United States Patent Application Publication US 2004/0216190 A1 - sequence listing, part 4

SEQ ID NO: 5513 - DNA, 651 bp, Triticum aestivum
  Clone ID: TRIAE-23APR03-CLUSTER98_783
catccactccaatccccaatctccctcccaaccaatccaccaagcaaaccccgatggcccgcacgaagcagacggcgaggaagtccaccggcggcaaggcgccgcggaagcagctggccaccaaggcggcgcgcaagtcggcgccggccaccggcggcgtgaagaagccgcaccgcttccgcccgggcaccgtggcgctccgggagatccgtaagtaccagaagagcacggagctgctcatccgcaagctgcccttccagcgcctcgtcagggagatcgcgcaggacttcaagaccgacctccgcttccagagctccgccgtctccgcgctgcaggaggccgccgaggcctacctcgtcgggctcttcgaggacaccaacctctgcgccatccacgccaagcgcgtcaccatcatgcccaaggacatccagctcgcaagacgcatccggggcgagagggcctaggatagtgtctgtctcttctgcaggtgtagagattagcatgtgttttgcgtggtggagtgatcccgtgttcgtgctatgttgggtgtgtgtgatgttctagtgcagtgtctgatgttaccatcttgttgtcatcagcaatctgaatgaaagttggctgtcagatctctctccaaaaaaaaaaaaaaaa

SEQ ID NO: 5514 - DNA, 1655 bp, Triticum aestivum
  Clone ID: TRIAE-23APR03-CLUSTER98_787
gaaacgcaagacatcgtctgttagtacaggagatctctttgcagtaggtggggggcgtcgtcggagaggattgaggccacatcgtcttctcctcatcttcttctccatcttccatccatcagataggccatggcttccaccgtccccttctccccggccaaggtccagatgctccaggcgaccaactgccacgggcacgcgccgttcggcagctctttcgccgtcccaagaaccgggccaaagcagcgttccctggccgtcagggtcagcagcgagcaggaggcgggccgccgccgtcagggcgccgtcggggaggagcatcgaggagtgcgaggccgacgccgtcgccggaaaattccccgcccccgctgcgtttgtcagaccaaaggccccagacggcacgcctgagatcaggcctcttgacatgccaaagcgccctcgtcgcaaccgcaggtcgccagctcttagggctgcattccaggagacaaccatctcgcctgcaaatttggtgctcccattgttcatccacgaaggggaagaggatgctccaattggcgctatgcccgggtgctttaggcttggatggcaacatgggcttcttgatgaggtgtataaggcacgtgatgttggtgttaacagctttgtgctctttccaaaggttccagatgcattgaagtctccgacaggaattgaagcatacaatgacaatggtttggttccacgtacaattcgcctgctcaaggataagttccctgatatcattgtctacacggatgttgctttggacccttattcatctgatggacatgatggcatcgtgagggaagatggagtaattttgaacgatgaaactgtatatcagttgtgcaaacaggcagtttcacaggcacgtgctggtgccgatgtagttagtcctagcgacatgatggatggtcgtgttggagcaatccgttctgctttggatgctgagggcttcaatgatgtctccattatgtcctatactgcaaagtacgccagttcattttatgcggccattccgagaagctttagattcaaatccacggtttggggataagaagacctatcagatgaacccagctaactacagggaagcccttctagaaactgcagcagatgaggcagaaggagctgatattcttctagtgaaacctggattgccatacttggatatcatccgacttctccgggataactccgcactgccaattgctgcataccaggtgtctgggggagtactcgatgatcaaggccggcgggggcgctgaacatgatcgacgaggagaaggtgatgatggagtcgctcatgtgcctgcggcgagccggcgccgacgtcatcctcacctacttcgcccgccaggccgccgccgtcctctgcggcatgggatccgctgccaagtagaaggaagcgctaggtcaggtcaactggtcacccccctgtgattattgattaatgtgcaatgctgaggagccaatgtgcttgagtagttggccttgacgtttgaccctaagcacttgaataatccgcaagtctcgttctagtacatgactgttagtttgttatactagttctttctctttaccgagtatacatgatatttttttctcccttacgattgctggggacttgaattttc

SEQ ID NO: 5515 - DNA, 1069 bp, Triticum aestivum
  Clone ID: TRIAE-23APR03-CLUSTER98_812
accccttagccgccgccacagcctccagctccaaaccctcatccccccatccgagctcactgccccccacccccacccagccatggcggaccgcggcggcgagcgtggcgtcgaccgcggcggcttcggacgcggcttcgggcgcggcgggcgcggggaccgtggcgggcgccgcggcggccgccgcggcccccgccaggaggaggagaagtgggtgcccgtcaccaagctcggccgcctcgtcaaggagggccgcttcaccaagatggaggagatctacctccactcgctccccgtcaaggagcaccagatcgtggagacgctctgcccggggctcaaggacgaggtgatgaagatcaccccggtccagaagcagacccgcgccggacaacgcacccgcttcaaggccttcgtcgtcgtcggcgacagcaacggccacgtcggcctcggcgtcaagtgcgccaaggaggtggccacggccatccgtggcgccatcatcctcgccaagctctctatcgtgcccgtcaggaggggctactgggggaacaagatcggcctgccccacaccgtgccctgcaaggtcaccggcaagtgcggctccgtcaccgtgcgcatggtgcccgcccccaggggttccggaatcgtcgccgcccgcgtccccaagaaggtcctgcagttcgccgggattgatgatgtcttcacttcctcgcgtggatccaccaagacccttggcaacttcgtcaaggcaaccttcgactgcctgatgaagacctatggattcctcacccctgacttctggagggagacaaccttcaccaaggcgccgtaccaggagttcaccgacatcttggcgaagccgaccaaggccctgatgcttgatgcaccagccgagaaggtagaagcttaggatgttgccataaaagggtttttactagctgggagctgtctgttgcacttccctttattatagtcgagaaccaggtgtctttgaattgtgctacttgtggaagtctctgtttgctgtcaagttttggattatggtgcaatgctactctctgttatcggcaac

SEQ ID NO: 5516 - DNA, 1843 bp, Triticum aestivum
  Clone ID: TRIAE-23APR03-CLUSTER98_820
agagtttctttctttctaatttctcgtggaggcgaggagatagagaagagagaggaaggggacggaggaggcatccctcgcgattggacagggcgcgaggaacccgaggagagcgcgcgtgcgatccccgacgcgcggggagtcgattccggcgccgggactgtctcgccctcgccgggccggccgtttcgagccgtctatcgccgaggatttggtgagatccggccaagagctggttggtggaggggaggggaggagcacgggggggatgggggccggggcggagccgagggaggaggagcccctcgaggtggaggagggggctggcgggaaggaggagaaggcggcggtgtcctgctcgatctgcctcgacgcggtcgttgccgccagcgcggagaggtccacggcgaggctgcagtgcggccacgagttccacctcgattgcattggatcggcattcaacgccaaaggagttatgcaatgcccgaactgccgcaaaattgagaaagggaattggctgtatgcaaatggttcccgcccctcacatgatattaacatggatgagtgggctcatgaagaggacctttatgatgttagttactctgagatgccatttcgttttcattggtgtccatttggtcgcttagcacagcttccatcattctttgaggaaggagaatcaccacccccagttacttttcatgacttcatgggacagcatgtgtttccggagaatttatccgtatctgctgcaccaggggcacatccttgcccatatgtggcatacttgcatcctcttccatcgctggcatcatcatcaagctcccatgtccctgagagaactatggatggttccgcttatcatgatcactggaatcacctggctggcccatcagatggtaggcccttgcaaacggtgcaacccactgatttccatcataaccattgggcgcatctgccccattcctatgtgcaatccaacggcaataacggggtgacggagcagccaggggtcccttttggatcaatgagggctgcaagggtggatggtgatagccaacgtcgaggatctgttgtttctccatcgtacttcagtaatggatctggctctagatctagagctcctaatgttcctcctctggtacctcagttcatgagggcacatggcaacatcaacgaacagtacactcagagttcatcatccagcctttttgctggagctcatagatcaggaggcatgcgacctgcccctccgccacctcaaccggagaacccaacattttgcctattcccaccgggttcatctggccatagttcaatggataccgatgaagctggaggaagccgattctatgcctgggagcgcgatcgcttcgcgccgtacccattgatgccggtcgactgcgagacgagctggtggagctcacagcagtcccacggcgcatcagaatccacacccgcacctgcaccaaggagactctttgggcagtggatcggcctcggcaggtcgtcgcccgagaatagatcgcccgagggctcatcgtatcgacaaatgcactctcctcggatgtagccagccccctgcggaggcaacctaagttaaaacttcacatttggaaccggagttgcttgtaagaaaagatgggggaaaacccatctgtatggaattaaaccgggtttgcgcgctaaacttccggggaattctgcgagggagaaacaggaaataacccggagggaaaacgttttggtttggttaatgtgaattccgtctcgtacatatttgaaaatcaaactgggatatttgaagtttcgcccttaaaaaaaaaaaaaaaaaactcgagac

SEQ ID NO: 5517 - DNA, 2062 bp, Triticum aestivum
  Clone ID: TRIAE-23APR03-CLUSTER98_825
aatatgccgcgcgcactctccctcgtgtgattggcgggtgcgggtgcgtctcttcctttctttcttgcttctccctttccccctcctcctccttgactccgccgccgtctcactcgcaacacccccgtctgctatctcttgggagaggtgggagtggaggaggctagccgacgccgcgacgcaggcgaggttcttttgagtttctttctgataccatggggcagaggctcctcttattggtgaccacttgtctgtgggctctttcatgcgccgtgccgcaccatgcttcctcgcttgatggactgcttaggatcaacctgaacaagaggagcttgacctatgaatctctggccgcggcaaaggcagcgaggcagcacggcgccctccgactgaagagcagcgatttagacagcgacatcgtgcctcttgtcgactacctcaacacccagtactatggggtcatcggcctcggcacgccgccgcagaatttcacggtgatattcgacaccgggagctccaacctctgggttccctcgtcgaaatgctatttctcgatagcatgctacctccacgccaaatacaagtcgagcaagtcaagcacttacaaagcagatggtgagacttgcaaaattacatatggctctggtgcaatctctggatttttcagcaatgataatgtgttggttggggatcttgttgtgaaaaatcagaaattcatcgagacaacacgtgaaacaagtgttagttttatcgtcgggaagtttgatggcatccttggccttggctaccctgacatctccgttggggaagcccctccagtatggctgagcatgcaagagcagaagttgctcgctgacgacgtattctcattttggcttaaccgggattctgatgcactttctggtggtgagcttgtctttggtggcatggacccagatcactataaggaaaaccacacctatgtccccgtgagccgcaaaggttactggcagtttaacatgggtgatctcttgattgatggccactctactggcttctgtgccaaaggctgtgctgctattgtggattctgggacttcccttctggctggcccaacagctatagttgctcaggtgaaccatgcaattggagctgagggaattatcagcatggaatgtaaagaggtggtgagccagtacggagagatgatccttgaattgttaatagcacagacacagccacagaaagtatgcagtcagattggtctgtgtttgtttgatggtactcactctgtcagcaacgggattgaatccgttgtcggtaaagaaaatgttggctcggatgttatgtgcacagcctgtgaaatggctgttgtgtggatagagaaccaactccgtgaaaacaaaacaaaggagctaatattgcaatacgctaaccagctgtgcgagcgtctaccaagccccaatggagagtcaacagtcagctgccatgagatgtcaaagatgccgaatcttgctttcaccatcgcaaacaagactttcgtgctaacaccagagcagtacgttgtgaaacttgagcaatcagggcaaaccgtctgcatcagtgggttcatggcattcgacataccgcccccacgtggtcctctctggattctcggggatgtcttcatgggcgcttaccacaccgtgttcgacttcggcaaggacagaatcgggttcgcagaatcggcttgaggagtcgagagcactatgacgtttccgaagatctccacgtacgtatcctagaatttgggtatcttcgacatgggagccctgctgtaaacgaattgataggtaaaaagctgaaacaaaagagagagccttttatttctttcttaaacaaagaataaatggatgattcaactctgaagacaaaaaaggcacgtttgtatccagtatagctgttgctgtttaatgaagaatggagtgcttgcccggtgaaaacttagagtaaacaggcaacacatggtttgtaaaaaggtttattgtatttgtaaaacatacgacgatgtaacaatcaattgaatatagtatgcttctttcat

SEQ ID NO: 5518 - DNA, 1265 bp, Triticum aestivum
  Clone ID: TRIAE-23APR03-CLUSTER98_839
aacacaattcccagaccacaccgtgcgccacgcccccttccccaaaaacctttcgaaaaccgccgcgccaaccgccaaccgccacccgcccccgtccaagaaaccgcacgccgacgccggcgcccggccaagatggtgcggctgagcaacaccatgatcgggatcctgaacgccatcaccttcctcctctcggtgccgatcctggcggggggcatctggctgcgcgcgcgcgccgacggcaccgagtgcgagcggtacctggcggcgccggtcatcgtcctgggggtcttcctcatgctcgtctccatcgcggggcttgtcggcgcctgctgccgcgtgacatgcctcctctggttctacctcgtcgccatgttcctgctcatcgtcgtcctcctcggggatcaccgtcttcgccttcgtcgtcacgcacaagggcaccggcgaggccgtctccggccgcgggttcaaggagtaccggctcggggactactccacctggctgcagaggcgggtggagaacgacaggaactggaacaggatcagggggtgcctccaggacgccaaggtctgcaagtcgctcgaggacaggagggacacggtccaacagttcatgtcctccgatctctcccccatccagtccggctgctgcaagcctccgatcagctgcggcttcacctacgtcaacggcacgcagtggagcggcccggccaagtcgacggagcccgactgcggtgcgtggtccaacgacgacggggcgctctgctacggctgccagtcgtgcaaggccggcgtggtggccacgctcaagcgcaactggaagcgctccgccatcatcaacatcgtcttcctcgtcttcatcgtcatcgtctactccgtcggctgctgcgccttcaggaacaaccgccgcgaccaccgcaacggcggcgggtacaagcagcagggcgcgtacgcttgatcgcgcgcttggctcggttatttattgcttggattggatggatgcgatcgtctcgtcgtgtcatgcatcttcgtcgtcgtgtttctcttaggatggcctgatctagctttgtacaggcgagatgtgctctgatcacctactagttaggttttactccgtggtcatgaggagggatgtgtatatatattttctgttctttgatatttattatcgcagaccattatatatgtaacagattattctggagttatttatttcatattatatctacttctgtccatctttttcaaaaaaaaaaaaaaaaaaaaaa

SEQ ID NO: 5519 - DNA, 1971 bp, Triticum aestivum
  Clone ID: TRIAE-23APR03-CLUSTER98_847
ttttttttttttttttgggttcaccatggacgattactactcatatccacattcctcgtattattttgctcaaccaactatgcaacgagggacttacggtaagggggagtcgagccaatcctggacggagatggcccattccacatttttttacagaggaagcggcaaatgaggattgtagtgatcacagccgatcaccaaaagagaaaacttatacaagcttcttttctctctaggaagtatagttagagcttttgttaggacctctgcatggagaagatgcatcttcagctagctctaatcgctgttggtgttggtgctattcgagtcccctgcctgggactggctcgccggcatgtaggaccaggcaatggctgctgtgccgagggtaactgctatgccaactgaaccccagaaccacttctgcctcatcttacgcttgttccgctgttgcctggacatctcgatagcttcttggtttctttgagacatctccctgtttgctgcttcatagtactggaccctatctgataagccttgcgatctcaaagttctttgctgaaatcacactttccatctctgactcaacttctacacgagcaattccccgggcaatagcagcggctaccagttgtgaaacagttatttgctggcacaactcagctccaggatccgcacttgtatcatcatcgttctcagctacagttggagatggaagtgacaaggcgatcagcgataggtgatgactcagcttcttccattccttctgccaggtctcagctacctcctcagcttgtttcctaccctcaatttctgtcaacatgcttaacctcatttcacggtattcgtcatcaatacatcgagaagatcgagttgcaccatcgcttgatatttcttcgaatgcgtcataaaattctgcaccaggtgtgccagcagacgtcccataaggagaactgggcttccaccacccctgcccaccagcatcctcagcctcagagttactagtcacactctgtgaatcctgaggttcaaggaaggcatcattttcgccatctcttggcattccattgttgacaagccttccaacattgacaggcctcaccaacgcatctggactttcatgccgaaactcgaactcgggctgatcctgctcatcttggccaaaaagggtcaccttgcctttctgcacccctccatccaaggtctccttcacaccattgttaaccacaccatcactctcttgtgtgaacctaaactcagactcctgcacttgaaaggcttcagaccttttcggcaaagcaggtagcccctcgggaaacttcggcaggctaccctcacttccgacatcaccctgggaagatgtcttgatcaggccaggtccacgacgtttatggttgatgagatacggcgaccaggttccagggaacgatgacggcgagtctggcagcggcgtgctctcgggcgtggagtagagcgctggcaaggtgctggtcctggcaggagccaccggcacaggtatgggcttctcggaggacttctcagggggtagcggcgcagctggaggcggcttgggaacaagcttctggaggttgggaagggagccggtctccaggaaggggtccaagacgtagtgcgtgatggtcggcatggggacgtggctgccggaatcagaagggacggtcaccgtagattctgcgttgctcgcaccaacgaggtcctgcgacccgccggggaggggggtggcgcctccgcgcctcgcctggttggaggaaaccctagcccgcggcagcgcctcgccgtcctcctcctccttccgccgccgccgccgccgcctctcgcctttcgaaagttatgagggcagggcaaaataagcggcgcgagacggaccagccaggcggcaaccccagaggaaaatatactaaaatacacttcctcgctcgagagggacaggggcggacgcgtgggcggacg

SEQ ID NO: 5520 - DNA, 1611 bp, Triticum aestivum
  Clone ID: TRIAE-23APR03-CLUSTER98_849
gagatctctttgcagtaggtgggggtcgtcggcggagaggattgaggccacatcgtcttctcctcatcttcttccccatcttccatccatcagataggccatggcttccaccgtccccttctccccggccaaggtccagatgctccaggcgaccaactgccacgggcacgcgcccttcggcagctgtttcgccgttccaagaaccgggccaaggccgcgttccgtggccgtcagggtcagcagcgagcaggaggcggccgccgccgtcagggcgccgtccgggaggagcatcgaggagtgcgaggccgacgccgtcgccgggagattccccgcccccgctgcgttcgtcaaaccaaaggcccctgacggcacgcctgagatcaggcctcttgacatgccaaagcgccctcgtcgcaaccgcaggtcgccagctcttagggctgcattccaggagacaaccatctcgcccgctaatttggtgctcccattggtcatccatgaaggggaagaggatgctccaattggcgctatgcccgggtgctttaggcttggatggcaacatgggcttcttgatgaggtgtataaggcacgtgatgttggtgttaacagctttgtgctctttccaaaggttccggatgcattgaagtctccaacaggagttgaagcatacaatgacaatggtttggttccacggacaattcgcctgctcaaggataagttccctgatatcattgtctacacggatgttgctttggacccttattcatctgatggacacgatggcatcgtgagggaagatggagtaattttgaatgatgaaacagtatatcagttgtgcaaacaggcagtttcacaggcacgtgctggtgccgatgtagttagtcctagtgacatgatggatggtcgtgttggagcaatccgttctgcgttggatgctgagggtttcaatgatgtctccatcatgtcctatactgcaaagtacgccagttcattttatgggccattccgggaagctttagattcaaatccacgatttggggacaagaaaacctatcagatgaacccggctaactacagggaagccctacttgaaactgcagcagatgaggccgaaggggctgatatccttctagtgaaacctggattgccgtacttggatatcatccgacttctccgggataattccgcactgccaattgctgcataccaggtgtccggcgagtactcgatgatcaaggccggcggggcgctgaacatgatcgacgaggagaaggtgatgatggagtcgctcatgtgcctgcggcgagccggcgccgacgtcatcctcacctacttcgcccgccaggctgccgccgtcctctgcggcatgggatccgctgccaagtagaaggaagcgctaggtcaggtcaactggtcacccccctgtgattattgattaatgtgcaatgctgaggagccaatgtgcttgagtagttggccttgacgtttgaccctaagcacttgaataatccgcaagtctcgttctagtacatgactgttagtttgttatactagttctttctctttaccgagtatacatgatatttttttctcccaaaaaaaaaaaaaaaa

SEQ ID NO: 5521 - DNA, 1846 bp, Triticum aestivum
  Clone ID: TRIAE-23APR03-CLUSTER98_857
agccaaatccccacgaaaccgtcctccaccatcacaatggcgaccacctcgcgtctcctgctcctcctcgctgccgtctgcctcctcgccggcgcggcggacgcgctccggctgcccccggacgccagcttcccgggcgcgcaggcggagcgcctcatccgcgcgctcaacctgctccccggggcgtcctccggccgcggcggcaaggtcggtgcgggggcagaggacgtcgcgcccgggcagctgctggagcggcgggtcacgctccccgggctccccgagggcgtcagcgacctcggccaccacgccggttactaccgcctccccaacacccacgacgccaggatgttctacttcttcttcgagtcgcggggcaagaaggaggagcccgtggtgatctggctcaccggcggccccggctgcagcagcgagctcgccgtcttctacgagaacgggcccttcgccatcgccaacaacatgtccctcgtctggaacaagttcggatgggacaagatctcgaacatcatattcgttgatcagcccaccgggactgggttcagctacagctccgacgaccgcgatacccgtcacgacgaggcaggggtcagcaacgacctgtatgactttctccaggtcttcttcaagaagcacccggagtttgtaaagaacgacttctttataactggagagtcctatgctgggcactacattccagcatttgcaagccgagttcaccagggaaacaagaaaaatgagggcactcacataaacttgaagggatttgcgatcggtaatggtctcacagatccagcaatccaatacaaagcctacacagactatgcattggacatgaaccttattcagaaagctgactatgacaggatcaacaaattcatcccaccatgtgaatttgcaatcaaactttgtggtacagatgggaaagcatcttgcatggcagcatatatggtctgcaataccatcttcaactctatcatgaagcttgttggtacaaagaattattacgacgttaggaaggagtgcgaagggaaactctgctacgacttctcaaacttggagaagttcttcggcgataaagcagtcagacaggcgattggagtgggtgacattgaattcgtctcatgcagcacttcagtttatcaagcaatgctcacagactggatgaggaacttggaagtcggcatcccagctctacttgaggatgggatcaatgtgctcatatatgctggggaatatgaccttatatgcaattggctcggaaactcaaggtgggtccactccatggaatggtctggtcagaaagactttgccaaaactgctgaatcatcgtttttagtagacgatgcccaagctggagtcttgaagagccacggggcactcagcttcctcaaggttcacaatgctggccacatggttccgatggaccaaccgaaggccgcccttgaaatgctgaggagattcacccaggggaaactcaaggaggcggttcctgaagaagagtcatctacgaccacgttttacaccgcgatgtgatcgtcaacaccgaccaaaaagggaaaagaaactggctaggtagcctgcacgcgtcgcccttgcggtctcaaggagtgtctgctgtagcttcctgttttccatgtatctttttctccgctgtttcaactggatatgtagtccctaataacaagaaaagaaagttgcccccaaaatgtaactgcaggatgtatggtttatgatgttgatgaaggacggaatacaccatggggggcgatgtttgagagccatgcctcatgttttaatcaaaaaaaaaaaaaaaaaactcgagactagt

SEQ ID NO: 5522 - DNA, 929 bp, Triticum aestivum
  Clone ID: TRIAE-23APR03-CLUSTER98_858
agttaaaatatgtgcatgtcattaatctccaagaattacaaggactctagccaatatgaccaggcaagcctacagatcacagtacaatgttccctctgtatcattggtacaaggctacaatcatgatacagaagtagagcaccatctgcttcatatcatccagtaggttcagcagctccttgcgcttgaaatggctttctctcatgaatcggccttcttctccggcgaagcggaggtcgaggacgagccggccgcggcggcagcaggggcgtcgtgggagcagcagccgccgccggcgtggtggtggtggtggtgcttcttggggacgggctggcgcagcatcttgcgcatgtcgtaggcgtcctcgccgtcggcgtagtacttggcctcgatgtcgtggatctggtagccgagggtggaggtgtagaggttgaaggcggcgcggttggagcggcggacgtggagcgacacgtactcggcgccgaagacctggtccatggcggcctgcgcggccgacataagcttggtggcgaggccgagcttgcggtgggagcggagcacggcgagcgaggtgatgtggccgtggcagggctccgaggggtcctcctccatcttggccagcacgtagccgacgatgcggccgccgtagtcctcggcgacgaacaggagctgcggccacgagagcatgtggtagaagtagtacttcatctggtagttctccggcaggcacatcaggttgcacgcctgcatcgccagcaggtcgtcgatcgtcgcctgccggatgcacaccatcttccacgccgcggccgccgccgctcggatctaatctaacgactgtatggatctagggttgggtggtggggagccttcgccggcgggatgggacgaggtgatggttttttttttttttttttcccgacccggccggc

SEQ ID NO: 5523 - DNA, 2022 bp, Triticum aestivum
  Clone ID: TRIAE-23APR03-CLUSTER98_867
gtgattggcgggtgcgtctcttctctttctttcttgcttctccctttccccctcctcctcctccttgacttcgccgccgtctcactcgcaacgccccccgtctgctatcccttccctggaagttgggagtggaggagcttgccgacgcgccgacgcaggcgaggttcttttgagtttctgagaccatggggcagaggctcctattactggtgaccacctgtctgtgggctctttcatgcgccgtgccgcaccacgcttcctcgcgtgatggactgcttaggatcaacctcaacaagaagagcttgacccatgaatctctggccgcagcaaaggccgcgaggcagcacgatgccctccgactgaagagcggcaattcagacagcgacatcgtgcctcttgtcgactacctcaacacacagtactatggggtcatcggcctcggcacgccgccgcagaatttcacagtgatatttgacaccgggagctccaacctctgggttccctcggcgaaatgctatttttcgatagcatgctacctccatcccaaatacaagtcgagcaagtcaagcacttacaaagcagatggtgagacttgcaaaattacatatggttctggagcaatctctggatttttcagcaatgataatgtgttggttggggaccttgttgtgaaaaatcagaaattcatcgagacaacacgtgaaacaagttttagttttatcgtcgggaagtttgatggcatccttggccttggctaccctgacatctccgttggaaaagcccctccagtatggctgagcatgcaagatcagaagttgctcgctgacgacgtattctcattttggcttaaccgggattctgatgcactttctggcggtgagctcgtcttcggtggcatggacccggatcactataagggaaaccacacctatgtccctgtgagccgcaaaggttactggcagtttaacatgggtgatctcttgattgatggccactctactggcttctgtgcaaaaggctgtgctgctattgtggactccgggacttccctgctggctggcccaacagctatagttgcgcaggtgaaccatgcaattggagctgagggaattatcagcaccgaatgtaaagaggtggtgagccagtacggagagatgatcctccgaattgttaatagcacagacacagccacagaaagtttgcagtcagattggtctgtgtttgtttgatggtactcactctgtcagcaacgggattgaatccgttgtcggtaaagaaaatgttggctcggatgttatgtgcacagcctgtgagatggctgttgtgtggatagagaaccagctccgtgaaaacaaaacaaaggagctgatattgcaatatgctaaccagctgtgtgagcgtctaccgagcccaaatggagagtcaacagtcagctgccatgagatgtcaaagatgccgaatcttgctttcaccatcgcaagcaagactttcgtgctaacaccagagcagtacgttgtgaaactggagcaatcagggcaaaccgtctgcatcagtgggttcatggcattcgacataccgcccccacgtggtcctctctggattcttggggatgtcttcatgggcgcttacccacaccgtgttcgacttcggcaaggacagaatcgggtttgcggaatcggcttgaggagtcgagagcactgtgatgtttccgaaggtttccacgcacgtatcctagaatagtttgggtatcttggacatgggagccctgctgtaaaggaattgataggtaaaaagctgaaacaaaagagagagccttttatttctttcttaaacaaagaataaatggatgcttgaactctgaagaaaaaaagtacatttgtatccattatggcccttcgtgtgtaatgaagaatggagtgcttgcacgatgagaaccgagagtaaataggcaacacatggtttgtaaaaaggtttattgtatttgtgaacacgtaacaaacaattcaatatacacttctttca

SEQ ID NO: 5524 - DNA, 1165 bp, Triticum aestivum
  Clone ID: TRIAE-23APR03-CLUSTER98_872
gaataaccccttcctcctcgtcgttgccctaggcttctgatcctctccggccatggcgaccgccggcgattccgcctccctccccccctccgcctctcccttctcatccgcccgcgcgctcgagtcggtccccttctcctccgggaacccccgcatcgaggagacccgcggcgtcgtcctcctccaccccgacccacccgccgctgccgctgccgcggccgccgcctcctcctcgtcatctcatcttccggcagagaggaagccgcaggtgttcgtgcctgcggtgcccaaccacatgacctacgcggacttctgccgattctgcggctccttcgtcccccacatgctcgagatgcgcatcgtcaggattgayggagcggaggaccagtatagcgttctcataaagyttgacaccctgagctccaccgatagcttctacaagcacttcaatggaaagcagttctcatcactggagggtgatgtttctcgtgtcttactgtttcattgaaatcgcagtcagaaaatacaacgacaaagcaagaacagtctacttcgaactgaagtatcctgaaacacacccatccatacatcccagctacagcctaactaagcaaggaatctacgccttcttgggggacttggcggtcttcttgggcgacttgggctccttgggggacttctcggccgtcttcttggggagcagcaccgggttgatgttggggatcacgccgccgtgcgcgatggtgatgccggcgagcagcttgccgagctcctcgtcgttcctgatggcgagcagcaggtggcgggggatgatgcggctcttcttgttgtccttggcggcgttgccggcgagctccagcagctcggcggcgaggtactcgaggacggccgcgaggtagacgggggcgccggagccgacgcgctgcgcgtagcggcccttcttgaggaagcgcccgatgcggctgacggggaactggagcccggccttgacggaccgcgacacggacttcttcctggggcctccggccttgcgaccggcggcgcccttcttccccttcccggtggctacggtggctgaggcgtccatggcgagctggagaaaggaatcgggtagtggagagatgtgtgtggggattgcttggctgctcggacgcgtgggcggacg

SEQ ID NO: 5525 - DNA, 1207 bp, Triticum aestivum
  Clone ID: TRIAE-23APR03-CLUSTER98_873
ctgctactaccaccaccactaccacggcaccaccacacttgctcgtctccctctgcctctcccctccctcctatagcaatcaaaccaccagctccactcccccctcctctcctccgtcctccccctccccctcctgctactccccagttcatgtcctgctgcttcccatgtcgccgcctctcgagctcgactacataggcctctcggccgccgccggcggccgcccggacgacgacctgaaaggcaccgagctccgcctcggacttcccggctgcgagtccccggaccgccgcccggtcgccgccaccaccacactcgacctgctgcccgccaagggcgccaagcgagggttttcggacgaggtcgtgccgcctgcgccggtttccgccgccgggaaagacaaggacgcgtccggggatgagaaggacaagaaggtcgccgccccgccgcagcctgctgccaaggctcaggtggtgggatggccaccagtccgcagctatcgcaagagcacgatggcaaccaccaccaaccagctgaagagcagcaaggaggattctgacacgaagcaggggcaagagtttctgtatgtcaaggtcagcatggatggtgcgccttacctgaggaaggttgacctcaagacatacaagaactacaagggcatggttgtggggctagggaaaatgttcattggcttcaggacagggaaggatggtgaatatgtgatgacttacgaagacaaggatggagactggatgctggttggtgacgtcccatgggagatgttcaccgagtcttgccggaggatcagggtcatgaaaagttcagatgtgattggacttggagttacaagggcaggggtcaagtccaagaataagaactaagacggtcgctgcccacggtttgaagacgaggtcgcacatatcgtctgtactactgcatggttttcctatcccgcaagtaaaatcacccgttactctactgtttaagatttgcgatatctcctagagacttatgctctatattttgttgtgcccacgttgttgtacgcgtgttatttccatccgtgtaaatggttggtatgcagtgcgagagctactgctgtgtttgatgacccctatgtattttgccactcttgtcctgaaccggtcgttcgtcgtaaatgtgaaggttgcaagactattatttacctgacgaactttgcttgggc

SEQ ID NO: 5526 - DNA, 1156 bp, Triticum aestivum
  Clone ID: TRIAE-23APR03-CLUSTER98_876
aaacacctagaacatcctattccaaaacttccacccttcaccgccgccagcgccacagcctccaagccctcgatctcccccatcggagctccctgcccacaaccccccacccccacccaaccatggcggaccgcggcggcgagcgtggtggcgaccgcggaggcgagcgcggcgggttcggccgcggcttcgggcgcggcgggcgcggggaccgtggcgggcgccgcggcggtcgtcgtggcccccgccaggaggaggagaagtgggtgcccgtcaccaagctcggccgcctcgtcaaggagggccgcttcaccaagatggaggagctctacctccactcgctccccatcaaggagcaccagatcgtggagcagctctgcccggggctcaaggacgaggtgatgaagatcacccccgtgcagaagcagacccgcgccggccagcggacccgcttcaaggcgttcgtcgtcgtcggcgacagcaacggccacgtcgggctcggcgtcaagtgcgccaaggaggtggccacggccatccgcggcgccatcatcctcgccaagctctccatcgtgcccgtcaggaggggctactgggggaacaagatcggcctgccccacaccgtgccctgcaaggtcaccggcaagtgcggctctgtcaccgtgcgcatggtgcccgccccgaggggttccgggatcgtcgccgcgcgcgtccccaagaaggtgctccagttcgctggtattgatgatgtcttcacttcctcgcgtggatccaccaagacccttggcaacttcgtcaaggcaaccttcgactgcctgatgaagacctatggattcctcacccctgacttctggagggagacgaccttcaccaaggcgccataccaggagttcaccgacattttggtgaagccgaccaaggccctgatgcttgatgcaccagccgagaagatcgaagcttaggatgtcggtgtaaagggtttttacaagctgagagctgtctaatgcactttgctttatttagttattaatactttgaatcgtgctgtttcaggatgtctctttttgccgtcaagtgttggtttgtggaactatgctactctcttttatcgtcaatggaagctacataattatggcaatcgatcttttttatctataga

SEQ ID NO: 5527 - DNA, 1490 bp, Triticum aestivum
  Clone ID: TRIAE-23APR03-CLUSTER98_877
cctcctcccacctccacctactacgcccttcaattccaccgttccgaggcggcgtctgcgtctcatccccccatcccccgtccctctcgctgcccccagcccggcgacacacccaccgccgcgccaccgtcggattcgccccctcccccctgcccgccggtccgatcgcgcggaggaagatgctgggcgccgcgaggaggcagctcggatccggccccatgctggggcaggtgctgcggaggctccgcccggcggcggcggcgtccacggaggcggcaagggggtactcctccgcggccaaggagatcactgtacgtgacgcgttgaactctgccctagatgaagaaatgtctgctgatccttctgtctttttgatgggtgaagaggttggagaatatcaaggtgcatacaagattacgaagggcttgcttgacaagtatggtcctgatagggttcttgataccccaatcactgaggctggttttacaggcattggtgttggcgcagcttatcaaggtcttcggccagtcatagagttcatgacatttaatttctcaatgcaggcaatcgatcatatcatcaactcagctgccaagtcaaactacatgtcagctggtcagataaatgtcccaattgttttcagaggaccaaatggtgctgctgctggtgttggtgctcaacactcacagtgttatgcagcttggtttgcgcatgttccaggacttaaggttctggctccatattcttcagaagatgccagaggcttgctaaaagctgcaattagggatcctgatcccgttgtttttctggaaaatgaattactctatggagagtcattccctgtttctgatgaagtgcttgattctagttttgctctgccgattggcaaagctaagatagaacgcgagggtaaagatgttacgattactgcattctccaagatggtcggctatgctcttcaggctgctgagatactgtccaaggaaggaatcagtgctgaggtgatcaaccttcgatcaattaggccactgggatagagccgccataaatgcatctgttaggaaaacaaatagattggttacccttgaagaaggttcccccagcatggtgttggtgctgagatatgcatgtcctgttgtagaagaaactttgagtatcttgatgctccaattgagaagattgccggagctgatgtaccgatgccctatgctgccaaccttgaaagattggcagttccacaggttgaggacatcgtccgtgcagcaaagcgagcttgctacagatcatcatccatggcggcaaacgcctaaagcacaaatgcaagttttgtttctcggccttcttcttccttccttgtccagaaaagatgtaccgaatcgcataattgtatcccccaactcgtgtgagctaattttgtagatctgcatgcattgttgattcctatctgtcggcggcagtcggatgactgcatttagttcatggttcatccc

SEQ ID NO: 5528 - DNA, 1690 bp, Triticum aestivum
  Clone ID: TRIAE-23APR03-CLUSTER98_881
aaacgcaagacatcgtctagttagtacaggagatctctttgcagtaggtgggggtcgccgtcggagaggattgaggcaacatcgtcttctcctcatcttcttccccatcttccatccatcagataggccatggcttccaccgtccccttctcgccggccaaggtccagatgctcaaggcgaccaactgccacggccacgcggccttcggcagctgtttcgccgtcccaagaaccgggccaaagcaccgttccctggccgtcagggtcagcagcgagcaggaggcggccgccgccgtcagggcgccgtcggggaggagcatcgaggagtgcgaggccgacgccgtcgccgggagattccctgcccccgcggcgtttgtcagaccaaaggcccccgatggcacgcctgagatcaggcctcttgacatggcaaagcgccctcgtcgcaaccgcaggtcgccagctcttagggctgcattccaggagacaaccatctcgcccgctaatttggtgctcccattgttcatccacgaaggggaagaggatgctccaattggcgccatgcccgggtgctttaggcttggatggcagcatgggcttcttgatgaggtgtataaggcacgcgatgttggtgttaacagctttgtgctctttccaaaggttccggatgcattgaagtctccaacaggagttgaagcatacaatgacaatggtttggttccacgaacaattcgcctgctcaaggataagttccctgatattattgtttacacggatgttgctttggacccgtattcatctgatggacatgatggcatcgtgagggaagatggagtaattctgaacgatgaaacagtatatcagttgtgcaaacaggcagtttcacaggcacgtgctggtgccgatgtagttagtcctagtgacatgatggatggtcgtgttggagcaatccgttctgctttggatgctgagggtttcaatgatgtctccatcatgtcctatactgcaaagtacgccagttcattttacgggccattccgagaagctttagattcaaatccacgatttggggataagaaaacctatcagatgaacccagctaactacagggaagcccttctagaaactgcagcagatgaggccgaaggggctgatatccttctagtgaaacctggattgccgtacttggatatcatccgacttctccgggataattctgcactgccaattgctgcataccaggtgtctggcgagtactcgatgatcaaggccggcggggcgctgaacatgatcgacgaggagaaggtgatgatggagtcgctcatgtgcctgcggcgagccggcgccgacgtcatcctcacctacttcgcccgccaggccgccgtcgtcctctgcggcatgggatccgctgccaagtaggagcactaggtcaggtcaactggtcacccccctgtgattatcgattaatgtgtaaatctgaggagccaatgtgcttgagtagttggccttgacgtttgaccctaaagcacttgaataatctgcaagtctcgtagtacatgatcgttagtttgttactaattctttctttttaccgagtatacatgatttttttccctttcgattgctagggagatactaccgtgccccggtatatgatgattttacgagtacatttgaattttcactggcgcac

SEQ ID NO: 5529 - DNA, 1592 bp, Triticum aestivum
  Clone ID: TRIAE-23APR03-CLUSTER98_888
cctcctccaccctccacctactacgccctccaattccaccgttccgaggcggcgtctgcgtctcctccccacgccccgtccctctcgctgcctccagcccggcgacacatccaccgccgcgccaccgtcggattcgcgcccccccgcccgccgctccgatcgcgtggacgaagatgctgggcgccgcgaggaggcagctcggatccggccccatgctggggcagttgctgcggaggctccgcccggcggcggcggcgtccacggaggcggcaagggggtactcctccgcggccaaggagatcaccgtacgtgacgcgttgaactctgccctagatgaagaaatgtctgctgatccttctgtctttttgatgggtgaagaggttggagaatatcaaggtgcatacaagattacgaagggcttgcttgacaagtatggtcctgatagggttcttgataccccaatcactgaggctggttttacaggcattggtgttggtgcagcctatcaaggtcttcggccagttatagagttcatgacatttaatttctcaatgcaggcaatcgatcatatcatcaactcagctgctaagtcaaactacatgtcagctggtcagataaatgtcccaattgttttcagaggaccaaatggtgctgctgctggagttggtgctcaacactcacagtgttatgcagcttggtttgcgcatgttccaggacttaaggttctggctccatattcttcagaagatgccagaggcttgctaaaagctgcaattagggatcctgatcccgttgtttttctggaaaatgaattactctatggagagtcgttccctgtttctgatgaagtgcttgattctagttttgctctgccgattggcaaagctaagatagaacgcgagggtaaagatgttacgattactgcattctccaagatggtcggctatgctcttcaggctgctgagatactgtccaaggaaggaatcagtgctgaggtgatcaaccttcgatcaattaggccactggatagagccgccataaatgcatccgttaggaaaacaaatagattggtgactcttgaagaaggcttcccccagcatggtgttggtgctgagatatgcatgtctgttgtagaagaaagctttgagtatcttgatgctccaattgagaggattgctggagctgatgtacccatgccctatgctgccaaccttgagagattggctgttccacagatcgaggatatcgtccgagcggccaggcgagcctgctacagagcgttgcccatgacggcaactgcgtgatcgaaatttcactttactctgcccatgctttttcccatcgcctgcccggccagaaagaaacgtgtgtgttccataatggtatccacaattgcccaaactcaaagcgagttaaatttttgtaggtgtgcctttgccatgttattcttttagctgcagtcggatctcaccgcactcgctggtgcctccctccactgtcttgtgaattattacgcatgcagctttcgttgattgattattactacggcctaatcacggtggttacataaatggaaaattgaggtgttctca

SEQ ID NO: 5530 - DNA, 2385 bp, Triticum aestivum
  Clone ID: TRIAE-23APR03-CLUSTER98_900
atccttccttcctcctccgactccctcttctatttctattaagaaggaagcaagcagggacagggcgccactcagatctctccgccccttcctctcctcgtgcccccaacccgcctctcgtcaacgtcgccccgcccgaggagaggacgagcgatggcatcgcctggccgcgcgcgcggcctccggcgctcctcctcctgctcgccctcgccgtcgccggcgtcctctccgacggctccgaccaccgctacaagctcggcgaccccgtcccgcycyackccaacaaggtcggccccttccacaaccccagcgagacgtaccgctacttcgacctccctttctgctccccggagaaagtgaaggagaagagcgaggccctcggcgaggtcctcaatggggatcggttggttgatgcgccctacaagcttgatttccgcaccgatcacgattccaaggccgtttgccccaagaagcttaccaaggaggacgtggccaagttccggaacgcggtagccaaggactactacttccagatgtactacgatgatctcccgctgtggggtttcatcggtaaggtcgagaagggaggcaagcctgacccgagcgagtggaagtactacctctacaggcacattatctttgacatcctctacaacaacgaccgtgtcattgagatcaatgtgcataccgaccagagtgcactgggttgacctgacggaggacaaggaggttaatgtggatttcctttacactgtcaagtggaaggagacacctacaccattcgagaagaggatggagaagtattccagctcctccaacatgccgcatcacttggaggttcattggttctccattataaattcttgtgttacggtccttctcctcacagggttcttggcaacaatcctcatgcgagttctgaagaatgattttgttaagtatgcccatgatgaggaagcagctgatgaccaagaagagtctggatggaagtatattcatggtgatgtctttcggttccccaagaacaagtcattgttttcggctgctcttggcactggaactcaactgtttgctctaacaacctttatattcctgcttgccctcgttggagtattctacccttacaatcgtggtgcccttttcaccgcattggtcgtcatctacgcactcacctcaggaattgctggttacattgcaacctctttctattgccagctagagggaatgaactgggtgaggaacttgctactgacaggatgcctgttttgtggacctctcttcctgacattctgtttcttgaacactgttgccattgcttatagtgcaacagcagcattgccgtttggcaccatctgtgtcattgtgctgatctggaccttagtcacattccctctactagttttgggaggcattgctggtaaaaacagcaagagtgaattccaagctccttgccgtaccaccaaataccctagggagattcctccacttccctggtaccggacaacagttccgcagatggctatggctggatttttgcctttcagtgctatatatatcgagctgtactacatctttgctagtgtttggggccaccgaatttacacaatctacagcattctcttcatagtcttcatcatcctacttattgtcactgccttcattactgttgcgctgacatacttccagcttgctgctgaagaccatgagtggtggtggaggtcattcctatgcggaggatcaactggatttttcgtctatggctactgtctgtactactactacgcgcgatcggatatgtctggcttcatgcagacctcattcttctttgggtacatggcgtgcatctgctatgcattcttcctgatgctgggtatggtgggcttccgtgccgccttgttctttgttcggcacatatacaagtcgatcaagtgtgagtaaagtgttgttggaggatgaagagcagcaagcagcagagttgtactcctttttggtgccgctaagaagtcccagtatagaaaaggttagctctcgcgtgcaacaggaagcaactagaagagattggcatgtttgagattaggccattattcataggaagaggtaatgaacctataaaatttcttgtcattgtgcgaccggtatgatgaaccgtctttcctttgatcccccccccccatgtattatgtgacgtccagacagtattactttgttgaaccataacctatataaatttctgtggaagttcctatggcagaataacacacgtatagagatgatgcctcaagaagggcatgtccagtcgatctgtaccgttgtactcctactactctgtatcctatgcgttctggttatatattgtcaggttttgaaacaaaaaaaaaaaaaaaa

SEQ ID NO: 5531 - DNA, 1141 bp, Triticum aestivum
  Clone ID: TRIAE-23APR03-CLUSTER98_918
tcgttcgttctggtcgtttcggtgaatcgatctcgcccaccaaacccgaccacccgatcccccggacagccggagagcgaggcgaagcggcgaggcgtaccgcaaccatgctcagggtcgcaggtcgacgcatatcctcccacctcgcatggcgccccgccgcggccgcctccgccggcagcagccccctcgccggcggcctccctggcgacgacttcccccgggaccagaatccgcgcttcgccatcgaatcacccttctacgtcgctgccagaggcttttcggctgaatctcttgttccgaggaaccaggatgtagagttggctgagctcacaccaactacggcagctctgaagaatccctgtgccaaaattgtgtacgatgagtataaccacgagaggtacccacctggtgaccccagcaagcgtgcctttgcctactttgtgttgagtggtgggagatttgtgtacgcatccttgttgcgtttgctcgtcttaaagtttgtcctgagtatgtcagcaagtaaggatgtgcttgccctcgcttcccttgaggttgacctgtcaagtattgagcccggtaccactgtgactgtaaagtggcggggcaagccagttttcatcaggcgcaggaccgaagatgatgtgaagctggccaacagcgttgatgttacatctctccgtgacccacaggaggatgcggtgcgtgtcaagaaccctgagtggcttgttgtcattggtgtctgcactcacttgggctgcattcccctccccaactctggggacttcggtggctggttctgcccatgtcatggctcacactacgacatctcaggtagaatcaggaagggcccagcaccatacaacctggaggtcccgacctacagtttcttggaagataacaaaatgcttattggctaagagcactggccgtaagattaatccctatggtgctgtgctgccattttgtgttggtttgaccattcgtcttcttgttgctcggatagtcctatgatggactgttatcttagtgcagtactcttactagcactggatagtaaagaataatctgctgctactttggtacttttaattaatttccaaaatggccgtgttttttggagctcactaaaaaaaaaaaa

SEQ ID NO: 5532 - DNA, 748 bp, Triticum aestivum
  Clone ID: TRIAE-23APR03-CLUSTER98_923
acgacaacgaggcacgggcggcgccacctgtgctctgccgcagcgccgacccaccctgcccgcccgcccgcccgccggtatataaatccggcgggagcacatctccgacccatctcactcactcgcactgacacagccacactgctgctgatacttcactgctactgccagttcccttccctcggatctcgtggcaccaagctctctcccgccaagatgtcgacggtcacccgcgcctacctcgaccagaggctcgccctcgccaaccgctgctccagagaggctgccatggccggagccaaggccgctgccgtcgccaccgtcgctgccgcagtccccaccctggcaagcgtgaggatgctgccgtgggcgagggcgcacctcaacccgaccgggcaggcgctcatcatctccaccatcgccgggatggcctacttcatcgtcgccgacaagaccatcctatccatggccaggaagcactccttcgacgacgcgccggaccacctcaagaacacctccttcaactaattagactacaatagtagatccattagtagtgcgcagcgacggcctgaaagatagtataatgttcagcacctatctgatatcaggccaagttcgcagacagtgagtggtgtagtactgcgcttctctgccgctctgcgtgcaagcacttgtctgatgatgtatccagccagtaatcttgaattaataataacctgcatctgtacaactcagttcacctgcc

SEQ ID NO: 5533 - DNA, 2319 bp, Triticum aestivum
  Clone ID: TRIAE-23APR03-CLUSTER98_925
tttttttctccccttcgatatccccgataaaacctccatctccatccccatccccgcccctcctatcgccacttcgccagccagctcgcccgcccgcccgcctagtcttctccgaaggaaggaacgaaggaaggaagcggccgcacgctcatggccctctcctgcatgaggtgcccggcggcggcggccggcggcggccccctcgcgcgccgcccgcaaccgccgccctcctcgtccctcgccttctccttcgccagatgcggagccgccaaggggtggcgcatccacgccgtcgccgggaaaggagtgaaagctcccatggatgctgtggagaacgctgtcgcccccgccgccccgtcaacggtggcaaatggcacttcttcagcaatcaccgtcgaggaatttgaagatttagcctctctagtgaaggatgatgaggcgtcggttagcatcaccgtagttggagcgtctggtgaccttgcgaagaagaagatatttcctgcccttttcgctctttactatgaaggttgtcttcccaagcatttctccatctttggctatgcgcggagtaaaatgacagatgctgaactgagagacatggtcagcaaaacactgacttgcaggattgataaaagggagaactgtagtgagaaaatggaagagtttctgaaacgatgcttctaccactcaggtcaatatgactcagaggaagatttcagggagctaggcaagaagatcaaacaacatgagggtcccagagtatctaaccatcttttctacttgtcgatacctccaaatatattcctggatgttgtaaaatgtgcaagcaaatcagcatcatctgtgagtggctggacaagggtaattgttgaaaaaccctttggccgggactcagagtcttctgctgccctaacgaaaggtctgaagcagtacctgacagaggaccaaatcttcaggattgaccattacttgggaaaggaactggtggagaacttgtctgtccttcgcttctcgaatcttgtttttgagcctctgtggtcaaggcaatatattaggaatgtgcaactgatattctcggaagactttggcactgaagggcgaggagggtactttgatagctatggtattatccgagacataatgcagaatcatcttcttcagatactagctctatttgcaatggaaactcctattagcttggaagcagaggacatacgaaatgagaaggttaaagttttgcgctccatgaagccattgcgactagaagatgtggtaataggacagtataaaagtcatacaaagggtggtattacataccctggatacactgaagataagacggtgcccaagggtagtctgactccaacatttgctgcagctgcgctttttataaataacgctagatgggatggagttccctttctcatgaaggctggaaaagctttgcatactaaacaggctgagattagagtacagtttcgacatgttcctggaaatctctacaaggggtcttttggaaccgatcttgacagggctactaatgaacttgtgatacgcgtgcaaccagatgaaggaatttacctaaagattaacaacaagattcctggtcttggtatgagactagataggagtaatctgaatcttcactatgcagcaaggtaccccaaggagataccagatgcgtacgagaggctcctgctcgacgcgatagaaggagagcgaaggctcttcatccggtcggacgagctggacgcagcgtgggagctcttcacgcccctcctgaaggagctggagcagaagcggatggcccccgagctatacccctacgggagccgcgggcccatgggcgcccactacctggcagccaagtacaaggtgagatggggcgacctgggtggctcggaacactaggaagagagcgtggtttcacacgggaggtgatgatttctgtttttggcgtcgcaatttctgcaaaaggccttgcagcgcacgcccagctagtgggggtgtgcgaggaacagatctgaataagggtgagcggttggcgatgcttgtgttcatcgatcgatcgaccgtgagtgagtatatttgttggtaccactggcttacatattctatgattcttaagaggaagcccagagcagaaagctcattcatcctggctgttcgtcggctcatttggttgtctggctgggccgggctgttgtattgggactgctgattgtgtaactgcaaaagctgttacttctttactgatgccggtgttcttgtcgtgttttttagttcaatataagcaagtactgggaagtaaaaaaaaaa

SEQ ID NO: 5534 - DNA, 1519 bp, Triticum aestivum
  Clone ID: TRIAE-23APR03-CLUSTER98_941
accaactcgccaagtacagtacatcagcacagtacactcgcggcgcacgctcgagcttgctagcgacagtcagtccgtccgagctcaccgtcatccatggctctccagctcctcccctccaccctctccgtccccaagaaggggagcagcatgggcgcggtggcggtgaaggacacggcggcgttcttgggcgtgagcagcaaggcgaagaaggcgtctagcggtgaggacgcaggtggccacggcgccttcgccggtgacgacgagcccgggctcggccgcggcgaagccgagcggcaagaagactctgcggcagggcgtggtggtgatcacgggcgcgtcctccgggcttggcctcgcgtcggccaaggcgctggcagagacgggcaagtggcacgtggtcatggcgtgccgcgacttcctcaaggcctccaaggcggccaaggctgccggcatggctgacgggagctacaccatcatgcacctcgacctcgcctcgctcgacagcgtccggcagttcgtcgacgcgttccgccgcgccgagatgccgctggacgtgctcgtgtgcaacgccgccatctaccgccccacggcgcgcacgccgacattcaccgccgacgggcacgagatgagcgtgggcgtgaaccacctcggccacttcctgctcgcccgcctcctcatggaggaccttcagaagtccgactacccgtcccgccgcatggtcatcgtcggctccatcaccggcaacagcaacacgctggcgggcaacgtgccgcccaaggccagcctcggtgacctccgcgggctcgctggcggcctcagcggcacgtcgggctcggccatgatcgacggggacgagagcttcgacggcgccaaggcgtacaaggacagcaaggtgtgcaacatgctgaccatgcaggagttccaccggcggtaccacgaggagaccggcatcaccttctcctcgctctaccccggctgcatcgccaccacggggctgttccgggagcacatcccgctgttccgcacgctcttcccgccgttccagaagttcatcacgaaggggttcgtctcggaggcggagtccggcaagaggctggcgcaggtggtggcggagcccagcctgaccaagtccggcgtgtactggagctggaacaaggactcggcgtccttcgagaaccagctctcgcaggaggccagcgaccccgagaaggcccgcaaggtctgggagctcagcgagaagctcgtcggactcgcctgatctcccacccacctccggctccggccacgtccaggcaatgcatgcatctaggacgccgatgctgaacttgtcgcattttttaacgttggtaattaccatttttacgtctttttagaaactcaattacccgggagaggccttgcgagtgtcggcgagagtgcatagatctcgtgtggaagatgtacaattttcggcgaaccatgaataataaaactgcaggcctgattgaggatggcaaaaaacccccacccccccagc

SEQ ID NO: 5535 - DNA, 1822 bp, Triticum aestivum
  unsure (1)..(1822): unsure at all n locations
  Clone ID: TRIAE-23APR03-CLUSTER98_955
agtactagtccgggatagtgcggctagggtttcttcgtcttcccacacaccccccctctcycacctgctccgtccccatcccytcsccgccgccgccgccatctgagcctcagactcgcgcgaatcctccccgggccgagcgatggcgatgcasaagtccggcaggagagactggtagcgagaagggcagttccccggtcaccccacacacaaatcccggcgagcgagcgcagagtgacccgactttttccgccgtccatggcgaccatgaacccctttgacctcctcggcgacgacgagggcgacgaccccacgcagctcctggccaaggcggccgccctggcgcagaaggccgaggccaagaaggccgccgcgccgcccgccgccggcaagggcggcgcgaagacggtcgccaatctgcccaccaagccgcctccgcctggtcaggctggcaatgactcccgaggtggtggtccaccctcctcgtggaggatatggtcgcggtgaacgtggctcaggcagaggtggccgaggagggtacggtcagaatcgcgactacggcagtgaagacacaaatggctacaggggaggttatggtgccagaactggaggtgaggaaggcgcccaggacagagagagggcccctcggcaaccctaccaggggggaggccgtcgtggtgggtatcgtgaaggcgagtttggtgatgattctgagaggccacctcgaaggaactatgagcgccatagcggcacaggccgtgggtatgagataaaacgcgagggtgctggccgtgggaactggggaactacctctgatgaatttgtcgcccgggaaactgaggccctgaagcaggatgagaaggcccctgcacctgagaagcagggcgcaccggaggatgcaccacaggcagatgagaacaagcccaccaaagatggcgccacagttgtggaagaagaaaaggaagaggataatgagatgactcttgatgaatttgagaaagtaatggaggagaagaggaaagcacttgctgctttgaagaagtctgaagagaggaaggttgaaattgataaggatctgcaggctatgcaactactttccaccaagaaaggaaatgatgaagttttcatcaaactgggtgctgataaggaggctttgaagaagaaagagaatgctgaacgtgaagagcgtgctaagaagtctgtgagcatcaatgagttcctgaagcctgctgaaggagagaggttctatggtggccgtggccgtggcggcaggggccgtggagaccgcggaggcttcagaggcggatttggtggtgggggctatcacggcccaccccctgctccggcaattcaggaccagaaccagttcccaaccctcggtgggaagtgagattgctgtaccatctcaagtaccacctttaccagtatcgtcgacgctgtcaagttaaaattttcctttcaccatatatttctgcgcggatcctatattgaaacaaataactctgctgcatgtggaccattcatccctgtgtctgtcgactttgtaaatccgacggttgtcgcttatcagaattttgtaggctatgaattgctcgttcctttgtccgtcatcttcaggtttctaatgtcctctgttgcgagtgattcatcagatatagatagcgctgcatacgtgcgaggtgataatattgggacagctaggcatcaccttgtttgtgagtccattggatcggtcgatgcagcatgatgtctttctccacaacataatgcnggggcggatcccgctagctacaaataaatatttgccttaggccaggacatc

SEQ ID NO: 5536 - DNA, 1683 bp, Triticum aestivum
  Clone ID: TRIAE-23APR03-CLUSTER98_963
ttcgcctgctcgaaattaaccctactaaagggaacaaaagctggagctccaccgcggtggcggccgctctagaactagtggatcccccgggctgcaggaattcggcaccagcacaccccctctcccccaacctgctccgtccccatcccctcgccgccgccgccgccgccgccgtctgagccctagactcgcgcgaatcctccccgggccgagcgatggcgatgcagaagtccggcgggagagactggtagcgagtagggcagttccccggtcaccccacacacaaatcccggcgagcgagcgcagagtgacctgactttttctgccatccatggcgaccgtgaaccccttcgacctcctcggcgacgacgagggcgacgaccccacgcagctcctggccaaggcggccgccctggcgcagaaggccgaggccaagaaggccgccgcgccgcccgccgccggcaagggcggcgcgcggacggtcgccaatctgcccaccaagccgcctccgcctggtcaggctgccaatgagtctcgtggtggtggtccactctcccgtggaggatatggtcgcggtgaacgtggctcaggcagaggtggccgaggagggtacggtcagaatcgcgactacgccagtgaagacacaaatggctacaggggaggttatggtgccagaactggaggtgaggaaggcgcccaggatagagagagggcccctcggcaaccctaccaggggggaggccgtcgtggtgggtatcgtgaaggcgagtttggtgatgattctgagaggccacctcgaaggaactatgagcgccaaagcggcacaggccgtgggtatgagataaaacgcgagggtgctggccgtgggaactggggaactacctctgatgaaattgttgcccaggaaactgaggccctgaagcaggatgagaaggcccctgcacctgagaagcagggcgcaccagaggatgcaccacaggcagatgagaacaaggccaccaaagatggcgctgcagttgtggaagaagaaaaggaagaggataatgagatgactcttgatgaatttgagaaagtaatggaggagaagaggaaagcacttgctgctttgaagaagtctgaagagaggaaggttgaaattgataaggatctgcaggctatgcaactactttccaccaagaaaggaaatgatgaagttttcatcaaactgggtgctgataaggaggctttgaagaagaaagagaatgctgaacgtgaagagcgtgctaagaagtctgtgagcatcaacgagttcctgaagcctgctgaaggagaaaggttctatggcggccgtggccgtggcggcaggggccgtggagaccgcggaggcttcagaggcggatttggtggtgggggttatcacggcccaccgcccgcaccggcaattcaggaccagaaccagttcccaaccctcggtgggaagtgagattgctgtaccatctcaagtgccacctttaccaatatcatcgacgctgtcaagtttagattttcctatcaccatatatttctgcacggatcctatattgaaacaaataactctgctgcatgtggaccattcatccctgtgtctgtcatgactttgtaaatccgatggttgtcgcttatcagaattttgtaggctatgaactgctccttcctttgtccgtc

SEQ ID NO: 5537 - DNA, 957 bp, Triticum aestivum
  Clone ID: TRIAE-23APR03-CLUSTER98_969
gccgcagcgaggttttaggggtaagcggagagggactcccggcggcggcgcgaagcggagagagggagagagatgtcgaagcgagctggtcccccgaagcaccagaacacctacgcatggaagcccaacctcggccggaagatcaacgagaccgagcccgggggcaggttccggcctctgtcggagatcaccggcgtctgccagcgctgccgggaccaaatcgactggaagcgcaaatacggcaagtacaagccgattgttgagcctgcaaaatgccagaagtgcagtaaacgaaacgtccggcaggcataccacaacgtctgcacaggttgctccaaggagcttgggatttgtgccaagtgctgcacctctgttaagcagcttgttggaagggatgctgaggaagcaaacagtgagcgcaaagaactagaggaggccatcagatatgctagggagagggaacgacggacacttcttcgccttatgaacaaaaacaaggacgaggagagcggcacatcagtcccgaagatcgcagaccgagatcgggagggcgaccttttccctgttgcatcccttgacgaatatgctgaacaggctgtacagaaggatgagtctgatgaagaagatgccagggattttgtgaaagattaacttggcaaggtttggtactgtaaaaggatatttagttttgtgcgcggacgctccttcggggtgttctaactcagcggagaaatgccaacacttgttttagcagagatatatatttctgtttatcagatcttattttgaccagtgagcttacgacaccttcccagttatgttatgcttcttcctaataagtgtaggattctgaagctgtattattattacatgagtggtatatattgctgttgctggtttacctccagagacaagtcaacattccccgtttaaaaaaaaataaaaaaaaaaaaaaaa

SEQ ID NO: 5538 - DNA, 1644 bp, Triticum aestivum
  Clone ID: TRIAE-23APR03-CLUSTER98_974
ttccgggtctggtttgtttgggggggaaatttggggccggaataccaattttccccccagggaaaccggttatggccccggttttccgccaagggcccaattttaccccccccttaaggggaacaaaaagctggggctccccccccggtggcggccccttttaaaattaagtggattccccggggtggcagggattcgcccgggggcccttccttagaacctcttaattgaaaagccattcgtggaaccagcaaaaccgtggacgagcaccgccggtattctgctcccgaattccacagatttccactccccgctcccaaagccccgatactttatagccggcgacagcaagcccagcaaaatcccatctcccaacccggaaatcctcccactcccgggaatgaatcagcttccccttccccttctctgagatctcagcccgagcctgcgcgccgcgacttccaccggaatccttccctcctagccgcaacatcgccggatcgattcaggcattcttggtggccggagaagcagtctttggtcctctgcttgagatcatcatcagacatgtcgctgctatcgaaattgcggctggttactgtggatgtgactggtactctgcttgcttacaaaggacggcttggtgattactactgcatggctgctaaggctgctggaaagccatgccctgattatgatcgaatgcacgaaggcttcaagcttgcatacactgagatggcaaggaaatacccatgctttggatttgcggcaaagatgccaacgattgaatggtggaggatttgtgtcaaggattcatttgttaaggctgggtatgattacgatgatgagacatttgataaagtgttcaagcgaatttattccgcctttggctcctctgcgccatactctgtttttcctgatgcacagcccttcatgagagggctgagggaaaaggggatcacagttggaatcgtcagcaatgcagagtaccggtacaaagaggtcatcttgcctgcgttagggctgaatcagggctcagagtgggacttcggggtgttctcaggcatcgtcggtgtcgagaaacctgacccaaaaatctacaagatcgcgctggagatggcggggaacgtcgcaccggaagaggcgctccacattggcgacagctaccgcaaggactacgtccctgcacggagcatcgggatgcacgcgctgctcctggaccggttcaagaccgccgacgccgagagctggaggcagtccggcgcgccggtgctccctgatctcgaagccgcacaggcatggctcaccaagaacccgaccgaggaacccgctgaggagccactaggggccgcactgctgcgcaggatggccgagaagctctgaatctcgcccctgggatggttcctgttgtgctcttgctggggagtgagggagccaaggagaagggatgtgttgtagcgatggttcactggccagtttagctagctggagctacttgaactctggtagtaggcttccagtgctgttgttgactgctgaatgtggccaagtgattcagccgtgcgacaaacatcttgcaatgacgaataattctaatcatgtttcgcataatggaggaatttaacatcaaaaaaaaaaaaaaaa

SEQ ID NO: 5539 - DNA, 1661 bp, Triticum aestivum
  unsure (1)..(1661): unsure at all n locations
  Clone ID: TRIAE-23APR03-CLUSTER98_990
agtgcacctcaagaagcagagcaccacaggcagctagcagtaacaatggcgatggcaagggtgcccatcctcatcgcggtggctctcgtggccgcggcggcctcctgcagcgcatgggagcccaccatccgtatgccgacggcggaggctgcggccgctgccgtcgacgacgccgtggcgccgctcatccacgcactgcgtccgctgctgggctccagcggagagctcggcagccgcggcggcgtgccgtgcgacagctggaggctgggcgtggaggcgtacaacgtgcgtgactggaagactgtccccgccaactgcgagggctacgtgggccactacatgctgggcagccatttccggcgcgactccaaggtcgtcatcgaccaggccatcgcctacgtcgacagcctcaagctcgccggcaacggcaaggaggtgtgggtcttcgacattgacgagaccacgctctccaacctcccttactacgccacgcacggctttggggctaggccatacaacgcgacgagcttcgacgcgtacgttcttgagggaaccgcgccggtgctgccggagacgaagcggctctactacaagctactcaaggtgggcatcaagccggtgttcatcacaggccggacggaagacaagagggccatcaccgtcggaaacctccgcagccagggcatctccgggtggatgaacctgacgctcaagcagcccgggttccatggctccgcgatatcctacaagtccgccgagaggaagaagctgcaggacgccgggtacgtcatcgtcggcaacataggcgaccagtggagcgatytcctcggcgcgcccgagggagctcgtactttcaagctgcccgaccccctgtactacatcagctaagcttgcggccattcattggacgaatgctcgtggtccacgaataagctccatgctcttaataattatctgcatgctggatgcatcaataataagcttctgtgttgttcttgcttggttggtttacttagttcatatcaattgccactagtggcgtctgccattacaaggctgaaaatgccgtagttcaggttttggactcagttaacatcacactgaatgctgaggacgaactgaaaaacgccgtcgggttggttcgcccagtgagtgttgcctttgaggtgatcgacggtttcaggcagtacaagagcggagtttacagtagcgaccattgcggtactacacctgatgacgtgaaccacgccgtcttgggcggtcgggtacggcgtggagaacggcgtcccgtattggctcatcaaagaactcgtgggggcgccgactggggtgacaatgggttacttcaagatgggaaatggggcaagaacatgtgtgctgttgctacctgtgcgtcctaccccatcngtagcggatgaagcgccaatcgacnattcatctcgcttcgctagacatgaataatgtgtttcagccacaagacatgaaattgggggatcagaaactgaaactctgctgtgaatataaacacaaggacacagttgcagnaacacnncgtgtanctctcggtatggttgtaggcanantgtngtgatacacaattatggggttccatgtagtcacacatttattcgganataaangncatcaantncggggaatta

SEQ ID NO: 5540 - DNA, 2416 bp, Triticum aestivum
  Clone ID: TRIAE-23APR03-CLUSTER98_991
ccacgcgtccgagaggccagagccagatctgggtccatccttccttcctcctccggcgccctcttctatttctattaagaaggaaggaaagcaagcagggcgccactcagatctctccgccccttcctcgcccccctcgtgccccccaccctctcgtcaacgccgccccgcccgaggagaggaggaaggacgagccatggcatcgccggccgcgcgcgcggcctcggcgctcctcctcctgctcgccctcgccgtcgccggcgtcctctccgacggctccgaccaccgctacaagctcggcgaccccgtcccgctctacgccaacaaggtcggccccttccacaaccccagcgagacgtaccgctacttcgacctccccttctgctccccggagaaagtgaaggagaagagcgaggccctcggcgaggtcctcaatggggatcggttggtcgatgcaccctacaagcttgatttccgcacggatcatgattccaaggcggtttgccccaagaagcttaccaaggaggacgtggccaagttccggaatgccgtagccaaggactactacttccagatgtactacgatgatctcccattgtggggattcatcggtaaggtcgagaagggaggcaagcctgacccgagcgagtggaagtactacctctacaggcacattatctttgacatcctctacaacaacgaccgtgtcattgagatcaatgtgcataccgaccagagtgcactggttgacctgacagaggacaaggaggttaatgtggacttcctttacactgtcaagtggaaggagacacctacaccgttcgagaagaggatggagaagtattccagctcctccaacatgccgcatcacttggaggtccattggttctccattataaattcttgtgttacggtccttctcctcacagggttcttggcaacaatcctcatgcgagttctgaagaatgattttgtgaagtatgcccatgatgaggaagcagctgatgaccaagaagagtctggatggaagtatattcatggtgatgtcttccggttccccaagaacaagtcattgttttcggctgctcttggcactggaactcaactctttgctctaacaacctttatattcctgcttgcactcgttggagtattttacccttacaatcgtggtgcccttttcactgcattggtcgtcatctatgcactcacctcaggaattgctggttacattgcaacctctttctattgccagctagagggaacgaactgggtgaggaacttgctattaaccggatgcctgttttgcggacctctcttcctgactttctgtttcttgaacactgttgccattgcttatagtgcaacagcagcattgccgttcggcaccatctgtgtcattgtgctgatctggaccttagtcacattccctctactagttttgggaggcattgctggtaaaaacagcaagagtgaattccaagctccttgccgtaccaccaaataccctagggagattcctccgcttccctggtaccggacaacagttccgcagatggctatggctggatttttgcctttcagcgctatatatatcgagctctactacatctttgctagtgtttggggccaccgaatttacacgatctacagcattctcttcatagtcttcatcatcctccttatcgtcactgccttcatcactgttgcgctgacatacttccagcttgctgctgaagaccatgagtggtggtggaggtcattcctatgcggaggatcaactggatttttcgtctatggctactgtctgtactactactatgctcgatcggatatgtctggcttcatgcagacctcttttttttttgggtacatggcgtgcatctgctatgcattcttcctgatgctgggtatggtgggcttccgtgcccgccctgttctttgttcggcacatatacaagtcgatcaagtgtgagtaagtgttgttggaggaagaagagcagcaagcagagttgtactcctttttggtgccgctaagaagtcccagtatagaaaaggttagctctcgcgtgcaacaggaagcagctagagattggcatgtttgagattaggccattattcataggaagaggtaatgaacctataaaatttcttgtcattgtgcgaccggtatgatgaaccgtctttcctttgatcccccccatgtattatgtgacgtccagacagtattactttgttgaaccataacagcctatataaatttctgtgcaagttcctatggcagaataacacacgtgtagagatgatgcctcaaggaagggcatgcccagtcgatctgtaccgttctacttgtatcctatgcgttctggttataattgtcagattttgaaacagcaaaaaaaaaaaaaaaaaaaaa

SEQ ID NO: 5541 - DNA, 2295 bp, Triticum aestivum
  Clone ID: TRIAE-23APR03-CLUSTER98_993
gcctttcccatttccacaaccacccgtcctcctcctcccacgctacagcagagcagagcagagcagcagcagcagctccgtcgatctcctccgccctcctccccccgcgcccggcctctcctcgccgccatggcgccccgcgtgccctcctccctcctcctcgtcggcgccgccctgctcctgggcctggcggccggcgcggcgcgggcgtccaacgaggagggggacgcgctgtacgcgctgcggatgcggctgtcggaccccaacggcgtgctccagagctgggatcccaccctcgtcaacccctgcacctggttccacgtcacctgcgacagcgccagccgcgtcgtccgcctggatttaggcaactccaacgtctccggctccatcggccccgagctcagccgccttgtgaatcttcagtacctggagctgtacaggaacaacctcaacggcgagatcccaaaagagttgggcaagctgaagaatttgatcagcttggatctgtatgccaataagctcaccggaagaatccccaagtccctttccaagctcagctcactgagattcatgcgtttgaacaacaacaaacttgctggatcaattccacgggagctggccaaactctccaacctgaaagtcattgatttgtctaacaatgacttatgtgggacgatccccgtcgatggtccattctcaagcttccctcttcgaagcttcgagaacaacagcaggctgaacggcccggagctgcaaggattggtttcctatgacttcggatgctaggaagcaccgatgcacacgacaatgcacgtggaaggaaggcaaaaaaatatagtagtacaacaaatagtgtggagcctagcactacaacatgtatggcttgcgatacatgcagcagaagatgaagaaggtatgtgagcgtagggtctgcgttcggtactcagaccgcagaaggaaaagaatgggatgtgagaagtcttagcttgatcgattgttattgccgtattgtaaattgtaataagctgcttagtaccgcagctatgctgaccgcttgggtccgtttagcaagcctttgccagttcggaactaaatccgggctgttgaagaatgtatctcaagttttatctacaaatgatgcacatctttttgctatgttagtatggttgaagtacttcgctacaaaacattctcctcatccttttctgccactgtaggatgaacacatctccccggacttgtttacagcaaattcgtctaggataatatggcccacagttttgttgctcatcattctacgttacaatgtttataacagcttgtatagtcgaccggccatatggcccagatgcctgttccttgcacaatgacattcttaataacagacctgcccgggcggccgcccgggcaggtacttctgatggctgctattcgccatgttcatattgcaagacctacaatatatcaagttgttaaggaactgatcgataagatgggctatgaggtaaaacttgttcgggtaaacaaaagaattgaagaagcatactgtgccgagctttatctaacaaagattggagatcaaacagagagtataacatttgatcttcggccttcggatgctatcaatattgctgttcgctgcaaggttcctatacaagtacataggagtcttgcatacagcgacggcataagatcagtcgagccagcaaaattggtggctgcaggtggcctttcagatggtttattgtttactgaacttgacagacctgatggagagccctgcgttgaagctcaagagttcagtttggtgcgaaacatgttcattgcagttgttgaagagagatacaaagatgcagcaacatggaaggacaaactaatgaggctgagatctaagcggaagaactgggcctgaaaggttcttaactcggtactctatttgtatcatattgtcgtccctttgtagacctgtgattaccccccgccccgcaatagactggtcactttggactgtgtaaataaaaaagtgtcctcaacctcactatgcaatggagatgattggtccgtatggtttgatgtaattagacgtatatattccaaggccctgagaagtagcttttgtaaattcagactaatattcagaaagtaagaactaatctatgtaagttccatcctatttatgcatgttggcgccaatggtcatytgggccctcattgaatcttgtgtttcgataaaaaaaaaggtactatattgctgggactgtattttcatatttaatacaacttttaaactaaaaa

SEQ ID NO: 5542 - DNA, 1303 bp, Triticum aestivum
  Clone ID: TRIAE-23APR03-CLUSTER99017_1
cacaagcccacatttccgtcttctacggttgcctctgccctcctcctcaagccgcagccgccgccaccagagaaaaagagaaagggagagacggaagaatgagcctgcggaatccggctaggtcagcctgcctctgccggctcgtccagctggcttccgacgctggcacccggcgggtgtactccaccgctgaccgtcgccgcaggctgatgctgaaggcacgggctggggagtccgccgagcccttcatccggaggctgaccttgggggctgccccagacaccaacccccggcccccacagcggagacccccaggcccaccccctcacgcctccgccacgggcgcctcccccgccgccacccccggacgcgccgccggggaagcagcagcgtccggaaaggagcgctcagaaagccatcggggagtcgctgatggagaagcctaagcggggcgacgccgcctcctccacgggaagcaacatcgaggctcagcagcctgaccacgaaccggggccgccactgcagacggaggacgtggacggcatcttccggaagatgaaagagacggggctgatacccaacgccgtcgccatgctcgacggcctctgcaagaacggattggtaccggaggccatgaagctgtttggtctgatgcgcgagaagggcgccatcccagaggtggtcatctacaccgctgttgtcgaggccttctgcaaagcagccaagctggacgatgccgtcaggatcttcaggaagatgcagggcaacggggtcattccaaatgccttcagctactggttgattatacagggtctgtgcaagggcgacagactggatgaggctgttgctttctgtgtggagatgttcgaggctgggcattccccgaatgctgcaacgtttgtgggtttggttgatgcagtatgcaagatgaagggggtagaggagggtgacaagcttgtgaggagcttccaggataggaactttgccattgatgagaagtccatcagggaacatttggacaagaaagggccattctcaccgattgtttgggaggtgatctttgggaagaaaaaaacaagccgccccttttgatctaactagtatgtgctcatcctctcaatagttgaagctccttccgtggttaaatcaaaatggctagcatgctgtttttacatgatgtccacccaccagtgattttgtatttctctgtgtttacatgcaattcaccaacatttagttgctgcaaaaaaaaaaaaaaaaaaaaaaaaaaaaaaaaaaaaaaaaaaaaaaaaaaaaaaaaaaa

SEQ ID NO: 5543 - DNA, 868 bp, Triticum aestivum
  Clone ID: TRIAE-23APR03-CLUSTER992_2
aaaccctccagccctcgcgccgccgccccctgcaccaaccggcggcggaaagcgagagctccagcgggccgtcgggagggaaccaccctcgtcgtcggagatgacgggcaaggcgaagccgaagaagcacacggccaaggagatcgcggctaagatcgacgcggcgacgaccaaccgcggcgggggcaaggccgggcagaaggaccggctcgggcaggagaagggcggccacgccaagatggagtgcccgctctgcaaggtgacggcccccgacgtcaagtcgatgcagatccaccacgaggcgcgccaccccaagctccccttcgacccggacaagatcaacaacctgcacggctccaccgccgccgcgcccgccgcggcggccgtcgcgtccacctccaagcccaagcccggcatccgcggcagcctcaagaagacgggcgatgaacagaaatgaggcctccacagcttcaagcgcctcttctaagtctctgtttgccgtcgcaatggattgttatgactactgtctcgtttgatcggttgatcgttttaagatatttggttgtcttgtaatcggatatattatgcgctccagaacatctgagatgtactaaacttgagcctaaataactggttgctgtcaatttgcttggtacctagaagggtggcaactgatgttgtgggataaacaccttaactaatcgctgccctttataacaaaaaaaaaaaaaaaaactaaatagtctggttttgtcgatgcacttttgttattgcattgccccactgaacaggcattgcaatgatgtgatattatgatatgcttgacacaaaacaaatcaattcaaataaaaaaaaaaagcggccgctc

SEQ ID NO: 5544 - DNA, 965 bp, Triticum aestivum
  unsure (1)..(965): unsure at all n locations
  Clone ID: TRIAE-23APR03-CLUSTER996_2
atcttagcacttgcacggttgttgcccggaacggccgtgaccgcgagacagagacccggcagccccgactaagaacggccggcggcgcttcgtgcggctagggcgagtctacctcggtggttctaccaagctagggcacggcggccgtcagggctccaacgagcaacaccggccctctcgacaagcgaggacctgctccgtgcagcggcacaagaaggcatggcaaaggcgggagagaacagctttgaggatgaaatcatggagtcggaccgtcggattggaaggggaagttgttgagccggacaatgatcctctgcagaagatgggagatccatcggttgaagtctctgaagaaatgcgcgacaaggcacagctctacaaaaagaagggtgttgatgcgctttcagaaggtaaactggacgaagcagtcgagcacctgacggaggccatcttgctgaaccccacttcagctatcctctatgcagccagggctggtgtttttgtgaagatgaagaaaccaaatgcagcgattcttgatgcggaggcagcattacagataaatccagattctgctaaaggatataaatcacgagggatggcaaaagctatgcttgggaagtgggaagatgctgctcatgacctacacttggcagcaaaattggattttgatgaagagatcagctcagagcttaagaaggtgatgtgatcactatccactcatctaatcaactggaagaaatatttacagccgcgtcaaaactgtcgaagcttgtgattctgtattttactgcaacatggtgtggaccatgtcgttttatgggccctgtttacaaaagcttatctgaacagcaccgaaatgtcgtattccttaagctggacattgatcaacaaggcaatattgcccatcgctggaatgtctcaagtgttccaacattctnctgtgtgataaatggcaaagagattga

SEQ ID NO: 5545 - protein, 452 aa, Arabidopsis thaliana
  unsure (1)..(452): unsure at all Xaa locations
  Clone ID: ARATH-23APR03-C0_1.p
HKRYSFIIILCSAFLHHQLRHRCLIVNTIALSSTPTFLLSSAAAGPGPNNFNRQEAVHVTTTXLAPPPKKRRNQPGNPNPDAEVIALSPKTIMATTRFLCEVCNKGLQREQNLQLHRRGHKLDGNLKQHYKEEVMGKHYHSPKPSCXTSIISHVYQKIAPYRDFQIQINWVIISEXDSYITHXRAFCDALIQEVSKXNPTVSFTAMAAGGGGGGQXHAFNGGASSALSHNHFGNNPNSGFTPLAAAGYNLNRSSXSDKFEDFVPXQATNPNPGPTNFLMQCSPNQGLLAQNNQSLMNHHGLISLGDNNNNNHNFFNLAYFQDTKNSDQTGVPSLFTNGADNNGPSALLRGLTSSSSSSVVVNDFGDCDHGNLQGLMNSLAATTDQQGRSPSLFDLHFANNLSMGGSDRLTLDFLGVNGGIVSTVNGRGGRSGGPPLDAEMKFSHPNHPYGKA

SEQ ID NO: 5546 - protein, 352 aa, Arabidopsis thaliana
  Clone ID: ARATH-23APR03-C10019_1.p
MGELDEAFIQAPEHRPNTHLTNSGDFIFSDEIPTIDLSSLEDTHHDKTAIAKEIAEACKRWGFFQVINHGLPSALRHRVEKTAAEFFNLTTEEKRKVKRDEVNPMGYHDEEHTKNVRDWKEIFDFFLQDSTIVPASPEPEDTELRKLTNQWPQNPSHFREVCQEYAREVEKLAFRLLELVSISLGLPGDRLTGFFNEQTSFLRFNHYPPCPNPELALGVGRHKDGGALTVLAQDSVGGLQVSRRSDGQWIPVKPISDALIINMGNCIQVWTNDEYWSAEHRVVVNTSKERFSIPFFFFPSHEANIEPLEELISEENPPCYKKYNWGKFFVSRNRSDFKKLEVENIQIDHFKA

SEQ ID NO: 5547 - protein, 298 aa, Arabidopsis thaliana
  Clone ID: ARATH-23APR03-C10033_1.p
MLETKDPAIKLFGMKIPFPTVLEVADEEEEKNQNKTLTDQSEKDKTLKKPTKILPCPRCNSMETKFCYYNNYNVNQPRHFCKAYQRYWTSGGTMRSVPIGAGRRKNKNNSPTSHYHHVTISETNGPVLSFSLGDDQKVSSNRFGNQKLVARIENNDERSNNNTSNGLNCFPGVSWPYTWNPAFYPVYPYWSMPVLSSPVSSSPTSTLGKHSRDEDETVKQKQRNGSVLVPKTLRIDDPNEAAKSSIWTTLGIKNEVMFNGFGSKKEVKLSNKEETETSLVLCANPAALSRSINFHEQM

SEQ ID NO: 5548 - protein, 263 aa, Arabidopsis thaliana
  Clone ID: ARATH-23APR03-C10034_1.p
MENNPRSSSSLPLAGRVAIVTGATRGMGREIAIHLHSLGARVTINYVSSSSKAELLVSELNDSSQLKSAIAVKADVSDPDQINNLFDQTEQEFGSKVHIVVNCAGVLDPKYPSLSETTLEDFDNTFTINTRGSFLCCKEAAKRVMRGGGGRIIMMSTSMVGGLAPGYGVYAASKAAVETMVKVLAKELKGSRITANCVAPGPVATEMFYAGKSDETVKMLAGACPMGRIGESKDITEIVGFLAGDGGEWINGQVIRANGGFVV

SEQ ID NO: 5549 - protein, 832 aa, Arabidopsis thaliana
  Clone ID: ARATH-23APR03-C100486_1.p
MALPPSSPSPSSPSLQRLSTFKNPPPSSLSSGAPPPQTPSSSSSSPLDSFATDPILSPFLSSSFSSASFSSAALASGSPASTAERLHQAIRLLDSQLRNDVISRHPELLAQLSSLSHADVSLSSLRSSVSSLQSSIRRVRSDLSEPIKSIRSKSVQLSNLHTATELLSHSVRTLRLSKKLRDLADFPDPDKIDLTKAAQFHFEILTMCKEYDLFGIDVIDEEIKFVTEIGEKLRSEAMKVLERGMEGLNQAEVGTGLQVFYNLGELKSTVDQLVNKYKGMAVKSVSVAMDMKAITSGSGGGFGPGGIRSSGSPHIGGGAKVREALWQRMASCMEQLCSLVVAVWHLQRVLSKKRDPFTHVLLLDEVIKEGDSMLTDRVWDALVKAFTSQMKSAYTASSFVKEIFTMGYPKLVSMIENLLERISRDTDVKGVLPAINLERKEQMVACIAIFQTAFLSLCFGRLSDLVNAIFPMSSRGSLPSKEQISQVLSHIQDEIEAVHPDARLTLLVLREIGKALSNLAQRAECQISTGPETRQISGPATSTQIRNFTLCQHLQGIHTHISSMVADLPSIATDVLSPYLAAIYDAACEPVTPLFKAMRDKLESCILQIHDQNFGADDADMDNNASSYMEELQRSILHFRKEFLSRLLPSAANANTAGTESICTRLTRQMASRVLIFYIRHASLVRPLSEWGKLRMAKDMAELELAVGQNLFPVEQLGAPYRALRAFRPLVFLETSQMGSSPLINDLPPSIVLHHLYTRGPDELESPMQKNRLSPKQYSLWLDNQREDQIWKGIKATLDDYAVKIRSRGDKEFSPVYPLMLQIGSSLTQENL

SEQ ID NO: 5550 - protein, 625 aa, Arabidopsis thaliana
  Clone ID: ARATH-23APR03-C10048_1.p
MLVCGKGFLKCRAPGVPFFCDKRKSFFTKTKRGFHSLPLGTGVRVYFNNNLRYSSNSIEVVEKAAINMGSKEDKADNPALSSYDDAMEALSTLISRRNRGDRTPTKGNRDKLEQVVTYLKILDLEDKIKELKVIHVAGTKGKGSTCVFSEAILRNCGFRTGMFTSPHLIDVRERFRIDGLDISEEKFLQYFWECWKLLKEKAVDGLTMPPLFQFLTVLAFKIFVCEKVDVAVIEVGLGGKLDSTNVIQKPVVCGIASLGMDHMDILGNTLADIAFHKAGIFKPQIPAFTVPQLSEAMDVLQKTANNLEVPLEVVAPLEPKKLDGVTLGLSGDHQLVNAGLAVSLSRCWLQRTGNWKKIFPNESKETEIPVAFCRGLATARLHGRAQVVHDVVSDPQDSSDSMETPCGDLIFYLDGAHSPQSMEACGRWFSSAVRGDKSLSTAVNGYMRHGEYGTDLNRVSKQILLFNCMEVRDPQVLLPKLVTTCASSGTHFSRALFVPSMSTYNKVISGASAIPSDTRRKDLTWQFRLQRLWEKSIQGTDAGLDHTLKPDGITALPPHDFLCGDAPQCGGPAGTPVTSSAVMPSLPLTINWLRDCVRRNPSLKLEVLVTGSLHLVGDVLRLLKR

SEQ ID NO: 5551 - protein, 185 aa, Arabidopsis thaliana [sequence omitted]

SEQ ID NO: 5552 - protein, 92 aa, Arabidopsis thaliana
  Clone ID: ARATH-23APR03-C1005_1.p
MGLKEEFEEHAEKVNTLTELPSNEDLLILYGLYKQAKFGPVDTSRPGMFSMKERAKWDAWKAVEGKSSEEAMNDYITKVKQLLEVAASKAST

SEQ ID NO: 5553 - protein, 673 aa, Arabidopsis thaliana
  unsure (1)..(673): unsure at all Xaa locations
  Clone ID: ARATH-23APR03-C100610_1.p
PYFVSACYPGEPLSLLAKGVEGFLSLGLPTELTGRKVFILASRAATPQLGQTNVSGGLQSQLSSIMLSHCNLGKIPGFLWYQQELRVIDLSNNILSGVFPTWLLENNTELQALLLQNNSFKTLTLPRTMRRLQILDLSVNNFNNQLPKDVGLILASLRHLNLSNIEFLGNMPFSMARMENIEFMDLSYNNLSGKLPRNLFTGCYSLSWLKLSHNRFSGPIIRKSSDETSLXTLIMDNNMFTGKIPRTLLNLRMLSVIDLSNNFLTGTIPRWLGNFFLEVLRISNNRLQGAIPPSLFNIPYLWLLDLSGNFLSGSLPLRSSSDYGYILDLHNNNLTGSIPDTLWYGLRLLDLRNNKLSGNIPLFRSTPSISVVLLRENNLTGKIPVELCGLSNVRMLDFAHNRLNESIPSCVTNLSFGSGGHSNADSDWYPASLLSNFMEIYTEVYYESLIVSDRFSLDYSVDFNVQVEFAVKQRYDLYMRGTLNQMFGLDLSSNELSGNIPEELGDLKRVRSLNLSRNSLSGSIPGSFSNLRSIESLDLSFNKLHGTIPSQLTLLQSLVVFNVSYNNLSGVIPQGKQFNTFGEKSYLGNFLLCGSPTKRSCGGTTISSGKEYEDDDESGLLDIVVLWWSLGTTYVTVMMGFLVFLCFDSPWRRAWFCLVDTFIDRVKDVLGVI

SEQ ID NO: 5554 - protein, 143 aa, Arabidopsis thaliana
  unsure (1)..(143): unsure at all Xaa locations
  Clone ID: ARATH-23APR03-C101244_1.p
MATGKTVKDVSPHEFVKAYAAHLKRSGKIELPLWTDIVKTGKLKELAPYDPDWYYIRAASMARKVYLRGGLGVGAFRSIYGGSKRNGSRPPHFCKSSGGVARHILQRLRALDHGXLDTKGGXKITSSGQRDLDQVAGRIAAAV

SEQ ID NO: 5555 - protein, 187 aa, Arabidopsis thaliana
  Clone ID: ARATH-23APR03-C101596_1.p
MTTAVNTVSGDEDRSDKKIQGDIDESKVKAPNMFERAKEELDAVIGAIHQRKSSKDKMEFKSDKPEDGKKKPNMLKKAREDLKSLFLKEKPPRHLHHHHKETHGRSDDISENTPVDEVKAPNVLDRAKEEIEAVIDTIHSKKKEKDGSGSPSRSRSLSPEKERAGFACSIGKGLEKICSPWSDDKKD

SEQ ID NO: 5556 - protein, 572 aa, Arabidopsis thaliana
  Clone ID: ARATH-23APR03-C10166_1.p
MMDRFWSWRLFVALSLFLHSPICSSDKAPNYSFMRDATGSPTTSYYDYIIIGGGTAGCPLAATLSQNASVLLLERGDSPYNNPNITRLSAFGAALSDLSESSPSQRFVSEDGVINARARVLGGGSALNAGFYTRAGTKYVRNMGWDGALANESYQWVEAKVAFQPPMGRWQTAVRDGLLEAGIVPNNGFTYDHINGTKFGGTIFDRNGNRHTAADLLEYADPKGITVLLHATVHRILFRTRGTTKPIANGVVYRDRTGQAHRAYLKEGALSEIILSAGTLGSPQLLMLSGVGPSAQLQAQNITVVMDQPHVGQGMYDNPMNAVFVPSPVPVEVSLIEVVGITGEGTYVEAAGGENFGGGGGGSSGSSSTRDYYAMFSPRATLLESNSMTKLSSAQPFQGGFLLEKVMGPLSTGHLELKTRNPKDNPIVTFNYFQHPDDLKRCVRGIQTIERVVQSKAFSRYKYADVSFEYLLNLTASTPVNLRPPRSGPGASLPPSAEEFCQHTVTTIWHYHGGCVVGRVVDGDYKVIGIDRLRVIDMSTVGYCPGTNPQATVMMLGRYMGVKILRERLTKK

SEQ ID NO: 5557 - protein, 599 aa, Arabidopsis thaliana
  Clone ID: ARATH-23APR03-C10182_1.p
MADHQEDEDLKLALKMSMQYNPPEPKRSKPIEEEETGSGSQSGGESPEAKSRRLQRELMAAAAEKRMVLFPKSPSPVNKARVLPISVVGGDKDEEVVGSCLGKELSVEESDQLFSIVFGNEVSKSVLAQWTNQGIRFSPDPETTIGLVQHEGGPCGVLAALQAFVLKYLLYFPGDRVASPCMGVWTLSKDRHVVSDSFSSVTEEAKTKALVRSMCEILFMCGDNNRAVIASFTNFEDSSSNQKDEAMAGGLPIESASDLQKILRFETFTTQASAQNKLEGTITAFQSRMGALLFLISALLSRGLDSVQADRDDPNLPLVTAPFGHASQEIVNLLLCGEAVPNVFDGRMDLGGGMFLKGISKNVDVGFLTLLESLNFCKVGQNLKCPKWPIWVIGSESHYTVLFALDPSVQEENELELRESQIRRAFDARDQSGGGGFITVEAFHQVAQETNIRLPIKKLDDICATGFIVWSELWQVILELDQNLGGIKDATGLMGKKVFDIYHFNGIAKSDINGGGQAMAVEGGMVPMQRPRLTKLNVSVPPKWTPEEYMTCALPPSSSEKDSEVNQPKPVQHAPLVDCIRTRWSRAACSWSGDPPSIV

SEQ ID NO: 5558 - protein, 192 aa, Arabidopsis thaliana
  Clone ID: ARATH-23APR03-C10189_1.p
LLVHSDITDMACVRSIGSLTSVNHSQRNVPRSGIVLSSCSVLPIKSSSFTGSPVSLPRAQPSSRTALRPMKPVSITMMVKPALQFIQGTDEMTIPDVKLTRSRDGSNGMALFSFDQPSVFDSSGEVGEITGLYMIDEEGVIQSTDVNARFVNGKPEGIVAKHIMRSPKEWDRFMRFMERYSDQNGLQFVKKQ

SEQ ID NO: 5559 - protein, 700 aa, Arabidopsis thaliana
  Clone ID: ARATH-23APR03-C10194_1.p
MAKETPASSSMPSGLKAYTVPIFLFVLAMFFQLFLLPRSFPPSHYDVLGVKMYSSVDDVKDAYQTVASKWDSGSGVSLPADFVKIQYAYELLTNLVWKRDYDLYAIDESVHIIEELEKQYAVEDFAKIKLPLLEVVSYEPEREGFMSITSQDFASKFQDSKPWLIQVYSSGSNSSAQFATVWRRIVALLDGVANHAMLELGDVQLVTYLAEKKPTGQVFFRKGLPSIFSFPPNCKTADCLIRFEGELSADAITDWFATTVLGLPRVFYHTKETLVSKFLSKVPPNKVKVILFSQTGERATPIVRQAAKDYWNFASLSHVLWREEDASFWWNALEVESAPAIVIMKDPGSKPVVYHGSGNRTWFLDILEQNKQLLLPQLRSTTSMELGCDARGYSRAGYDKVTWYCAILVGRQSVELNKMRETMCRVQDALSKYDDSDDASKDPSITPAASAHKSKRLSFAWLDGEAQNKYCFFYVQSETSYDTCGTRRAPIDVPRILIVRYHRNATETANAEQKSSKWPKTVWQSEADDVDPAAQLVVSYDGTAEIPQIIKWLSKMVDDGDNRNLPFYRAKTPELVPESAEPMRSGVPKTVKATQKLLSLWNRIKDYLADPRMGPTLLLGALLSAGNVWWMRSRSSTQQPAQTNQPSPNQPADNVEEKKKKERKREQRRRNAKEEEVPASITDNEPKDAVQILSSGSDSD

SEQ ID NO: 5560 - protein, 711 aa, Arabidopsis thaliana
  Clone ID: ARATH-23APR03-C10199_1.p
MTSYGDRLKSTSINGVKLYNVSSAPNVPTWLNPKKQRALRKNPHYMQRVELIQELKFETATTRIKATPDGEYLIASGIYPPQVKVYELNQLALKFERHLDSEIVDFEILDDDFSKLAFLCADRSINLHAKYGKHHTLRIPRMGRDMTYDSWSCDLLCAASSPDLYRINLEQGRFLSPLSTQSPALNVVSRSNLHGLVACGGEDGAVEFFDMRMKSSAARINAVTHGGDAAAEVTAIEFDDSEGLQVAVGSSAGKVFIYDLRTSTPIRVKDHMYESPILNIKWQRTLNTQQPKLITTDKHIVRIWDPNTGEGMTSIEPTQGGINDICVFRGSGLMLLALDSSLIPSYFIPELGPAPKWCSPLENLTEELEESAQTTIYDNYKFLAMEDLEKLQLTHLIGTDLLKASMHGYFINYHLYKKALAVIEPFAFDDYLERRKQEKLEEQRTQRITKKRRLPKVNRDLAARLHGDESEEENKTAEDGEATKKVLKKKKPILTDEHFVDGRFGSMFQNPDFQIDKDSYEYGVLHPVASSKKQPSLLDEHFEAVSDDDENSDSDASQPSDDEADDGDATRPSKKARTPKLYEVKDERHAAAYHNRTSLAKEDSLPMGERVKAIENRRGNFGGSKDIKFGPGGSREFSFKARGSSKYKEDRDDEYEDGQRNKRRGVQSLGLKSTNIRGGFRGRGGGGFRGRGGGGSRGKGGRGGGRGRGRQ

SEQ ID NO: 5561 - protein, 1789 aa, Arabidopsis thaliana
  unsure (1)..(1789): unsure at all Xaa locations
  Clone ID: ARATH-23APR03-C102017_1.p
PARGLVLGQLLPLLGPPCPCSYVTLSQRVRDPQLKDYADGVPLHPSRHIRFAEDYTEEQATAHIRRLLDIVACTTAFGPSKPPVSRTLPKDSEKKESGSTDGDSPTEKDAGDSNSGLSPKPKESEKKSVGACEAQSAECGDILAPLMRLKVNNHHSREKHFYMXNVLCCSAGPRLVTPALTTFLLLSVFGFIAXKTRYIQLLNKKFVPLFFKIRKELKKKKNSRGGPVPVHNKFGNLPYGFRANTWVVPPVVADSPSTFPSLPVEDETWGGDGGGVGRSGKYDKRKWAKEFAILAAMPCKTPEERQVRDRKAFLLHSLFVDVSVFKAVEIIKKIVENNQCSLKDPAALGFHEERIGDLIVRVARDDPDASAKLDRKSDGTQVLEISQEELAQRNLLKGITADESATVHVILLASAAFLSFALTGIVTEIYLDHIGYVYFGGGGSIVKVASEFKLNDGHILQDIDIEDQSEGGANALNVNSLRTLLHKSSTPSSLAQRSPNADSEQIRVAKSLVRKVIEDSLKKLEIEPSRYSKPIRWELGACWVQHLQNQASSKSESKKTEDPKPEPAVKGLGKQGALLKEIKRKIDVKANKTEQGKEAPANDTDNTSETEDQKELEKQNEEIEKMWKELVTETAYQRLKESETGFHLKSPKELIEMARKYYTDTALPKLGKSSVPHKFRLDMLQVADFGSLELSPVDGRTLTDFMHTRGLQMHSLGRVVELAEKLPHVQSLCVRTRGVRAYKHILQAVVAAVENTADVATSIATCLNVLLGTPSDTESVYDEKIKWTWVETFISKRFGWDWKHEGCQELRKFSILRGLSHKVGLELVPKDYEMDTSYPFKKFDIISMVPVYKHVACSSADGRTLLESSKTSLDKGKLEDAVNYGTKALAKLVAVCGPYHRMTAGAYSLLAVVLYHTGDFNQATIYQQKALDINERELGLDHPDTMKSYGDLAVFYYRLQHTELALKYVNRALYLLHLTCGPSHPNTAATYINVAMMEEGMKNAHVALRYLHEALKCNQRLLGADHIQTAASYHAIAIALSLMDAYSLSVQHEQTTLQILQAKLGPEDLRTQDAAAWLEYFESKALEQQEAARNGTPKPDASISSKGHLSVSDLLDYITPDSGIKARDAQRKARPKVKGKPGQSPGPVSEENQKDDEILSPAHLTGESSSDKENKSETKSEEKKVENFDLEQSKPQDQLKLVKPEATVQEDDDSDEGWQEAVPKNRFSSGRRTRPSLAKLNTNFMNMPQQPSRSRGKSTNFTSPRTSSNELSISVAGSTSSPASKMFVKSPLNKKQNNSSVVGERPVNDKSALASSACTEQINKPTPMLSPVSVKAGKLFSYKEVALAPPGTIVKIVAEQLPEETKAPQNLDAAKIAVDGPEKVNAQDAESENKHVATETEAENTDCNEQGRVVVGGSELTSSPKEIKNVEVEKAAEKAFPIETAVSNARPGKSKSAQMAEDSDTCLLNKSPTANDSNGSESVIGVKLQKDLCDAELKTVDGETENLPNGDSSPKSSVAADGEKQDACEAQKEMSKKLSASAPPYTPTTIPIFGSIAVPGFKDHGGILPSPLNMPPMLPINHVRRSTPHQSVTARVPYGPRLSGGGYNRSGNRVPRNKPSFPNSTESNGEANQFNGPRIMNPHAAEFIPSQPWVSNGYPVSPNGYLASPNGAEITQNGYPLSPVAGGYPCNMSVTQPQDGLVSEELPGAGSSEEKSGSEEESNNDKNAGEDDEAVGQETTDTPENGHSTVGEVETTSHETCDEKNGERQGGKCWGDYSDNEIEQIEVTS

SEQ ID NO: 5562 - protein, 504 aa, Arabidopsis thaliana
  Clone ID: ARATH-23APR03-C102079_1.p
MLTGAGETHVRRRRDLQNLLSLFQSFLSFWSWFFSPLSSSLSQNPKLSFPLVFFSEGLLCDGRVNVYSTSPAPNHNSDADPPLNPTREESHFSIIALSKFLEQFFIDTSFGSRSAVLAVTPLVPSHRISLMARDSLGPSVVPFPVRTSTTHDELHCWQVFFPGASPSTITSDLYDGGALPSLLSTVTTLGFGGMGLNFLDGPVATIHAFGGLGLSQFGGPKTLNLIWPISRFALLRVLSTLSLNHCFTITDGRGLHSIVGTLVLEDPCNHNTRNLLHRVDWLPTDVSLVLKLSGLVLISNHRLCDAAHAFVFICDHIMSLNLPTIMLTHPVPCRLLDDASQPSWNCWLKLLRPALSTLFSSPMNPVYLCHLIRRLSVLWTCNLCCRLHYVYSSKEIPSLKPYSSKEISSLKLEPGEKSHTAASSLEHFNKSFYASIARAYYDHKLIRDFSKLVFKLESLQVPIDLPSLATFSKLCILEDSWNLYLYLSCNALILLCINPPLLRS

SEQ ID NO: 5563 - protein, 760 aa, Arabidopsis thaliana
  Clone ID: ARATH-23APR03-C10207_1.p
MGKKKGNKAAASTDDFLQTLEDFTSKENWDKFFTLRGNDDSFEWYAEWPQLHDSLLPLLQDSSSSSSDSLQILVPGCGNSRLTEHLYDAGFRDITNVDFSKVVISDMLRRNIRTRPELRWRVMDITKMQLADESFDTVLDKGALDALMEPEVGTKLGNQYLSEAKRVLKPGGKFICLTLAESHVLALLFSRFRFGWKMNVHSIAQKRSKLKTYMVVAEKENSVLLHEITSAFELVSLGRNDSQGSGMREAVESENKIRRDCNNGSDLLYSHEDLKLGIKGDLAELTEGRRIKFTLGGQGSNFSYRAVLLDAQKQTEPFVYYCGVFLVPKTRAHEWLFCSEEGQWQVVESSQAARLIMVFLDSSHSGATMEDIQNDLSPMVTQLAPRNDDEARIPYMMASDGIKKRDTVHEVTSPMTGKVVVEDVVYESAPSNLEDLSTSSDLAFRRLVFKRTEGLIQSEALLVEDGEILEQSQKEKTKNVSQSKRKGNKKQNQEPSRPLMRVSHDYLASSYHTGIISGFTLVSSYLKKAESCGTMVKTVVIGLGAGLLPMFLHGCLPFFSIEAVELDPVMLSVGKDYFGFTQNDRLKVHIADGIKFIRDITNSEASSEESSNIGSNGDSTTHNTQGGICPDILIIDVDSADSSGGLTCPASDFIEETFLLSVKQALPQHGLFIVNLVTRSQSVKDMVVSRMKKVFDHLFGLQLEEEDDVNVVLFGLCSESVISENDIPESAVILEGLLKCQRLETKQSIIDATKKLKCWK

SEQ ID NO: 5564 - protein, 2946 aa, Arabidopsis thaliana
  Clone ID: ARATH-23APR03-C102107_1.p
MEDDDERKLPEADIANPLHNRIEAFDTTLQGISSADRAFKDDDFEQVSLGDQEKAANESQGDLQEPGSFSNSDHGRSSFGGTEVVTYQLSGTQEMYDLMPMDDVQSDRLSSPGPEREAAYSMQQSLSETSLDSVHHPESGYSPVHSPQKPKPKATVPNVSPELLHLVDSAIMGKPESLDKLKNVVCGIENFGCGEESEATAFLVVDSLIATMGGVESFEEDEDSNPPSVMLNSRAAIVSGELIPWLPGLGDNVNFMSPRTRMVRGLLVILRSCTRNRAMCSTAGLLGVLLRSVEAIISKDVDMKWNAAAILLLCIQHLAGHSLSVDDLHRWLQVIKAAITTAWSSPLMLALEKAMSGKESRGPACTFEFDGESSGLLGPGESRWPFTNGYAFATWIYIESFADTLNAATAAAAIAAAAAAKSGKTSAMSAAAAASALAGEGTAHMPRLFSFLSADNQGIEAYFHAQFLVVESGSGKGRKSSLHFTHAFKPQCWYFIGLEHSCKQGLLGKAESELRLYIDGSLYESRPFDFPRISKPLSFCCIGTNPPPTMAGLQRRRRQCPLFAEMGPVYIFKEPIGPERMARLASRGGDVLPCFGNGAGLPWLATNDYVRNKAEESSILDADIGGYTHLLYHPCLLSGRFCPDASLSGAAGTLRRPAEVLGQVHVATRMKPVESFWALAYGGPMSLLPLTVSSVHKDSLEPCLGNLPLSLSTVTLAAPVFRIMSVAIQHPGNNEELCRTQGPEILARILSYLLHSLASLDRKHDGVGEEELVAAIVSLCQSQKINHVLKVQLFRTLLLDLKIWSLCNYGLQKKLLSSLQDMVFTEATAMRDAEAIQLLLDGCRRCYWMISEKDSETTFPLDGNTRQMGELNALIDELLVIIELLMGAASPSLAADDLRRLLGFIIDSPQPNQVARVLHLMYRLVVQPNAARAQMFAEVFITSGGIETLLVLLQREAKTGEDNVLAMGRSGKRSSTDPSEKSPYNESGSVKQLDSNPHDNEIGFDLPGPDGNSVEDDNVGSLNVPESVRQEKEHGSTPVVCDSDSVSISNSINTERLSAEIGGISLSISADSARNNVYNVDNSDAVVVGIIRLIGALISSGHLTFDFDARSDVTSNILGSGLHENGGTMFDDKVALLLFALLKAFQAAPNRLMTDNVYTTLLGASINASSTEDGLNFYDSGHRFEHSQLLLVLLRSLPSASKALQSRALQDLLFLACSHPENRSSLTTMEEWPEWILEILISNYEKDAGKQSASVGSCEVEDMIHNFLIIMLEHSMRQKDGWKDIEATIHCAEWLSIVGGSSTGEQRIRREESLPIFKRRLFGGLLDFAARELQAQTQVIAAAAAGVAAEGLAPKDAKAGAENAAQLSVFLVENAIVILMLVEDHLRSQSKQTCATNAVASPSPLKKRTSTLTAIGESSEISSSRASLSSDSGKVPLDILASMADSSGQISAVAMERLTAASAAEPYESVSCAFVSYGSCAMDLAEGWKYRSRLWYGVGLPSKPSSLGGGGSGSDSWKSTLEKDAHGNWIELPLVKKSVSMLQALLLDESGLGGGLGIGGGSGTGMGGMTALYQLLDSDQPFLCMLRMVLLSMREEDYGEDNMLMRNLSSERSSGNSVTLDSGSQMSMRQSRSALLWSVLSPIINMPISDSKRQRVLVTACVLYSEVWHAISRDRRPLRKQYIEAIVPPFIAVLRRWRPLLAGIHELATADGMNPLVVDDRALAADALPVEGALSMVTPEWAAAFASPPAAMSLAMIAAGAAGWEAPPPPTPSHLRRDSSMLERKTAKLQTFSSFQKPLEPPNNNAPPRPRDKAAAKAAALAAARDLERNAKIGSGRGLSAVAMATSAQRRNIGDMERLQRWNTSEAMGVAWMECLQPVDTKSVYGKDFNALSYKFIAVLVASFALARNMQRSEIDRRMQDDIIAANRLCLGSRAWRKLIRYLAEMRCFFGPFGDGICSPERVFWKLDSMESFSRMRQSIRRNYSGTDHHGAAADYDDQTETKSDNGSKGSQSNPPVVAAEVILMEIAYEEDEHGEGDQLDVKGNAEEHKRDEGRISGSHEHASRTSAGNSDPRTSNDLEMVRDSSVVAPGFVPSELDERILLELPTSMVRPLRVVKGTFQITTRRINFIVDNRESQNLADHSDESQSGDQEKDRSWPMSSLHQIYSRRYLLRRSALELFMVDRSNFFFDFGNTEGRRNAYRAIVQARPPHLNNIYLATQRPEQLLRRTQLMERWARWEISNFEYLMQLNTLAGRSYNDITQYPVFPWIISDNSSESLDLSNPSTFRDLSKPIGALNPERLKKFQERYSSFEDPVIPKFHYGSHYSSAGAVLYYLARVEPFTTLSIQLQGGKFDHADRMFSDFPGTWNGVLEDMSDVKELVPELFYLPEVLTNENSIDFGTTQLGEKLDAVKLPPWAKNPVDFVHKQRRALESEHVSAHLHEWIDLIFGYKQRGKEAIMANNVFFYITYEGTVDIDKITDPVQQRATQDQIAYFGQTPSQLLTVPHMKRMPLKDVLHMQTIFRNPKEIKPYTVQTPERCNLPASAIQASSDSVVIVDMNVPAARVAQHKWQPNTPDGQGTPFLFHHGKATTTSTSGSLMRMFKGPASSGTGDWQFPQAQAFASSGIRSSSVIAITSDGEIITGGHADNSIKLVSSDGAKTLETAFGHCAPVTCLALSPDNNFLVTGSRDSTVLLWRIHKAFTSRTSVSEPSTGSGAPSSTSNTNLANTLANKGKKCRLEGPIQVLRGHRRELVCCCVSSDQGVVVSSSESSDVLLHSIRKGRLIRRLVGVKADSLCISSDGVIMAWSSSEGSISVFTINGVLIAKAKFPLFCSVGCMEISMDGQNALIGMNSCSNSDYSSSNDTSKDSKEIERLDVPSPSICFLNLYTLQVFHVLKLGQGQDITALALNVDNTNLLVSTEDKQLIIFTDPALSLKVVDQMLKLGWE

SEQ ID NO: 5565 - protein, 648 aa, Arabidopsis thaliana
  Clone ID: ARATH-23APR03-C10213_1.p
MVVVTKKTMKIQIHLLYSFLFLCFSTLTLSSEPRNPEVEALISIRNNLHDPHGALNNWDEFSVDPCSWAMITCSPDNLVIGLGAPSQSLSGGLSESIGNLTNLRQVSLQNNNISGKIPPELGFLPKLQTLDLSNNRFSGDIPVSIDQLSSLQYLRLNNNSLSGPFPASLSQIPHLSFLDLSYNNLSGPVPKFPARTFNVAGNPLICRSNPPEICSGSINASPLSVSLSSSSGRRSNRLAIALSVSLGSVVILVLALGSFCWYRKKQRRLLILNLNDKQEEGLQGLGNLRSFTFRELHVYTDGFSSKNILGAGGFGNVYRGKLGDGTMVAVKRLKDINGTSGDSQFRMELEMISLAVHKNLLRLIGYCATSGERLLVYPYMPNGSVASKLKSKPALDWNMRKRIAIGAARGLLYLHEQCDPKIIHRDVKAANILLDECFEAVVGDFGLAKLLNHADSHVTTAVRGTVGHIAPEYLSTGQSSEKTDVFGFGILLLELITGLRALEFGKTVSQKGAMLEWVRKLHEEMKVEELLDRELGTNYDKIEVGEMLQVALLCTQYLPAHRPKMSEVVLMLEGDGLAERWAASHNHSHFYHANISFKTISSLSTTSVSRLDAHCNDPTYQMFGSSAFDDDDDHQPLDSFAMELSGPR

SEQ ID NO: 5566 - protein, 407 aa, Arabidopsis thaliana
  Clone ID: ARATH-23APR03-C10220_1.p
MAGRVFEAWKGSNKFLFGGRLIFGPDAWSIPFTFLLIITPVCFFSVFVATHLRRELLPNNAGHVFLVAGVLFTVFVLILLFLTSARDPGIVPRNSHPPEEELCYDTTVSSDGRQTPTVQIPRTKEVMVYGVSVRVKYCDTCMLYRPPRCSHCSICNNCVERFDHHCPWRNYRYFFMFVSSATILCIYIFSMSALYIKVLMDNHQGTVWRAMRESPWAVMLMIYCFISLWFVGGLTGFHLYLISTNQTTYENFRYRSDNRINVYNRGCSNNFFETFCSKVKPSRNDFRAFIKEEPPRNITLATTWERPEEADEENREERRQKVEDDLDIDEDVMKLQQRLNDEEGSDTAHHKIDIDQMRIGSNERAPTIRSEARHGNWGARSNAQEEDVIAGSSVRESRSYAAAEEGR

SEQ ID NO: 5567 - protein, 683 aa, Arabidopsis thaliana
  Clone ID: ARATH-23APR03-C10227_1.p
MNPTISWRFASSTSLLSIPRTPKSAFIFAMTFSSSSSSSSSMSNPRQRKGEAMMNPTISWRFASSTSLLSIPRTPKSAFIFAMTFSSSSSSSSSSSSVENPNKDDSSSSLELVLKYHNQTKHSLNGYARGPRGLDWANQPNPFRRYLSAPLLPLQHPNHDIDDDSDSPLYSTLFDSLPPPKPISLPTISHLFYHSLALSAWKTTGSSTWPLRVNPSSGNLHPTEAYLIAPPIPSLSQSAFVSHYAPKEHSLEVRAHIPSSFFPNFFPENSFLIGISSIFWREAWKYGERAFRYCNHDVGHAIAALSIAAADLGWDLKLLDAFGADDLKRLMGLPEFQLPEGKGKAELPEIEFEHPDCLLLVFPNGTSREHLNLDYLAISSALRDFPSLEWTGNPNTLSKEHLCWDIIYRTAKAVEKPPLIYSTSSSSIDVASFTSSRALFSHSSYNKLTVRQVVRTRRSAVDMDAVTCIDMSSFYQMLMHCLPSTGESQKEQLALPFRALPWDTAEVHLALFVHRVSGLPKGLYLLVRNEDHLSDLKTATRPEFEWTKPDGCPDNLPLYKLAEGDCQRLAKGLSCHQDIAGDGCFSLGMIARFEPALREKGSWMYPRLFWETGVVGQVLYLEAHAMGISATGIGCYFDDPVHEVLGINDSSFQSLYHFTVGGPVVDKRIMTLPAYPGPTTTVA

SEQ ID NO: 5568 - protein, 184 aa, Arabidopsis thaliana
  Clone ID: ARATH-23APR03-C102340_1.p
MLTTLRSRCSSLLLDQSWKLAPNRIFASSPSFSSTAGISNVSEILTLPEVEKILADVKADNVTVIPTHNHCFWADFTVIATGRSDWHLRNIAQALVYRAKQKQKGAKHVMLPSVQGYNSKWIVIDYGKFVVHALDEKARGYFNLESLWSAESSGTDTSDQDLQNVFVKVRPKNNSKRKPAKVSS

SEQ ID NO: 5569 - protein, 720 aa, Arabidopsis thaliana
  Clone ID: ARATH-23APR03-C10239_1.p
MEPPPSSLSSTAVASTSISAATTPVPPPLPPHVTSSYPESLDSSPRSRTTDGWDDLPAPSGGGGGGGGSAVSSKLRFMCSYGGHILPRPHDKSLCYMGGDTRIVVVDRNSSLPSLIARLSNTLLDGRSFTLKYQLPSEDLDSLISVTTDEDLDNMIEEYDRTISASNSTKPSRLRLFLFTSKPEATQSMGQILESSAKSDDWFLNALNSAGLLNRGFSDSDTNVNRLLGLDDALALRSNSGDNNNRDGDDGSVKSAKQQQPPPPQQQEQQQGGQDVNCLPDSPMLDTSSSFGSTSSSPSLANLPPIRVHVEEPGGVRTLPDQRNLGIEEQFARFNVGNKHQLHDDGFAAISSPPPMPVTIALPAAPVTAATVSNEFQARVYSDDERSDHGVQAGYRKPPTPRSQPQNLPPQQAHQLKSNSGGGHELPSPNSVSSDSSMSNPMFHQRPSVYQEPIAQIPSGSTVVTGMINPSDPSTLLSQHQNQDPAYILHPQFEQQSAQSQPQQQFIHTAAPPQYIHHHPSSGLPVPTYIQVYPSQQPQQSFHQHAGRLDQQPYPVYYVTAPVPPRPYSMPVPQSPSVSDAAGSIPSNHPNSTMMPPPPNNHMRSVSSGKPEMGQAGVYTTAPGVGGAQMVHQIPTNQQQFMGYSQIRHPPQSGSAGNPNYGYEYVDNAHTQIYYTQPMGHAQYQTMTGPPPAMVMPDGSAAAKLPAENMTQQIRSSQPL

SEQ ID NO: 5570 - protein, 684 aa, Arabidopsis thaliana
  Clone ID: ARATH-23APR03-C10248_1.p
MAIITTTTVRFTDGTSPTFFSSASTKAYNLHFLYSNSTQRLTNPKFGIGGKLKVTVNPYSYTEEVRPEERKSLTDFLTEAGDFVNSDGGDGGPPRWFSPLECGARAPESPLLLYLPGIDGTGLGLIRQHKRLGEIFDIWCLHFPVKDRTPARDIGKLIEKTVRSEHYRFPNRPIYIVGESIGASLALDVAASNPDIDLVLILANPVTRFTNLMLQPVLALLEILPDGVPGLITENFGFYQEMFETMLNENDAAQMGRGLLGDFFATSSNLPTLIRIFPKDTLLWKLQLLKSASASANSQMDTVNAQTLILLSGRDQWLMNKEDIERLRGALPRCEVRELENNGQFLFLEDGVDLVSIIKRAYYYRRGKSLDYISDYILPTPFEFKEYEESQRLLTAVTSPVFLSTLKNGAVVRSLAGIPSEGPVLYVGNHMLLGMELHAIALHFLKERNILLRGLAHPLMFTKKTGSKLPDMQLYDLFRIIGAVPVSGMNFYKLLRSKAHVALYPGGVREALHRKGEEYKLFWPEHSEFVRIASKFGAKIIPFGVVGEDDLCEMVLDYDDQMKIPFLKNLIEEITQDSVNLRNDEEGELGKQDLHLPGIVPKIPGRFYAYFGKPIDTEGREKELNNKEKAHEVYLQVKSEVERCMNYLKIKRETDPYRNILPRSLYYLTHGFSSQIPTFDLRNH

SEQ ID NO: 5571 - protein, 297 aa, Arabidopsis thaliana
  Clone ID: ARATH-23APR03-C10261_1.p
MWSVMGLVRRTAMSSTVNKASPVRSLLGGFRCLNVESKEEDEKKDMTVLEAKKLMRLVNVEDMKKKLIGMGDKEMVTYTTLIEASQGLGIARSLDEAHAFARVLDDAGVILIFRDKVYLHPHKVVDLIRKAVPLGLNPDDELIREEFDKMRSMKEEIDVLAHQQVRKILWGGLGYSVVQIGIFVRLTFWEFSWDVMEPITFFTTAPGMSTGIIVGYAYFLMTSRDPTYQDFMKRLFLSRQRKLLKSHKFDAERFKELENKWKITSCSSSSCHANASIRNRVGVDLDLEDSLQSHHRD

SEQ ID NO: 5572 - protein, 191 aa, Arabidopsis thaliana
  Clone ID: ARATH-23APR03-C102994_1.p
MGVMSLSKTMVVVVLQVMILLGQEIGKVSSTLYKVGDMDAWGIPIDAKVYSKWPKSHSFKIGDSLLFLYPPSEDSLIQVTPSNFKSCNTKDPILYMNDGNSLFNLTQNGTLYFTSANPGHCTKYQKLLVSVGTYSAEAEALSPSSAADAPSYQNAFGSIPLSQKSSASSSLISAFSTVAASLACAVVGAIM

SEQ ID NO: 5573 - protein, 336 aa, Arabidopsis thaliana
  Clone ID: ARATH-23APR03-C10319_1.p
MAFSSSSSSPAMQKGIFVSMPVLVLTVSFVAAVFFLLSSSFSSCSCPEALSSSPTDAVEASVGGSGGDVRFEDRISPTKDDIEWVRDLIRSNGLHMQKNELRKGINPRTRDQQLADLIQYKGISHYEGDEANNHTALPCPGELLVEQHHSNYGEPWAGGRDVFEFLAESSSLKPNSRVLEIGCGTLRVGLHFIRYLSPQHFHCLEKDELSLMAALRYELPSQGLLHKRPLIVRGDDMEFSKFGSDTTYDLIYASAVFLHMPDKLVWTGLERLVDRLKPYDGRIFVSHNVKFCSRLGQDKCSQKLASLGLEYLGKQTHDSLLFNHYEIWFGFRRFKT

SEQ ID NO: 5574 - protein, 926 aa, Arabidopsis thaliana
  Clone ID: ARATH-23APR03-C1032_1.p
MALANEIMGSRLIFERSSSLASPFHSRFSIKKKTQRTQFSINPFDPRPMRAVNSSGVVAAISEDLVKTLRISTVGRKQEKEEEEEKSVKFKVRAVATVRNKNKEDFKETLVKHLDAFTDKIGRNVVLELMSTQVDPKTNEPKKSKAAVLKDWSKKSNSKAERVHYTAEFTVDSAFGSPGAITVTNKHQKEFFLESITIEGFACGPVHFPCNSWVQSQKDHPSKRILFTNQPYLPSETPSGLRTLREKELENLRGNGKGERKLSDRIYDYDVYNDIGNPDISRELARPTLGGREFPYPRRCRTGRSSTDTDMMSERRVEKPLPMYVPRDEQFEESKQNTFAACRLKAVLHNLIPSLKASILAEDFANFGEIDSLYKEGLLLKLGFQDDMFKKFPLPKIVTTLQKSSEGLLRYDTPKIVSKDKYAWLRDDEFARQAIAGINPVNIERVTSYPPVSNLDPEIYGPGLHSALTEDHIIGQLDGLTVQQALETNRLFMVDYHDIYLPFLDRINALDGRKAYATRTILFLTRLGTLKPIAIELSLPSQSSSNQKSKRVVTPPVDATSNWMWQLAKAHVGSNDAGVHQLVNHWLRTHACLEPFILAAHRQLSAMHPIFKLLDPHMRYTLEINAVARQTLISADGVIESCFTAGQYGLEISSAAYKNKWRFDMEGLPADLIRRGMAVPDPTQPHGLKLLVEDYPYANDGLLLWSAIQTWVRTYVERYYANSNLIQTDTELQAWYSESINVGHADHRDAEWWPKLSTVEDLVSVITTIIWLASAQHAALNFGQYPYGGYVPNRPPLMRRLIPDESDPEFTSFIEDPQKYFFSSMPSLLQTTKFMAVVDTLSTHSPDEEYIGERQQPSIWTGDAEIVDAFYGFSAEIGRIEKEIDKRNRDPSRRNRCGAGVLPYELMAPSSEPGVTCRGVPNSVSI

SEQ ID NO: 5575 - protein, 576 aa, Arabidopsis thaliana
  Clone ID: ARATH-23APR03-C103657_1.p
MLEKIGLPPKPSLRGNSWVVDASHCQGCSSQFTFINRKHHCRRCGGLFCGTCTQQRLSLRGQGDSPVRICEPSQIMEIARGKNLYADSDQPKKRSNDLATDSRLNGGDDSVTENDMKDPALLSTLKNLGWEDEEPKKEEASFGSVQSSGPRIAAKSKGQIQRELLDLKRKALAFKRQGKTGDADELYSKASVLEAQLAELETPKMEMKGSASAIKPENYMDVDLLVGSQMEDKAIKSASVSHAPQDSYDLLGDFISPAKSGSSGVVSQPGQQQPSMMDLLTGSADAWAQIHAEKGNAETMSGFRSGNNHGAEQRVAREESEPSHIQSASIQNTSPQNTLKQEILAHKKKALALKREGNISEAKKALQEAKLLERRLQEGENPSPEKLGRDDMVSTTEDPPAREKENSPSSSAPKAMSGRDRFKLQQESLSHKRQAMKLRREGKMQEAEAEFEIAKTLEAQLEDSTSSKPEPVDDVAVEDFLDPQLLSALKAIGLDNPVNPPPVSKTDTTQAAAKPNPVKESNRNTNNQERSQLEERIKAEKVKAVTFKRAGKQAEALDALRRAKLYEKKLNALASS

SEQ ID NO: 5576 - protein, 585 aa, Arabidopsis thaliana
  Clone ID: ARATH-23APR03-C10389_1.p
MEQMKPCAANSPPLTPIGFLERAATVYGDCTSIVYGKELKKMEDLKPSAANSLPLTLLGFLERAATVYGDCTSIVYGNSTVYTWRETNHRCLCVASALSSIGIGRSDVVSVLSANTPEMYELQFSVPMSGAILNNINTRLDARTVSVLLRHCESKLLFVDFFYSDLAVEAITMLLNPPILVLIANEEEEEGGAEVTERSKFCYLYSDLITRGNPDFKWIRPGSEWDPIVVNYTSGTTSSPKGVVHCHRGIFVMTLDSLTDWAVPKTPVYLWTLPIFHANGWTYPWGIAAVGGTNVCVRKLHAPSIYHLIRDHGVTHMYGAPIVLQILSASQESDQPLKSPVNFLTAGSSPPATVLLRAESLGFIVSHGYGLTETAGVIVSCAWKPNWNRLPASDQAQLKSRQGVRTVGFSEIDVVDPESGRSVERDGETVGEIVLRGSSIMLGYLKNPIGTQNSFKNGWFFTGDLGVIHGDGYLEIKDRSKDVIISGGENVSSVEVEAVLYTNPAVNEAAVVARPDEFWGETPCAFVSLKPGLTRKPTDKEIIEYCKYKMPRYMAPKTVSFLEELPKTSTGKIIKSLLKEIAKNM

SEQ ID NO: 5577 - protein, 561 aa, Arabidopsis thaliana
  Clone ID: ARATH-23APR03-C10400_1.p
MEEDDGDASTPFWLQSRRNNTYFRRTASLGGRTTTIATQIFFAGTAAILIVVFIIPPFFSSVSQIFRPHLVRKSWDYLNFVLVLFAVLCGFLSRNTNNDESNHHKEEDIRNKFSTSPSIIDRRSRVSNSGTTPRYWNDDRGGGGGDQTVYKRFSRLRSVSSYPDLRLREYEADERWRFYDDTRVSQCRYEDVDPIYPNQSYRNWHEEGKPPPEDVDQTEDGDNGEGSKVRNGGSETEKVEVVATAEAEVVEELKVPSAPPYIPSPPPSPPRPPPAKQAKRKTNRVYQDVSPQEEKKERDDFVATTTPIPPPATVYQKSNKQEKKKGGATKDFLIALRRKKKKQRQQSIDGLDLLFGSDPPLVYSPPPPPPPPPPFFQGLFSSKKGKSKKNNSNPPPPPPPPPPERRYESRASTSKLRKAPVESRTSKPNPPAKVTQYVGTGSESPLMPIPPPPPPPPFKMPAWKFVKRGDYVRMASDISISSDEPDDPDVAQSAGSKEAAGSMFCPSPDVDTKADDFIARFRAGLKLEKMNSVKRGRSNLGPEPGLHESGSSTGYRPSPSV

SEQ ID NO: 5578 - protein, 272 aa, Arabidopsis thaliana
  unsure (1)..(272): unsure at all Xaa locations
  Clone ID: ARATH-23APR03-C10403_1.p
MGDVYFNHFAQQLQMSDQEKGEMSRHSHPHSINEESESSTLERVAAESLTNKVLDRGLMEYGCPHYRRRCCIRAPCCNEIFGCHHCHYEAKNNINVDQKQRHDIPRHQVEQVICLLCGTEQEVGQICIHCGVCMGKYFCKVCKLYDDDXNGHPCVEGAMHHDCPICFEFLFESRNDVTVLPCGHTIHQKCLEEMRDHYQYACPLCSKSVCDMSKVWEKFDMEIAATPMPEPYQNRMVQILCNDCGKKAEVQYHVVAQKCPNCKSYNTRQTRG

SEQ ID NO: 5579 - protein, 734 aa, Arabidopsis thaliana
  Clone ID: ARATH-23APR03-C10406_1.p
MSMMTVWALRRNVRRKNHSMLVRYISGSASMKPKEQCIEKILVANRGEIACRIMRTAKRLGIQTVAVYSDADRDSLHVKSADEAVRIGPPSARLSYLSGVTIMEAAARTGAQAIHPGYGFLSESSDFAQLCEDSGLTFIGPPASAIRDMGDKSASKRIMGAAGVPLVPGYHGHEQDIDHMKSEAEKIGYPIIIKPTHGGGGKGMRIVQSGKDFADSFLGAQREAAASFGVNTILLEKYITRPRHIEVQIFGDKHGNVLHLYERDCSVQRRHQKIIEEAPAPNISEKFRANLGQAAVSAARAVGYYNAGTVEFIVDTESDQFYFMEMNTRLQVEHPVTEMIVGQDLVEWQIRVANGEPLPLSQSEVPMSGHAFEARIYAENVPKGFLPATGVLNHYRPVAVSPSVRVETGVEQGDTVSMHYDPMIAKLVVWGGNRGEALVKLKDCLSNFQVAGVPTNINFLQKLASHKEFAVGNVETHFIEHHKSDLFADESNPAATEVAYKAVKHSAALVAACISTIEHSTWNESNHGKVPSIWYSNPPFRVHHEAKQTIELEWNNECEGTGSNLISLGVRYQPDGSYLIEEGNDSPSLELRVTRAGKCDFRVEAAGLSMNVSLAAYLKDGYKHIHIWHGSEHHQFKQKVGIEFSEDEEGVQHRTSSETSSHPPGTIVAPMAGLVVKVLVENEAKVDQGQPILVLEAMKMEHVVKAPSSGSIQDLKVKAGQQVSDGSALFRIKG

SEQ ID NO: 5580 - protein, 656 aa, Arabidopsis thaliana
  unsure (1)..(656): unsure at all Xaa locations
  Clone ID: ARATH-23APR03-C10417_1.p
EGISNEKKKKKKKKKKTKKNNNLEGVPVKPREGAQHTGPDNVGGDLAGHSPSNILAAQAQGXFLLNLHRGYENPTGEWDEHYSYLNVEGMDEACQGEFNAKSTYISQTLFWTLPSIXYDIILHRLCVQIPXVIVCLLQEHIPIEVAPPYYHRVVPXSPHYITFFRLSPSSPALSVFDXKQISMDPPLFYVPQPIGSFNXSQQDLGFPEWQHGFDGGIWSDWSKPSDMHRHSSSISPALSPQPLGSYGSYGQNIPMGSQRQRSFYGFGSGSNSYNRGYMHSGGRGQGSNYGSRLISNVGMGNQGWIGVDNSRGRGRVSDPSLGGAYNGTFDILNEQNRGPRASKPKTQVLEELDSAADSKKNNKGSAKEHEESNNADFVTDYTNAKLFIIKSYSEDNVHKSIKYNVWASTPNGNKKLDAAYREAKDEKEPCPLFLLFSVNASSQFCGVAEMVGPVDFEKSVDYWQQDKWSGQFPVKWHIIKDVPNSQFRHIILENNDNKPVTNSRDTQEVKLEQGIEMLKIFKNYDADTSILDDFGFYEEREKIIQDRKARRQPSLPSAGVVAGENEHKPASAALPTDFMKNMSKSFAQVVRLDEGSKEAVKASSSPDAITTAAVSSGQSKSDRVWFLCKVSLFPPPFSASGVFSQNLIHFPLFNVL

SEQ ID NO: 5581 - protein, 961 aa, Arabidopsis thaliana
  unsure (1)..(961): unsure at all Xaa locations
  Clone ID: ARATH-23APR03-C1042_1.p
MGKKAKKKARAPTKEIQTMEISKKVSEEPPSQAGEIAEGDVKAVKETQACVHFDKALNLEKVLDKIKSSRQIKCAECNEGVYGKRGTKAKGSKGKKDFSSSDPKSNNKAIWLCLECGCYVCGGVGLPNGPQSHVLRHSRVTRHRLVIQWENPQLRWCFPCQLLLPVEKEDNGEKKDVLSEVVKLIKGRSLNNLASSDIEDQCSGSGSITSDIKLEGAVTSDIEARDGYVVRGLVNLGNTCFFNSIMQNLLSLDRLRDHFLKENGSGVGGPLASSLRKLFTETKPEAGLKSVINPRAFFGSFCSKAPQFRGYDQHDSHELLRCLLDSLSTEESALRKKRGVSDNDEKSTTLIESVFGGETSSIVSCMECGHSSKVYEPFLDLSLPVPFKKSPPKKPQPVSRAKKXKLPPKRVPKNVSKVSKVSKVLPGMVLSELNSSGKSMAVTADSDTSCSSLAPLDNGPVLETPSVLTLDNNQASESASQSDTGFDGSWLDFIGPETSGDETNLDMQEDGIDNVITAEVNQIVPSPNIVANSSVSSGDQTLEGNTERLMQDYEEIAKAEANLDEKDVQAMQSDECPATSGISAEFSQASCIGCDPGIGESSSSVNPWDEEELPLVVADSQILYMPYKEISCNDKSVEGECEASSSFVTGDHEPQNSDFVDFGGLFDEPETTEGPVFGPPSKAEASGVGFMAFSSESDPEEIDDSDLPVSVERCLGHFTKHEILSDDNAWNCENCSKNLKLQRLREKRKSNEDESRSSNTSNGWVKENEDEGFGETEILAVKQDPNDTSCVKDHSSDGRKAARIHSADESESKGTQDEDEDSEKVITVKRDATKKVLINKAPPVLTIHLKRFSQDLRGRLSKLNGHVAFKEVIDLRQYMDSRCSGEDPPVYRLAGLVEHSGTMRGGHYVAYVRGGQRVKETDSSSTAWYNVSDAYVRQVSLEKVLHSEAYILFYERIFSQE

SEQ ID NO: 5582 - protein, 596 aa, Arabidopsis thaliana
  Clone ID: ARATH-23APR03-C10479_1.p
MATGENRTVPDNLKKQLAVSVRNIQWSYGIFWSVSASQPGVLEWGDGYYNGDIKTRKTIQAAEVKIDQLGLERSEQLRELYESLSLAESSASGSSQVTRRASAAALSPEDLTDTEWYYLVCMSFVFNIGEGIPGGALSNGEPIWLCNAETADSKVFTRSLLAKSASLQTVVCFPFLGGVLEIGTTEHIKEDMNVIQSVKTLFLEAPPYTTISTRSDYQEIFDPLSDDKYTPVFITEAFPTTSTSGFEQEPEDHDSFINDGGASQVQSWQFVGEEISNCIHQSLNSSDCVSQTFVGTTGRLACDPRKSRIQRLGQIQEQSNHVNMDDDVHYQGVISTIFKTTHQLILGPQFQNFDKRSSFTRWKRSSSVKTLGEKSQKMIKKILFEVPLMNKKEELLPDTPEETGNHALSEKKRREKLNERFMTLRSIIPSISKIDKVSILDDTIEYLQDLQKRVQELESCRESADTETRITMMKRKKPDDEEERASANCMNSKRKGSDVNVGEDEPADIGYAGLTDNLRISSLGNEVVIELRCAWREGILLEIMDVISDLNLDSHSVQSSTGDGLLCLTVNCKHKGTKIATTGMIQEALQRVAWIC

SEQ ID NO: 5583 - protein, 524 aa, Arabidopsis thaliana
  Clone ID: ARATH-23APR03-C10484_1.p
MPLFELFRLTKAKLESAQDRNPSPPVDEVVELVWENGQISTQSQSSRSRNIPPPQANSSRAREIGNGSKTTMVDEIPMSVPSLMTGLSQDDDFVPWLNHHPSLDGYCSDFLRDVSSPVTVNEQESDMAVNQTAFPLFQRRKDGNESAPAASSSQYNGFQSHSLYGSDRARDLPSQQTNPDRFTQTQEPLITSNKPSLVNFSHFLRPATFAKTTNNNLHDTKEKSPQSPPNVFQTRVLGAKDSEDKVLNESVASATPKDNQKACLISEDSCRKDQESEKAVVCSSVGSGNSLDGPSESPSLSLKRKHSNIQDIDCHSEDVEEESGDGRKEAGPSRTGLGSKRSRSAEVHNLSERRRRDRINEKMRALQELIPNCNKVDKASMLDEAIEYLKSLQLQVQIMSMASGYYLPPAVMFPPGMGHYPAAAAAMAMGMGMPYAMGLPDLSRGGSSVNHGPQFQVSGMQQQPVAMGIPRVSGGGIFAGSSTIGNGSTRDLSGSKDQTTTNNNSNLKPIKRKQGSSDQFCGSS

SEQ ID NO: 5584 - protein, 443 aa, Arabidopsis thaliana
  Clone ID: ARATH-23APR03-C105052_1.p
MTKKPHLRSKDSSLGDEDEKLYEKKILDLESVNEALKSDVEELRSKLADVSISSSVDTLQSSREFTQKSIANKEEGVSSRSKSNMRSICSTKKYKTESSVKQFDGEVQKLKAQKVKLHCKIKLDSMQFRLLKASLEKEVLQLKKELRKSEFEKHILSALNNRQKLILQLKNTQALTALKRLKMLLQSKKISSNKKKGPSKGTSSEIQDSSNESGLLMKLNKIHSDYERQMKEMAEEIKRFSLEAGVLKAEFEGEQSSCSASCDNQINHTPMDSELKELKEEFNRLSTLVSQMEMTKSQFSETDKVQSEPVERSITSKNIDDESNSEPFQPETSEETLCKKEQSKAEVCCSCTKKSLCKTKSCKCKANGSGCGDSCGCLASKCSNREESAKPDKPMEPIDVKKPAGISHDDKGANKQPLRDIGNIQEAVKVGKLRKVQKRVGKK

SEQ ID NO: 5585 - protein, 428 aa, Arabidopsis thaliana
  unsure (1)..(428): unsure at all Xaa locations
  Clone ID: ARATH-23APR03-C10537_1.p
KNRNVGHEASSMLLIRSFTAISNXRPPSKLSLSDLSMAILKSHFFLLFPLLLLHFHTVSFAQTLFVFGDGLYDAGNKQFLSQNRVDASFPPYGVTVGQATGRCSDGSIVPDYLAKFMGIPKISPILVTTADFSHGANFAIADATVLGSPPETMTLSQQVKKFSENKNKWTNQTRSEAIYLIYIGSDDYLSYAKSNLSPSDNQKQAFVDQVITTIKAEIKVVYGSGGRKFAFQNLAPLGCLPAVKQASGNVEECVKLPSEMAALHNKKLLQLLVELSRELNGFQYSFYDFFSSIQNRVIKSKTYTFETGNAACCGTGSINGSDCSAKNVCAKPEEYIFFDGKHLTQEANLQVGHLMWGADPEVIGPNNIRELMVLPLDITVILAGIQEAMAAMRPRQSNIESLYDIKKMESEMDNHWLYQVDKAISFMI

SEQ ID NO: 5586 - protein, 960 aa, Arabidopsis thaliana
  Clone ID: ARATH-23APR03-C10560_1.p
MMRFHKACHRFSLSPLCHLSPPSPSPASSLLLLPKLSGFSTLSTRRCVRVRRFSENPLTTVMASRSASRLRSLASACSGGAEDGGGTSNGSLSASATATEDDELAIGTGYRLPPPEIRDIVDAPPVPALSFSPHRDKILFLKRRALPPLADLARPEEKLAGVRIDGYCNTRSRMSFYTGLGIHQLLPDGTLSPEKEITGIPDGGKINFVTWSNDGKHLAFSIRVDENGNSSKPVVWVADVETGVARPLFNSQDIFLNAIFESFVWIDNSTLLVSTIPSSRGEPPKKPLVPSGPKTLSNETKTVVQVRTFQDLLKDEYDADLFDYYASSQLVLASLDGTVKEVGVPAVYTSLDPSTDHKYLLVSSLHRPYSFIVPCGRFPKKVEVWTTDGRFVRQLCDLPLAEDIPIASNSVRKGMRSINWRADKPSTLWAETQDGGDAKMEVSPRDIVYMQSAEPLAGEEPEVLHKLDLRYGGISWCDDTLALVYESWYKTRRTRTWVISPGSNDVSPRILFDRSSEDVYSDPGSTMLRRTDAGTYVIAKIKKENDEGTYVLLNGSGATPQGNVPFLDLFDINTGNKERIWESDKEKYFETVVALMSDQKEGDLKMEELKILTSKESKTENTQYSLQLWPDRKVQQITNFPHPYPQLASLQKEMIRYQRKDGVQLTATLYLPPGYDPSKDGPLPCLFWSYPGEFKSKDAAGQVRGSPNEFAGIGSTSALLWLARRFAILSGPTIPIIGEGDEEANDRYVEQLVASAEAAVEEVVRRGVADRSKIAVGGHSYGAFMTANLLAHAPHLFACGIARSGAYNRTLTPFGFQNEDRTLWEATNVYVEMSPFMSANKIKKPILLIHGEEDNNPGTLTMQSDRFFNALKGHGALCRLVVLPHESHGYSARESIMHVLWETDRWLQKYCVPNTSDADTSPDQSKEGSDSADKVSTGTGGGNPEFGEHEVHSKLRRSLL

SEQ ID NO: 5587 - protein, 430 aa, Arabidopsis thaliana
  unsure (1)..(430): unsure at all Xaa locations
  Clone ID: ARATH-23APR03-C10569_1.p
SRIVKPSKGFSGIGSSIVTKKLVTLGSSKRERMVISLSLILEERFMRNIDQFLRKGMKYKNNNFNHYRSSSLEKIFKGQGXIIKKDQNIFDFQFVHLCSDSLFTTRLKTYIISHFQLRNLIRSISNHVRYFMENYSLMHWSSLLXEGXEVVNVTXSVTPTLKLPGLFSEPLSRVQVSSMAVKENLILLGGFDGELLCKCVNQPGVAFCTRLSTEENAITNTLXIYRDPSGSLRLITANNDCKIRVFDAQSFTRVSEFALDWSVNNTSVSPDGKLLAVVGDSTECLISDSHSGKVISSLRGHKDYSFASAWHPNGLILATGNQDTACRLWDIRNPSESFAVLKGNMGAIRGLKFTPEGRFLAMAEPADFVHIFDTQSGFLQSQEIDLFGEIAGISFSPDTEALYVGVADRTYGSLLEYKRRKDNHYMDSFY

SEQ ID NO: 5588 - protein, 661 aa, Arabidopsis thaliana
  Clone ID: ARATH-23APR03-C1056_1.p
MGFKLQMSWMPSLLSQKRRNGPPLGLRNLGNTCYLNSVLQCLTFTPPLANFCLTHKHSSHCDTYVDGERKRDCPFCIVEKRIARSLSVDLTTDAPNKISSCLKIFAEHFKLGRQEDAHEFLRYVIDACHNTSLRLKKLRYNGNEPFNGNSVVKEIFGGALQSQVKCLSCGAESNKADEIMDISLEILQSSSVKESLQKFFQSEILDGNNKYRCESCEKLVTARKQMSILQAPNILVIQLKRFGGIFGGKIDKAISFGEILVLSNFMSKASKDPQPEYKLFGIIVHSGFSPESGHYYAYVKDSLGRWYCCNDSFVSLSTLQEVLSEKAYILFFSRSNQRPASAKTLVTSNGTTSHEVNGCETSNPQKFIGPLNGFNMKPQAEQSFQKGNLASSKPHKFIRPKPRAEQAPLEDNLLSSKVEKAPLRPHAKVSISVNLGAKRVSPVNGRLSFHQDENIAPKANKENSVSVLPTKVNSGTERKFGTENGGNGVKENGSAPGSSNHKVALHPHERSNGSSNGGDHHKDNLHPCGSNGSQNGTAHPETERNGVSTTQSKGLCSSTKEDPCILLRKDESSRNELEAIKESLKKDALSHLRSCGWYDKVLISMHAKKRLRTEQSGGEDGSDLKRRLIEDVKSSLKSQIPEELKADLVNRIWEISKKKYS

SEQ ID NO: 5589 - protein, 593 aa, Arabidopsis thaliana
  Clone ID: ARATH-23APR03-C10585_1.p
MDDNLSGEEEDYYYSSDQESLNGIDNDESVSIPVSSRSNTVKVITKESLLAAQREDLRRVMELLSVKEHHARTLLIHYRWDVEKLFAVLVEKGKDSLFSGAGVTLLENQSCDSSVSGSSSMMSCDICVEDVPGYQLTRMDCGHSFCNNCWTGHFTVKINEGQSKRIICMAHKCNAICDEDVVRALVSKSQPDLAEKFDRFLLESYIEDNKMVKWCPSTPHCGNAIRVEDDELCEVECSCGLQFCFSCSSQAHSPCSCVMWELWRKKCFDESETVNWITVHTKPCPKCHKPVEKNGGCNLVTCLCRQSFCWLCGEATGRDHTWARISGHSCGRFQEDKEKQMERAKRDLKRYMHYHNRYKAHIDSSKLEAKLSNNISKKVSISEKRELQLKDFSWATNGLHRLFRSRRVLSYSYPFAFYMFGDELFKDEMSSEEREIKQNLFEDQQQQLEANVEKLSKFLEEPFDQFADDKVMQIRIQVINLSVAVDTLCENMYECIENDLLGSLQLGIHNITPYRSNGIERASDFYSSQNSKEAVGKSSDCGWTSRLDQALESGKSEDTSCSSGKRARIDESYRNSQTTLLDLNLPAEAIERK

SEQ ID NO: 5590 - protein, 80 aa, Arabidopsis thaliana
  Clone ID: ARATH-23APR03-C106113_1.p
MKKTGIIAASISVAASATAISAGSTNTSVSFSSPESNLSRQEAKEKQRKKKGSSEDGGDEKFAPRFDGLRFIETLVTAHR

SEQ ID NO: 5591 - protein, 666 aa, Arabidopsis thaliana
  Clone ID: ARATH-23APR03-C10611_1.p
MLSLSLSNHVPPLTLLSHERRILKLQSRSSILFHQLFHTKFLLLSNSSSLSSSHGVVAISASPSSVAVPELEDEDHFDDELRRLLALVPEEIRQTLKEHPEISELIEIVLDLGRKPLARFPSGDFVISDDAVRVKDLEFAVSQVGEFTNDNRAGISRTLHRISAIRNRKGEIIGLTCRVGRSVRGSANLLRDLVQDGNSLLLIGPPGVGKTTMIREVARMLGNDYEKRVMIVDTSNEIGGDGDIPHPGIGNARRMQVPNSDTQHKVLIEAVENHMPQVIVIDEIGTKLEAIAASTIAERGIQLVATAHGATIENLIKNPSLDLLVGGVQSVTLGDEEATRRGGQKTVLERKGPSTFNCGAEIVSKTEVRVHRSLEATVDAILAGRLPNVEIRKIKSHGVEVIMEKEPFIDEKTVDKKHEEETLDVSKLTKEETVSEVLQTKEITEAESSEKDTLMYLYVYGIAESTVLQAIKQLEMETAVELTDDISEAEALLALQAKIRKNPRIKSFATSHGIPVYVTKTNSGIQVAKAIRALLTDYEDGLGEFGSEDRLKLSEKMDALEEARLAIERIVIPKKETTDLLPRPPRIVSLQGKLVRKYNLRSERKWRGDEMYLRILPYSTEEDRDDREDEGEFGEANGEELDELGFATGESNDSPSGIDRLPLLPD

SEQ ID NO: 5592 - protein, 1222 aa, Arabidopsis thaliana
  unsure (1)..(1222): unsure at all Xaa locations
  Clone ID: ARATH-23APR03-C10625_1.p
MSDPLKMAAETEEIKPVPAAMGEKKDVVLCKKIVETLGGGGDQRVLLVGEAGIGKTRMAQMVDKEASKDVLCYQTLWLHLNRKFKVNDNYIKEKKFEDEWSLYENIASQLSLYSDFEETEVGERDEDEEEEKKVEDLLKDLKPKIEKYLLEKKEAVVKKLEDDKKKKEKEAAEKLEAEKKLVDPAAKKAKDHGNKNPTDAAKEKTTQVVAGGEDKAQTSSERKPYLLLILDDEGMTSEYEVMVHLGLEDFLKDHTPRKILITRRQETEEATKSGEHAEGEANDSQSGEKKEDTDGEDEIRSADKEEPESQARVKTEEKHEKVVPPTIDDLWGSTNTYGEITFQTTNESQDLLESFNLKEAEALFTSSMFFKDMPNFFFDPVPGTDEKLLNHMLKKSKSLPAAINVLAKSLEYTVKSKSYKLNKDEEERLLKEKIEMVLSAERGNPSDQESSSESPKKASGENPILLLAYKLFKTDGPLKDTILDCFWHSLDFFEHCGCVYYRDLITQWILEGYFDPVRSVEKAYQDGHSIFMELIDRGMLKIQENNVVVPEMAMRNVIDPRRGGHLGKSRLGFSRVYGGNKRKGIGKITQLDDMIKTVQAKKGDKITTILVSGDRLRRVTPKKFFKNLKELEVLGLFEPTVKPFVPSFSDQLKLLRVLIIRDCDLLKSIEELKALTKLNTLEVSGASSLSKISEKFFESFPELRSLHLSGLKIESSPPSISGLKELHCLIIKDCPLLQDLPNIQELVNLEVVDVSGASGLRTCFDNADGAKKNKSKNKNFYLLTKLQHLDFSGSQIERLPIFQDSAVAAKLHSLTRLLLRNCSKLRRLPSLKPLSGLQILDLSGTTSLVEMLEVCFEDKLELKTLNLSGTNLSELATTIEDLSSLNELLLRDCINLDAIPNIEKLENLEVIDVSGSAKLAKIEGSFEKMFYLRVVDLSGTQVETPELPADTKIHCLKRFTRADGKCFERDTWREIKEDIERDRSENASSSDAVVISQEITEKKPVEIREVESNAPRASDCTEKVDVNKERLLKVPIDRALYQKALTSLVDSKIPQEEVLEINETNKLDEEALASAEFVSFVDCTPERVKSIFEKAKLVKGCWLRMCFDIKDPFDGVDEENLKSLETLSITNLXSLETISFIAKLENLKNLSLDCCPKIKTIFPEMPASLPVLNLKHCENLEKVVVGVEVSTHTNLDLKVENCPKFGDYVMVDHSDVPPPHEC

SEQ ID NO: 5593 - protein, 402 aa, Arabidopsis thaliana
  Clone ID: ARATH-23APR03-C10635_1.p
MSNHMSIMKFLNQILCLSLILSISMTTLSFAQTCSKYKFSSNNVFDSCNDLPFLDSFLHYTYESSTGSLHIAYRHTKLTSGKWVAWAVNPTSTGMVGAQAIVAYPQSDGTVRVYTSPIRSYQTSLLEGDLSFNVSGLSATYQNNEIVVLASLKLAQDLGNGGTINTVWQDGSMSGNSLLPHPTSGNNVRSVSTLNLVSGVSAAAGGAGGSSKLRKRNIHGILNGVSWGIMMPLGAIIARYLRVAKSADPAWFYIHVFCQASAYIIGVAGWATGLKLGGDSPGIQYSTHRAIGIALFSLATVQVFAMFLRPKPEHKHRLYWNIYHHTIGYTIIILGVVNVFKGLGILSPKKQWKNAYIGIIVVLAIVATLLEAFTWYVVIKRRKLEAKTAQHGASNGTRSQYA

SEQ ID NO: 5594 - protein, 473 aa, Arabidopsis thaliana
  Clone ID: ARATH-23APR03-C10646_1.p
MVEARSLKKPIQLGNKEDQNPRKFYSRFIFKALILTVLCAVVPVFLSQTPELANQTRLLELLHLVFVGIAVSYGLFSRRNYDGGGGGGTSNSDHNKADHSNNNSHSYVPKILEVSSVFNVGHESESEPSDDSSGDQRKFQTWKNKYHMKIPEVETRFVDRVSSENREKPLLLPVRSLNYSRVSDSSGDNSGRWEKVRSKRELLKTLGDDNSDVLPSPIPWRSRSSSSSSSSSKEVESLPSVKNLTTVESQPLIKNLTPSSSFSSPRKSNPIPNLASEFHPSPPPPPPPPPPLPAFYNSSSRKDHPGIYRVERRESSVHKTKFAGGEFHPPPPPPPPPPVEYYKSPPTKFRLSNERRKSSEQKMKRNAPKKVWWSDPIVESKEQDTEKNDQRSNLGSKAVEESENGEQRRGENEIHDEVEKKIVEEEGVSEINNGSDVDKKADEFIAKFREQIRLQRIESIKRSTNKISANSSR

SEQ ID NO: 5595 - protein, 98 aa, Arabidopsis thaliana
  Clone ID: ARATH-23APR03-C10656_1.p
MAISKALIASLLISLLVLQLVQADVENSQKKNGYAKKIDCGSACVARCRLSRRPRLCHRACGTCCYRCNCVPPGTYGNYDKCQCYASLTTHGGRRKCP

SEQ ID NO: 5596 - protein, 591 aa, Arabidopsis thaliana
  Clone ID: ARATH-23APR03-C1066_1.p
MAAATSSIAPSLSCPSPSSSSKTLWSSKARTLALPNIGFLSSSSKSLRSLTATVAGNGATGSSLAARMVSSSAVKAPVSLDFETSVFKKEKVSLAGYEEYIVRGGRDLFKHLPDAFKGIKQIGVIGWGSQGPAQAQNLRDSLVEAKSDIVVKIGLRKGSRSFEEARAAGFTEESGTLGDIWETIAGSDLVLLLISDAAQADNYEKIFSHMKPNSILGLSHGFLLGHLQSSGLDFPKNISVVAVCPKGMGPSVRRLYVQGKEINGAGINASFAVHQDVDGRAADVALGWSVALGSPFTFATTLEQEYRSDIFGERGILLGAVHGIVESLFRRYTENGMSEDLAYKNTVECITGTISRTISTQGMLAVYNSLSEEGKKDFETAYSASFYPCMEILYECYEDVQSGSEIRSVVLAGRRFYEKEGLPAFPMGNIDQTRMWKVGERVRKSRPAGDLGPLYPFTAGVYVALMMAQIEILRKKGHSYSEIINESVIESVDSLNPFMHARGVSFMVDNCSTTARLGSRKWAPRFDYILTQQALVAVDSGAAINRDLISNFFSDPVHGAIEVCAQLRPTVDISVPADADFVRPELRQSSN

SEQ ID NO: 5597 - protein, 329 aa, Arabidopsis thaliana
  Clone ID: ARATH-23APR03-C1069_1.p
MAATPMEGKWVQLKQKGTGPGARSSHAIALVGNKMYAFGGEFQPRVPVDNQLYVFDLETQTWSIQEASGDAPPPRVGVAMAAVGPIIYFFGGRDSTHQELNELYCFNTLTNQWKLLSSGETGPQNRSYHSITADSQNVYVFGGCGVDGRLNDLWAYNVVDQKWIKFPSPGEACRGRGGPGLEVVQGKIWVVYGFAGEEADDVHCFDIAKGEWKEVETKGEKPSARSVFSTAVVGKQILISGGEIDPSDLGHMGAGCFTGDAYGLDTETLEWRKWEDGVGSVEHPGPRGWCAFAAGSRDGKQGLLVYGGNSPSNDRLDDIFFFTPNTLLK

SEQ ID NO: 5598 - protein, 1121 aa, Arabidopsis thaliana
  Clone ID: ARATH-23APR03-C10709_1.p
MPMGRFLSLVRGDSAESPREITSQSNIIGDTGSNGWLIRFFDSAFFCEWIAVSYLYKHPHAGVRDYLCNRMYTLPLSGIESYLFQICYMMVHKPSPSLDKFVIDICGKSLKIALKVHWFLLAELEDADDNEGISRIQEKCQIAATLMGEWSPLMRPQNEVSTPGSKNQVLNRLLSSKQKLFSLKLSPPTQKSLSFSPSPGTNVQDDGSQLPAEDNKIFKKLIPSPKVRDALMFRKSADKDDEESEKEGFFKRLLRDSKGEGDEPIPNSEGFFKRLLKDNKSEDEDITNSSEGFFKRLLSSKGESEELTSSSDGLFKRLLRDNKGDEEELGANSDSFFKRLLRESKNEDEESNPNSEGFFKKLFRDSKPEDDKVPKEVDDEDKDGFLKKLFREKNDDKRHGSEKNEANGTVYADKKSGEEDEREGFFKKFFKEKSDDKKDIVKVDDGNESEGDESPEFSLFKRLFRIHPEDAKPTSENENSSNGLVESSPGTENFFRKLFRDRDQSVEDSELFGSKKHKEKRPGSPKQRDDTPSGKPPLPNNTASQFRKGAYHESLEFVQALCETSYGLVDIFPIEDRKIGLRESLAEINFHLSEAEITGGICFPMGRGVFRVVHIPEDECILLNSREKAPYMISVEVLKAETPSAKESSNSQKLSKGGIPLANGDAFLQKPPPWAYPLWTTQEVYRNSADRMSLSTAQAIDQAMTPKSEVKVKLVNVSLSVEDRTSALESFGDPIDDVLGEAPRTGLNNDLEWVRVVVTADPGLRMESIPDPSVPRKKEHRRVPSTVAMEEVRAAAAKGEAPPGLPLKGAGQDSSDAQPRANGGMLKEGDALSGELWEGKRDRIRKASIYGKLPGWDLRSIIVKSGDDCRQEHLAVQLISHFYDIFQEAGLPLWLRPYEVLVTSSYTALIETIPDTASIHSIKSRYPNITSLRDFFVAKYKENSPSFKLAQRNFVESMAGYSLVCYLLQVKDRHNGNLLLDEEGHIIHIDFGFMLSNSPGGVNFESAPFKLTRELLEVMDSDADGVPSEFFDYFKVLCIQGFLTCRKHAERIILLVEMLQDSGFPCFKGGPRTIQNLRKRFHLSLTEEQCVSLVLSLISSSLDAWRTRQYDYYQRVLNGIL

SEQ ID NO: 5599 - protein, 335 aa, Arabidopsis thaliana
  unsure (1)..(335): unsure at all Xaa locations
  Clone ID: ARATH-23APR03-C107189_1.p
MAIHSYFFVFTFFLFLSLLSHCSSTTTHQDVLHPPTLFPTIPTSPPDXAAFPPVPITPPNPATTAPTVPPVTTIPPPTLTPPPVITIPPPTLTPPVTNPVTNPVTQYPPTQPSGTVPVPVPVVAPPLLPAPPSASGASGCVAKPGASQVSLQQALDYACGIADCSQLQQGGNCYSPISLQSHASFAFNSYYQKNPSPQSCDFGGAASLVNTNPSTGXSCIYHTGSSTXSTPMTXAGTTTPTPSTQTVNQPPVTSTPIIPTGGGIIGVGTPPAIFNPANPTSNTLHNPSSGGLAGGYGFDAPPNETNPPSSDSTHLKIHFGHAMVATLILHAVLFH

SEQ ID NO: 5600 - protein, 492 aa, Arabidopsis thaliana
  Clone ID: ARATH-23APR03-C1071_1.p
MAVDSPAGVIIIAAVLLLAATTLACGSDAVLKLERLIPPNHELGLTELRAFDSARHGRLLQSPVGGVVNFPVDGASDPFLVGLYYTKVKLGTPPREFNVQIDTGSDVLWVSCTSCNGCPKTSELQIQLSFFDPGVSSSASLVSCSDRRCYSNFQTESGCSPNNLCSYSFKYGDGSGTSGYYISDFMSFDTVITSTLAINSSAPFVFGCSNLQSGDLQRPRRAVDGIFGLGQGSLSVISQLAVQGLAPRVFSHCLKGDKSGGGIMVLGQIKRPDTVYTPLVPSQPHYNVNLQSIAVNGQILPIDPSVFTIATGDGTIIDTGTTLAYLPDEAYSPFIQAVANAVSQYGRPITYESYQCFEITAGDVDVFPQVSLSFAGGASMVLGPRAYLQIFSSSGSSIWCIGFQRMSHRRITILGDLVLKDKVVVYDLVRQRIGWAEYDCSLEVNVSASRGGRSKDVINTGQWRESGSESFNRSYYLLQLVVFLVHLFARFL

SEQ ID NO: 5601 - protein, 510 aa, Arabidopsis thaliana
  Clone ID: ARATH-23APR03-C10764_1.p
MATSDQDRRHRVTRNRPPIARPSTSSSRPVVSPPRSKVSKRVLLRVASVACGIQFGWALQLSLLTPYVQELGIPHAWASVIWLCGPLSGLFVQPLVGHSSDRCTSKYGRRRPFIVAGAVAISISVMVIGHAADIGWAFGDREGKIKPRAIVAFVLGFWILDVANNMTQGPCRALLADLTENDNRRTRVANGYFSLFMAVGNVLGYATGSYNGWYKIFTFTKTVACNVECANLKSAFYIDVVFIAITTILSVSAAHEVPLASLASEAHGQTSGTDEAFLSEIFGTFRYFPGNVWIILLVTALTWIGWFPFILFDTDWMGREIYGGEPNIGTSYSAGVSMGALGLMLNSVFLGITSVLMEKLCRKWGAGFVWGISNILMAICFLGMIITSFVASHLGYIGHEQPPASIVFAAVLIFTILGIPLAITYSVPYALISIRIESLGLGQGLSLGVLNLAIVIPQVIVSVGSGPWDQLFGGGNSPALAVGAATGFIGGIVAILALPRTRIQKPIPLP

SEQ ID NO: 5602 - protein, 424 aa, Arabidopsis thaliana
  Clone ID: ARATH-23APR03-C10775_1.p
MSWPTDSELNSIKEAVAQMSGRDKGEVRVVVAPYRICPLGAHIDHQGGTVSAMTINKGILLGFVPSGDTQVQLRSAQFEGEVCFRVDEIQHPIGLANKNGASTPSPSKEKSIWGTYARGAVYALQSSKKNLKQGIIGYLSGSNGLDSSGLSSSAAVGVAYLLALENANELTVSPTENIEYDRLIENGYLGLRNGILDQSAILLSNYGCLTYMDCKTLDHELVQAPELEKPFRILLAFSGLRQALTTNPGYNLRVSECQEAAKVLLTASGNSELEPTLCNVEHAVYEAHKHELKPVLAKRAEHYFSENMRVIKGREAWASGNLEEFGKLISASGLSSIENYECGAEPLIQLYKILLKAPGVYGARFSGAGFRGCCLAFVDAEKAEAAASYVKDEYEKAQPEFANNLNGGKPVLICEAGDAARVLL

SEQ ID NO: 5603 - protein, 330 aa, Arabidopsis thaliana
  Clone ID: ARATH-23APR03-C10793_1.p
MPKTHYHKMAFSKGLIFAMIFAVLAIVKPSEAALDAHYYDQSCPAAEKIILETVRNATLYDPKVPARLLRMFFHDCFIRGCDASILLDSTRSNQAEKDGPPNISVRSFYVIEDAKRKLEKACPRTVSCADVIAIAARDVVTLSGGPYWSVLKGRKDGTISRANETRNLPPPTFNVSQLIQSFAARGLSVKDMVTLSGGHTIGFSHCSSFESRLQNFSKFHDIDPSMNYAFAQTLKKKCPRTSNRGKNAGTVLDSTSSVFDNVYYKQILSGKGVFGSDQALLGDSRTKWIVETFAQDQKAFFREFAASMVKLGNFGVKETGQVRVNTRFVN

SEQ ID NO: 5604 - protein, 198 aa, Arabidopsis thaliana
  Clone ID: ARATH-23APR03-C108044_1.p
MGTHVAPWKQLLFGAIEANSHLSHSSYVQLATIGLNGRPSNRTVVFRGFEENSDRIQINTDLRSRKIEELKHCPFSEMCWYFSDTWEQFRINGRIEVIDASNPDQTKLQQREKAWFANSLRSRLIYVCPTPGSPCNSEQSSQQVKLDPSSGPVPEYCLLLLEPEKVDYLNLKTNQRLFFSSMATGTGEKCWTSEKVNP

SEQ ID NO: 5605 - protein, 301 aa, Arabidopsis thaliana
  Clone ID: ARATH-23APR03-C108082_1.p
MAFNHRKMLLSCLQFKDLRFCFRQYPPPPPPPPPPRELSLLLPTSICVVGSIILFLFLVFFLYLHITQQRRISAASVTPGDTNQQEDEDETEERDFSDFHHVWQIPTVGLHRSAINSITVVGFKKGEGIIDGTECSVCLNEFEEDESLRLLPKCSHAFHLNCIDTWLLSHKNCPLCRAPVLLITEPPHQETETNHQPDSESSNDLRGRQDSSRSRRNHNIFLPRAQSDLANYCGSGRVENVRRSFSIGGSLSLCDGINNATRSGRQFYTSFSANLFSSSRRVRNEQPIPQNQMPSVTGNTS

SEQ ID NO: 5606 - protein, 387 aa, Arabidopsis thaliana
  Clone ID: ARATH-23APR03-C1080_1.p
MTVSEAYSPPLFSIAPMMGWTDNHYRTLARLITKHAWLYTEMLAAETIVYQEDNLDSFLAFSPDQHPIVLQIGGRNLENLAKATRLANAYAYDEINFNCGCPSPKVSGRGCFGALLMLDPKFVGEAMSVIAANTNAAVTVKCRIGVDDHDSYNELCDFIHIVSSLSPTKHFIIHSRKALLSGLSPSDNRRIPPLKYEFFFALLRDFPYLKFTINGGINSVVEADAALRSGAHGVMLGRAVYYNPWHILGHVDTVIYGSPSSGITRRQVLEKYKVYGESVLGKYGKGRPNLRDIVRPLINLFHSESGNGQWKRRTDAALLHCTTLQSFLDEVLPAIPDYVLDSSAVKEATGREDLFADVQRLLPPPYEKESFKALERIPTRPVILDEE

SEQ ID NO: 5607 - protein, 439 aa, Arabidopsis thaliana
  Clone ID: ARATH-23APR03-C10822_1.p
MKREEMAETEILEPYQLSFSDLLLSSRNRSQWISKNVMDALGPTGPGLLCITGVLGSAFLRRKLLPMARKLALLDPDKRKLILMEHHLGSDVPLKNPERDVSSFAMQLNYERTTYKSSLGKLWFDEAGSKLDLQEDDDDAFTNLGGAFKELGFCMRELGLSIARLCDREIGGGLLEESLLDSCTAKGRLIHYHSAADKYALRESQRRNQSGNRVSSKRRVQNAAEQELNRRNGAGLSGSHFNLWQQWHYDYGIFTVLTDPMFLSPYSYQEFSLMSSHSYLQIYHPSKNKFYMVKTPQDSFLVQIGESADILSKGKLRSTLHCVCKPEKLDHVSRETFVVFLHPKWSQTFSVSEYTMEHLRSDEVVPRPDLQNIVPPLSSRLRDGMTFAEFSRETTKQYYGGNVVEGKRNEPRGLVVKEIRLKGELGFVMCTSMLEPKQQ

SEQ ID NO: 5608 - protein, 368 aa, Arabidopsis thaliana
  unsure (1)..(368): unsure at all Xaa locations
  Clone ID: ARATH-23APR03-C10833_1.p
MCAKKEEEEEEEEDSSEAMNNIQNYQNDLFFHQLISHHHHHHHDPSQSETLGASGNVGSGFTIFSQDSVSPIWSLPPPTSIQPPFDQFPPPSSSPASFYGSFFNRSRAHHQGLQFGYEGFGGATSAAHHHHEQLRILSEALGPVVQAGSGPFGLQAELGKMTAQEIMDAKALAASKSHSEAERRRRERINNHLAKLRSILPNTTKTDKASLLAEVIQHVKELKRETSVISETNLVPTESDELTVAFTEEEETGDGRFVIKASLCCEDRSDLLPDMIKTLKAMRLKTLKAEITTVGGRVKNVLFVTGEESSGEEVEEEYCIGTIEEAXKAVMEKSNVEESSSSGNAKRQRMSSHNTITIVEQQQQYNQR

SEQ ID NO: 5609 - protein, 261 aa, Arabidopsis thaliana
  Clone ID: ARATH-23APR03-C10852_1.p
MKKWLAIAATVAIIAIIVRQGTTQYGWNKEAALEKLKEWSDRLGIWAIPTYVAVHTITLALCLPHAVFFEAGASMLFGFLPALLCVFSAKVLAASFSFWIGRFVFKSSTRATGWAHSNKYFNILSRGVERDGWKFVLLARFSPIPSYVINYALAATEVRFVADFLFPTVIGCLPMILQNASVGSLAGMAVASVAGKQKSQVWGYVFPVLGILSSVLISLRIKKYSAGITEASSDTSANNSSLASSETANPAYGTDGSKKSE

SEQ ID NO: 5610 - protein, 1036 aa, Arabidopsis thaliana
  Clone ID: ARATH-23APR03-C108532_1.p
RYSLSTFPVPGLCWGPCMGCGQVGAAHGPKDCGLHSNSKAIGNSSVIESKSKFNSLTIIDHEKEKKTDIADNAIEEKVGVNCENDDQTATTFLKKARGRPMGASNVRSKSRKLVSPEQVGNNRSKEKLNKPSMDISSWKEKQNVDQAVTTFGSSEIAGVVEDTPPKATKNHKGIRGLMECDNGSSESINLAMSGLQRRKSRKVRLLSELLGNTKTSGGSNIRKEESALKKESVRGRKRKLLPENNYVSRILSTMGATSENASKSCDSDQGNSESTDSGFDRTPFKGKQRNRRFQVVDEFVPSLPCETSQEGIKEHDADPSKRSTPAHSLFTGNDSVPCPPGTQRTERKLSLPKKKTKKPVIDNGKSTVISFSNGIDGSQVNSHTGPSMNTVSQTRDLLNGKRVGGLFDNRLASDGYFRKYLSQVNDKPITSLHLQDNDYVRSRDAEPNCLRDFSSSSKSSSGGWLRTGVDIVDFRNNNHNTNRSSFSNLKLRYPPSSTEVADLSRVLQKDASGADRKGKTVMVQEHHGAPRSQSHDRKETTTEEQNNDDIPMEIVELMAKNQYERCLPDKEEDVSNKQPSQETAHKSKNALLIDLNETYDNGISLEDNNTSRPPKPCSSNARREEHFPMGRQQNSHDFFPISQPYVPSPFGIFPPTQENRASSIRFSGHNCQWLGNLPTVGNQNPSPSSFRVLRACDTCQSVPNQYREASHPIWPSSMIPPQSQYKPVSLNINQSTNPGTLSQASNNENTWNLNFVAANGKQKCGPNPEFSFGCKHAAGVSSSSSRPIDNFSSESSIPALHLLSLLDPRLRSTTPADQHGNTKFTKRHFPPANQSKEFIELQTGDSSKSAYSTKQIPFDLYSKRFTQEPSRKSFPITPPIGTSSLSFQNASWSPHHQEKKTKRKDTFAPVYNTHEKPVFASSNDQAKFQLLGASNSMMLPLKFHMTDKEKKQKRKAESCNNNASAGPVKNSSGPIVCSVNRNPADFTIPEPGNVYMLTGEHLKVRKRTTFKKKPAVCKQDAMKQTKKPVCPPTQNA

SEQ ID NO: 5611 - protein, 497 aa, Arabidopsis thaliana
  Clone ID: ARATH-23APR03-C108750_1.p
MRWNKKNVISLVSKSHHLPAPITPPLPEIYRIPNPPPKLPEISIPPTLTLSPSPKHSNFVNFLENNLPHHQTLTPQTLLGFLRSKIRNHPLYAHYDFAVFNWAATLDTFRHDHDSFLWMSRSLAATHRFDDLYRLLSFVAANPCPCSSGIFSCPELEPIFRSAIDAYCRARKMDYALLAFDTMKRLIDGKPNVGVYNTVVNGYVKSGDMDKALRFYQRMGKERAKPDVCTFNILINGYCRSSKFDLALDLFREMKEKGCEPNVVSFNTLIRGFLSSGKIEEGVKMAYEMIELGCRFSEATCEILVDGLCREGRVDDACGLVLDLLNKRVLPSEFDYGSLVEKLCGENKAVRAMEMMEELWKKGQTPCFIACTTLVEGLRKSGRTEKASGFMEKMMNAGILPDSVTFNLLLRDLCSSDHSTDANRLRLLASSKGYEPDETTYHVLVSGFTKEGRRKEGEVLVNEMLDKDMLPDIFTYNRLMDGLSCTGKFSRKQVRML

SEQ ID NO: 5612 - protein, 196 aa, Arabidopsis thaliana
  Clone ID: ARATH-23APR03-C10894_1.p
MASPEEMGDDASEIPSPPKNTYKDPDGGRQRFLLELEFIQCLANPTYIHYLAQNRYFEDEAFIGYLKYLQYWQRPEYIKFIMYPHCLYFLELLQNPNFRTAMAHPANKELAHRQQFYYWKNYRNNRLKHILPRPLPEPVPPQPPVAPSTSLPPAPSATAALSPALSPMQYNNMLSKNDTRNMGATGIDRRKRKKGI

SEQ ID NO: 5613 - protein, 538 aa, Arabidopsis thaliana
  Clone ID: ARATH-23APR03-C1089_1.p
MADEKNGGRLSDASDYSSEDEGTEDYRRGGYHTVRVGDTFKNGSYVIQSKLGWGHFSTVWLAWDTLNSRYVALKIQKSAQHYTEAAMDEIKILKQIAEGDAEDKKCVVKLLDHFKHAGPNGQHVCMVFEYLGDNLLSVIKYSDYRGVPLHMVKEICFHILVGLDYLHRELSIIHTDIKPENILLCSTIDPEADARKSGIPLVLPTVKDKAVPERPVEKEKPKSYTYSADLTKNQKKKIRKKAKKVEGSEENERDSSNSEARPNGNATVERLEESSERVKDAENVSQKSRGNRRGSRSTRQKLLADVDRKCKLVDFGNACWTYKQFTSDIQTRQYRCPEVVLGSKYSTSADMWSFACICFELATGDVLFDPHSGENFERDEDHLALMMELLGMMPRKIALGGRHSRDFFNRQGELRHIRRLRFWPLSKVLTDKYDFSEEDAIAMQDFITPILQFVPEKRPTAAQCLTHPWLNPVPKSLKPSSSPQNPKEEEEEASDEDKDKEKVEREAMEAGVGNIAIDGSERKTSAREGRQSARDLRT

SEQ ID NO: 5614 - protein, 774 aa, Arabidopsis thaliana
  unsure (1)..(774): unsure at all Xaa locations
  Clone ID: ARATH-23APR03-C109267_1.p
MALIDVAISCLNSIREIEEDVKDAIVYIDAGCTESFQFVGAFPLFLELGARAVCSLENMTSLDAVADWNSKSDCAKRIVIMTSRLLNDAHRYMLRCLSTHEGPDAYREYETLLVQDYNEHTKKSDKISKDKGVSKFSSALESLTMEPIESENVDISSGGAQGSVAEASLSRQHEDSLSFGLPPISTGSMSDTDDVPPGATLTAHFLYQLALKMELKLEIFSLGDQSKNVGKILTDMSSVYDVARRKRSAGLLLVDRTLDLITPCCHGDSLFDRIFSSLPRAERFSSQAQLKQGVPSINRPSLDVQVPLGELLNEEPSKIRDSGLPEGIEAFLRGWDSYTSAPQNVGLFNECDKKSTTNWTELLNGSLVATECFRGTPYLEAMIDRKTKDGSVLVKKWLQEALRRENISVNVRARPGYATKPELQAMIKALSQSQSSLLKNKGIIQLGAATAAALDESQSAKWDTFSSAEMMLNVSAGDTSQGLAAQISDLINKSAVAELQAKKNEKPDSSSRGLLSFRDALLLTIVGYILAGENFPTPGSGGRSRREAGEXLKEAIVDAVLENPSAGNLKFLNGLTEELEGRLNRLKSEETKEIPSDDQLDIDALDDDPWGKWGDEEEEEVDNSKADESYDDMQLKLDLRDRVDSLFRFLHKLSSLRTRNLPLREGSLASESSFPGEPSGNKGLVYRLITKVLSRQEXPGGNGRLGLGQAKPSLADQGVVLVLVIGGINGREVLEAQEAVSASGRPDINLVSGGTTLLTPDDMFELLLGQFSHL

SEQ ID NO: 5615 - protein, 351 aa, Arabidopsis thaliana
  Clone ID: ARATH-23APR03-C10949_1.p
MQRNRVLAFLLLAAQLLVKIPETCAKFPALIVFGDSTVDSGNNNQISTVLKSNFQPYGRDYFDGKATGRFSNGRIAPDFISEGLGLKNAVPAYLDPAYNIADFATGVCFASAGTGLDNATSAVLSVMPLWKEVEYYKEYQTRLRSYLGEEKANEIISESLYLISIGTNDFLENYYLLPRKLRKYSVNEYQYFLIGIAADFVTDIYRLGARKMSLSGLSPFGCLPLERTTQLFYGSKCIEEYNIVARDFNIKMEEKVFQLNRDLNGIQLVFSNPYDLVSEIIYHPEAFGFENVRSACCGTGYYEMSYLCDKMNPFTCSDASKYVFWDSFHPTEKTNAIVANHVLKYDLSRFQ

SEQ ID NO: 5616 - protein, 666 aa, Arabidopsis thaliana
  unsure (1)..(666): unsure at all Xaa locations
  Clone ID: ARATH-23APR03-C109838_1.p
MACMKLGSKSDAFQRQGQAWFCTTGLPSDIVVEVGEMSFHLHKFPLLSRSGVMERRIAEASKEGDDKCLIEISDLPGGDKTFELVAKFCYGVKLELTASNVVYLRCAAEHLEMTEEHGEGNLISQTETFFNQVVLKSWKDSIKALHSCDEVLEYADELNITKKCIESLAMRASTDPNLFGWPVVEHGGPMQSPGGSVLWNGISTGARPKHTSSDWWYEDASMLSFPLFKRLITVMESRGIREDIIAGSLTYYTRKHLPGLKRRRGGPESSGRFSTPLGSGNVLSEEEQKNLLEEIQELLRMQTRLAPPPLFVDMLRIAKILKASPDCIANLEKRIGMQLDQAALEDLVMPSFSHTMETLYDVDSVQRILDHFLGTDQIMPGGVGSPCSSVDDGNLIGSPQSITPMTAVAKLIDGYLAEVAPDVNLKLPKFQALAASIPEYARLLDDGLYRAIDIYLKHHPWLAETERENLCRLLDCQKLSLEACTHAAQNERLPLRIIVQVLFFEQLQLRTSVAGCFLVSDNLDGGSRQLRSGGYVGGPNEGXGGGGGGWATAVRENQVLKVGMDSMRMRVCELEKECSNMRQEIEKLGKTTKGGGSASNGVGSKTWENVSKKLGFGFKLKSHQMCSAQEGSVSKSNNENVKIEKLKDVKERRGKHKKASSISSER

SEQ ID NO: 5617 - protein, 204 aa, Arabidopsis thaliana
  unsure (1)..(204): unsure at all Xaa locations
  Clone ID: ARATH-23APR03-C10983_1.p
METPIDAPNKDEHECPRWKKSTVVFVLGGPGSGKGTQCANVVKHFSYTHFSAGDLLRAEIKSGSEFGAMIQSMIAEGRIVPSEITVKLLCKAMEESGNDKFLIDGFPRNEENRNVFENVARIEPAFVLFFDCPEEELERRIMSRNQGREDDNIETIKKRFKVFVESTLPIISYYESKGKLRKINAAKSSEXVFEAVRVLFASET

SEQ ID NO: 5618 - protein, 171 aa, Arabidopsis thaliana
  Clone ID: ARATH-23APR03-C109851_1.p
MASGGSKSAAFMLLMLNLGLYFVITIIASWAVNHGIERTRESASTLSLPAKIFPIYFPVGNMATGFFVIFTLIAGVVGMATSLTGIINVLQWDSPNLHSAAASSLISWSLTLLAMGLACKEINIGWTEANLRTLEVLTIIVSATQLLCTGAIHAGVGETVASGERPHLGRV

SEQ ID NO: 5619 - protein, 743 aa, Arabidopsis thaliana
  Clone ID: ARATH-23APR03-C10985_1.p
MASPNPYTKRRSPPNVVVPPQPRYKSIGGGGFFCKSVLFALFLLALPLFPSQAPDFVGETVLTKFWELIHLLFVGIAVAYGLFSRRNVESAVDLRMTRVDESSLSYVSRIFQVSSVFDEEFDDNSCEFVDVRSDESVSARASVVGKSESFVVESGELEESSEFGETNEVRAWNSQYFQGKSKVVVARPAYGLDGHVVHQPLGLPIRRLRSSLRDNAALQDKSFADSCDGAVNAEAESLLADNFFDEVLAAPASPVPWQARPEMMGIGDNYPSNFQPISVDETLKSISSRSTGSSSSQTSYASQNQNRFSPSRSVSAESLNSNVEELVKEKSRQSSSRSSSPSLPPSPSLSPSPPSPELVPNDTRRRSPELVTDDTPRRASHSRHYSDGSLLEEDVRRGFENELEGSKVRGRKAEFFSKKERGSKSLNLAAESSRRGNKSRRSYPPESISSPVGGADDSTTRRQDLQQKSNCHLLEENIRKGVEADHNNLRVKKGRSHDSLELTAEDSAKDEKVSESFPALDVVFQPTNAKASRRAMRSSRGGRDTLPEKDVVTRKLEDDTVDSDKSRKKDLPGKDKEMKLDGPRIEPRSWRASSNVSLRGKSVRTIRSDRHGKDVKTDGDSSEDRAEAKVESRGRTKSRRPRQEELSIVLHQEKSSETRAKSEPEEVAMEEPQAEQQPEVTFEEEEEAAWESQSNASHDHNEVDRKAGEFIAKFREQIRLQKLISGEQPRGGGTGIFRNSQFR

SEQ ID NO: 5620 - protein, 191 aa, Arabidopsis thaliana
  Clone ID: ARATH-23APR03-C109880_1.p
MKAVVSKLYCSSMEEVMVVRRRPHVVNGGGFVVTDYKEKIVFKIDGCGVLGTKGELVLRDSDGNDLLLIHKKGGVVQALSIHNKWKGYSYDYQGSPKPVFTLRDPKHSCFSITSSIRISVGPGNCYFDVKGYFPDRDCSIVDSTGNVIAQVKEWIGSRDIYKVVTKPSVDKAFVFGVIAVLDYIYGESTSC

SEQ ID NO: 5621 - protein, 147 aa, Arabidopsis thaliana
  Clone ID: ARATH-23APR03-C10995_1.p
MLLGKRQRPPIKRTTSLSEIKFDLNQPSEQEPSDHQIQLVNVDEHRQVHQRLLDQRLLAMVSPRGTQRRHSSDYSEDFLRSCSLCKRLLVHGRDIYMYRGDRAFCSLECRQQQITVDERKEKKKGSVRSTIVVATGTTTGERVSAAV

SEQ ID NO: 5622 - protein, 322 aa, Arabidopsis thaliana
  Clone ID: ARATH-23APR03-C11000_1.p
MDGEELTEQETALYDRQIRVWGANAQRRLTKAHILVSGIKGTVAEFCKNIVLAGVGSVTLMDDRLANMEALNANFLIPPDENVYSGKTVAEICSDSLKDFNPMVRVSVEKGDLSMLGTDFFEQFDVVVIGYGSRATKKYVNEKCRKLKKRVAFYTVDCRDSCGEIFVDLQDYKYTKKKLEEMVECELNFPSFQEAISVPWKPIPRRTAKLYFAMRVIEVFEESEGRKHGECSLLDLARVLEIKKQLCEANSVSESHIPDILLERLITGTTEFPPVCAIVGGILAQEVIKAVSGKGDPLKNFFYYDGEDGKGVMEDISDSFTS

SEQ ID NO: 5623 - protein, 970 aa, Arabidopsis thaliana
  unsure (1)..(970): unsure at all Xaa locations
  Clone ID: ARATH-23APR03-C110052_1.p
MSTAEADYVKAKTSVWWDIENCEVPRGWDAHVIALNVSSSLLKMNYCGPVSISAYGDTNLIPLHHQQALSSTPAALGLTPARVRDAGDWTRLAVLWLWAIDDPAPAHLPLLSGVSAVASAPLHLGVGAFSVRLALPPRASVPLGAAPCGGRLGTPRAPRPRPRSNTGAAPRFDEGGLRVSGHRMLKWPFSGDAPSRRPSGSVSXPGQNRESRIPNEPRGCLDVIPERVKLPTKRECGQRIWKMSRSINPNQKHRKPKTSLEDARIFLERLPKGKRLRAKLITFGLAFGGKNIKIMMFSFXGRLTFYFGLAFAYFLLLFLIYKLYLLKKIQEQXVLGQHNMNKKVMIESRAQANAEFVCLMCNVVCQSQIVFNSHLRGKKHANMLSQSEATLDQALIVSTKLQEKGVGEKEQPSETVAELQLQSQKAQEKQVPMVLVDSKKLPEKGDEVKGQPKEMTALRNASAKYICRMCNDQALIDSKKLQEKGFGEKEQPRETIVEPQLQSQNAQENSKCFEKHVVMVNQSEVLINASKLEEKDAQEKAQPIESIAEPQSQSQNTQEHTKFFEKQNEELRKICGTLESSVKEPLPSTKDWVETLNKQIPNGEFFFGDLRSDFEVPREASECFDGIVKPVNLSKGETKXHWPNQTYYSAFVASNGSQSSVSTNPLKEPEGLQPVWCQVCQISCNSKVAFASHTYGKKHRQNLESQSAKNETMSTGPGKLSKDYGEKTKKVSCKNQTTFDSQLKSQNHYTMAKELVXEAFVSAFEHVSALEQFSIVDSRTIREDTDQEKEATKEQTLVKMDGNGFRGAPEDKVELNQEKHREALEQFSIDSRIIREETDQEKEATEEQTLVKMDDLGFRGAPEDKVELKERHTVSENLVHRVFTEQNRESRIPNEPRGCLDVIPERVKLPPNVNVAKNLEDEQKHKPEPKAQEAENKSGGRKDLPGEAAKREEIKGQADNFWTRLWGKKY

SEQ ID NO: 5624 - protein, 356 aa, Arabidopsis thaliana
  Clone ID: ARATH-23APR03-C110158_1.p
MMILRLALAIVISAYATAQPASTSSLVTYIFGDSLTEVGNNNFLQYSLARADFPYYGVDFSGGKATGRFTNGRTIGDIISTKLGILSPPPYLSLSQNDDAFLSGINYASGGAGILNETGIYFIQRLTFNDQINCFKKTKEVIRAKIGDGAANKHINDAMYFIGLGSNDYVNNFLQPFMADGQQYTHDEFVELLTSTLHNQLTTIYKLGARKVIFHGLGPLGCIPSQRVKSKTRMCLNRVNEWVLEFNSRTKKLLIDLNKRLPGAKFSFADTYPAVLDLINNPTHYGFKIANTSCCNVDTSVGGLCLPNSKMCKNRQDFVFWDAFHPSDSANQILADHLFSSLLSSSSPSPAPKPRQ

SEQ ID NO: 5625 - protein, 184 aa, Arabidopsis thaliana
  Clone ID: ARATH-23APR03-C11015_1.p
MAEVLRPEMLDISNDTSSLASPKLLHVLAVDDSMVDRKFIERLLRVSSCKVTVVDSATRALQYLGLDGENNSSVGFEDLKINLIMTDYSMPGMTGYELLKKIKESSAFREIPVVIMSSENILPRIDRCLEEGAEDFLLKPVKLADVKRLRDSLMKAEERAFKNIMHKRELEANDIYSQLKRAKI

SEQ ID NO: 5626 - protein, 351 aa, Arabidopsis thaliana
  Clone ID: ARATH-23APR03-C11033_1.p
MAYRRRQGIGKFATFKEEIDRLPPESITAVKDRSPPARSSPAFDQPRSKNFTTEPKGLWGVIAQKAKSVIEDDKSSDRSTTASQSRFSYLSDEGFKKMDNPKLRRGLDKLTSSLNQIGDTFEKAFEDGRTLVENKTADIIQETRKLQTRRRGTGGEDENQNQSYGVSSSWKKSPEQPMQLNHMEHETQLKASRDVAMATAAKAKLLLRELKTVKADLAFAKERCAQLEEENKHLRESHREKGSNPADEDLIRLQLESLLAEKARLAHENSVYARENRFLREIVEYHQLTMQDVVYIDEGSEEVTQVSPFVSTLMTSSPADRSQSPPSQEMIKEMLVVAEESSVCASVVSVS

SEQ ID NO: 5627 - protein, 320 aa, Arabidopsis thaliana
  Clone ID: ARATH-23APR03-C11037_1.p
TSLVPPPRKGKKQSEEAPEHAIAMALLCPSLPSPNSRLFRCRSSNISSKYHGASKELMIARSGVSTRSISSEKGLSRRDLVLIGLSSPLSMFLPLSSPVTHAEEDVKMSGEELKMGTMVDDINAYSYAYPLDYPSEKLVFKWVESRKPERYSSAAPLSPDARLRIVSERVDLTDNLVISISIGPPNSRLTSKEKKTWSAKEVADSVLSDKSALRVTSSQRLEESSVLDAHASDIDGEPYWYYEYLVRKSPTKIAEASKLYRHYISSTAERDGYLYTINASTLGKQWDKMGPVLERAVGSFRLLPPTDSYVPPYKDPWRFW

SEQ ID NO: 5628 - protein, 1189 aa, Arabidopsis thaliana
  unsure (1)..(1189): unsure at all Xaa locations
  Clone ID: ARATH-23APR03-C110689_1.p
MSFQVRRDRSDDRSHRFNHQQTWIPRNSSTSSVVVNEPLLPPNTDRNSETLDAGSASRPVYLQRQHNASGPPSYNHHQRSSNIGPPPPNQHRRYNAPDNQHQRSDNIGPPQPNQHRRYNAPDNQHQRSDNSGPPQPYRHRRNNAPENQHQRSDNIGPPPPNRQRRNNASGTLPDNRQRVASRTRPVNQGKRVAKEENVVLTDPNLPQLVQELQEKLVKSSIECMICYDKVGRSANIWSCSSCYSIFHINCIKRWARAPTSVDLLAEKNQGDNWRCPGCQSVQLTSSKEISYRCFCGKRRDPPSDPYLTPHSCGEPCGKPLEKEFAPAETTEEDLCPHVCVLQCHPGPCPPCKAFAPPRSCPCGKKMVTTRCSERRSDLVCGQRCDKLLSCGRHQCERTCHVGPCDPCQVLVNATCFCKKKVETVICGDMNVKGELKAEDGVYSCSFNCGKPLGCGNHFCSEVCHPGPCGDCDLLPSRVKTCYCGNTRLEEQIRQSCLDPIPSCSNVCRKLLPCRWDTCNEMCHAGDCPPCLVQVNQKCRCGSTSRAVECYITTSSEAEKFVCAKPCGRKKNCGRHRCSERCCPLLNGKKNDLSGDWDPHVCQIPCQKKLRCGQHSCESLCHSGHCPPCLEMIFTDLTCACGRTSIPPPLSCGTPVPSCQLPCPIPQPCGHSDTHGCHFGDCPPCSTPVEKKCVGGHVVLRNIPCGLKDIRCTKICGKTRRCGMHACARTCHPEPCDSFNESEAGMRVTCRQKCGAPRTDCRHTCAALCHPSAPCPDLRCEFSVTITCSCGRITATVPCDAGGRSANGSNVYCAAYDEASVLQKLPAPLQPVESSGNRIPLGQRKLSCDDECANLERKGVLQDAFHITPPNLEALHFSENSAMTEIISDLYRRDPKWVLAVEERCKFLVLGKARGSTSALKVHIFCPMQKDKRDTVRLIAERWKLGVSNAGWEPKRFSVVHVTADPKPPTRIIGPGGGAISIGGPHPPFYDSLVDMDPGLVVSFLDLPREANISALVLRFGGECELVWLNDKNALAVFHDHARAATAMRRLEHGSVYHGAVVVQSGGQSPSLNNVWGKLPGSSAWDVDKGNPWRRAVIQEXSDDSWGAEDSPIGGSSTDAQASALRSAKSNSPIVTSVNRWSVLEPKKASTSTLEPIAQIEESSSSKTTGKQPVEGSGEEVVDDWEKVCE

SEQ ID NO: 5629 - protein, 289 aa, Arabidopsis thaliana
  Clone ID: ARATH-23APR03-C11077_1.p
INEVRTLLGPLTEKSSEFCSDAAITRYLAARNGHVKKATKMLKETLKWRAQYKPEEIRWEEIAREAETGKIYRANCTDKYGRTVLVMRPSCQNTKSYKGQIRILVYCMENAILNLPDNQEQMVWLIDFHGFNMSHISLKVSRETAHVLQEHYPERLGLAIVYNPPKIFESFYKMVKPFLEPKTSNKVKFVYSDDNLSNKLLEDLFDMEQLEVAFGGKNSDAGFNFEKYAERMREDDLKFYGNTTVSSTSAHLTNSDSEVSDSEMKYLEDKEDETIENGTLQSPLDTTKT

SEQ ID NO: 5630 - protein, 113 aa, Arabidopsis thaliana
  Clone ID: ARATH-23APR03-C111186_1.p
MFNSTALVIFAILFLSISADVFPIPSPNGEIDAMLIRNSIIGEDEDLMPTEISRRVLMAQKRYIGYETLRRDMVPCQKPGASYYDCRSGQANSYSRGCDTITRCARDTNDINT

SEQ ID NO: 5631 - protein, 638 aa, Arabidopsis thaliana
  Clone ID: ARATH-23APR03-C11179_1.p
MESTIVMMMMITRSFFCFLGFLCLLCSSVHGLLSPKGVNFEVQALMDIKASLHDPHGVLDNWDRDAVDPCSWTMVTCSSENFVIGLGTPSQNLSGTLSPSITNLTNLRIVLLQNNNIKGKIPAEIGRLTRLETLDLSDNFFHGEIPFSVGYLQSLQYLRLNNNSLSGVFPLSLSNMTQLAFLDLSYNNLSGPVPRFAAKTFSIVGNPLICPTGTEPDCNGTTLIPMSMNLNQTGVPLYAGGSRNHKMAIAVGSSVGTVSLIFIAVGLFLWWRQRHNQNTFFDVKDGNHHEEVSLGNLRRFGFRELQIATNNFSSKNLLGKGGYGNVYKGILGDSTVVAVKRLKDGGALGGEIQFQTEVEMISLAVHRNLLRLYGFCITQTEKLLVYPYMSNGSVASRMKAKPVLDWSIRKRIAIGAARGLVYLHEQCDPKIIHRDVKAANILLDDYCEAVVGDFGLAKLLDHQDSHVTTAVRGTVGHIAPEYLSTGQSSEKTDVFGFGILLLELVTGQRAFEFGKAANQKGVMLDWVKKIHQEKKLELLVDKELLKKKSYDEIELDEMVRVALLCTQYLPGHRPKMSEVVRMLEGDGLAEKWEASQRSDSVSKCSNRINELMSSSDRYSDLTDDSSLLVQAMELSGPR

SEQ ID NO: 5632 - protein, 916 aa, Arabidopsis thaliana
  Clone ID: ARATH-23APR03-C11198_1.p
MSQIARRRRKGRPSKADLAARRSSSSPRESGYELRRGQRQRNVRYNFDFDDYFDEEEEDEVEEEKKRQKKLKQVLKLNQSRARADPPVKSRARVRHASDYEEEDEEDDEAEEEEEEVSEKRQVKKRKLNRQDEEEEEEEEKDYDVEEEEEEEEGHADSEEEDDKERKRRSASGNQCDHSSETTPILDKKSLELILDKLQKKDIYGVYAEPVDPEELPDYHDMIEHPMDFSTVRKKLANGSYSTLEELESDVLLICSNAMQYNSSDTVYYKQARTIQEMGKRKFEKARLKIKRAEKELKTDEKVKPDSSVKKQVRQPFSRNGLEAVGSDFSSGANLASGGASQNEPVSTQIGGHEKHSYTDVLFEGNTSLVDSLEKAEDLSSGKGLFGKCGRKLSVVEEDRRATYEDSDQQGDRSESIFTTFESEIKQFVAVGLHAEHAYGRSLARFAATLGPVAWKIASQRIEQALPADFKFGRGWVGEYEPLPTPVLLFETCTPKEPPKKASVFSKRKSNAATKTNETLFKTPLPAKEQQGSRPVRDGNHAFPFPASIGALSEGSPSFVATQVGNLKSMSQHEYRNPSQLDFVKPQNRIPQQVELNLPPPAEQTNSGSGCVLENQSFGKSDTVASYRSSSDMMRNMSSTDSEHYKHQMTTNGIFPGGLRNGKVSPGVNNRMFDLSTDFANQMSRTATSSQQPMRQQSQSHEEQAQIMRNFNERARTQHNSTYNHPKADAPPKISSPQSARSEDSGNASVAAARAWMSIGAGGNNKQTFENASNPKSSQISAESLYNPSREHFHQQAFKPRDAEETQFHPQRNGFPFQTFVHQPVHGMMNGGYQPFQNNRPIVFPQMAAPTSDFSRFHVQSQWRGGITPQVQLKQRQENFNLPPDLNIGVHSPDSPAKQSSGVRVDSQQPDLALQL

SEQ ID NO: 5633 - protein, 472 aa, Arabidopsis thaliana
  Clone ID: ARATH-23APR03-C11211_1.p
MGSLGYSISMIASLSPTLMESRLISSMGCVSMTVAPSFSSVSVVSSSLGTTRRDRTLKLRSSMSPGMVTTLDSDVGVGSSATTKKVLVPIGYGTEEIEAVVLVDVLRRAGADVTVASVEQKLEVEGSSGTRLLADVLISKCADQVYDLVALPGGMPGAVRLRDCEILEKIMKRQAEDKRLYGAISMAPAITLLPWGLLTRKRTTGHPAFFGKLPTFWAVKTNIQISGELTTSRGPGTSFQFALSLAEQLFGETTAKSIEEFLLLRDGYQNPKNKEFNSIDWSLDHTPRVLIPVANGSEAVELVSIADVLRRAKVDVTVSSVERSLRITAFQGTKIITDKLIGEAAESSYDLIILPGGHTGSERLQKSKILKKLLREQHESGRIYGATNSSSTVLHKHGLLKEKRTTVYPSESDEPMNQQMIEGAEVVIDGNVITSLGLATVTKFSLAIVSKLFGHARARSVSEGLVHEYPRQ

SEQ ID NO: 5634 - protein, 1044 aa, Arabidopsis thaliana
  Clone ID: ARATH-23APR03-C11234_1.p
MASNDLKTWVSDKLMMLLGYSQAAVVNYLIAMAKKTKSPTELVGELVDYGFSSSGDTRSFAEEIFARVPRKTAGVNLYQKHEAEAAMLVRKQKTYALLDADDDEDEVVVEKKSSVSESRKSDKGKKRFRKKSGQSDESDGEVAVREDSRHVRRKVSEEDDGSESEEERVRDQKEREELEQHLKDRDTARTRKLTEQTLSKKEKEEAVRRANALEKDDLYSLRKVSRQEYLKKREQKKLDELRDEIEDEQYLFGGEKLTETELREFRYKKELYDLVKKRTQDEDNVEEYRIPDAYDQEGGVDQEKRFSVAVQRYRDLDSTEKMNPFAEQEAWEDHQIGKATLKFGAKNKQASDDYQFVFEDQINFIKESVMAGENYEDAMDAKQKSQDLAEKTALEELQEVRRSLPIYTYRDQLLKAVEEHQVLVIVGDTGSGKTTQIPQYLHEAGYTKRGKVGCTQPRRVAAMSVAARVAQEMGVKLGHEVGYSIRFEDCTSDKTVLKYMTDGMLLRELLGEPDLASYSVVIVDEAHERTLSTDILFGLVKDIARFRPDLKLLISSATMDAEKFSDYFDTAPIFSFPGRRYPVEINYTSAPEADYMDAAIVTILTIHVREPLGDILVFFTGQEEIETAEEILKHRIRGLGTKIRELIICPIYANLPSELQAKIFEPTPEGARKVVLATNIAETSLTIDGIKYVVDPGFSKMKSYNPRTGMESLLITPISKASATQRAGRAGRTSPGKCYRLYTAFNYNNDLEENTVPEVQRTNLASVVLALKSLGIHDLINFDFMDPPPAEALVKSLELLFALGALNKLGELTKAGRRMAEFPLDPMLSKMIVVSDKYKCSDEIISIAAMLSIGGSIFYRPKDKQVHADNARMNFHTGNVGDHIALLKVYSSWKETNFSTQWCYENYIQVRSMKRARDIRDQLEGLLERVEIDISSNLNELDSVRKSIVAGFFPHTAKLQKNGSYRTVKHPQTVHIHPNSGLSQVLPRWVVYHELVLTSKEYMRQVTELKPEWLIELAPHYYQLKDVEDAASKKMPKGAGKAAM

SEQ ID NO: 5635 - protein, 298 aa, Arabidopsis thaliana
  unsure (1)..(298): unsure at all Xaa locations
  Clone ID: ARATH-23APR03-C112656_1.p
MFKKKKQNLTYLLIXFXSFCSLILFALPHVVKLPMTSLPIILASSPLRNLTKPCSTSQIPKPIQNSTKQPPIHLLTKTNLSVTISQLIITSPVLASESFDSISSDPSSGKIDLESILVTIDNFFNKYPFFVAGCTFTYLVVYPAVMFYLRKYKPISAMNAFRKLKNESDSQLLDIRDVKTLALLASPNLKFLGKSSVQVPFSENDEEGFLTKVKGSFSDAENTVVCVLDNFDGNSSKVAELLIKNGFKEAYYIRGGARGKNGWLAIQEELLPPPVHMYTAKNVKSSNNNEASVVGTEN

SEQ ID NO: 5636 - protein, 227 aa, Arabidopsis thaliana
  Clone ID: ARATH-23APR03-C112936_1.p
MLCRKNSSLVDRGNVPVYLNVYDLTPINGYAYWLGLGVYHSGVEVHGIEYAYGAHEYPSTGIFEGEPKQCEGFTFRKSILIGKTDLGPLEVRATMEQLADNYKGSSYNLITKNCNHFCDETCIKLTGNPIPSWVNRLARIGFMCNCVLPATINATRFGNNRVNQDKSCEAENEKKKLTSVSSRERSTIATPSSSSSSPSVQVRGRSRKRRPRALQPSSPLTLGSSSV

SEQ ID NO: 5637 - protein, 278 aa, Arabidopsis thaliana
  Clone ID: ARATH-23APR03-C11298_1.p
MADQGLEESNPMDLSKHPSGIVPTPHSQVIYKMPPRIAAIRLVSSHREVYEPCDDSFALVDALLADRTNLIEHNPKICMEIGCGSGYVITSLILLLQNEVPGVHYLAIDTNPIATRVTKETLEAHGVNADVICADLATGLEKRLAGSVDVIVVNPPYVPTPEYEVGMEGIASAWAGGENGRTVIDKILPVVDLLLSEKGWFYLVTLTSNFPAEICLMMRKKGYASRIVVQRSTEEENLVILKFWRDKDEESQDKETSSSSFVSQFSKSLSSLMEKQWR

SEQ ID NO: 5638 - protein, 73 aa, Arabidopsis thaliana
  Clone ID: ARATH-23APR03-C112999_1.p
MYLQGKGWSSRPLDDQTQTLVQIYSTKLEMKAGSNMRLALCIFSSGFLQRTLQETLLVSKLPLIDLERSSLRP

SEQ ID NO: 5639 - protein, 167 aa, Arabidopsis thaliana
  Clone ID: ARATH-23APR03-C11305_1.p
MRAPISGIFSRSLGYLHRTTPLSSATRHLCAVASPEARTKKLERIADDLLKLNRIELYDYSLLFSHKIGLNRYGSAVAVTGSVGDASASTETKTAEKTTFDVKLEKFEAASKIKVIKEIRAFTDLGLKEAKALVEKAPVIVKNGLTKEEAEKIMEKLKAVGAIVALE

SEQ ID NO: 5640 - protein, 323 aa, Arabidopsis thaliana
  Clone ID: ARATH-23APR03-C11311_1.p
MASATLRRRLHHGDVDGRKYERYDATDSETLSEPLLGSSSTDNSRNEYIEERTLEDIWEEERKRQQVHWTLIFSQLIAQWAQWIAKIVFGSGSLVGRFLSLPTFGQIGTGGRLLPPPLSMLQEERLRNIKRRIEIPFDGSRMEHQDALRQLWRLAYPQRELPPLKSELWKEMGWQGTDPSTDFRGGGYISLENLIFFAKTYPESFQRLLHKQDGTRAEWEYPFAVAGINISFMLAQMLDLQSGKPSTIAGIRFLGFLEEDEMAFDNLYCIAFQMMDAQWLARRASYMEFNDVLKSTRAQLERELALDDVSSITDLPAFNLLYK

SEQ ID NO: 5641 - protein, 186 aa, Arabidopsis thaliana
  Clone ID: ARATH-23APR03-C11328_1.p
MAFAATLFVPPPVAVRSPARFLGRLSIPCLLQVLPTNGAASPRQVKRAIVANASPGNGGVKAEEEDGVSLGTMKLPVDTDLARFETLLFQWANSLCQGANLPLPVPLKVDRISGGARLGFIVMEDEGKTDVPVYIDCLVFQTTENGVVFQATRNGRKKDKAPPGEERIMRSLLGALKKAVEIARVT

SEQ ID NO: 5642 - protein, 381 aa, Arabidopsis thaliana
  Clone ID: ARATH-23APR03-C113309_1.p
MELKNVKDAFDRVTKKQKLCYSKTHEVVEKMSQEIDKALKTIQEDNHESVVADLKKTFEEIAPINLLEASQKEINGVLTKYPKALDKTLNPDISTAYRNVKFDTHTVHQILAQFFYRQGMYGVGDCFISETGEVKPESSVTKAFMEMNMILEAMKERDLGPALKWVASNSDKLKEAKSDLELKLHSLHFLEIAKDKTSEEAINYARKHFATYSADSCCFPEIQKLMCSLLWNRNLNKSPYSEFLSPVLWTNAAKELTRQYCILLGESPESPLSVTVAAGSQVLPTFLKYLNVLPEKRKEWQTMEQLLVPVELSEEYRFYSVFVCPVSKEHSSEDNPPMRLACGHVLCKQSINRMSRNGSRSFKCPYCPTDIDASQCKQLYF

SEQ ID NO: 5643 - protein, 811 aa, Arabidopsis thaliana
  Clone ID: ARATH-23APR03-C11334_1.p
MFLSSTDQRSPSNNNPSSSSSFLHLTNSCDELGQSHLSTFSIRDYAFSYRTKNIKKSWPFSSTSLQLCLNHGLTDPLPPIQPPEVKKPNITHVEAVSHKRKSEKLGSYQILVETTKQGFENGLLASGSKSKIQVAMVNKNPRKKCGLIVKPGACVDSGGKEDHSSLFSASDSMALRTCPICKTFSSASNTTLNAHIDQCLSVDSGQQPIRKPNRPKTKPRLKVKTMTDIYASAKEGTLEDLDKRNGTKWAMISSYSNRVVSDDKPEVSNKVKKRSVSRARIDEDAAGIGPVYIDAKGQKLRILSKFNEKASDPSRREHEEVCEKKSSSEGKGGKSFRKKLWGEKHYKHRKLVPQNRKLTVRKSNASEIPEYRRGYSKEGKDFERSETSGPGQGRIFNQRMLTKRSLSRHGKKNGTDICESENWNSLSEDPLVLRSPSHVSTDLSETVSSPLNSIGSWRVCGESQVSGKSWALSRNRSIESDLFVANPLRCLTPVARGVMKFKKARMDFSENEDEDIGKWESEMTQERELSDYDGWDDDDGETDKVALSSNPSFSGEDNDYESYEETGDNKGGDDMLDKTKDADVEFESMVYEKTGCETAEQESSFMEVDPIPIPGPPGSFLPSPWDMMGTDAVEHHGNSSVITSQVHSSQDQFDLTDRNSSESPVSAISNFAAPETQTLSLHNIITTDKRPSRFRDNDQSCCCQRKEKALEDTTFCQPPPPQMIQQDLDFLSKSVPAVPSTPNPVLRLMGKDLMVINQREEPSHNESSPKPTSQFLDLSKTQQASPSVNLLHPPYSGNGYFDTNTSFYNIP

SEQ ID NO: 5644 - protein, 485 aa, Arabidopsis thaliana
  Clone ID: ARATH-23APR03-C11335_1.p
MLDLNLDVDSTESTQNERDSITVKGVSLNQMDESVTSNSSVVNAEASSCIDGEDELCSTRTVKFQFEILKGGGEEEEEDDDERSAVMMTKEFFPVAKGMNFMDSSAQSSRSTVDISFQRGKQGGDFIGSGSGGGDASRVMQPPSQPVKKSRRGPRSKSSQYRGVTFYRRTGRWESHIWDCGKQVYLGGFDTAHAAARAYDRAAVKFRGLEADINFVIGDYEEDLKQMANLSKEEVVQVLRRQSSGFSRNNSRYQGVALQKIGGWGAQMEQLHGNMGCDKAAVQWKGREAASLIEPHASRMIPEAANVKLDLNLGISLSLGDGPKQKDRALRLHHVPNNSVCGRNTMMENHMAAAACDTPFNFLKRGSDHLNNRHALPSAFFSPMERTPEKGLMLRSHQSFPARTWQGHDQSSGGTAVAATAPPLFSNAASSGFSLSATRPPSSTAIHHPSQPFVNLNQPGLYVIHPSDYISQHQHNLMNRPQPPP

SEQ ID NO: 5645 - protein, 592 aa, Arabidopsis thaliana
  Clone ID: ARATH-23APR03-C11341_1.p
MAATDFFFAFVFSFALIFGFSFAGDPYVSYDFTLSYITASPLGVPQQVIAVNGKFPGPVINATTNYNVHVNVLNHLDEPLLLTWPGVQMRRNSWQDGVLGTNCPIPPNWNFTYDFQLKDQIGSYFYSPSLNFQRASGGFGALIINNRDLVPIPFTEPDGEIIFIIGDWYTQNHTALRRILDSGKELGMPDGVLINGKGPFKYNSSVPDGIEHETVNVDPGKTYRIRVHNVGISTSLNFRIQNHKLLLIETEGRYTSQMNFTDFDVHVGQSYSFLVTMDQNATSDYYIVASARFVNETVWQRVTGVGILHYSNSKGPASGPLPVSATDVNHPWSAMNQPRAIKQNTSASGARPNPQGSFHYGQINITRTYILRSLPPTKINGKLRATLNGISFVNPSTPMRLADDHKVKGDYMLDFPDRPLDEKLPRLSSSIINATYKGFIQVIFQNNDTKIQSFHIDGYAFYVVAMDFGIWSEDRNSSYNNWDAVARSTVEVYPGAWTAVLISLDNVGVWNIRVENLDRWYLGQETYMRIINPEENGSTEMDPPENVMYCGALQAMQKEQHHSSATKSMTNGQLILIFSMMMVLLSSFSSFC

SEQ ID NO: 5646 - protein, 1840 aa, Arabidopsis thaliana
  Clone ID: ARATH-23APR03-C113488_1.p
MDTRFPFSPAEVSKVRVVQFGILSPDEIRQMSVIHVEHSETTEKGKPKVGGLSDTRLGTIDRKVKCETCMANMAECPGHFGYLELAKPMYHVGFMKTVLSIMRCVCFNCSKILADEVCRSLFRQAMKIKNPKNRLKKILDACKNKTKCDGGDDIDDVQSHSTDEPVKKSRGGCGAQQPKLTIEGMKMIAEYKIQRKKNDEPDQLPEPAERKQTLGADRVLSVLKRISDADCQLLGFNPKFARPDWMILEVLPIPPPPVRPSVMMDATSRSEDDLTHQLAMIIRHNENLKRQEKNGAPAHIISEFTQLLQFHIATYFDNELPGQPRATQKSGRPIKSICSRLKAKEGRIRGNLMGKRVDFSARTVITPDPTINIDELGVPWSIALNLTYPETVTPYNIERLKELVDYGPHPPPGKTGAKYIIRDDGQRLDLRYLKKSSDQHLELGYKVERHLQDGDFVLFNRQPSLHKMSIMGHRIRIMPYSTFRLNLSVTSPYNADFDGDEMNMHVPQSFETRAEVLELMMVPKCIVSPQANRPVMGIVQDTLLGCRKITKRDTFIEKDVFMNTLMWWEDFDGKVPAPAILKPRPLWTGKQVFNLIIPKQINLLRYSAWHADTETGFITPGDTQVRIERGELLAGTLCKKTLGTSNGSLVHVIWEEVGPDAARKFLGHTQWLVNYWLLQNGFTIGIGDTIADSSTMEKINETISNAKTAVKDLIRQFQGKELDPEPGRTMRDTFENRVNQVLNKARDDAGSSAQKSLAETNNLKAMVTAGSKGSFINISQMTACVGQQNVEGKRIPFGFDGRTLPHFTKDDYGPESRGFVENSYLRGLTPQEFFFHAMGGREGLIDTAVKTSETGYIQRRLVKAMEDIMVKYDGTVRNSLGDVIQFLYGEDGMDAVWIESQKLDSLKMKKSEFDRTFKYEIDDENWNPTYLSDEHLEDLKGIRELRDVFDAEYSKLETDRFQLGTEIATNGDSTWPLPVNIKRHIWNAQKTFKIDLRKISDMHPVEIVDAVDKLQERLLVVPGDDALSVEAQKNATLFFNILLRSTLASKRVLEEYKLSREAFEWVIGEIESRFLQSLVAPGEMIGCVAAQSIGEPATQMTLNTFHYAGVSAKNVTLGVPRLREIINVAKRIKTPSLSVYLTPEASKSKEGAKTVQCALEYTTLRSVTQATEVWYDPDPMSTIIEEDFEFVRSYYEMPDEDVSPDKISPWLLRIELNREMMVDKKLSMADSAEKINLEFDDDLTCIFNDDNAQKLILRIRIMNDEGPKGELQDESAEDDVFLKKIESNMLTEMALRGIPDINKVFIKQVRKSRFDEEGGFKTSEEWMLDTEGVNLLAVMCHEDVDPKRTTSNHLIEIIEVLGIEAVRRALLDELRVVISFDGSYVNYRHLAILCDTMTYRGHLMAITRHGINRNDTGPLMRCSFEETVDILLDAAAYAETDCLRGVTENIMLGQLAPIGTGDCELYLNDEMLKNAIELQLPSYMDGLEFGMTPARSPVSGTPYHEGMMSPNYLLSPNMRLSPMSDAQFSPYVGGMAFSPSSSPGYSPSSPGYSPTSPGYSPTSPGYSPTSPGYSPTSPTYSPSSPGYSPTSPAYSPTSPSYSPTSPSYSPTSPSYSPTSPSYSPTSPSYSPTSPSYSPTSPAYSPTSPAYSPTSPAYSPTSPSYSPTSPSYSPTSPSYSPTSPSYSPTSPSYSPTSPAYSPTSPGYSTTSPSYSPTSPSYGPTSPSYNPQSAKYSPSIAYSPSNARLSPASPYSPTSPNYSPTSPSYSPTSPSYSPSSPTYSPSSPYSSGASPDYSPSAGYSPTLPGYSPSSTGQYTPHEGDKKDKTGKKDASKDDKGNP

SEQ ID NO: 5647 - protein, 761 aa, Arabidopsis thaliana
  unsure (1)..(761): unsure at all Xaa locations
  Clone ID: ARATH-23APR03-C11352_1.p
MANRDLMLGQNRNIGIGQGQSLVLGHSHSLGLGQNHVDVELGQGHNMDLGLAHHDHDHHEIDLGNPHDDHELDLGNSEDQDGEDHHHHHHHDYMNENEISVDQKPGHDDVDPDLVLSSQNHEFSLSDNNHQLVVGENHELDDNLELAVDSSHELEIDQHGEMVMVSTPVQARALTADMTYQLTVGQEFPDVKSCRRALRDMAIALHFEMQTIKSDKTRFTAKCSSDGCPWRVHAAKLPGVPTFTIRTIHESHSCGGINHLGHQQASVQWVASSVEQRLRENPNCKPKEILEEIHRVHGITLSYKQAWRGKERIMATMRGSFEEGYRLLPQYCEQVKRTNPGSIASVYGSPADNCFQRLFISFQASIYGFLNACRPLLGLDRTYLKSKYLGTLLLATGFDGDGALFPLAFGIVDEENDENWMWFLCELHNLLETNTENMPRLTILSDRQKGIVEGVEQNFPTAFHGFCMRHLSESFRKEFNNTLLVNYLWEAAQALTVIEFEAKILEIEEISQDAAYWIRRIPPRLWATAYFEGQRFGHLTANIVESLNSWIAEASGLPIIQMMECIRRQLMTWFNERRETSMQWTSILVPTAERRVAEALELARTYQVLRANEAEFEVISHEGNNIVDIRNRCCLCRGWQLYGLPCAHAVAALLSCRQNVHRFTESCFTVATYRKTYSQTIHPIPDKSHWKEIXRELSEGDPNVNKAALDAIINPPKSLRPPGRPRKRRVRAEDRGRVKRVVHCSRCNQTGHFRTTCAAPI

SEQ ID NO: 5648 - protein, 323 aa, Arabidopsis thaliana
  Clone ID: ARATH-23APR03-C11360_1.p
FFFLSYLFRTELCHGFFFFFSSNTSRCLFPLTKLTRELKKPLQLTEPKLRRSLRSHRPLIKHQTTPEQNSAMASSSSSLLILAVACFVSLISPAISQQACKSQNLNSAGPFDSCEDLPVLNSYLHYTYNSSNSSLSVAFVATPSQANGGWVAWAINPTGTKMAGSQAFLAYRSGGGAAPVVKTYNISSYSSLVEGKLAFDFWNLRAESLSGGRIAIFTTVKVPAGADSVNQVWQIGGNVTNGRPGVHPFGPDNLGSHRVLSFTEDAAPGSAPSPGSAPAPGTSGSTTPGTAAGGPGNAGSLTRNVNFGVNLGILVLLGSIFIF

SEQ ID NO: 5649 - protein, 424 aa, Arabidopsis thaliana
  Clone ID: ARATH-23APR03-C11401_1.p
CSSVISCNPYKQRAWRIVSEERKLKMATLFNKFQQAVGVLAKSTTFAKNPRQLQFEADVNKLFMYTSYNRLGREAEETDAEEIIEMAGKATLSEQQKQVQENIHYQVEKFCSLMDGILLPDVRRNESGSQSTSPRPPRRSGLTFAIGSNNAFPHADQPLVPETKPLKLTDVSQRLMDQMGYTLEIKPSVIPHKDAGQGCFIKGEADVGTVLAFYPGVIYSPAFYRYIPGYPKVDSQNSYLITRYDGTVINAQPWGLGGESREAWNGSYTPAVKTNTKTAENGSDRLWKALSKPLEGSGKGKEVLERRNPLAFGHLANHPAKEMTPNVMICPYDFPLMAKDLRPYIPNISFGDSGEIKMKRFGSFWFKTGSKNGLEAPVLKTLVLVATRSLCNEELLLNYRLSNSKRRPDWYTPVNEEEDRRRWS

SEQ ID NO: 5650 - protein, 2158 aa, Arabidopsis thaliana
  unsure (1)..(2158): unsure at all Xaa locations
  Clone ID: ARATH-23APR03-C11409_1.p
MVHNSPCNKHKTTSISWTRILAGRCTGLFVQVSNRRRFRTQAIAFFLGEPTRGENTTEEKNPKRHKYRDFVMLVQLPRLTSSLREPFDIDQAYLRRKTILQTLNKPRSSGNRLDESDLAKRIVHQWEGASLEVRQAYKQFIGAVVELIDREVPSDEFREVAFSAYRLFNNPVEEDDSDINDNISISGKKLELQNLVGHAVSDANVKNVASFAQALYSIQPTHQSETYADEVNGGAEFGADLVFNLPARFLVEASLDETGFVDVESNDAHTSFSEGWSGVSDTKNNLSAGKFNLSWLRDACGRMVRETNSQLSREELAMAICRFLDSDKPGEEIAGDLLDLVGDGAFETVQDLIMHRKEIVDAIHHGQMILKSDKAASNTQSRMPTYGTQVTVQTESAKQIEKLRRKEEKKNKRNADLGLESEISEANFSSLLEASEKKTAFEDLIGSGEANSLALALPQGTVRKHLKGYEEVFIPPTPTAQMKPGEKLIEIKELDDFAQAAFHGYKSLNRIQSRIFQTVYHTNENILVCAPTGAGKTNIAMISVLHEIKQHFRDGYLHKNEFKIVYVAPMKALAAEVTSAFSRRLAPLNMVVKELTGDMQLTKTELEETQMIVTTPEKWDVITRKSSDMSMSMLVKLLIIDEVHLLNDDRGAVIEALVARTLRQVESTQTMIRIVGLSATLPSYLQVAQFLRVNTDTGLFYFDSSYRPVPLAQQYIGITEHNFAARNELLNEICYKKVVDSIKQGHQAMIFVHSRKDTSKTAEKLVDLARQYETLDLFTNETHPQFQLMKKDVMKSRNKDLVKFFEAGFGIHHAGMLRSDRTLTERLFSDGLLKVLVCTATLAWGVNLPAHTVVIKGTQLYDAKAGGWKDLGMLDVMQIFGRAGRPQFDKSGEGIIITSHDKLAYYLRLLTSQLPIESQFISSLKDNLNAEVVLGTVTNVKEACAWLGYTYLSIRMKLNPLAYGIGWEEIIADPSLSLKQRALVADAARSLDKAKMMRFDEKSGNFYCTELGRVASHFYIQYSSVETYNEMLKRHMNESEIINMVAHSSEFENIVVREEEQHELETLARSCCPLEVKGGPSNKHGKISILIQLYISRGSIDAFSLVSDASYISASLARIMRALFEICLRKGWCEMTLFMLEYCKAVDRQLWPHQHPLRQFERDLPSDRWGDLDQRWEVVDQVFGALVRDIPARRRLGPGPSLLLPPPGCPPSRPVAAAVWPITPTVLWVDRLLAPALRWWVRFQGTALRWCFLSELSALAXRLPSGLPPLPSRTARGEPQKLSFTVPIFEPHPPQYYVHAVSDSWLHAETYFTISFHNLALPEARTSHTELLDLKPLPVTSLGNKLYESLYKFSHFNPIQTQIFHVLYHTDNNVLVGAPTGSGKTISAELAMLRLFSTQPDMKVVYIAPLKAIVRERMNDWKKHLVAPLGKEMVEMTGDYTPDLVALLSADIIISTPEKWDGISRNWHTRSYVKKVGLVILDEIHLLGADRGPILEVIVSRMRYISSQTERSVRFVGLSTALANAGDRADWLGVGEIGLFNFKPSVRPVPIEVHIQGYPGKYYCPRMNSMNKPAYAAICTHSPTKPVLIFVSSRRQTRLTALDLIQFAASDEHPRQFLSVSEEDLQMVLSQITDQNLRHTLQFGIGLHHAGLNDHDRSAVEELFTNNKIQVLVSTCTLAWGVSLPAHLGIIKGPGHGDGTSQRSVVFPRAQILPTGGPAGRPPSLLQGSAVCRVLQPDHSLSNMGLRVPFPVDRSLAVTLRARSNPAPVSGAXGSSGAAAPLLTWTYLFRRLMANPAYYGLEGTQDETICSYLSRLVQTTFEDLEDSGCLKVNEDSVEPTMLGTIASQYYLCYMTVSMFGSNIGPDTSLEAFLHILAGASEYDELPVRHNXEENYNKTLSDRVRYPVDNNHLDDPHVKANLLFQAHFSQLALPISDSAPPGQAGLLRSLRIPLALTDVCAPCAWRPAALAGWPRFLMVVQPMRAGPASSFSMIPCMNDLLLGSLSARGIHTLHQLLNLPRETLQSVTENFPASRLSQDLQRFPRIQMNVRLQKKDSDGKKKPSTLEIRLEKTSKRNSSRALAPRFPKVKDEAWWLVLGDTSTSELFAVKRVSFTGRLITRMELPPNITSFQDTKLILVSDCYLGFEQEHSIEQLARRG

SEQ ID NO: 5651 - protein, 533 aa, Arabidopsis thaliana
  Clone ID: ARATH-23APR03-C11425_1.p
MNTHNNRYAKWKQRELVLILLYAIAFYAYVVWRSLRLSHDHYFKLHGLASGWLIPNRRNDVSDAQWRNFRGNLPILSFVFAVFTVIANGVRSFFHLRAKGMAILWLSMSLIYLIYLHGACVIYILSIATANFLLVKVFARTSYFPYMLWTFNIFFLFCNRIYEGYSFSIFGQQFEFLDNFRGTFRWHICFNFVVLRMLSFGYDYHWSQLDSHFDQEKHVMRCSLCKLGKTCYVVRQERGLASDSCSFSLYLCYLVYAPLYLAGPIISFNAFASQLDMPQNTLSFKDVAWYGVRWLFSFLLIELMTHLFYYNAFVISGLWRELSPVEIFIVGYGVLNFMWLKFLLLWRYFRFWSLVNGIETVENMPNCINNCYSLELFWKTWHASFNRWLIRYMYIPLGGSRRKFLNVWVVFTFVAMWHDLEWKLLSWAWLTCLFFMPEMLLKSASSAYKVESAFGEFLLRELKALSGAVTITCLMIANLAGYVIGPSGINWMVSSFLKREGVPVLGGVFFSLYVGTKLMFHIQDLRSVAHSPK

SEQ ID NO: 5652 - protein, 237 aa, Arabidopsis thaliana
  Clone ID: ARATH-23APR03-C11427_1.p
MNVNPHRYLQALFLACQSSAKTSLGRKNITLVNKSITDVLELEGGYDAVVICLGSKVDFLPGLTGKLPLRTCRGVITHMQLHESARGSYPDDGPSILSDAWLAVQGPRNLHMGSTWEWQSRNYSSDVPAEEASRALNELLPKASAVYPDIEKWEFAGARAGLRAMPPVTSHGSLPLLGCVNQLIGAGQFCNFWVFSGLGSRGLLYHAWLGKLMSKAVLSCNEELLPSELTSWKKNRQ

SEQ ID NO: 5653 - protein, 253 aa, Arabidopsis thaliana
  Clone ID: ARATH-23APR03-C11453_1.p
MQPETSDQMLYSFLAGNEVGGGGYCVSGDYMTTMQSLCGSSSSTSSYYPLAISGIGETMAQDRALAALRNHKEAERRRRERINSHLNKLRNVLSCNSKTDKATLLAKVVQRVRELKQQTLETSDSDQTLLPSETDEISVLHFGDYSNDGHIIFKASLCCEDRSDLLPDLMEILKSLNMKTLRAEMVTIGGRTRSVLVVAADKEMHGVESVHFLQNALKSLLERSSKSLMERSSGGGGGERSKRRRALDHIIMV

SEQ ID NO: 5654 - protein, 97 aa, Arabidopsis thaliana
  Clone ID: ARATH-23APR03-C11463_1.p
MDSSREANRKHDAEEKREDEKTSLMEVNLMVVLLSQLSTKKEDENGLEKERRDHVAHEARESRARANKRFMKDTKLMEKRTHVLQPMAKEFRHYRKM

SEQ ID NO: 5655 - protein, 679 aa, Arabidopsis thaliana
  Clone ID: ARATH-23APR03-C11484_1.p
MEHVRVIFFFACFLTLAPFHAFAQVDSYEFDPDFNCVDRGNFTANSTFAGNLNRLVSSLSSLKSQAYGFYNLSSGDSSGERAYAIGLCRREVKRDDCVSCIQAAARNLTKQCPLTKQAVVWYTHCMFRYSNRTIYGRKETNPTKAFIAGEEISANRDDFERLQRGLLDRLKGIAAAGGPNRKYAQGNGSASAGYRRFYGTVQCTPDLSEQDCNDCLVFGFENIPSCCDAEIGLRWFSPSCNFRFETWRFYEFDADLEPDPPAIQPADSPQSAARTERTGKGKGGSKVIIAIVIPILLVALLAICLCLVLKWRKNKSGYKNKVLGKSPLSGSIAEDEFSNTESLLVHFETLKTATDNFSSENELGRGGFGSVYKGVFPQGQEIAVKRLSGNSGQGDNEFKNEILLLAKLQHRNLVRLIGFCIQGEERLLVYEFIKNASLDQFIFDTEKRQLLDWVVRYKMIGGIARGLLYLHEDSRSHASDRDLKASNILLDQEMNPKIADFGLAKLFDSGQTMTHRFTSRIAGTYGYMAPEYAMHGQFSVKTDVFSFGVLVIEIITGKRNNNGGSNGDEDAEDLLSWVWRSWREDTILSVIDPSLTAGSRNEILRCIHIGLLCVQESAATRPTMATVSLMLNSYSFTLPTPLRPAFVLESVVIPSNVSSSTEGLQMSSNDVTVSEFSPR

SEQ ID NO: 5656 - protein, 188 aa, Arabidopsis thaliana
  Clone ID: ARATH-23APR03-C11492_1.p
MNWAKFRETGSPEDTDMSSTPISSDTTAVSKVIDPNYVLMVADFFKAISPDESCNDFTSFDSFSVLFQNNTRALSIARGRVSCSVTVTPGISNFFKGLHGGAVASIAERVAMACVKTVVSEDKHLFIGELSMSYLSSAPISSELLVEGTVVRTGRNLSVVTVEFKIKETMKVTYLSRATFYHSPISKL

SEQ ID NO: 5657 - protein, 1031 aa, Arabidopsis thaliana
  Clone ID: ARATH-23APR03-C11611_1.p
MKLSFSLVFNALTLLLQVCIFAQARFSNETDMQALLEFKSQVSENNKREVLASWNHSSPFCNWIGVTCGRRRERVISLNLGGFKLTGVISPSIGNLSFLRLLNLADNSFGSTIPQKVGRLFRLQYLNMSYNLLEGRIPSSLSNCSRLSTVDLSSNHLGHGVPSELGSLSKLAILDLSKNNLTGNFPASLGNLTSLQKLDFAYNQMRGEIPDEVARLTQMVFFQIALNSFSGGFPPALYNISSLESLSLADNSFSGNLRADFGYLLPNLRRLLLGTNQFTGAIPKTLANISSLERFDISSNYLSGSIPLSFGKLRNLWWLGIRNNSLGNNSSSGLEFIGAVANCTQLEYLDVGYNRLGGELPASIANLSTTLTSLFLGQNLISGTIPHDIGNLVSLQELSLETNMLSGELPVSFGKLLNLQVVDLYSNAISGEIPSYFGNMTRLQKLHLNSNSFHGRIPQSLGRCRYLLDLWMDTNRLNGTIPQEILQIPSLAYIDLSNNFLTGHFPEEVGKLELLVGLGASYNKLSGKMPQAIGGCLSMEFLFMQGNSFDGAIPDISRLVSLKNVDFSNNNLSGRIPRYLASLPSLRNLNLSMNKFEGRVPTTGVFRNATAVSVFGNTNICGGVREMQLKPCIVQASPRKRKPLSVRKKVVSGICIGIASLLLIIIVASLCWFMKRKKKNNASDGNPSDSTTLGMFHEKVSYEELHSATSRFSSTNLIGSGNFGNVFKGLLGPENKLVAVKVLNLLKHGATKSFMAECETFKGIRHRNLVKLITVCSSLDSEGNDFRALVYEFMPKGSLDMWLQLEDLERVNDHSRSLTPAEKLNIAIDVASALEYLHVHCHDPVAHCDIKPSNILLDDDLTAHVSDFGLAQLLYKYDRESFLNQFSSAGVRGTIGYAAPEYGMGGQPSIQGDVYSFGILLLEMFSGKEPTDESFAGDYNLHSYTKSILSGCTSSGGSNAIDEGLRLVLQVGIKCSEEYPRDRMRTDEAVRELISIRSKFFSSKTTITESPRDAPQSSPQEWMLNTDMHTM

SEQ ID NO: 5658 - protein, 302 aa, Arabidopsis thaliana
  Clone ID: ARATH-23APR03-C11616_1.p
MVPSSKAVVFARQMAKQIRVTTPSMSATRFLSTGDNGQVDEQQNPPEPLPNRPLRGERSSNSHREPPARQAHNLGKSDTTLSDDGFLEQFKLGVNQDSRETPKPEQYPQEPLPPPEDSDEIFKKMKEGGLIPNAVAMLDGLCKDGLVQEAMKLFGLMRDKGTIPEVVIYTAVVEAFCKAHKIEDAKRIFRKMQNNGIAPNAFSYGVLVQGLYNCNMLDDAVAFCSEMLESGHSPNVPTFVELVDALCRVKGVEQAQSAIDTLNQKGFAVNVKAVKEFMDKRAPFPSLAWEAIFKKKPTEKPF

SEQ ID NO: 5659 - protein, 538 aa, Arabidopsis thaliana
  unsure (1)..(538): unsure at all Xaa locations
  Clone ID: ARATH-23APR03-C11619_1.p
MALVKTETQALGNHQHSSRFGSLYVGDLSPDVTEKDLIGKFSLNVPVVSVHLCRNSVTGKSMCYAYINFDSPFSASNAMTRLNHSARPGPAPRIMWSQRDLAYRRRTRTGFANLYVKNLDSSITSSCLERMFCPFGSILSCKVVEENGQSKGFGFVQFDTEQSAVSARSALHGSMVYGKKLFVAKFINKDERAAMAGNQDSTNVYVKNLIETVTDDCLHTLFSQYGTVSSVVVMRDGMGRSRGFGFVNFCNPENAKKAMESLCGLQLGSKKLFVGKALKKDERREMLKQKFSDNFIAKPNMRWSNLYVKNLSGSMXNETRLREIFGCYGQIVSAKVMCHENGRSKGFGFVCFSNCEESKQAKRYLNGFLVDGKPIVVRVAERKEDRIKRLQQYFQAQPRQYTQAPSAPSPAQPVLSYVSSSYGCFQPFQVGTSYYYMGNQVPQMSGHQNITTYVPAGKVPLKERRSMHLVYKHPAYPVAKRGAKQTLVFKGEVNRNLEAGTSTKATTCGENGKEERRLAETGKLGGEEKEEETGDQKE

SEQ ID NO: 5660 - protein, 394 aa, Arabidopsis thaliana
  unsure (1)..(394): unsure at all Xaa locations
  Clone ID: ARATH-23APR03-C11684_3.p
ELSDPPGLQESAEHLRTPRKKYPKAFSIISKTTKKPFYPQNKVSTSLQSRNPTPKKEKKYVSLPHLILYLTLXRVVVTGETLRPKXYSETCPEAESIVRREMKKXMIKEARSVASVMRFQFHDCFVNGCDASLLLDDTPXNMLGEKLSLSNIDSLRSFEVVDDIKEALEKACPATVSCADIVIMAARDAVALTGGPDWEVKLGRKDSLTASQQDSDDIMPSPRANATFLIDLFERFNLSVKDMVALSGSHSIGQGRCFSIMFRLYNQSGSGKPDPALEPTYRKKLDNLLFKHNKVGTGGGNVTGDLYATPQVFDNQYFKDLVSGRGFLNSDQTLYTNLVTREYVKMFSEDQDEFFWASPQGMVKLGDLQSGRPGEIRFNCRVVNRRPIDVLLVS

SEQ ID NO: 5661 - protein, 254 aa, Arabidopsis thaliana
  unsure (1)..(254): unsure at all Xaa locations
  Clone ID: ARATH-23APR03-C11694_1.p
MINLAYQEQDLGMLMMNTAPSSSTRKKXAARGWNFLVVRVSLGPWKHGMGFRSSLYSDMXATFQLKGAEPPGFSFQIVNTNLDEISPRARRRSALLTWQHIASLPPTLPVVYCGGFNTQKESTTGRFLLGRSREHGVVGDMRDAWPSARVGKNVALIRTYHDFKGDKQGTVEFLKLIFRALCLCWDRQTQDLHTDWILYRGRSIVPVMCEIVNDKIDDLYPSSHYPVFAEFMLPRSVRMLEPTPPVSAPAQEES

SEQ ID NO: 5662 - protein, 550 aa, Arabidopsis thaliana
  unsure (1)..(550): unsure at all Xaa locations
  Clone ID: ARATH-23APR03-C117553_1.p
MRLILTVMCSFIPYLYSSSPHRPCSSPISRPPPRIRPCRLSRFATALVATSALLLASVAWLSLVFSPTTSRCWHLLKGWEDNHLWSKRYHHPIVTPPPPPPSPPSLPALPLFDHEFRNRSLSEIDKLDLSMNHLMFGIAGSSQLWERRKELVRLWWKPSQMRGHVWLEEQVSPEEGDDSLPPIIVSEDSSRFRYTNPTGHPSGLRISRIAMESFRLSLPNVRWFVLGDDDTIFNVHNLLAVLSKYDPSEMVYIGNPSESHSANSYFSHNMAFGGGGIAISYPFXAEALSRIHGGCLDRYPKLYGSDDRLHACITELGVPLSREPGFHQWGIKGIARRLPPSLPLAPFVASRPVDAVIPLLPGLSTLDSLKLLTRAMSLDPRSVETLDKSYDHTHKLTFAISLGYVVQVFPXSILLPRDLERAELSFSAWNGISQPSEFDLDIKLPISSLCKKPILFFLKEVGQEGNATLGTYSRSLVKDDLKTKLLCFPRSLPLHKVDKIQVSGFPLSKNWHLAPRRLCCRATPTTTNEPLRLTVGQCGKIILGSTISSQ

SEQ ID NO: 5663 - protein, 632 aa, Arabidopsis thaliana
  Clone ID: ARATH-23APR03-C11773_1.p
MADESQYSSDTYSNKRKYEEPTAPPPSTRRPTGFSSGPIPSASVDPTAPTGLPPSSYNSVPPPMDEIQIAKQKAQEIAARLLNSADAKRPRVDNGASYDYGDNKGFSSYPSEGKQMSGTVPSSIPVSYGSFQGTTKKIDIPNMRVGVIIGKGGETIKYLQLQSGAKIQVTRDMDADPNCATRTVDLTGTPDQISKAEQLITDVLQEAEAGNTAGSGGGGGRRMGGQAGADQFVMKIPNNKVGLIIGKGGETIKSMQAKTGARIQVIPLHLPPGDPTPERTLQIDGITEQIEHAKQLVNEIISGENRMRNSAMGGGYPQQGGYQARPPSSWAPPGGPPAQPGYGGYMQPGAYPGPPQYGQSPYGSYPQQTSAGYYDQSSVPPSQQSAQGEYDYYGQQQSQQPSSGGSSAPPTDTTGYNYYQHASGYGQAGQGYQQDGYGAYNASQQSGYGQAAGYDQQGGYGSTTNPSQEEDASQAAPPSSAQSGQAGYGTTGQQPPAQGSTGQAGYGAPPTSQAGYSSQPAAAYNSGYGAPPPASKPPTYGQSQQSPGAPGSYGSQSGYAQPAASGYGQPPAYGYGQAPQGYGSYGGYTQPAAGGGYSSDGSAGATAGGGGGTPASQSAAPPAGPPKASPKS

SEQ ID NO: 5664 - protein, 941 aa, Arabidopsis thaliana
  Clone ID: ARATH-23APR03-C11781_1.p
MVERRNPLVLSSTRSTLRSVLNSSQPSSADGDRVLNKDGDLLRGNARLSAGILRWRKDGENVSDAKLDSLDDSALVGLSTQLLKRLSINSGSLVVVKNIEIGIQRVAQVVVLDPPKTTLEDASLTQVPVSDSLHTMLVFPTYDLMGQQLLDQEVAYLSPMLAFNLSLHISCLKSLVHRGNGVLEKYFEAKCDEEFIGKSAEDGSKIGLDLEPVSQVPGYASHLRVSFVKIPECGTIPSLKVNSSFEAEERQGLIDSALQKYFGTDRQLSRGDIFRIYIDWNCGSSICNPCSQRLCSESDDYIYFKVIAMEPSNERFLRVNHSQTALVLGGTVSSGLPPDLLVYRSKVPMPLQEETVNILASVLSPPLCPSALASKLRVAVLLHGIPGCGKRTVVKYVARRLGLHVVEFSCHSLLASSERKTSTALAQTFNMARRYSPTILLLRHFDVFKNLGSQDGSLGDRVGVSFEIASVIRELTEPVSNGDSSMEEKSNSNFSENEVGKFRGHQVLLIASAESTEGISPTIRRCFSHEIRMGSLNDEQRSEMLSQSLQGVSQFLNISSDEFMKGLVGQTSGFLPRDLQALVADAGANLYISQESETKKINSLSDDLHGVDIHQASQIDNSTEKLTAKEDFTKALDRSKKRNASALGAPKVPNVKWDDVGGLEDVKTSILDTVQLPLLHKDLFSSGLRKRSGVLLYGPPGTGKTLLAKAVATECSLNFLSVKGPELINMYIGESEKNVRDIFEKARSARPCVIFFDELDSLAPARGASGDSGGVMDRVVSQMLAEIDGLSDSSQDLFIIGASNRPDLIDPALLRPGRFDKLLYVGVNADASYRERVLKALTRKFKLSEDVSLYSVAKKCPSTFTGADMYALCADAWFQAAKRKVSKSDSGDMPTEEDDPDSVVVEYVDFIKAMDQLSPSLSITELKKYEMLRDQFQGRSS

SEQ ID NO: 5665 - protein, 532 aa, Arabidopsis thaliana
  Clone ID: ARATH-23APR03-C11792_1.p
MVKRNRVPPAEQALPIEEDCKSLIKKLASCKQSIRDRSLRTVLRTWLPEQTEISDEDMKKLWQGIFYCVWHADKSLYQSELIDRLSSALQSLPLPLSIHYFTVFLFTMRREWSRIDRLRLDKFYLLIRRFLHGFFSLIDSNSWDLEFTRRLMGILFDGTLLADDKFQGNGVNYHITSAFVEELRPFLPLRKEVLELLFAPFVKIMGVVNDKILVGKIKSNLFDELLKMGKKLLIIKQSGDDAVPEDDDVVVLGSIALSMEFAKRFYELGSSPECHQGNRKLIFALHKEFLQLEKDMSSSSIEVSIVEASRPGNDEVPESVPVSESNTNVVSKSKKIVANGSSSKKKGLKKCSKTKKDSVKKGAVMDSVVDLGNKDESFDETMISDLRQEFEKIASEMSPSKSEVASVCDVAEPVSVSKKTKKRKRENKGEEQVSTVNRDAAETSLAGPSSEKSSKRVRFAMKNNLVWKPHCPLPPQDLRCPPSATPRGSALKQGIPAGPVRELASRKTKKKVKPAARRGVKSIKNLKKKLSP

SEQ ID NO: 5666 - protein, 973 aa, Arabidopsis thaliana
  Clone ID: ARATH-23APR03-C11824_1.p
MSSHHQILQIRSDPFVLSHCCRHTRLTSSLTLQSPLKQPFSCLPFRWRRSYRGGVRSSTTETHGSKKEALVSETATTSIELKRVYPFHEIEPKWQRYWEDNRIFRTPDDVDTSKPKFYVLDMFPYPSGAGLHVGHPLGYTATDILARLRRMQGYNVLHPMGWDAFGLPAEQYAIETGTHPKTTTLKNIDRFRLQLKSLGFSYDWDRELSTTEPDYYKWTQWIFLQLYKKGLAYQAEVPVNWCPALGTVLANEEVVDGVSERGGHPVIRKPMRQWMLKITAYADRLLEDLDELEWPESIKEMQRNWIGRSEGAELNFSILDGEGRETDKEITVYTTRPDTLFGATYMVVAPEHQLLSYFVTAEQKQQVEEYKDFASRKSDLERTELQKDKTGVFTGCYAKNPANGDAIPIWVADYVLASYGTGAIMAVPAHDTRDNEFALKYNIPIKWVVRNEANSSDDAKQVYPGLGIIENSSTLETGLDINQLSSKEAALKVIEWAERTGNGKKKVNYKLRDWLFARQRYWGEPIPILILDESGETIAISESELPLTLPELNDFTPTGTGEPPLSKAVSWVNTVDPSTGKPAKRETSTMPQWAGSCWYYLRFMDPKNPEALVDKEKEKYWSPVDVYVGGAEHAVLHLLYSRFWHKVLYDIGVVSTKEPFKCVINQGIILGEVQYTAWKDQEGNYVSADTEERLNEHQQVTIPEEKVIKSGDHFVLKEDPSIRLIPRVYKMSKSRGNVVNPDDVVLEYGADSLRLYEMFMGPFRDSKTWNTSGIEGVHRFLARTWRLVIGLPQSDGSFKDGTLVTDDEPTLEQLRTLHKCIAKVTEEIESTRFNTGISGMMEFVNAAYKWNNQPRGIIEPFVLLLSPYAPHMAEELWSRLGHPNSLAYESFPKANPDYLKNTTIVLPVQINGKTRGTIEVEEGCSEDDAFVLASQDDKLRKYLDGQSIKKRIYVPGKILNVILDRTNVKVTTK

SEQ ID NO: 5667 - protein, 434 aa, Arabidopsis thaliana
  Clone ID: ARATH-23APR03-C11826_1.p
MMQQQDRIGDETDLESFTSSVPSRDASHRFSSHQFSGMVRQRAYIFDGDGKYYNKEWDLAEGTGKEFCWYHVELPKGNQKLSQSAQHLIDALCPPLKLQDILALASNGPFCGHVDGALVFRVNSPGPASSSNTFKIAARITENSVITVSLGRVPRLGFSPMGQSLLSEVPSVIEEHVLEFLLKMNHSEEADNPVPTSVSNLVVHIIDTHVDRLQDVVTELEIELDGVELEMDRGGFAMKKKMLDDRRFPKLHLNLQRLLQVIAHGEQVFPRVKEKCSTKPWFLAEDIHSLEELIGRLRRLKENVGFIANRVTAIQAGLDSWQAEQINRKLYYLSFLSIIFLPLSIITGVFGMNVGGVPWTGQDKPELRDGFRNVMYICLIMLVLVLCCFGFPALYSRIASWWGTRDMKRSWSLNRRSFKKIPNIVQERKGYLRL

SEQ ID NO: 5668 - protein, 635 aa, Arabidopsis thaliana
  Clone ID: ARATH-23APR03-C118338_1.p
MEGKPNYVIQVEEELPTLLRKATTEEMVGFDNYKENGHPFPHSISRFHPSHASTTTLNGQETSRSIDTMEAHHHNYNETTPWTHQRKPSISMPTSPNVLMISDPTTSLSSENHKNSGSTGKSVKFLSQPMTKVSSLYIESGNGDDDRRQSHDNHHHHLHRQHQSGHHQNQNQAANKLKDNRYNSFKTWSGKLERQFTRKPASVEPEAPNRNNQNLNTNEAMPVDRYYDALEGPELETLRPQEEIVLPNDKKWPFLLRYPISTFGMCLGVSSQAIMWKTLATAEPTKFLHVPLWINQGLWFISVALILTIATIYLLKIILFFEAVRREYYHPIRINFFFAPFISLLFLALGVPPSIITDLPHFLWYLLMFPFICLELKIYGQWMSGGQRRLSRVANPTNHLSVVGNFVGALLGASMGLREGPIFFYAVGMAHYLVLFVTLYQRLPTNETLPKDLHPVFFLFVAAPSVASMAWAKVTGSFDYGSKVCYFIAIFLYFSLAVRINFFRGIKFSLSWWAYTFPMTGAAIATIRYATVVKSTMTQIMCVVLCAIATLVVFALLVTTIIHAFVLRDLFPNDLAIAISNRPRPKQNSQHRWLDQLRNVSSENIENYLKFTDSDSSQSNDVEACNGKTQESDSS

SEQ ID NO: 5669 - protein, 368 aa, Arabidopsis thaliana
  Clone ID: ARATH-23APR03-C11835_1.p
MDRLKLYFSVFVLSFFIVSVSSSDVNDGDDLVIRQVVGGAEPQVLTSEDHFSLFKRKFGKVYASNEEHDYRFSVFKANLRRARRHQKLDPSATHGVTQFSDLTRSEFRKKHLGVRSGFKLPKDANKAPILPTENLPEDFDWRDHGAVTPVKNQGSCGSCWSFSATGALEGANFLATGKLVSLSEQQLVDCDHECDPEEADSCDSGCNGGLMNSAFEYTLKTGGLMKEEDYPYTGKDGKTCKLDKSKIVASVSNFSVISIDEEQIAANLVKNGPLAVAINAGYMQTYIGGVSCPYICTRRLNHGVLLVGYGAAGYAPARFKEKPYWIIKNSWGETWGENGFYKICKGRNICGVDSMVSTVAATVSTTAH

SEQ ID NO: 5670 - protein, 120 aa, Arabidopsis thaliana [sequence omitted]

SEQ ID NO: 5671 - protein, 163 aa, Arabidopsis thaliana
  Clone ID: ARATH-23APR03-C1190_1.p
MTIALTIGGNGFSGLPGSSFSSSSSSFRLKNSRRKNTKMLNRSKVVCSSSSSVMDPYKTLKIRPDSSEYEVKKAFRQLAKKYHPDVCRGSNCGVQFQTINEAYDIVLKQIKNQMEGTEEFEPFDVYDEGLNGMNDPDCDTWEEWMGWEGAGTRDYSSHVNPYA

SEQ ID NO: 5672 - protein, 293 aa, Arabidopsis thaliana
  Clone ID: ARATH-23APR03-C119141_1.p
MVAPPIAAASLELPPPFPAVFEQPMEKLTFPNEFPYEFASSTFSTSPEDSTETEDETTDDEDDFLAGLTRRLALSTQRLSSPSFVTDKSQMKPKVTESTQSGLGSPNGPFSQVPSPPTSPSREEDSLKVLSAAAGEVAKIKKANFDAKPISYPNPNPNYLTSFPQNVAYYNCYWLWEPHYPQSQMGIVPNAWHIPPSPVRAFYTLPTAVKSPSTGTGVFLPRKYSNPSDSPKKKSGDGCVKVVNQQKPKIEVLPVRCKPNSKAGLSTGRSKIDYVAGGGCLKHEKPLLQEWMY

SEQ ID NO: 5673 - protein, 372 aa, Arabidopsis thaliana
  Clone ID: ARATH-23APR03-C119_10.p
MALRTVLVSDVPSLPDSVYGLSEGLELSKPTSFRLPGFSVIGHRGIGMNVLQSSDRRARGVKENSILSFNSAAKYPIDFIEFDVTKDDCPVIFHDDFIYSEENGIVNESRVTDLSLSEFLLYGPQKETEKIGKTLMRKSKEGKVLKWDVDLDDSLCTLQEAFEQVEQTLGFNIELKFDDQTVYEREFLDHILRSVLQVVSNYAKDRPVIFSSFQPDAAKLVRELQSTYPVFFLTDAGNEIHNDERRNSLEEAIQVCLEGGLQGIVSEVKGVFRNPAAISKIKESNLSFLTYGKLNNVGEAVYMQYVMGIDGVIVDFVEEIIESTTRMMIRPPPSSSPLPSPSKDDDVAITRPEFSQKEISFLLKLLSQLIQH

SEQ ID NO: 5674 - protein, 434 aa, Arabidopsis thaliana
  Clone ID: ARATH-23APR03-C11_1.p
MMADTEMQEQDVPSGTKGVVEEPSELEKDLNSIERPKSPVPEDTTHTLDSDVHLSDAPIANQIEANEEVGGQNSVDGRNGDVDQSEKKITSDGGQEETTLGESNPLKGDPSSPHVPEESVKKWKTWLLSDAEAREVDEAGAPQDQEAFIKEVEAFNKENFLEFKAPKFYGQPLNCLKLWRAVIKLGGYDVVTTSKLWRQVGESFHPPKTCTTVSWTFRIFYEKALLEYEKHLRQNGELNLPGSASLPSSGIEKEASSHQASGSGRTRRDAAARAMQGWHSQRLLGSGEVTEPIVKEKGLNSTPKQKNLKNIGVQKQKTTTGMDLVFSHESEKQSTAEVIDVGPPADWVKINVRETKDCFEIFALVPGLLREEVRVQSDPAGRLVIAGQPEQLDNPWGITPFKKVVNFPARIDPLHTSAVVSLHGRLFVRVPFEQ

SEQ ID NO: 5675 - protein, 556 aa, Arabidopsis thaliana
  unsure (1)..(556): unsure at all Xaa locations
  Clone ID: ARATH-23APR03-C12006_1.p
LALLVWRKRKLEFNEYDFHSRECPSVDSRMPLFVSFKDXITQPISVPFTWEQAPGRLKGNDFKPQVXVLMKEEEQVFTPCLPPGKAVDANMTRLQSSKGKQVEESDDDEDDVFSDALDTLSPKDSFSFNNSISGVSEYGGVETKKPLDAQSRDFMMSRFLPAAKAMTVEQSHYASNRKPSTFMAEPTIQIRELVPGEKQQTPNRYDVSIVPSYYYHQDIDDEESKVGEEDDEVSEYAYLSKRGCGMLPQLCFKDSLGMLNTVPGFKAKHNSPITSPSHDQVKSSKVAQLKYRFQSVKKLALDSVSKHKLSGKVHSPVHPSNGKKFNSESNLISAAKRSSSPYRHSRCMSPFRSTGNGSPLHHAGFPETRRETENLRANRLSNHTRNISRTSQELLYPKSNGSILEKTVYVDTENDHMTNDQHNSNLMIFPEEADMTGRKPDANPELEAFENISIRSSEMVKGNELVEISSGFDRSPLAPPSPKRPSESWLCHNLPSVTSQITSRRYHPFNPQKQDLTENYRNGTKWETIVKTSYMHRDHIRYSEELVAHTSHQSKT

SEQ ID NO: 5676 - protein, 270 aa, Arabidopsis thaliana
  Clone ID: ARATH-23APR03-C12010_1.p
MSSSPDIAGILDNTKELDRLRKEQEEVLVEINKMHKKLQATPEIVEKPGDISLSKLKNLYIQAKELSESEVTVSNILLTQLDSLLPSGPTGQQRRKLEGNEQKRKRMKVDTDVTRVSPSMRNQIEAYASLKGEQVAARVTAEDAEKDEWFVVKVIHFDRETKEVEVLDEEPGDDEEGGGQRTYKLSMSCILPFPKRNDPSSTQEFIPGKHVLAVYPGTTALYKATVISTPRKRKSDEYLLEFDDDEEDGALPQRTVPFHKVVALPEGHRQ

SEQ ID NO: 5677 - protein, 802 aa, Arabidopsis thaliana
  Clone ID: ARATH-23APR03-C12022_1.p
MLRRLGWLIGLSQRSRQTKSIDAEPYVARVKPVLMIDTVQEIAIYIHRFHNLDLFQQGWYQIKISMRWEDGDNNSCGIPSRVVQYEALDSTSNDSYGVWKIDDKDSSFLTQPFRIKYARQDVRLCMMVSFTMPLERYEGSATSAVILKFELLYSPIMEDIPVTHSDACAAAVHEFRIPPKALSGVHSYCPVHFDTFHAVLIDVSVHVSVMKSAAYKRPAILSSDASNGKNLTSGNIQSSKKAFTQIASADKKLVSFVKALLGARDTLLEEMQRLSKAVGQTVDLSEFVSSMDNALLSDSGSTGKSVEVEGSGQGKLQNNLEKLNGPFDLASDDWLHNFSKEHLSRTFHLLGTQLHYLWNTFLTLHRDNYTKILEYLRDIWTKDRRAEWSIWMVYSKVEMPHHFISGMEDISNHSSHKRVSTGLKLNDPAQVASTRAELHRRSIAQMRINNRAIQDMHIFGDPMRVPIVIIERVWNAPRRTFSDNSYMRHVDRIDSSLLNGHDDESGTKKHINPQHTGRELKIVVFVHGFQGHHLDLRLIRNQWLLIDPKIEFLMSEANEERTHGDFREMGQRLAQEVVSFFKRKKDKHARYGRLKNIKLSFVGHSIGNVIIRAAIADSLMDPYRKYFHTYISLSGPHLGYLYSSNSLFNSGLWLLKKLKSTQVIHQLTLTDDPDLQNTFFYKLCKQKTLCSFKNIILLSSPQDGYVPYHSARIESCQPASFDNSKRGVAFLEMLNNCMDQIRGPSPETPHHQRVFMRCDVNFDTTLYGRNLNSFIGRAAHIEFLESDVFARFIMWSFQDLFR

SEQ ID NO: 5678 - protein, 288 aa, Arabidopsis thaliana
  Clone ID: ARATH-23APR03-C12052_1.p
TVVLKDVESKTLYSNGLKLKRITLDSKKAHRIEKKEKKEKRKEKKETKREKSHKHSIKATDNHHKLIFLPSKKVSDESDSLEKSGLTDELEEPQKHLGYLSDGSQNSKKRIRDDSPPAVESLIKAAPVAGKPLRIRMVFKKPKEEVPTLPREAVVCSTTVAKSLSHQDVITSSISSSKTSELEKNLPSTSIAAIDETKKRKKHRSSKEDQYNALFDGWTPPSMCIADASSNDNGDYWLFGNKTQEVLKPKAAVKVDDDTMMRPGDSSWPRAQFLSEVGIYSLPYTVPF

SEQ ID NO: 5679 - protein, 130 aa, Arabidopsis thaliana
  Clone ID: ARATH-23APR03-C12077_1.p
MSNRRRTGDDDKGLLWKLPQVRIRDIGKVGPAFGLGVGCGFGFGAGLIGGVGFGPGVPGLQFGLGFGAGCGIGVGFGYGVGRGAAYDHSRSYYNVGKPSLNEVDSLIDELVVSTKKLVKATTNEIDKWLK

SEQ ID NO: 5680 - protein, 411 aa, Arabidopsis thaliana
  unsure (1)..(411): unsure at all Xaa locations
  Clone ID: ARATH-23APR03-C12089_1.p
MAQCVRSTLNPVRTPQSFTRKAYVKSPAFASVSFLRAVPEFNKYPKPCSLVMSCQGKAQNQQEERPQLSLDDLVTSNRKGEVLGTIKDSLSNCLSETNLLATVPGLKSRIKGKVRDIYDAXDYLVLITTDRLSAFDRNLASIPFKGQVLNETSLWWFNNTQHITPNAIVSSPDRNVVIAKKCSVFPIEFVVRGYVTGSTDTSLWTVYNKGVRNYCGNELSDGLVKNHKLPANILTPTTKAADHDVPISPNEIVEGGFMTQAEFDEASMKALSLFEFGQGVAKKHGLILVDTKYEFGRSSDGSILLIDEIHTPDSSRYWLAGSYEERFQKGLEPENVDKEFLRLWFKENCNPYEDEVLPAAPAELVTELAWRYIFLYETITGSRIDIIPTQEPIHDRISRNTSQALSSLRQL

SEQ ID NO: 5681 - protein, 258 aa, Arabidopsis thaliana
  Clone ID: ARATH-23APR03-C12098_1.p
MAASANPSGNNQEGSSATQKVSSSSAAAANGAAVNSVDNGGNTGAAADNSQTIGALRHNPGISTDWTLEEQSLLEDLLVKYATEPSVFRYAKIAMKMKDKTVRDVALRCRWMTKKENGKRRKEDHSSRKSKDKKEKATDSSAKSSSHLNVHPNGPSYAPPMMPIDTDDGISYKAIGGVSGDLLEQNAQMFNQLSTNFSAFQLHENVNILCKARDNILAILNDLNDMPEVMKQMPPLPVKLNEELANSILPRPSHQRKS

SEQ ID NO: 5682 - protein, 247 aa, Arabidopsis thaliana
  Clone ID: ARATH-23APR03-C1209_1.p
MANLFTATAPFLSLSKPFTKTASYHQCYASSSNPPEPESSSPPPPPPPPQPLASQQKRKKNVETTDWVASSLTRRFGIGAGLAWAGFLAFGVISEQIKTRIEVSQEVANTRDVEEEKEIVLPNGIRYYDQRVGGGATPRAGDLVVIDLKGQVQGTGQVFVDTFGTKDKKKMKPLALVVGSKPYSKGLCEGIDYVLRSMKAGGKRRVIVPPSLGFGVDGAELESGLQIPPNASLEYIVEIDRVSIAPA

SEQ ID NO: 5683 - protein, 139 aa, Arabidopsis thaliana
  Clone ID: ARATH-23APR03-C12113_1.p
MAHGRYDTYKKKSGQIPRFGEWEEANEMPITQYFENPRQAEALKLASHHPRPRHLHAQRQTAGTKEKRGPQRRVRDVSAQSDKYYIDVNGVKQFKNDVALTCKPPKPVDEDLYKIPPEFIHSSTRKRRPSFLACLVPCA

SEQ ID NO: 5684 - protein, 537 aa, Arabidopsis thaliana
  unsure (1)..(537): unsure at all Xaa locations
  Clone ID: ARATH-23APR03-C12127_1.p
MSVVLLSSTSATITKSQSKKIPFLSPTTKFPLKVSISPSRSKLFHNPLRVAAPPSVPTSDSTEEKRIEEEYGXGDKEEEGSEFKWRDHWYPVSLVEDLDPNVPTPFQLLGRDLVLWFDRNDQKWAAFDDLCPHRLAPLSEGRLDENGHLQCSYHGWSFGGCGSCTRIPQAATSGPEARAVKSPRACAIKFPTMVSQGLLFVWPDENGWDRANSIEPPRLPDDFDKPEFSTVTIQRDLFYGYDTLMENVSDPSHIDFAHHKVTGRRERAGPLPFLVEXSGGWGYEPVNDDSPRITAKFVAPCYSMNKIELDAKLPIVGNQKWVIWICSFNIXMAPGKTRPXVCRPVILSVSVPXPAWWQVVPRADRFVLAFIDWLRRHGKSQPQWFGSNPYNLPLPYSVLTKRQMLHRFTPTQADRFVLAFRNWLRRHGKSQPEWFGSTPSNQPLPSTVLTKRQMLDRFDQHTQVCSSCKGAYNSFQILKKFLVGATVFWAATAGVPSDVQIRLVLAGLSLISAASAYALHEQEKNFVFRDYVHSEIE

SEQ ID NO: 5685 - protein, 1051 aa, Arabidopsis thaliana
  Clone ID: ARATH-23APR03-C12146_1.p
MLFFLFFFYLLLSSSSDLVFADRRVLHEPFFPIDSPPPSPPSPPPLPKLPFSSTTPPSSSDPNASPFFPLYPSSPPPPSPASFASFPANISSLIVPHATKSPPNSKKLLIVAISAVSSAALVALLIALLYWRRSKRNQDLNFSDDSKTYTTDSSRRVYPPPPATAPPTRRNAEARSKQRTTTSSTNNNSSEFLYLGTMVNQRGIDEQSLSNNGSSSRKLESPDLQPLPPLMKRSFRLNPDVGSIGEEDEEDEFYSPRGSQSGREPLNRVGLPGQNPRSVNNDTISCSSSSSGSPGRSTFISISPSMSPKRSEPKPPVISTPEPAELTDYRFVRSPSLSLASLSSGLKNSDEVGLNQIFRSPTVTSLTTSPENNKKENSPLSSTSTSPERRPNDTPEAYLRSPSHSSASTSPYRCFQKSPEVLPAFMSNLRQGLQSQLLSSPSNSHGGQGFLKQLDALRSRSPSSSSSSVCSSPEKASHKSPVTSPKLSSRNSQSLSSSPDRDFSHSLDVSPRISNISPQILQSRVPPPPPPPPPLPLWGRRSQVTTKADTISRPPSLTPPSHPFVIPSENLPVTSSPMETPETVCASEAAEETPKPKLKALHWDKVRASSDREMVWDHLRSSSFKLDEEMIETLFVAKSLNNKPNQSQTTPRCVLPSPNQENRVLDPKKAQNIAILLRALNVTIEEVCEALLEGNADTLGTELLESLLKMAPTKEEERKLKAYNDDSPVKLGHAEKFLKAMLDIPFAFKRVDAMLYVANFESEVEYLKKSFETLEAACEELRNSRMFLKLLEAVLKTGNRMNVGTNRGDAHAFKLDTLLKLVDVKGADGKTTLLHFVVQEIIRAEGTRLSGNNTQTDDIKCRKLGLQVVSSLCSELSNVKKAAAMDSEVLSSYVSKLSQGIAKINEAIQVQSTITEESNSQRFSESMKTFLKRAEEEIIRVQAQESVALSLVKEITEYFHGNSAKEEAHPFRIFLVVRDFLGVVDRVCKEVGMINERTMVSSAHKFPVPVNPMMPQPLPGLVGRRQSSSSSSSSSTSSSDEDEHNSISLVS

SEQ ID NO: 5686 - protein, 602 aa, Arabidopsis thaliana
  Clone ID: ARATH-23APR03-C1216_1.p
MASVEGDDDFGSSSSRSYQDQLYTELWKVCAGPLVEVPRAQERVFYFPQGHMEQLVASTNQGINSEEIPVFDLPPKILCRVLDVTLKAEHETDEVYAQITLQPEEDQSEPTSLDPPIVGPTKQEFHSFVKILTASDTSTHGGFSVLRKHATECLPSLDMTQATPTQELVTRDLHGFEWRFKHIFRGQPRRHLLTTGWSTFVSSKRLVAGDAFVFLRGENGDLRVGVRRLARHQSTMPTSVISSQSMHLGVLATASHAVRTTTIFVVFYKPRISQFIVGVNKYMEAIKHGFSLGTRFRMRFEGEESPERIFTGTIVGSGDLSSQWPASKWRSLQVQWDEPTTVQRPDKVSPWEIEPFLATSPISTPAQQPQSKCKRSRPIEPSVKTPAPPSFLYSLPQSQDSINASLKLFQDPSLERISGGYSSNNSFKPETPPPPTNCSYRLFGFDLTSNSPAPIPQDKQPMDTCGAAKCQEPITPTSMSEQKKQQTSRSRTKVQMQGIAVGRAVDLTLLKSYDELIDELEEMFEIQGQLLARDKWIVVFTDDEGDMMLAGDDPWNEFCKMAKKIFIYSSDEVKKMTTKLKISSSLENEEYGNESFENRSRG

SEQ ID NO: 5687 - protein, 337 aa, Arabidopsis thaliana
  Clone ID: ARATH-23APR03-C12214_1.p
MSGMGDGYVGTAQDAVRIRRLQKQREAERKKIQELKSKSASGNDQSGLLQFGTSSCEILDTAFKKETVGLVTREEYVEKRVNIRNKFEEEEKEKLQKLQQEEEELQLEKRNKKRKIKGSSRLSFAEDFENGSDEDDGENKSSGTGNLRCGKLGKDPSVETNFLPDSEREAEEQAERERLKKQWLREQEQIKNEPLEITYSYWDGTGHRRVIQVRKGDPIGNFLRAVQQQLAPDFREIRTASVENLLYVKEDLIIPHQHSFYELIINKARGKSGPLFHFDVHEDVRTIADATIEKDESHAGKVVERHWYEKNKHIFPASRWEIYDPTKKWERYTVHGD

SEQ ID NO: 5688 - protein, 137 aa, Arabidopsis thaliana
  unsure (1)..(137): unsure at all Xaa locations
  Clone ID: ARATH-23APR03-C122265_1.p
MQREHKTHNKLSFIYITPLYISPINQXTRLTYLSSSFLLSSSSKMCLSSSETFSDTPTRLVLYLKTQSHVRIPRLSRRRRMWREEKKMEMINLKLYVENQNIIRENEKLKKKALLLHQENKTLFSLLQTKKLSSVHK

SEQ ID NO: 5689 - protein, 280 aa, Arabidopsis thaliana
  Clone ID: ARATH-23APR03-C12244_1.p
MNLSPFKRDIDELIDEFVEDDLTTFADMKSVWLSRKFSHIYEASPNSNLAFFMQSLYVHTIGHMVSIDSFSRRLGGLYCLYCLHEIQPFKPKFRIYISLQELGKFRDLVVEAKDKGVEIAAAVAKKMLDENMLIFGAVDETSATKTIHQLTELQNARVRFAYEKLICDTSINQFIHLDMGKEVDLNSLDKMSIEYAEAKKRAVEGAGEIMEIDDIKHISEEKELMGERMEKLKEEWDSQRLYFYEQTKLDGFTTTPKQLTNVEHDEDDGFDELDRLLSQS

SEQ ID NO: 5690 - protein, 251 aa, Arabidopsis thaliana
  Clone ID: ARATH-23APR03-C12249_1.p
MYYQLTKSSYRDSLKILEADIEHANGLAAEIPMGKSGVRLQMKLVCSNLAPFFIFLLQWMDFSCLLPRYFDFFHILIYKVRADGRWNRSRYGRKATIREFYGVILPSLERLHINFADLPDESLWYPNPKAITKKQYDIEGSRYMNSIDLEREDECGICLEPCTKMVLPNCCHAMCIKCYRNWNTKSESCPFCRGSIKRVNSEDLWVLTCDEDVVDPETVTKEDLLRFYLHINSLPKDYPEAAFLVYNEYLI

SEQ ID NO: 5691 - protein, 400 aa, Arabidopsis thaliana
  Clone ID: ARATH-23APR03-C12252_1.p
MRFRSFFFSSSIFSLSHSRSPSLSSSRFSSLSAAMSPALEKSRQGNGGCNDDSKSKVTVVGSGNWGSVAAKLIASNALKLPSFHDEVRMWVFEEVLPNGEKLNDVINKTNENVKYLPGIKLGRNVVADPDLENAVKDANMLVFVTPHQFMDGICKKLDGKITGDVEAISLVKGMEVKKEGPCMISSLISKQLGINCCVLMGANIANEIAVEKFSEATVGYRGSREIADTWVQLFSTPYFMVTPVHDVEGVELCGTLKNVVAIAAGFVDGLEMGNNTKAAIMRIGLREMKALSKLLFPSVKDSTFFESCGVADVITTCLGGRNRRVAEAFAKSRGKRSFDELEAEMLQGQKLQGVSTAREVYEVLKHCGWLEMFPLFSTVHQICTGRLQPEAIVQYRENKL

SEQ ID NO: 5692 - protein, 771 aa, Arabidopsis thaliana
  unsure (1)..(771): unsure at all Xaa locations
  Clone ID: ARATH-23APR03-C122594_1.p
MNRLGHKSVVYHGDLRLGELDVNHVSSSHEFRFPNDEIRIHHLSPAGERCPPLAILQTIASFAVRCKLESSAPVKSQELMHLHAVCFHELKTAVVMLGDEEIHLVAMPSKEKKFPCFWCFSVPSGLYDSCLRMLNTRCLSIVFDLDETLIVANTMKSFEDRIEALKSWISREMDPVRINGMSAELKRYMDDXMLLKQYIDNDYAFDNGVLLKAQPEEVRPTSDGQEKVCRPVIRLPEKNTVLTRINPEIRDTSVLVKLRPAWEELRSYLTAKTRKRFEVYVCTMAERDYALEMWRLLDPEAHLISLKELRDRIVCVKPDAKKSLLSVFNGGICHPKMAMVIDDRMKVWEDKDQPRVHVVSAYLPYYAPQAEACALVVPHLCVARNVACNVRGYFFKEFDESLMSSISLVYYEDDVENLPPSPDVSNYVVIEDPGFASNGNINAPPINEGMCGGEVERRLNQAAAADHSTLPATSNAEQKPETPKPQIAVIPNNASTATAAALLPSHKPSLLGAPRRDGFTFSDGGRPLMMRPGVDIRNQNFNQPPILAKIPMQPPSSSMHSPGGWLVDDENRPSFPGRPSGLYPSQFPHGTPGSAPVGPFAHPSHLRSEEVAMDDDLKRQNPSRQTTEGGISQNHLVSNGREHHTDGGKSNGGQSHLFVSALQEIGRRCGSKVEFRTVISAYIELQFSVEVLFTGEKIGIGMAKTKKDAHQQAAENALRSLAEKYVAHVAPLARETEKGPENDNGFLWESSEDVSNKGLEEEAPKENISEL

SEQ ID NO: 5693 - protein, 103 aa, Arabidopsis thaliana
  Clone ID: ARATH-23APR03-C1227_1.p
MSGRGKGGKGLGKGGAKRHRKVLRDNIQGITKPAIRRLARRGGVKRISGLIYEETRGVLKIFLENVIRDAVTYTEHARRKTVTAMDVVYALKRQGRTLYGFGG

SEQ ID NO: 5694 - protein, 917 aa, Arabidopsis thaliana
  Clone ID: ARATH-23APR03-C12350_1.p
MFVASPVKTNFNGVSLVKSPAFSALSCRKQHRVPISRQVRAVISREEKAVDQEDGKKSTNKPLINSSQFPWQRSKYTGSKTVTAVVKIRKKIKEKLTERFEHQLELFMKAIGQGMLIQLVSEEIDPETGKGRKSLESPVMGLPKAVKDPRYLVFTADFTVPINFGKPGAILVTNLLSTEICLSEIIIEDSTDTILFPANTWIHSKNDNPQARIIFRSQPCLPSETPDGIKELREKDLVSVRGDGKGERKPHERIYDYDVYNDLGDPRKTERVRPVLGVPETPYPRRCRTGRPLVSKDPPCESRGKEKEEFYVPRDEVFEEIKRDTFRAGRFKALFHNLVPSIAAALSNLDIPFTCFSDIDNLYKSNIVLGHTEPKDTGLGGFIGGFMNGILNVTETLLKYDTPAVIKWDRFAWLRDNEFGRQALAGVNPVNIELLKELPIRSNLDPALYGPQESVLTEEIIAREVEHYGTTIEKALEEKRLFLVDYHDILLPFVEKINSIKEDPRKTYASRTIFFYSKNGALRPLAIELSLPPTAESENKFVYTHGHDATTHWIWKLAKAHVCSNDAGVHQLVNHWLRTHASMEPYIIATNRQLSTMHPVYKLLHPHMRYTLEINARARKSLINGGGIIESCFTPGKYAMELSSAAYKSMWRFDMEGLPADLVRRGMAEEDSSAECGVRLVIDDYPYAADGLLIWKAIKDLVESYVKHFYSDSKSITSDLELQAWWDEIKNKGHYDKKDEPWWPKLNTTQDLSQILTNMIWIASGQHAAINFGQYPFGGYVPNRPTLLRKLIPQETDPDYEMFMRNPQYSFLGSLPTQLQATKVMAVQETLSTHSPDEEYLIELREVQRHWFQDEQVVKYFNKFSEELVKIEKTINERNKDKKLKNRTGAGMPPYELLLPTSPHGVTGRGIPNSISI

SEQ ID NO: 5695 - protein, 258 aa, Arabidopsis thaliana
  Clone ID: ARATH-23APR03-C12362_1.p
MSTESYEDAIKRLGELLSKKSDLGNVAAAKIKKLTDELEELDSNKLDAVERIKSGFLHFKTNNYEKNPTLYNSLAKSQTPKFLVFACADSRVSPSHILNFQLGEAFIVRNIANMVPPYDKTKHSNVGAALEYPITVLNVENILVIGHSCCGGIKGLMAIEDNTAPTKTEFIENWIQICAPAKNRIKQDCKDLSFEDQCTNCEKEAVNVSLGNLLSYPFVRERVVKNKLAIRGAHYDFVKGTFDLWELDFKTTPAFALS

SEQ ID NO: 5696 - protein, 323 aa, Arabidopsis thaliana
  Clone ID: ARATH-23APR03-C12375_1.p
MVRPPCCDKGGVKKGPWTPEEDIILVTYIQEHGPGNWRAVPTNTGLLRCSKSCRLRWTNYLRPGIKRGNFTEHEEKMIVHLQALLGNRWAAIASYLPQRTDNDIKNYWNTHLKKKLNKVNQDSHQELDRSSLSSSPSSSSANSNSNISRGQWERRLQTDIHLAKKALSEALSPAVAPIITSTVTTTSSSAESRRSTSSASGFLRTQETSTTYASSTENIAKLLKGWVKNSPKTQNSADQIASTEVKEVIKSDDGKECAGAFQSFSEFDHSYQQAGVSPDHETKPDITGCCSNQSQWSLFEKWLFEDSGGQIGDILLDENTNFF

SEQ ID NO: 5697 - protein, 479 aa, Arabidopsis thaliana
  Clone ID: ARATH-23APR03-C123780_1.p
MGKLLVLMLVGVFLAFESLEALEYGDALNKSILFFEGQRSGKLPTNQRVKWRADSAISDGSLANVNLIGGYYDAGDNVKFVWPMSFTTTLLSWAAIEYQNEISSVNQLGYLRSTIKWGTDFILRAHTSPNMLYTQVGDGNSDHSCWERPEDMDTSRTLYSISSSSPGSEAAGEAAAALAAASLVFKSVDSTYSSTLLNHAKTLFEFADKYRGSYQASCPFYSSYSGYKDELLWAAAWLYKATGDKSYINYVISNKDWSQAVNEFSWDNKFVGAQALLVSEFYNGANDLAKFKTDVESFVCAMMSGSSSQQIKQTPGGLLFIRDSSNLQYVTTATTVLFHYSKTLTKVGVGSIQCGSTKFTVSQIRNFAKSQVDYILGNNPMKMSYMVGFGTKYPTQPHHRGSSLPSIQSKPEKIDCNGGYSYYNSDTPNPNVHIGAIVGGPNSSDQYSDKKSDYSHAEPTTYINAAFIGPVAALISSSG

SEQ ID NO: 5698 - protein, 611 aa, Arabidopsis thaliana
  Clone ID: ARATH-23APR03-C12408_1.p
MEALAGIEADIESYFGEQDQQKSSPDGCKQVPWLSWEEWDSVRESLFSSSPDRIASALERVATWRSRGSLPAPVDVTCSLIEIQLKDGFIPREKQSADALYSEHLLQMLYCMGILRLVNCVIEKTRRREDVSIADAARAIGIPRKLIDLRHEGSHRELPALSVLRDAADEALEWLKSYYWEQQKYQIPLKRDGTASIRREVKSKLRKLAFSLQLKRNPQFDSPLVKEKCSNKRIRKIVSSLVELYPSFSAEISSVLLEFLLKALDSSKSTDLQNKAGQDFRVFLDEWKPVIMELSNREPELLLTLLKEVLDMIQNNERRRHETEKPVEEVSQVEQVPFLFAWLVSLLNGSKHFQRNSSLEVKPPSIFLMELIRRCLVLGALGYELVLKSAFLLAEIVGGRVLKEKLIKLPLMHKSSAIVPLKQSSTLVTASTTLLEQEKNLGNAGKRLEFVKLQLSKKKGIDTDKTGNRWRKAKTRSPCPIGMLPRIIGSSGRLPLLDNQNAKSISKQAQGNNNAKRGAECNRNQLEKSPCKRARKSAGDSESNDVTLESYEEEAEMEIEHAYEETETVAEENLMWNDEEESRSCLMIDGEWKRVNDGELSGMASSVTICV

SEQ ID NO: 5699 - protein, 398 aa, Arabidopsis thaliana
  unsure (1)..(398): unsure at all Xaa locations
  Clone ID: ARATH-23APR03-C12409_1.p
MRRPSQMMRLLLTSFFGVIVGFLMGITFPTLTLTKMNLPSTLFPSIDLAYIEDKYSDISRQRLFGSWSSTKGLKLKNDIPDPPYNYNDTKIWVSTNPRGAERLPPDIVTPESDFYLRRLWGDPNEDLTVKQRYLVTFTVGYDQRKNIDTVLKKFSDNFSIMLFHYDGRAXEWEEFEWSKRAIHVSIRKQTKWWYAKRFLHPDIVAPYEYIFIWDEDLGVEHFDSEKYLAVVKKHGLEISQPGLEPYEGLTWEMTKKRDDTEVHKHAEERNGWCTDPNLPPCAAFVEIMAPVFSRKAWRCVSHMIQNDLIHGWGLDFAVRKCVQNAHEKIGVVDAQWIIHQGVPSLGNXGQPEQGKQPWEGVRERCRREWTMFQDRLDDAEKAYFEASAHKNASSRPHG

SEQ ID NO: 5700 - protein, 500 aa, Arabidopsis thaliana
  Clone ID: ARATH-23APR03-C12440_1.p
MVILSLVSCSFSVFSPPISLRLHLPPVTSLCSHGTFPASSTFRSQLQPLLISCLNHREPALTFRCSCLSSPIESGSQIESLFSLFRDIGFIEEETEMILAKNPDIKSTSLDKIGARVASLQSLKINGFPLQGLIAKCPNLLTSEEFDLVISFLVDELEGRLDPELVERLLSVVDTSILLSFNQKVRLLLLHGIPKEKISHVLNKVYLNKLLYQKSVEDIERLISFLEPFGGIGIIARRPVILNSDLDSQLIPRVDFIRNLSGEDDFATGTVLRRLPAILSYSVEHMNGQVEFLKSFAGLTSEQVFKIVHVFPNVISTSKERKLRPRIEFLKECGFDSPGMFKFLSKAPLILALSENNLSHKLGFLVKIGYKHRTKELAFAMGAVTRTSSDNMQRVIGLYLSYGLSFEDILAMSTKHPQVLQYNYTSLEEKLEYLIEYMGREVEELLAFPAFLGYKLDSRIKHRYEEKLKSRGENMSLNKLLTVSAERFSKAADNIEMICL

SEQ ID NO: 5701 - protein, 805 aa, Arabidopsis thaliana
  Clone ID: ARATH-23APR03-C12466_1.p
MGMVLFAGLLLLLIFPTCGYAAINTSSPLSIRQTLSSPGGFYELGFFSPNNTQNQYVGIWFKKIVPRVVVWVANRDTPVTSSAAALTISSNGSLILLDGKQDVIWSTAGKAFSSNKCHELLFNTNFVVIDDVSGNKLWQSFEHLGNTMLPQSSLMYDTSNGKKRVLTTWKSNSDPSPGEFSLEITPQIPTQGLIRRGSVPYWRCGPWAKTRFSGISGIDASYVSPFSVVQDTAAGTGSFSYSTLRNYNLSYVTLTPEGKMKILWDDGNNWKLHLSLPENPCDLYGRCGPYGLCVRSDPPKCECLKGFVPKSDEEWGKGNWTSGCVRRTKLSCQAKSSMKTQGKDTDIFYRMTDVKTPDLHQFASFLNAEQCYQGCLGNCSCTAFAYISGIGCLVWNGELADTVQFLSSGEFLFIRLASSELAGSSRRKIIVGTTVSLSIFLILVFAAIMLWRYRAKQNDAWKNGFERQDVSGVNFFEMHTIRTATNNFSPSNKLGQGGFGPVYKGKLVDGKEIGVKRLASSSGQGTEEFMNEITLISKLQHRNLVRLLGYCIDGEEKLLIYEFMVNKSLDIFIFDPCLKFELDWPKRFNIIQGIARGLLYLHRDSRLRVIHRDLKVSNILLDDRMNPKISDFGLARMFQGTQYQDNTRRVVGTLGYMSPEYAWAGLFSEKSDIYSFGVLMLEIISGKRISRFIYGDESKGLLAYTWDSWCETGGSNLLDRDLTDTCQAFEVARCVQIGLLCVQHEAVDRPNTLQVLSMLTSATDLPVPKQPIFAVHTLNDMPMLQANSQDFLSVNEMTESMIQGR

SEQ ID NO: 5702 - protein, 249 aa, Arabidopsis thaliana
  unsure (1)..(249): unsure at all Xaa locations
  Clone ID: ARATH-23APR03-C124753_1.p
VAEFVFSGQVNVRNHISTIVPPPSRLCLLVAXVRCLGYGASSEERTLAMIKPDGVSGNYTEEIKTIVVEAGFNIVKEMLTQLDKETASAFYEEHSSRSFFSHLVTYASGGPVLVMVLEKRNAVSDWRDLIGPTDAEKAKISHPHRFDLLPNTILDFANSNVRAKMNIVVSCITXNRSLTCYESLGCSLILFTYNMAFSCFCSIRALCGKNSQKNCVHGSDSTSSAEREIKFFFKDVVSGDIATQQHDEL

SEQ ID NO: 5703 - protein, 817 aa, Arabidopsis thaliana
  Clone ID: ARATH-23APR03-C12476_1.p
MNRNFSPAAMPPISSMTIDNSFSPPPSSGDLPEIPDAWYGNIQYLLNISVIGLLCCVSIFLFVKLRSDHRRMPGPSALFSKLLAVWKATCREIARHCGADAAQFLLIEGGSFVLLFSIAVLAVSVMLPLNLYAGTALLSDELSKTMITHIQKGSALLWLHFVFVVIVVVISHFGIAAIEARLKFTRFRDGNGNISDPNANSTAVFTIMVQGLPKNLGSDRVEFEDCFRLKYPGKVYKFIVPMDLCALDDLATELVRVRDEITWLVAKMDSRLLPDEYENVGDNGLVFCVCSLWVRVKVLWSQITERFGFTDDEKLRKLQELRADLESQLAAYKEGRAQGAGVAFVMFKDVYTANKAVQDFRNERSRRTGKFFSVTELRLQRNQWKVDRAPLATDIYWNHLGLTKVALIVRRVIVNTILLLILVFFSSPLALISALVSAGRIFNAEALDSAQYWLTWVQTSGWIGSLIFQFLPNVFIFVSMYIVIPSALSYLSKFERHLTVSGEQRAALLKMVCFFLVNLIILKALVESSLESALLKMSRCYLDGEDCKRIEEYMSPSFLSRSCVSALAFLITSTFLGISFDLLAPIPWIKKKIQKFRKNDMLQLVPEQNEEYALENQEPSSNLETPLLPENMFESPRFGDIEPMSQDLSEYPISRTSPIPKQKFDFAQYYAFNLTIFALTMIYSSFAPLVVPVGAVYFGYRYIVDKYNFLYVYRVRGFPAGNEGKLMDTVLCIMRFCVDLYLVSMLLFFSVKGDSTKLQAIFTLGVLVMYKLLPSDTDRYHPALLRSIQTVDSIIDGPVDYEAYSHPNFDWDTYNNR

SEQ ID NO: 5704 - protein, 684 aa, Arabidopsis thaliana
  Clone ID: ARATH-23APR03-C12480_1.p
MSEVNEMSGGSIGGELLRASPKVLTAGDRKLLKVELRPGDTTYVSWKKLMRDAGKVNGLSASVPDPPPNANPNLEFRIAPGHPVEIETNEQPHSNRFNAVIEKIERLYKGNDSSDGEELDGAPDDDEYDTEDSFIDDAELDEYFEVDNSTVKHDGFYVNRGKLERMEPSTTSNQQPKKRRRKDSAKPCRDAVDVSDKHTKLSITARKKDQSTAPGSWKTQESPLPSGAQDANTSVPLDDVKHSDRANHQSRNDTSHKSRETGSSSALHQKYSNKSLHQQSTSLLGKSPPNVFAEVTVVRQKENNGMHQLANVTGSRQSSQASKKDGSNVKSKTSILEKAIRELEKVVVESRPPAITENQEADTSSQAVKRRLPRDVKLKLAKVARIAQASQGKHSTELINRLMSIVGHLIQLRSLKRNLKIMIDMGDSATREKDTRFKQINNEVLDMIKAKVSLMESQAIKPEGATSDDFQDSVEKPSLKKFVMDAALEDKLCDLYDIFIDGLDEDQGPQTKKLYVNLAELWPNRLMDYRGIKHAIFRAKERRKALYGNLAKEMDQTKMKKSMKQLVPRTDCTAQPNTELVVQRQHSGEKKLIVDPNATSTSVVTSQTMVDRSNQQQPEKLKGISSSCNPTEETRVVKRKNEAVMAEKQVVLALKKPEHPQTRVIPAPQNLNIPRTTPDLNLPS

SEQ ID NO: 5705 - protein, 1625 aa, Arabidopsis thaliana
  unsure (1)..(1625): unsure at all Xaa locations
  Clone ID: ARATH-23APR03-C12483_1.p
MGFEFIEWYCKPVPNGVWTKTXVANAFGAYTPCATDSFVLGISQLVLLVLCLYRIWLALKDHKVERFCLRSRLYNYFLALLAAYATAEPLFRLIMGISVLDFDGPGLPPFEAFGLGVKAFAWGAVMVMILMETKIYIRELRCYVRFAVIYALVGDMVLLNLVLSVKEYYSSYVLYLYTSEVGAQVLFGILLFMRLPNLDTYPGYMPVRSETVDDYEYEEISDGQQICPEKHPNIFDKIFFSWMNPLMTLGSKRPLTEKDVWYLDTWDQTETLFTSFQHSWDKELQKPQPWLLRALNNSLGGRFWWGGFWKIGNDCSQFVGPLLLNQLLKSMQEDAPAWMGYIYAFSIFGGVVFGVLCEAQYFQNVMRVGYRLRSALIAAVFRKSLRLTNEGRRKFQTGKITNLMTTDAESLQQICQSLHTMWSAPFRIIIALILLYQQLGVASLIGALLLVLMFPLQTVIISKMQKLTKEGLQRTDKRIGLMNEVLAAMDTVKCYAWENSFQSKVQTVRDDELSWFRKSQLLGALNMFILNSIPVLVTIVSFGVFTLLGGDLTPARAFTSLSLFAVLRFPLFMLPNIITQVVNANVSLNRLEEVLATEERILLPNPPIEPGEPAISIRNGYFSWDSKGDRPTLSNINLDVPLGSLVAVVGSTGEGKTSLISAILGELPATSDAIVTLRGSVAYVPQVSWIFNATVRDNILFGSPFDREKYERAIDVTSLKHDLELLPGGDLTEIGERGVNISGGQKQRVSMARAVYSNSDVYIFDDPLSALDAHVGQQVFEKCIKRELGQKTRVLVTNQLHFLSQVDRIVLVHEGTVKEEGTYEELSSNGPLFQRLMENAGKVEEYSEENGEAEADQTAEQPVANGNTNGLQMDGSDDKKSKEGNKKGGKSVLIKQEERETGVVSWRVLKRYQDALGGAWVVMMLLLCYVLTEVFRVTSSTWLSEWTDAGTPKSHGPLFYNLIYALLSFGQVLVTLTNSYWLIMSSLYAAKKLHDNMLHSILRAPMSFFHTNPLGRIINRFAKDLGDIDRTVAVFVNMFMGQVSQLLSTVVLIGIVSTLSLWAIMPLLVLFYGAYLYYQNTAREVKRMDSISRSPVYAQFGEALNGLSTIRAYKAYDRMADINGRSMDNNIRFTLVNMGANRWLGIRLETLGGLMIWLTASFAVMQNGRAENQQAFASTMGLLLSYALNITSLLTGVLRLASLAENSLNAVERVGNYIEIPPEAPPVIENNRPPPGWPSSGSIKFEDVVLRYRPQLPPVLHGVSFFIHPTDKVGIVGRTGAGKSSLLNALFRIVEVEKGRILIDDCDVGKFGLMDLRKVLGIIPQSPVLFSGTVRFNLDPFGEHNDADLWESLERAHLKDTIRRNPLGLDAEVSEAGENFSVGQRQLLSLSRALLRRSKILVLDEATAAVDVRTDALIQKTIREEFKSCTMLIIAHRLNTIIDCDKILVLDSGRVQEFSSPEXNLLSNEESSFSKMVQSTGTANAEYLRSLVLDNKRAKDDSHHLQGQRKWLASSRWAAAAQFALAASLTSSHNDLQSLEIEDDSSILKRTNDAVVTLRSVLEGKHDKEIAESLEEHNISREGWLSSLYRMVEGLAVMSRLARNRMQQPDYNFEGNTFDWDNVEM

SEQ ID NO: 5706 - protein, 132 aa, Arabidopsis thaliana
  Clone ID: ARATH-23APR03-C125188_1.p
MHSLSWFLLVIGLSVGLSSGKWNEKNSVIFTNSLGRNKVLKVNCISNDDNLGFHFLRHGQTYDFSFHDSLFKSEFYCDLWQGPNFKLHAAFTAYEGGGLIVHYGKKNFWDVRDDGIYFTHGQKMPKLEYTWK

SEQ ID NO: 5707 - protein, 157 aa, Arabidopsis thaliana
  Clone ID: ARATH-23APR03-C125322_1.p
MVVVLGLQSLKWYTHGRIMETKKKRHLMRIVQATEREDSFQIDRDKAREALKQLDQQIESQADEKPRIINKTSSDVVRTNNDPIMFEEPPEISGSFLTSSAFVLLALTLFYNILFITVIKPSMDGPESVPEENSVAMSDSDIVKFPLSSLPENTFKQ

SEQ ID NO: 5708 - protein, 538 aa, Arabidopsis thaliana
  Clone ID: ARATH-23APR03-C125353_1.p
MAARSLWRTRTKLLVVGTALCGGSGAAFIASSDDPSTTLKLCTSIPVRLYRNTVTAASIAFDYEYSLLGLAEGSSERAKVKHEVHLRSAQKLQELCFKNGGIYIKLGQHIGQLEYLVPEEYVRTMRESMLNKCPISSYEQVCEVFKKEVGEMPDQVFAEFDPVPIASASLAQVHVARTHDGKKVAVKVQHAHMTDTAAADTAAVGVLVNTLHRIFPSFDYRWLLDEMSESLPKELDFLVEAKNNEKCLDNFRKLSPHIAEYVYAPTIYWNLSTSKLLTMEFMDGAQVNDVDKIRKLGIQPYEVSKLVSQTFAEMMFKHGFVHCDPHAANLIVRPDPSGKRNIYGKRKPQLVILDHGLYKELDFNTRFNYASLWKALVFSDAKAIKEHSEKLGAGDDLYVLFAGILTMRPWKQVIDTSVDHLVIQGNKEDVSELQMYASQYFSEISELLRRLPRVILLMLKTNDCLRSVNNELMQGSSLESFLIIGKVSSQAVLEAKRAEKKSLMKWLKVWLEGFSVEARLWVMQFALWILQVRKSLTL

SEQ ID NO: 5709 - protein, 143 aa, Arabidopsis thaliana
  unsure (1)..(143): unsure at all Xaa locations
  Clone ID: ARATH-23APR03-C125470_1.p
MGFEENQKQSPKQSPNHIKHMVFKFHFHVPHLHILPHHHHHHHHDVPKGCVAIMVGHEDDEEGLHRFVVPLVFLSHPLFLDLLKEAEKEYGFKHDGPITIPCGVDEFKHVQEVIDEXETHRRHSHGGHGHNNHNHHNNHLRCF

SEQ ID NO: 5710 - protein, 238 aa, Arabidopsis thaliana
  unsure (1)..(238): unsure at all Xaa locations
  Clone ID: ARATH-23APR03-C125586_1.p
MPIRSNPFFNMDSSALLSLLRHTGTSMDSKNSKKSSGSIGGGVLKMFKLIPMLSSGCKMVNLLSRGHRRPLLKDYATTGTIFGFRKGRVFLAIQEDPHCLPMFIIELPMLTSALQKEMASETVRIALESETKTSRKKVLXEYVWGIYCNGRKIGYSIRRKNMSEEEMYVIDALRGVSMGAGVLPCKNQYDQETEGEMTYMRARFDRVIGSKDSEALYMINPEGSGQGTELSIYFLRSH

SEQ ID NO: 5711 - protein, 256 aa, Arabidopsis thaliana
  Clone ID: ARATH-23APR03-C125650_1.p
MASISSFGCFPQSTALAGTSSTTRCRTTVAARLADQSDDFAPLRSSGGNCGCVNNSGEFDRRKLLVSSVGLLIGALSYDSKDGDFASASQFADMPALKGKDYGKTKMKYPDYTETQSGLQYKDLRVGTGPIAKKGDKVVVDWDGYTIGYYGRIFEARNKTKGGSFEGDDKEFFKFTLGSNEVIPAFEEAVSGMALGGIRRIIVPPELGYPDNDYNKSGPRPMTFFGQRALDFVLRNQGLIDKTLFFDVELLKIVPN

SEQ ID NO: 5712 - protein, 498 aa, Arabidopsis thaliana
  Clone ID: ARATH-23APR03-C12577_1.p
MAVMKIKGAATVAGTWLNEAVSFVVFCILDIVDSFLCLLYKAADYLFEAEWKPCYCLSDKEPITTTRGKILLSHNNGESKILTLSPLQELGGRSKIELEDISETLYTRPSLISDISTISVNELNKRFVKVTRSESECSGHNEKTKNKRRRSLTKSSLTVNFTVVEMLRGKIRPQNLNHDISRWSDCDCGFCTSWASTSDKNHSLFVKTQIPNGVTAKEDVLFIHGFISSSAFWTETVFPSLSASSSTHRLFAVDLLGFGKSPKPADSLYTLREHVEMIEKSVLHKYNVKSFHIVAHSLGCILALSLAARHGGLIKSLTLLAPPYYPVPKGEKKPRQYVMKKVAPRKVWPPIALGASMACWYEHISRTICLLICKHHRVWQFIAGVLTRNNRTVNFLIEGFMCHTHNAAWHTLHNIICGTGSKLDTYLDIVRDKLKCNVTIFHGGDDELIPVECSYNVKQRIPRARVKVIEHKDHITMVVGRQDEFARELQEIWKTSSC

SEQ ID NO: 5713 - protein, 220 aa, Arabidopsis thaliana
  Clone ID: ARATH-23APR03-C125828_1.p
MGFSSFISQPLSSSLSVMKRNVSAKRSELCLDSSKIRLDHRWSFIGGSRISVQSNSYTVVHKKFSGVRASWLTTTQIASSVFAVGTTAVLPFYTLMVVAPKAEITKKCMESSVPYIILGVLYVYLLYISWTPETLKYMFSSKYMLPELSGIAKMFSSEMTLASAWIHLLVVDLFAARQVYNDGLENQIETRHSVSLCLLFCPVGIVSHFVTKAIINNQYK

SEQ ID NO: 5714 - protein, 122 aa, Arabidopsis thaliana
  Clone ID: ARATH-23APR03-C125903_1.p
MFAIYKSTLLLLPLILILLITPQVSSFLQPIQPPISPQVALIEDKARLGSTPPSCHNRCNNCHPCMAIQVPTLPTRSRFTRVNPFSGGFVRPPSSLTTVLDQYSNYKPMGWKCHCNGHFYNP

SEQ ID NO: 5715 - protein, 239 aa, Arabidopsis thaliana
  unsure (1)..(239): unsure at all Xaa locations
  Clone ID: ARATH-23APR03-C125935_1.p
MAGTKDSHVVEIPVDEEHKERQQQQQLVAVSNPGMGILKVIQQHPLSEISESPGHLLLLKLWQREEDLFCRRVLLKESRLESIKREIFQLCCFFLVFHGFFFTLVYSSSCSDDADVVKSNAVCKKXWWIPSAXVSLATSLVLVFLVQAKLFVFWKVYRGVNRERNDNXALTRCVLELRMKGSSFDLSKEPMSGKRMKSSSVEIKWKPVTWFSQYLITIVLLCSAXGLFFPVSKFILCGF

SEQ ID NO: 5716 - protein, 245 aa, Arabidopsis thaliana
  unsure (1)..(245): unsure at all Xaa locations
  Clone ID: ARATH-23APR03-C126008_1.p
MPNLPHLPPPPQLQPPETPSWETPSSVWYTPRTTPWRTPQSTQSTPVGQMVLTKPATVRFNGLDAEPRKDRVILRQPRSSRTSLWIWCVAGFCFVFSLLLIFFAIATLIVFLAIRPRIPVFDIPNANLHTIYFDTPEFFNGDLSMLVNFTNPNKKIEVKFEKLRIELFFFNRLIAAQVVQPFLQKKHETRLEPIRLISSLVGLPXKVKAHFGMIHYSYQLHGRCQLQMTGPPTGILISRNCTTKK

SEQ ID NO: 5717 - protein, 506 aa, Arabidopsis thaliana
  Clone ID: ARATH-23APR03-C12622_1.p
MARDFKLIFSISILLLLLDCCYGGKVGVCYGRSADDLPTPSKVVQLIQQHNIKYVRIYDYNSQVLKAFGNTSIELMIGVPNSDLNAFSQSQSNVDTWLKNSVLPYYPTTKITYITVGAESTDDPHINASSFVVPAMQNVLTALRKVGLSRRIKVSTTLSLGILSRSFPPSAGAFNSSYAYFLRPMLEFLAENKSPFMIDLYPYYAYRDSPNNVSLDYVLFESSSEVIDPNTGLLYKNMFDAQVDALYYALTALNFRTIKIMVTETGWPTKGSPKEKAAASSDNAETYNSNIIRHVVTNQGTPAKPGEAMNVYIFSLFNENRKAGLDSERNWGLFYPDQTSVYQLDFTGKSNGFHSNSSGTNSSGSSNSWCIASSKASERDLKGALDWACGPGNVDCTAIQPSQPCFQPDTLVSHASFVFNSYFQQNRATDVACSFGGAGVKVNKDPSYDKCIYITAGGNKTKATNATALTSSASTPRGNELLQWILKLCLMISLFFSLQTMNSQAL

SEQ ID NO: 5718 - protein, 77 aa, Arabidopsis thaliana
  Clone ID: ARATH-23APR03-C126231_1.p
MNVVHGLKRIPRIKFPQRHINPSASEGKSQVANEADTLFFSNLNNIQKTIGGKASSQPKRTPVSNEEMEAILLGGCI

SEQ ID NO: 5719 - protein, 167 aa, Arabidopsis thaliana
  unsure (1)..(167): unsure at all Xaa locations
  Clone ID: ARATH-23APR03-C126244_1.p
MDLKKASLFLFLLLCLHLQLQHHFAHAVSRSSTSLAFVDPNHDDLPFQEVELKPDGDVIEANLPKLTVVVKKGGGGGGRGGGGFGGGGRSFGGGGDAVSAEEXSSSRGGGGSSSRGGGGSSSRGGGIRPIPIYGGGTHRSGHHSSGGRETASGWLGLSILAGLGLVF

SEQ ID NO: 5720 - protein, 256 aa, Arabidopsis thaliana
  Clone ID: ARATH-23APR03-C12636_1.p
MKFGKSLSNQIEQTLPEWQDKFLSYKELKKRLKLIGSKTADRPVKRLRLDEFSVGISKEEINFIQLLEDELEKFNNFFVEKEEEYIIRLKEFRDRIAKAKDSMEKMIKIRKEIVDFHGEMVLLENYSALNYTGLVKILKKYDKRTGDLMRLPFIQKVLQQPFYTTDLLFKLVKESEAMLDQIFPANETESEIIQAELSEHKFMESLHMKSTIAALRVLKEIRSGSSTVSVFSLPPLQLNGLDETWKKIPLLEQEAK

SEQ ID NO: 5721 - protein, 705 aa, Arabidopsis thaliana
  Clone ID: ARATH-23APR03-C12637_1.p
DRFDFNQRSMKMVMISHKMDLILVFIIVIGGSIFRRVSANFTEPCNGRCGGLTLPYPFGFSNGCSIRFDCSAAEKPMIGDFSVQNVTENSIFVGLSHNCTRKIEDMNPLFGENFAPTSENSFLMENCNRTTDGCSIKQKFLENVLKLKSCDATGNISCFSLDSNSSSKNSAKFFSMKTLRNSSCSLLFSSIAFESVGVNAGIALEFERVRLGWWLKGGCESGTCAANTDCTDVETPHGYAGHRCSCLDGFHGDGYTNPCQRALPECRGSKLVWRHCRSNLITIVGGTVGGAFLLAALAFFFFCKRRRSTPLRSHLSAKRLLSEAAGNSSVAFFPYKEIEKATDGFSEKQKLGIGAYGTVYRGKLQNDEWVAIKRLRHRDSESLDQVMNEIKLLSSVSHPNLVRLLGCCIEQGDPVLVYEYMPNGTLSEHLQRDRGSGLPWTLRLTVATQTAKAIAYLHSSMNPPIYHRDIKSTNILLDYDFNSKVADFGLSRLGMTESSHISTAPQGTPGYLDPQYHQCFHLSDKSDVYSFGVVLAEIITGLKVVDFTRPHTEINLAALAVDKIGSGCIDEIIDPILDLDLDAWTLSSIHTVAELAFRCLAFHSDMRPTMTEVADELEQIRLSGWIPSMSLDSPAGSLRSSDRGSERSVKQSSIGSRRVVIPQKQPDCLASVEEISDSSPISVQDPWLSAQSSPSTNTLLGNIPR

SEQ ID NO: 5722 - protein, 323 aa, Arabidopsis thaliana
  Clone ID: ARATH-23APR03-C126388_1.p
MAEERSLNGEATGQDDESFFDSDQQGDDGKSTELNQKIGDLESQNQELARDNDAINRKIESLTAEIEELRGAESKAKRKMGEMEREIDKSDEERKVLEAIASRASELETEVARLQHELITARTEGEEATAEAEKLRSEISQKGGGIEELEKEVAGLRTVKEENEKRMKELESKLGALEVKELDEKNKKFRAEEEMREKIDNKEKEVHDLKEKIKSLESDVAKGKTELQKWITEKMVVEDSLKDSEKKVVALESEIVELQKQLDDAEKMINGLKNVVEEPLNGIEFKSWSPNVTAVGSGGAVAAVAVAVAGAAVVCYIYHSRRV

SEQ ID NO: 5723 - protein, 309 aa, Arabidopsis thaliana
  Clone ID: ARATH-23APR03-C12639_1.p
MDMLHTILNFLLPPLTISFLVLFYPFYLFIKLVRFLVKHLRFENVTGKVVLITGASSGIGEHVAYEYAKKGAKLALVARRKDRLEIVAETSRQLGSGDVIIIPGDVSKVEDCKKFIDGTIHHFGKLDHLINNAGVPQTVIFEDFTQIQDAISIMDINFWGSTSITYFAIPHLRKSKGKIVVISSATAIIPLPAASVYSASKAALVKFFETLRVEISPDIKITIALSGFISTDMTTPQFKEMYGSDFILLESVSRCAKAIFRGIGRGEAYVIEPSWIKWIFLIKNVCPEIVDYLLDYIFVSYLKPYFKRD

SEQ ID NO: 5724 - protein, 429 aa, Arabidopsis thaliana
  unsure (1)..(429): unsure at all Xaa locations
  Clone ID: ARATH-23APR03-C126667_1.p
MANSSIVALLLLFVIASSVNGGDQEYPNQYLTEALGDKEWLVSVRRQIHENPELLFELHKTSALIRRELDELGVSYSYPVAKTGIVAQIGSGYPPVVALRADMDALPLQELVEWDHKSKIDGXHACGHDSHTTMLLGAAKLLSKRKRMLNGTVRLLFQPAEEGGAGAFHMIKEGALGDSEAIFGMHVHTGLPTGELATISGPALASTSIFSVRMSGKSPASSETYSCVDPVLAASSTILALQLIISREVXDPLLSHVLSVTFMKSGGSEFDVIPAYVEFGGTLRSLTTNGINWLIKRLKEVVEGQAEVQRCKADIDMHEXDDHPMYPATVNDHKLHEFTEKVLKLLLGPEKVKPANKVMAGEDFAFYQQKIPGYYIGSGIRNEEIGSVRSVHSPYFFLDENVLPIGSATFAALAEMYLQEHQNQTKSGD

SEQ ID NO: 5725 - protein, 367 aa, Arabidopsis thaliana
  unsure (1)..(367): unsure at all Xaa locations
  Clone ID: ARATH-23APR03-C126819_1.p
MDHDITTKVRAMFDHRXLNRSGSSLFTAFASTVIALVVFTIVLVSNLSVREDFSAKVVTIEIKTIVPYLPLSSEKEVSDQVNNNYSIKQQITVKEEINKLQVLEVFGGKDVSEKFQQRATEFLRDDCEVKFMMTWISPAELFXVMAVTPDLPFLLKDTAGESWLEEIQTGKRDPGKISLAQNLSNLMRLAYLFKFGGVYLDTDMIVLKSFKTLRNVIGAQTLEPVSRNWTRLNNAVLIFDKNHPFLLKSIEEFALTFNGNVWGHNGPYLVSRVARAVEGTDGYNFTILTPPAFYPVNWVEIEKLFKVPRTEKDSKRVQVKVLEMQKRSYGLHLWNKFSRKFEIEQGSAMDKLVSNQCIICDSVVSVS

SEQ ID NO: 5726 - protein, 287 aa, Arabidopsis thaliana
  Clone ID: ARATH-23APR03-C126880_1.p
MASSAFAFPSYIITKGASTDSFKSTSLSSSRSLVTDFHLLFSRPISSGPKYQSAKSAKPESPVAINCLTDAKQVCAVGRRKSMMMGLLMSGLIVSQANLPTAFASTPVFREYIDTFDGYSFKYPQNWIQVRGAGADIFFRDPVVLDENLSVEFSSPSSSNYTSLEDLGSPEEVGKRVLRQYLTEFMSTRLGVKRQANILSTSSRVADDGKLYYQVEVNIKSYANNNELAVMPQDRVARLEWNRRYLAVLGVDNDRLYSIRLQTPEKVFLEEEKDLRRVMDSFRVEKI

SEQ ID NO: 5727 - protein, 293 aa, Arabidopsis thaliana
  Clone ID: ARATH-23APR03-C126999_1.p
MEVPSSEELLQFLSSCLSQIKWRLKSNSKRRLEIDVLALCTGMRPVVMIDYGGKMPELQNRLLSLLELIREGLPVFKDLKVMVIEDMIYLINVRSLPKFVSSSLDSEPELFFIDLEQDPPKMVTQSNESNLGMQLRSIQKLFSSTFPLDDSNTDTTTVLDEAKSSQTSLCIDLSCCLQDTKVTIPTLNGWLLDYPVVYLFGTDHIEEAIYNLSTKSLRLFKVLVCRNGTTEKDSHLEELTSFSVPYDLSMEGSKEVWAEKFLERMSSRWEECKHIWRSLDLQVSECYPQAIVL

SEQ ID NO: 5728 - protein, 439 aa, Arabidopsis thaliana
  unsure (1)..(439): unsure at all Xaa locations
  Clone ID: ARATH-23APR03-C127091_1.p
MASFNHSWLSSPLTETPTFFFPPSPHPKSLKLSLFRTRSNSSSPDRSSEVELDVDPVKLALKKAEAYKKSKSEQKEPEKNAGDEELPLSVKAAMQKANAYKKRKGLGTDAVAKAKPSNTEQSFVRLTNKVVEDNDVKKKELKVSSIDFMGLGFADKKSTRGLPAGLVPVVDYLPEGDLPEVEFIVGDKTRFAEKVKEVEQEGDGNSDVYKPKVSTWGVFPRPSNISKTFGGGRTLRPGDSVETAEERIVREQKTKKLLIAYKESLGLNIDPKLKLECEKAIDVGNSLMDSGKLKEALPYYEKVMEKIVFKLCXSELHGLAALQWSICQDSLRKTDKARRMYEKLISHPNPGVSKKARQFMFSFQAMEMLKVKGSSFAEGNTGYQDYFEAFVEDKTNYKAQEKKEXERKMGINETLLYVILLASPILMVFIVAAQRGYTH

SEQ ID NO: 5729 - protein, 630 aa, Arabidopsis thaliana
  Clone ID: ARATH-23APR03-C12714_1.p
MEVISCYLLLIILLLLLSSNFLSSFGTISWLSLVKFSPVTRFLRSLVFSENLVNHIERLMESNMQNLLEKLRPLVGARAWDYCVLWRLNEDQRFVKWMGCCCGGTELIAENGTEEFSYGGCRDVMFHHPRTKSCEFLSHLPASIPLDSGIYAETLLTNQTGWLSESSEPSFMQETICTRVLIPIPGGLVELFATRHVAEDQNVVDFVMGHCNMLMDDSVTINMMVADEVESKPYGMLSGDIQQKGSKEEDMMNLPSSYDISADQIRLNFLPQMSDYETQHLKMKSDYHHQALGYLPENGNKEMMGMNPFNTVEEDGIPVIGEPSLLVNEQQVVNDKDMNENGRVDSGSDCSDQIDDEDDPKYKKKSGKGSQAKNLMAERRRRKKLNDRLYALRSLVPRITKLDRASILGDAINYVKELQNEAKELQDELEENSETEDGSNRPQGGMSLNGTVVTGFHPGLSCNSNVPSVKQDVDLENSNDKGQEMEPQVDVAQLDGREFFVKVICEYKPGGFTRLMEALDSLGLEVTNANTTRYLSLVSNVFKVEKNDNEMVQAEHVRNSLLEITRNTSRGWQDDQMATGSMQNEKNEVDYQHYDDHQHHNGHHHPFDHQMNQSAHHHHHHQHINHYHNQ

SEQ ID NO: 5730 - protein, 90 aa, Arabidopsis thaliana
  Clone ID: ARATH-23APR03-C127253_1.p
RHIDSNTFISFFFVETNKDETSFSFEFRLCHHEMVCNDHYEDENPQKIGKEAEVLVVKHLWRAQKIQTSFFDSSLYRLYEADRKRRRTEE

SEQ ID NO: 5731 - protein, 319 aa, Arabidopsis thaliana
  Clone ID: ARATH-23APR03-C1272_1.p
MAMIFCNTLYSSSSPSYLSPLTSKPSRFSKNLRPRAQFQSMEDHDDHLRRKFMEFPYVSPTRKQLMVDLMSTVENRLQSQLLPCNLPPDVRNFNNPNGSAEASLHIRSGDKSSPIDFVIGSWIHCKIPTGVSLNITSISGFLNSSTKAPNFVVELIQSSSKSLVLILDLPHRKDLVLNPDYLKEYYQDTALDSHRQSLLKLPEVNPYVSPSLFVRSAFSPTASMLKIDAEEEDKLEEILRDHVSPAAKEVLEVWLERCVKEEEEKIVVGEEERMELERRDKSFRRKSIEDDLDLQFPRMFGEEVSSRVVHAIKEAFGVL

SEQ ID NO: 5732 - protein, 120 aa, Arabidopsis thaliana
  Clone ID: ARATH-23APR03-C127353_1.p
MASKSSTTISLIIILLISLAEANLLSSPTPTNNFGSCPRNPLQLGVCANVLGLANVTAGDPRARQCCTALNGLTNVQVTDCLCFIFRPIPLVFGIDVAVREIFFACNRVFPIGFQCPPPQ

SEQ ID NO: 5733 - protein, 374 aa, Arabidopsis thaliana
  Clone ID: ARATH-23APR03-C12749_1.p
PTVELNYTSLSIICVSPANLIPLSFLQFFDRKPDVRSLEVQGFAEAQSFAFKEKEEEGLQDTVPFLQMLQSEDPSSFFSIKEPNFLTLLSLQTLKEPWELERYLSLEDSQFHSPVQSETNRFMEGANQAVSSQEIPFSQANMTLPSSTSSPLSAHSRRKRKINHLLPQEMTREKRKRRKTKPSKNNEEIENQRINHIAVERNRRRQMNEHINSLRALLPPSYIQRGDQASIVGGAINYVKVLEQIIQSLESQKRTQQQSNSEVVENALNHLSGISSNDLWTTLEDQTCIPKIEATVIQNHVSLKVQCEKKQGQLLKGIISLEKLKLTVLHLNITTSSHSSVSYSFNLKMEDECDLESADEITAAVHRIFDIPTI

SEQ ID NO: 5734 - protein, 367 aa, Arabidopsis thaliana
  Clone ID: ARATH-23APR03-C12750_1.p
MVNLVNVFNMSKSNPSNLKYYNLHPSFKHHKALNLKRHFNNIHFHSHSPPKKKKTEAMNSSSLLTPSSSPSPHLQSPATFDHDDFLHHIFSSTPWPSSVLDDTPPPTSDCAPVTGFHHHDADSRNQITMIPLSHNHPNDALFNGFSTGSLPFHLPQGSGGQTQTQSQATASATTGGATAQPQTKPKVRARRGQATDPHSIAERLRRERIAERMKSLQELVPNGNKTDKASMLDEIIDYVKFLQLQVKVLSMSRLGGAASASSQISEDAGGSHENTSSSGEAKMTEHQVAKLMEEDMGSAMQYLQGKGLCLMPISLATTISTATCPSRSPFVKDTGVPLSPNLSTTIVANGNGSSLVTVKDAPSVSKP

SEQ ID NO: 5735 - protein, 327 aa, Arabidopsis thaliana
  Clone ID: ARATH-23APR03-C12752_1.p
MTLEALSSNGLLNFLLSETLSPTPFKSLVDLEPLPENDVIISKNTISEISHQEPPPQRQPPATNQGKKRRRRKPRVCKNEEEAENQRMTHIAVERNRRRQMNQHLSVLRSLMPQPFAHKGDQASIVGGAIDFIKELEHKLLSLEAQKHHNAKLNQSVTSSTSQDSNGEQENPHQPSSLSLSQFFLHSYDPSQENRNGSTSSVKTPMEDLEVTLIETHANIRILSRRRGFRWSTLATTKPPQLSKLVASLQSLSLSILHLSVTTLDNYAIYSISAKVEESCQLSSVDDIAGAVHHMLSIIEEEPFCCSSMSELPFDFSLNHSNVTHSL

SEQ ID NO: 5736 - protein, 166 aa, Arabidopsis thaliana
  Clone ID: ARATH-23APR03-C127556_1.p
MAFVTTAEVCDANQEMIRSGQLRALQPVFQIYGRRQIFSGPVVTVKVFEDNGLIRHFLEEKGNGRVLVVDGGGSLRCAILGGNPVVQAQNNGWAGIIVNGCIRDVDEINGCDIGVRALASHPIKASKKGLGEQRVSLNIAGTRICDGEWLYADTDGILVSQIELSV

SEQ ID NO: 5737 - protein, 369 aa, Arabidopsis thaliana
  Clone ID: ARATH-23APR03-C12756_1.p
MSKKNLAILLRARMRSNNPSKFSLSQFPKEIQSNPQENHSRDHIVQNSNDFGTTGRVYDVVRETMHSAISASKTGVLDITLNDFQEGYFSLSLEDREKLLLVLAKEYDVNREQVRELVKQYLGLETPASDDDKGALSSVFYRIERNLRHALRPTYEVLFERLNTHPGGLRFLSILRADLLSILSKENTPSLRTLDSFLKEKLGMWLSPATLELHQITWDDPASLLEKIVAYEAVHPISNLLDLKRRLGIGRRCFGYFHPSVPGEPLIFIEVALMETVAQTIQEVLWDNPPIPENQATCALFYSISSTQPGLAGINLGKFLIKRVITLVKKDMPHVSTFATLSPIPGFMQWLLSKLSSQSRFAEDESWYT

SEQ ID NO: 5738 - protein, 497 aa, Arabidopsis thaliana
  unsure (1)..(497): unsure at all Xaa locations
  Clone ID: ARATH-23APR03-C127583_1.p
MHAIDFKEIQEKLSDGFRPWQRSFQFWARATDIYTGYKVSLXIDGXFQLRMNFVKDVNKHEEMWERQHELAAHKVYSMCSDLGGFFLKIAQILGKPDLAPAAWVRKLVTLCDQAPATPFDAVRVVLEKELGKSIEQVFETFDEKPLGSASIAQVHRARVKGDKRDVVVKVQHPGVEKLMMVDIRNLQIFALYMQKTDIKFDLFSMTKEIEKQIGYEFXFKREANAMEKIRRFLYDNNRKSPGLGPRVFPNLVTRKGLVMEFMNGIPILXSLGDEMAKRGINPHGKMAEAAKFNILHSLSQAYGQMILKSGFFHADPHPGNILIGKGSEARQLKRGVAQGGPGPGKELPDRVRGGPAGLGAGRALPCASTGGAXALGNLGKATVAKCKNERQELLQLAKTILDTGMPPGAATLQPLSEDSSIKKISDEAFAEELFSVLRTVDLLRGLSVGIGIYYSCAQHWRAMAEEALHASGRLSTGRKQKRRCSSLRRLYPGPRES

SEQ ID NO: 5739 - protein, 270 aa, Arabidopsis thaliana
  Clone ID: ARATH-23APR03-C12780_1.p
MGDTAEDQDDRAMMEAEGVTSFSELLMFSDGVLSSSSDHQPEGNVGDGGEDSLGFVFSGKTGSRMLCFSGGYQNDDESLFLEPSVPTSGVSDLDPSCIKIDCRNSNDACTVDKSTKSSTKKRTGTGNGQESDQNRKPGKKGKRNQEKSSVGIAKVRKERLGERIAALQQLVSPYGKTDAASVLHEAMGYIKFLQDQIQVLCSPYLINHSLDGGVVTGDVMAAMKAKDLRSRGLCLVPVSSTVHVENSNGADFWSPATMGHTTSPSLPQGF

SEQ ID NO: 5740 - protein, 75 aa, Arabidopsis thaliana
  Clone ID: ARATH-23APR03-C128006_1.p
MASSSDPSKPVMERKKKGAPIKFLVPLIYAPALPLIRLSLRHKPVLRDRLFGLVLVGAFAHGFYLVTDIYDAESK

SEQ ID NO: 5741 - protein, 316 aa, Arabidopsis thaliana
  Clone ID: ARATH-23APR03-C128102_1.p
MGESACLMQPFSYAAPQGDSLGALGQSVSFGRFMSEKLDWEKWSAFSTQNPYVAEAERYSKPGSVAQKKAFFEAHYKKVAAARKAAAEEALLLQQQIPKPQPEKSPVQEEDINEGEKKDWMVSKPDLEIPRGSLDVSAQLKLLAEKEGRFSNRQSDEKENCGMAESEINGRTAEEQVDEEKPILKSVKKKSKDSQPKSSTKPRVSKYNSSERTPSKKSNNKSSSYTFTPAKEFNRLVSIIRKIDGSRASSKPTKDCKTPLRTPSNKVSAKGMLFYTVWLKNRGESREKKKEARGEIQGNGDTEPEGGGKECGEGRE

SEQ ID NO: 5742 - protein, 305 aa, Arabidopsis thaliana
  Clone ID: ARATH-23APR03-C128198_1.p
MDHEEIPSTPSTPATTPGTPGAPLFGGFEGKRNGHNGRYTPKSLLKSCKCFSVDNEWALEDGRLPPVTCSLPPPNVSLYRKLGAEFVGTLILIFAGTATAIVNQKTDGAETLIGCAASAGLAVMIVILSTGHISGAHLNPAVTIAFAALKHFPWKHVPVYIGAQVMASVSAAFALKAVFEPTMSGDVTVPTVGLSQAFALEFIISFNLMFVVTAVATDTRAVGELAGIAVGATVMLNILIAGPATSASMNPVRTLGPAIAANNYRAIWIYLTAPILGALIGAGTYTIVKLPEEDEAPKERRSFRR

SEQ ID NO: 5743 - protein, 322 aa, Arabidopsis thaliana
  Clone ID: ARATH-23APR03-C128337_1.p
MGEPKDSLALFLCHESESSLNEDDDETIERSDKQPHFTTTIDDEDYVADLVLKENLRFETLPSKTTSSSDRLIAIDWILTTRTRFGFQHQTAYIAISYFDLFLHKRFIGLQKDETWAMRLLSVACLSLAAKMEERIVPGLSQYPQDHDFVFKPDVIRKTELLILSTLDWKMNLITPFHYFNYFLAKISQDNHSVSKDLVLLRSSDSLLALTKEISFTEYRQFVVAAVTTLLASSSTSSDIRLTREEIANKFGSISWWTSNENENVYLCYQRTLEIEERKHMTPPPEIAVSREPPASGSGAKRRLSFDDSDQSSPPAKRMRRL

SEQ ID NO: 5744 - protein, 741 aa, Arabidopsis thaliana
  unsure (1)..(741): unsure at all Xaa locations
  Clone ID: ARATH-23APR03-C128367_1.p
MKNSEIRPEKLHLRKLRKSLRKIRMKCXCSGEQMRHREEEDKKSEVGXGRDYNGSSALSTAESENAKKLDNGNIEEAELSLRETSSLNYEEARALLGRIEYQKGNIEAALRVFEGIDINGITVKMKTALTVREDRKHRRRSKGGFSTAPSPAMSKHAVSLLFEAIFLKAKSLQRLGRFQEAAESCRVILDIVETSLAEGASDNVTGDIKLQETLTKAVELLPELWKLADSPRDAILSYRRALLNHWKLDPETTARIQKEYAVFLLYSGEEAVPPNLRSQTEGSFIPRNNVEEAILLLMLLLRKVNLKRISWDAAILDHLSFALTIAGDLTALAKQFEELSPELLDQRELYHTLSLCYQGAGEGLVALGLLRKLFSEREDPNRTSGLLMASKICGERSGLAEEGLDYARKAIGNLGKECSQLDGAARFVLGITLTESSRMAVTETERIARQSEGIQALESADMTNPRVVHRLALENAEQRXNLDSALAYAKEXALKLGAESDLEVWLLLARVLSAQKRFSDAETIVDAALNETGKWEQGKLLRLKAKLRLAKGEVKDAIKTYTQLLALLQVQSKSFNSAKKLPKGYVKELMSLELGTWHDLAHIYINLSQWRDAESCLSRSRLIAPYSSVRYHIEGVLYNRRGQLEEAMEAFTTALDIDPMHVPSLTSKAEILLEVGNRSGIAVVRSFLMEALRIDRLNHSAWYNLGKMFKAEGSVSSMQEAVECFQAAVTLEETMPVEPFR

SEQ ID NO: 5745 - protein, 367 aa, Arabidopsis thaliana
  Clone ID: ARATH-23APR03-C128383_1.p
MLVLFLAKHTRIREHALELTRSVLHALGFRVKALFSVLLFHKFDFLIPNPFPFYSDQSSEKSIGDMSSKDKKPSKPTSGRTGGIRTLSDLNRRSEPDSDSDSDGPQEYFTGGEKSGMLVQDPTKEPKHDDVDEIFNQARQLGAVEGPLEHPSSSRSFTGTGRLLSGESVPTALQQPEPVIHNIIFWSNGFTVDDGPLRKLDDPENASFLDSIRKSECPKELEPVDKRAPVHVNLMRRDEKCPEKEKLKVSFQGVGRTLGGASSSTASSQSNLTDVAAVQSPLQSLVVDETLPSTSIQLRLADGTRMVAKFNNHHTVNDIRGFIEFSRPGNPNNYTLQVMGFPPKPLTDPSQTIEQAGLASSVVIQKF

SEQ ID NO: 5746 - protein, 643 aa, Arabidopsis thaliana
  Clone ID: ARATH-23APR03-C12840_1.p
MGDLENLLLEAAGRTNSAGRSSHPPSSRRREGSYSDGSSDSRDDSDEDRGYASRKPSGSQVPLKKRLEAEREDRAARVEGGYGDGPSDREGDSSEESDFGDDLYKNEEDRQKLAGMTEFQREMILSERADKKGDKNFTEKLRSKRESEKTPVSKKETQPLPASRGVRSSARSADRAAAKDDALNELRAKRMKQQDPAALRKLRDASKGGSGSRDFSSTKRKPLASSNLSSSSQSDSDSRSQSDDEGSNGGMLDSDDDRSDVPTFEDVKEVTIRRSKLAKWLMEPFFEELIVGCFVRVGIGRSKSGPIYRLCWVKNVDATDPDKTYKLENKTTHKYLNVVWGNETSAARWQMAMISDGHPLEEEYRQWIREVERTNGRMPTKQDISEKKEAIQRTNSFVYSAETVKQMLQEKKSASVRPMNVAAEKDRLRKELEIAQSKNDEAGVERIKSKIKQLDASRNKKGVDKKALKLAEMNKKNRAENFKNASEVKSITASLKAGEAGYDPFSRRWTRSSNYYNGKNKGKDGEENEAAVAAAVETNGADAGAGVEATEAALEAAAEAGKLIDTRAPIGQGAEHNQLHNFELSLSLTALQKYGGPQGVQKAFMARKQLTEATVGCRVAENDGKRHGLTLTVSDYKRRRGLL

SEQ ID NO: 5747 - protein, 391 aa, Arabidopsis thaliana
  Clone ID: ARATH-23APR03-C128497_1.p
MFRTLASGEIETARLNRNLGITSNLGVSCGGFEDFAMRFEGENMVPYKGEEQEEEEDQVVVNETTPFQFQQPLFLQQQQKLVVGYALTSKKKKSFLQPKLELLARRKGIFFVAIDLNRPLSEQGPFDVVLHKLLGKEWEEVIEDYQQKHPEVTVLDPPGSIQRIYNRQSMLQGMADLKLSDCSGSLFVPKQMVVLKDSAASADAVVEAGLKFPLVAKPLWIDGTPKSHQLYLAYDRRSLAELDPPLVLQEFVNHGGVMFKVFVVGDVIKVMRRFSLPNVSNCEKAKVDGVFQFPRVSSAAASADNADLDPRVAELPPKPFLEALVKELRSLLGLRLFNIDMIREHGSKNVFYVIDINYFPGYGKLPDYEQVFVDFFQNLAQVKYKKRQHCK

SEQ ID NO: 5748 - protein, 870 aa, Arabidopsis thaliana
  Clone ID: ARATH-23APR03-C12852_1.p
MEASLAALERPRGSASNTVFKSGPLFISSKGLGWTSWKKRWFILTRTSLVFFKNDPGTLPQKGGEVNLTLGGIDLNNSGSVVVREDKKLLTVLFPDGRDGRAFTLKAETFEDLYEWKTALEQALAQAPNAALIMGQNGIFRAETNEAIEGREKRPLKSLVVGRPILLALEDIDGSPSFLEKALQFIEKYGTKIEGILRQSADVEEVERRVQEYEQGKTEFTFDEDPHVVGDCIKHVLRELPSSPVSASCCTALLEAYRIESKEARISSLRSAIAETFPEPNRRLLQRILKMMHTISSHSHENRMNPNAVAACMAPLLLRPLLAGECDLEDDFDGGEDNSAQLLAAANAANNAQAIITVLLEDYGSIFDEENIQRCSISTESHIGNSGPDDSSDDDNNMKNGYHNADNEVEPVTDDDNDRALSGKMSESSGCTGSDLYEYKGFVADDSDIESPRDTNGPRCNSNIRTDHLMRNPFVNSTDQQAGEQIGDDPTKYGVNSCLAHVSESYQQSGTGLNVPTHGNTLAAPGLESPSAKSVNKGTPSSVHAKRATFWGRGSARKISTDGSFDSSGEDELAIQRLETTKNELRQRIAKEARGNAILQASLERRKQALHERRLSLEQDVSRLQEQLQAERDLRAALEVGLSMSSGQFSSHGVDSKTRAELEEIALAEADVARLKQKVAELHHQLNQQRQTHFGSFSDARDTHQYLQNHNPQKRFLQQDFDSTLAYVNHERKQRHEENVLGAEWRNSKGAGSFGVGNSRQPSRKQIPESTNTTDSKISEESGKISVDKLSSIDSPSIPSTSRVLDITEYPRLNHPSAAASAALVELTTRLDFFKERRSQLMEQLQNLDLNYGGSSSQDFIHRPSSPPWN

SEQ ID NO: 5749 - protein, 809 aa, Arabidopsis thaliana
  Clone ID: ARATH-23APR03-C12857_1.p
MPPKVVKRGGAARRGGRLTRSALKAQNPHVESSHDESVNIGELSGSDALEAKEVTPEVDKTVEEENPLDVPKSSDSIDDSEAAANPHVDVPSKKETEVEESVDDFGKDERLDLDDNEPEYEAEEYGGEEFEERELGQEDHELVNEEGEELEEEIEVEEEAGEFADEIGDGAEDLDSEDDDDDHAIEEVKHGETVDVEEEEHHDVLHERRKRKEFEIFVGSLDKGASEEDLKKVFGHVGEVTEVRILKNPQTKKSKGSAFLRFATVEQAKRAVKELKSPMINGKKCGVTASQDNDTLFVGNICKIWTPEALREKLKHYGVENMDDITLVEDSNNVNMNRGYAFLEFSSRSDAMDAHKRLVKKDVMFGVEKPAKVSFTDSFLDLEDEIMAQVKTIFIDGLLPSWNEERVRDLLKPYGKLEKVELARNMPSARRKDFGFVTFDTHEAAVSCAKFINNSELGEGEDKAKVRARLSRPLQKAGKGRQSSRSDQRSRHGAGRSGRSSFARLPPRSLASSRSARGAGSRAPSSSAKRASGSRGRRPRPPLPPPARARPLPPPARARPMPPPARARPLPPPARSYDRRPPVPLYPKASLKRDYDRRDELPPPRSRPAVSYSSRLSPERHLSYRDDYPPRGSGYSDLPRSSSRSEIRRPFVDDLYSPRFERPPSYSEGRPRAYEPLPGSKRPYAALDDLPPRYADVDVRHSRPRLDYDVGPSQYGESYGDRIPRSSLGYGSSRNSMSNHDSRGPYSSRQGMDYGGGSYSGSDVGGMYSSSYGGDLPRRDGGGSSYSSIYSSRGLGGSSYSGGGPGSYY

SEQ ID NO: 5750 - protein, 174 aa, Arabidopsis thaliana
  Clone ID: ARATH-23APR03-C128755_1.p
MASHPKVFFDMTIGGAPAGKIVMELYTDKTPKTAENFRALCTGEKGVGRSGKPLHFKGSSFHRVIPNFMCQGGDFTKGNGTGGESIYGAKFEDENFERKHTGPGILSMANAGANTNGSQFFICTVKTDWLDGKHVVFGQVVEGLDVVKAIEKIGSSSGKPTKPVVIADCGEISS

SEQ ID NO: 5751 - protein, 182 aa, Arabidopsis thaliana
  Clone ID: ARATH-23APR03-C128890_1.p
MAGSVMVPSVSIGLALSVLIFFALSLKTLEARGTFGRLAGQPPQRTAAGGICASSVHIFGYKCEEHDVVTQDGYILNMQRIPEGRTGAVAGDGGKRQPVLIQHGILVDGMSWLLNPADQNLPLILADQGFDVWMGNTRGTRFSRRHKYLNPSQRAFWNWTWDELVSYDLPAMFDHIHGLTGQ

SEQ ID NO: 5752 - protein, 348 aa, Arabidopsis thaliana
  Clone ID: ARATH-23APR03-C129030_1.p
MVGNILVTGGAGYIGSHTVLQLLLGGYNTVVIDNLDNSSLVSIQRVKDLAGDHGQNLTVHQVDLRDKPALEKVFSETKFDAVMHFAGLKAVGESVAKPLLYYNNNLIATITLLEVMAAHGCKKLVFSSSATVYGWPKEVPCTEESPLSGMSPYGRTKLFIEDICRDVQRGDPEWRIIMLRYFNPVGAHPSGRIGEDPCGTPNNLMPYVQQVVVGRLPNLKIYGTDYTTKDGTGVRDYIHVVDLADGHIFALQKLDDTEIGCEVYNLGTGKGTTVLEMVDAFEKASGMKIPLVKVGRRPGDAETVYASTEKAERELNWKANFGIEEMCRDQWNWASNNPFGYGSSPNST

SEQ ID NO: 5753 - protein, 310 aa, Arabidopsis thaliana
  Clone ID: ARATH-23APR03-C129108_1.p
MGEMMYKLFASASLLTLGLYHLICTFFHLLKSPQSYAAKPFYPFPRLSSVTGNNHHNHNRLQNLPLFILILSLFVAFLHETLISFYSDPLVKGSTPVHRFSSLNSAAVFFLFLIIAIYYLLSDSTSLIPLPSDLLFALASVGFFLHYSAASSSAAIQTSDLQAHCDSLSARISALCSLLCLLLACRSRLFIADAALAAAICLQGLWQLQTGLSLYVDGFIPEGCHRLLDVQSGVEGSTQCDIQDSKLRAVSILDLMFTVHVVLVVILIFVTYTMVVMAAGVRRTGSYEALPTNNADSNHIQMKSLTGTQA

SEQ ID NO: 5754 - protein, 1707 aa, Arabidopsis thaliana
  unsure (1)..(1707): unsure at all Xaa locations
  Clone ID: ARATH-23APR03-C1294_1.p
MSGQVSNQGTMSQQNGNSQMQNLVGGGSAPATGAGLGPSRVSPVDNDILKLRQAMRIRIFNILQQKQPSPADEASKAKYMDVARRLEEGLFKIANTKEDYVNPSTLEPRLASLIKGRQLNNYNQRHANSSSVGTMIPTPGLQHSGGNPNLMITSSGDATMAGSNNITTSAMNTGNLLNSGGMLGGNLSNGYQHSSSNFGLGSGGNMSSMSSQRNTGQMMPTPGFVNSSTNNNSNNGQSYLSVEASNNSGGFSTAPMMVPQTQQQQLRQDIGGQNSRMLQNHGSQMGVGLRPGMQQKLSNVSNSSINGGVGMNAKSVDSGTSYTNPIRNSQQAYDNLQRSGMQGDGYGTNNSDPFGSGNLYGAVTSVGMMTNTQNANTASFQAVSRTSSSLSHQQQQFQQQPNRFQQQPNQFHQQQQQFLHQQQLKQQSQQQQRFISHDAFGQNNVASDMVTHVKHEPGMENPSESIHSQTPEQFQLSQFQNQYQNNAEDRHAGSQILPVTSQSDMCTSVPQNSQQIQQMLHPHSMASDSVNGFSNLSVGVKTESGMRGHWQSQSQEHTQMSNSMSNERHIQEDFRQRMSGTDEAQPNNMSGGSIIGQNRVSTTSESLNPQNPTATTCRNGNGNRDPRFKNQQKWLLFLRHARHCKAPEGKCPDRNCVTVQKLWKHMDSCAAPQCSYPRCLPTKTLINHHRSCKEPNCPVCIPVKAYLQQQANARSLARLKNETDAARSVNGGGISSDAVQTSAGAKSCTSPGADISGHLQPSLKRLKVEQSSQPVDVETESCKSSVVSVTEAQSSQYAERKDHKHSDVRAPSKYFEVKAEVSDFSVQTRPGFKDTKIGIAENIPKQRPVSQPDKQDLSDVSPMQETTKVEKEPESLKKENLAESTEHTSKSGKPEIKGVSLTELFTPEQVREHIRGLRQWVGQSKAKAEKNQAMEHSMSENSCQLCAVEKLTFEPPPIYCTPCGARIKRNAMYYTVGAGDTRHYFCIPCYNESRGDTILAEGTPMPKARLEKKKNDEEIEEWWVQCDKCEAWQHQICALFNGRRNDGGQAEYTCPYCFIAEVEQSKRKPLPQSAVLGAKDLPRTILSDHIEQRLFKRLKQERTERARAQGKSYDEIPTAESLVIRVVSSVDKKLEVKPRFLEIFREDSYPTEFAYKSKVVLLFQKIEGVEVCLFGMYVQEFGSECAFPNQRRVYLSYLDSVKYFRPEVRSYNGEALRTFVYHEILIGYLEYCKLRGFTSCYIWACPPLKGEDYILYCHPEIQKTPKSDKLREWYLAMLRKASKEGIVAETINLYDHFFMQTGECRAKVTAARLPYFDGDYWPGAAEDLIYQMSQEEDGRKGNKKGMLKKTITKRALKASGQTDLSGNASKDLLLMHRLGETIHPMKEDFIMVHLQPSCTHCCILMVSGNRWVCSQCKHFQICDKCYEAEQRREDRERHPVNFKDKHALYPVEIMDIPADTRDKDEILESEFFDTRQAFLSLCQGNHYQYDTLRRAKHSSMMVLYHLHNPTAPAFVTTCNACHLDIETGQGWRCEVCPDYDVCNACFSRDGGVNHPHKLTNHPTIADQNAILISXTTHPSLADQNAQNKEARQLRVLQLRKMLDLLVHASQCRSPVCLYPNCRKVKGLFRHGLRCKVRASGGCVLCKKMWYLLQLHARACKESECDVPRCGDLKEHLRRLQQQSDSRRRAAVMEMMRQRAAEVAGTSG

SEQ ID NO: 5755 - protein, 235 aa, Arabidopsis thaliana
  unsure (1)..(235): unsure at all Xaa locations
  Clone ID: ARATH-23APR03-C129555_1.p
MRPQYKDVNDKLDSTAKHETNSHGGRYNNPYVHITSPTSASDKRSKDKVLEVLNRCGKKVEDATRKAEALVGGLKDHLNFSPSISDAAMARLSQGTKMIVEGGPERVFQREFGVLAVEKLLDSFVCYISTTSGPVTGVIYISNRRIAFCSDYAIRXLPSSAGGNGVAAYXYKVVMEWEKISSISSSTNVLKPSERYVHMVTRDGFEFWFMGFVSYIDAFNCLNKALLNSRCDHAM

SEQ ID NO: 5756 - protein, 324 aa, Arabidopsis thaliana
  unsure (1)..(324): unsure at all Xaa locations
  Clone ID: ARATH-23APR03-C129578_1.p
MMESSIPSENGSVTSDRDRSALIFLGTGCSSAVPNAMCLIQRSDNPCYVCSQSLSIPPEKNPNYRGNTSLLIDYCQSDGKHKYIQIDVGKTFREQVLRWFTLHKIPQVDSIILTHEHADAVLGLDDIRSVQPFSPTNDIDPTPIFVSQYAMESLAVKFPYLVQKKLKEGQEVRRVAQLDWRVIEEDCEKPFVASGLSFTPLXRLHGEDYVCLGFLFGEKSRVAYISDVSRLPPNTEYAISKSGGGQLDLLNLDTLHETGPPHTHLCFAQTLDTIKRLSPKRALLIGMTHEFDHHKDNEFLEEWSKREGISVKLAHDGLRVPIDL

SEQ ID NO: 5757 - protein, 1145 aa, Arabidopsis thaliana
  Clone ID: ARATH-23APR03-C1300_1.p
MASNNHFMNSRSNLSTNSDAAEAERHQQPVSNSVTFARRTPSGRYVNYSRDDLDSELGSVDLTGYSVHIPPTPDNQPMDPSISQKVEEQYVSNSLFTGGFNSVTRAHLMEKVIDTETSHPQMAGAKGSSCAVPGCDVKVMSDERGQDLLPCECDFKICRDCFMDAVKTGGMCPGCKEPYRNTDLADFADNNKQQRPMLPPPAGGSKMDRRLSLMKSTKSGLMRSQTGDFDHNRWLFETSGTYGFGNAFWTKDGNFGSDKDGNGHGMGPQDLMSRPWRPLTRKLQIPAAVISPYRLLILIRIVVLALFLMWRIKHKNPDAIWLWGMSVVCELWFALSWLLDQLPKLCPINRATDLNVLKEKFETPTPSNPTGKSDLPGLDMFVSTADPEKEPPLVTSNTILSILAADYPVEKLACYVSDDGGALLTFEAMAEAASFANMWVPFCRKHNIEPRNPDSYFSLKRDPYKNKVKADFVKDRRRVKREYDEFKVRINSLPDSIRRRSDAYHAREEIKAMKLQRQNRDEEIVEPVKIPKATWMADGTHWPGTWINSGPDHSRSDHAGIIQVMLKPPSDEPLHGVSEGFLDLTDVDIRLPLLVYVSREKRPGYDHNKKAGAMNALVRASAIMSNGPFILNLDCDHYIYNSQALREGMCFMMDRGGDRLCYVQFPQRFEGIDPSDRYANHNTVFFDVNMRALDGLMGPVYVGTGCLFRRIALYGFDPPRAKEHHPGFCSCCFSRKKKKSRVPEENRSLRMGGDSDDDEEMNLSLVPKKFGNSTFLIDSIPVAEFQGRPLADHPAVQNGRPPGALTIPRELLDASTVAEAIAVISCWYEDKTEWGSRIGWIYGSVTEDVVTGYRMHNRGWKSVYCVTKRDAFRGTAPINLTDRLHQVLRWATGSVEIFFSRNNAFFASSRMKILQRIAYLNVGIYPFTSIFLIVYCFLPALSLFSGQFIVQTLNVTFLVYLLIISITLCLLALLEIKWSGISLEEWWRNEQFWLIGGTSAHLAAVIQGLLKVVAGIEISFTLTSKSGGEDVDDEFADLYIVKWTSLMIPPITIMMVNLIAIAVGFSRTIYSVIPQWSKLIGGVFFSFWVLAHLYPFAKGLMGRRGRTPTIVYVWSGLVAITISLLWVAINPPAGSTQIGGSFTFP

SEQ ID NO: 5758 - protein, 383 aa, Arabidopsis thaliana
  Clone ID: ARATH-23APR03-C131499_1.p
MAEQELQRINEKKPWQVLEFYSGIGGMRYSLMASGIVSEVVEAFEINDSANDVYQHNFKHRPYQGNIQSLTAADLDKYNADAWLLSPPCQPYTRQGLQKHSGDARASSFLRILELIPHTTKPPQMLFVENVVGFETSDTHMEMIGTLTKLDYVTQEFILSPLQFGVPYSRPRYFCLAKRKPLPFKSQHSNNKLLWSPDPLYGRDDQVEFGKCQAEEGLDKLLEFCEPVEKFLELAAHVDGEPSSVDDSENGSKDCCGQEGDSVPDSVHQYLVPVSLIERWGNAMDIVYPDSKRCCCFTKSYYRYVKGTGSLLATVQPKIKGKESCLKEQRLRYFTPREVANFHSFPEDFEFPKHISLRQRYAMLGNSLSVAVVAPLLRYLFDS

SEQ ID NO: 5759 - protein, 244 aa, Arabidopsis thaliana
  Clone ID: ARATH-23APR03-C13220_1.p
MSINQYSSDFHYHSLMWQQQQQQQQHQNDVVEEKEALFEKPLTPSDVGKLNRLVIPKQHAERYFPLAAAAADAVEKGLLLCFEDEEGKPWRFRYSYWNSSQSYVLTKGWSRYVKEKHLDAGDVVLFHRHRSDGGRFFIGWRRRGDSSSSSDSYRHVQSNASLQYYPHAGAQAVESQRGNSKTLRLFGVNMECQLDSDWSEPSTPDGSNTYTTNHDQFHFYPQQQHYPPPYYMDISFTGDMNRTS

SEQ ID NO: 5760 - protein, 267 aa, Arabidopsis thaliana
  Clone ID: ARATH-23APR03-C13221_1.p
MSVNHYHNTLSLHHHHQNDVAIAQRESLFEKSLTPSDVGKLNRLVIPKQHAEKYFPLNNNNNNGGSGDDVATTEKGMLLSFEDESGKCWKFRYSYWNSSQSYVLTKGWSRYVKDKHLDAGDVVFFQRHRFDLHRLFIGWRRRGEASSSPAVSVVSQEALVNTTAYWSGLTTPYRQVHASTTYPNIHQEYSHYGAVVDHAQSIPPVVAGSSRTVRLFGVNLECHGDAVEPPPRPDVYNDQHIYYYSTPHPMNISFAGEALEQVGDGRG

SEQ ID NO: 5761 - protein, 306 aa, Arabidopsis thaliana
  Clone ID: ARATH-23APR03-C132476_1.p
MKIGAVQESWLIRTPVLRPAVQGSIRRNGKPQLEFPLSNRLSRCVVMAVQGGRGYESPWDEKPYETLPTGKRVYVDESDVVTFLDPPKELIPLDPASYNPAAYLWKKIEDIPEERRHHLLQLLEPRLISRAWEIASTRYEDPKLAKMTASKIFSAGNAEIPVEYFSCRTSQGPLIISWINFFKMALFRSYNGQIYGRVCGGPVVSTLANAFSPLYFEVTEAMEVMATEEPCDVACKFGDGLLAIEDYPQGFPRPAKHPYPFNDSVVIYIRHIGPGVCVGQAWQEGRELQQVPQRLCSDILMVKQYR

SEQ ID NO: 5762 - protein, 481 aa, Arabidopsis thaliana
  unsure (1)..(481): unsure at all Xaa locations
  Clone ID: ARATH-23APR03-C13250_1.p
MRRLLMNRNLSPLCRSVLRFIDLSVCRAMACFLDCFRARDNRSTSNLVSHSSLTNSRKAQDSQNDLSALFLSEEKSASSPCLDKERFDLDSIHIDKGLRDEARFLKACGTIPETPIEIRKASQKLSPQHSGSSHFHSWISSSSSMGSRLAESSTPMKACEEVGRPSFTSEQTASSCVIDVRDNARISSASSDGTEVESVGTAIKGELDRTARPTFTAGKNKSVRFEXDLDQSNSSNSSENGSSRKPEMGGKICFTVSSPNPTPLKLSDEMQTPGTIYPANMESGGRGRPRIRSQFVHSVSNIMENASLYKVYKDSHEGLDYEEQIEAETPSSETYGEKVEESSDEKLSKFEASFSPWLNQINENIAALNERTPGVGVITPGDRPIIGLVAAQWIENEQTEISPKMWDGNGIPNSTTKYKEDQKVSWHATPFEVRLEKALSEEGGQSLFPQRKLEVMMEEVEGDTDISQLHHSVQPNSVVSF

SEQ ID NO: 5763 - protein, 442 aa, Arabidopsis thaliana
  Clone ID: ARATH-23APR03-C13273_1.p
MAAHATSEPAVNLPATQFESQVTEPFGVTLLVRHLPDGIPHDIVSRLFSQYGASAVRPCSGGKLRNAAFVDFKNEAFASQAHRQLNGLRFLGKVLQVQRANKPNDNKKSRQIEESVTKGNAFSTVSTNNDSKSGQILSGEPIAPKLGIDYPFPPHLQYAYPPPDANILANITNALIAVPPLYTQVLHLMNKMNLPPPFRLALPTPPLPKAGPQQTDLEHQSSSESEMESDEDIGTSKSGRKRARHGFLVGLGMDKDVPHETVGVKPSSLTPKEIPRIRKNKHVMQIKITSKVTQDEYKEESENEDPADEPKEKDSNLKPFASLEELEKGRLPPQDILSLPMFKNYTAGNPSVVLYIKNLAKDVVIDDFYYIFGSQFESSEVAKSSLGVRLMQEGRMRGQAFLTFPSVEVAHRALNLVNGFVFKGKPMIIQFGRTPGAAKPNE

SEQ ID NO: 5764 - protein, 773 aa, Arabidopsis thaliana
  Clone ID: ARATH-23APR03-C13281_1.p
MENPPAEELLKKILELEESQEHLKQEMSRLKVSTELRQRSHSVSPHRPARRNIGEGAPSWRKSGAASFRNASPLRKESRIQNSMRLRSEVGGGGPSAGKFTDKQYLNILQSMAQAVHAFDLNMRIIFWNAMAEKVYGYSAAEALGENPINVIADDRDAAFAMNIARRCVRGESWTGEFPVKSKSGDRFSAVTTCSPFYDDDGALMGIICITSNTAPYLNPRISLAKLKAQEEGETSSIPARNSFASKLGLDSRGAVISKLGLDSDQPIQVAIASKISDLASKVSNKVRSKMRAGDNSATLSEGGSGDSHQKDHNVFGATLVDHRDDAASSGASTPRGDFIQSPFGVFTCNDEKFVSKPFKDSSDESDGKPAIHKVLTSKAEEWMVKKGLSWPWKGNEQEGSKGRPTNSVWPWVQNEQKKERCHQINPSAGVQYESHAFESNKPINNEASSLWSSPINANSTSSASSCGSTSSSVMNKVDTDSEGLEYEILWDDLTIGEQVGQGSCGTVYHGLWFGSDVAVKVFSKQEYSAEVIESFKQEVLLMKRLRHPNVLLFMGAVTSPQRLCIVSITICSGSLFRLLQKSTSKLDWRRRIHMALDIARGMNYLHHCSPPIIHRDLKSSNLLVDKNWTVKVADFGLSRIKHETYLTSKSGKGTPQWMAPEVLRNESADEKSDIYSFGVVLWELATEKIPWETLNSMQVIGAVGFMDQRLEIPKDIDPRWISLMESCWHSDTKLRPTFQELMDKLRDLQRKYMIQFQATRAALSDNSLLKDN

SEQ ID NO: 5765 - protein, 290 aa, Arabidopsis thaliana
  unsure (1)..(290): unsure at all Xaa locations
  Clone ID: ARATH-23APR03-C134699_1.p
LQICSAAIELRILVQIEGKLSAXRSHFIIDKMIQMDGGDRLRVTLLDRMSTVENGRSSVTLEDILMAETSSFRSLTTPTTPVRNHSSSSLLDVMRRERRRDKTAWKSLRDKLRLKRTATGWISSNPIPTLDNHILTPDNDSHRFNRLGFLLTNSETNRSSRDVSDAAEEAAEREGRLRLGTVLAAEREEMQPPRMSLMELLEDNDGHMYELSARDEVEVEGRDGCDGGGEAVAVTVAAELGCCVCLARCXGAAFIPCGHTFCRLCSRELWVQRGNCPLCNTAILQVLDIF

SEQ ID NO: 5766 - protein, 350 aa, Arabidopsis thaliana
  unsure (1)..(350): unsure at all Xaa locations
  Clone ID: ARATH-23APR03-C13572_1.p
FLRTTENFKMVSQIISCLSQSSSLLCLSDSRRLILPKTCTCGGLSRFSPGFASRRLFTVNRKKWRSACIFNSGKEPGGEGKLQGGSSEWPILQRWEVPWGWQTVSLTSFACALXCFVLTGLTEMAVIPFLGIDVEKLTLDDKAEILFLDQGLTTAVVLAVIFTVAKTFDPLPEDILRYDLRQPVNLQKGWLVWGGIGLVGAVGAIALTGVVLSVFRTEAPEREVDSLMKLLPLIGSSNISTLSLVGITGILAPLLEETVFRGFFMVSLTKWVPTPIAIIISSAAFALAHFTPGEFPQLFILGSVLGLSYAQTRNLITPMVIHGFWNSGVILLLTFLQIQGYDIKELLQAN

SEQ ID NO: 5767 - protein, 1006 aa, Arabidopsis thaliana
  Clone ID: ARATH-23APR03-C13574_1.p
MIVKAKKSVILVVAQVIELIFYDVCFCVCSLVDALQQIATTLGSKFWKFDAENCKIEMVGLTETPPPTAKQEIECECSPTNDTDCHVVKFAFKDHNLPGTLPQIVKLPYLREIDLAYNYINGTLPREWASSNLTFISLLVNRLSGEIPKEFGNSSLTYLDLESNAFSGTIPQELGNLVHLKKLLLSSNKLTGTLPASLARLQNMTDFRINDLQLSGTIPSYIQNWKQLERLEMIASGLTGPIPSVISVLSNLVNLRISDIRGPVQPFPSLKNVTGLTKIILKNCNISGQIPTYLSHLKELETLDLSFNKLVGGIPSFAQAENLRFIILAGNMLEGDAPDELLRDGITVDLSYNNLKWQSPESRACRPNMNLNLNLFQSTSTKKSSKFLPCIKDFKCPRYSSCLHVNCGGSDMYVKEKKTKELYEGDGNVEGGAAKYFLKPDANWGFSSTGDFMDDNNFQNTRFTMFVPASNQSDLYKSARIAPVSLTYFHACLENGNYTINLDFAEIRFTNDENYNRLGRRLFDIYIQEKLVAKDFNIMDEAKGAQTPIIKPLTAYVTNHFLTIRLSWAGKGTTRIPTRGVYGPIISAISIVSDSKPCERPKTGMSPGAYIAIGIGAPCLIIFILGFLWICGCLPRCGRQRKDPYEEELPSGTFTLRQIKFATDDFNPTNKIGEGGFGAVFKGVLADGRVVAVKQLSSKSRQGNREFLNEIGAISCLQHPNLVKLHGFCVERAQLLLAYEYMENNSLSSALFSPKHKQIPMDWPTRFKICCGIAKGLAFLHEESPLKFVHRDIKATNILLDKDLTPKISDFGLARLDEEEKTHISTKVAGTIGYMAPEYALWGYLTFKADVYSFGVLVLEIVAGITNSNFMGAGDSVCLLEFANECVESGHLMQVVDERLRPEVDRKEAEAVIKVALVCSSASPTDRPLMSEVVAMLEGLYPVPESTPGVSRNAGDIRFKAFKDLRRGMENNSKTQCSVKSYPSSSSTSSGAGQAVQERKKEESRP

SEQ ID NO: 5768 - protein, 841 aa, Arabidopsis thaliana
  Clone ID: ARATH-23APR03-C13597_1.p
MELDDLDLSGSWPLDQITFASNFKSPVIFSSSEQPFSPLWSFSETSGDVGGELYSAAVAPTRFTDYSVLLASSESETTTKENNQVPSPSWGIMPLENPDSYCAIKAKMTQALRYFKESTGQQHVLAQVWAPVKNRGRYVLTTSGQPFVLGPNSNGLNQYRMVSLTYMFSLDGERDGELGLPGRVFRKKLPEWTPNVQYYSSKEFSRLGHALHYNVQGTLALPVFEPSRQLCVGVVELIMTSPKINYAPEVEKVCKALEAVNLKTSEILNHETTQICNEGRQNALAEILEILTVVCETYKLPLAQTWVPCRHRSVLAFGGGFKKSCSSFDGSCMGKVCMSTSDLAVYVVDAHVWGFRDACAEHHLQKGQGVAGRAFQSGNLCFCRDVTRFCKTDYPLVHYARMFKLTSCFAVCLKSTYTGDDEYVLEFFLPPAITDKSEQDCLLGSLLQTMKQHYSSLKVVSETELCENNMSLEVVEASEDGMVYSKLEPIRIHHPAQISKDYLELNAPEQKVSLNSDFMENNEVDDGVERFQTLDPIPEAKTVKKSERKRGKTEKTISLEVLQQYFAGSLKDAAKSLGVCPTTMKRICRQHGISRWPSRKINKVNRSLTRLKHVIDSVQGADGSLNLTSLSPRPWPHQIPPIDIQLAKNCPPTSTSPLSNLQDVKIENRDAEDSAGSSTSRASCKVNPICETRFRLPTHNQEPSRQVALDDSDSSSKNMTNFWAHLTCQDTASPTILQHKLVSIKATYREDIIRFKISPESVSITELKQQVAKRLKLETAAFELKYLDDDREWVSVSCDADLSECLDTSAAKANTLRLSVHDVTFNFGSSCESSEETMMCL

SEQ ID NO: 5769 - protein, 406 aa, Arabidopsis thaliana
  Clone ID: ARATH-23APR03-C135_1.p
MDPTWIDSLTRSCEANSNTNHKRKRERETLKHREKKKKRFRERKMASKLCDSCKSATAALYCRPDAAFLCLSCDSKVHAANKLASRHARVWMCEVCEQAPAHVTCKADAAALCVTCDRDIHSANPLARRHERVPVTPFYDSVSSDGSVKHTAVNFLDDCYFSDIDGNGSREEEEEEAASWLLLPNPKTTTTATAGIVAVTSAEEVPGDSPEMNTGQQYLFSDPDPYLDLDYGNVDPKVESLEQNSSGTDGVVPVENRTVRIPTVNENCFEMDFTGGSKGFTYGGGYNCISHSVSSSSMEVGVVPDGGSVADVSYPYGGPATSGADPGTQRAVPLTSAEREARVMRYREKRKNRKFEKTIRYASRKAYAEMRPRIKGRFAKRTDTNESNDVVGHGGIFSGFGLVPTF

SEQ ID NO: 5770 - protein, 657 aa, Arabidopsis thaliana
  Clone ID: ARATH-23APR03-C13607_1.p
IKNSTMETPKGTIIFTTVGRTHYGFDVFSLNIATSVERRLTDGVSVNFNAQFVNDKSDDVVFVSERNGSARIYKTRSGISKPEQIPGAPESYFHDRPIITQNNRLYFISAHEQPDRYFKNWSALYTVELNSAKREVTRVTPPDTADFSPAVSQSGDFLAVASYGTRSWGGEFHEINTDITVFKASKPETRVVICERGGWPTWSGDSTVFFHHQADDGWWSIFRVDIPENFTEYTDFPITPIRVTPSGLHCFTPAAFRDGKRIALATRRRGVNHRHIEIYDLENTTFQPVTESLNPSFHHYNPFVSPDSEFLGYHRFRGESTQGESIVPNIESIVSPIKTLRLLRINGSFPSSSPNGDLIALNSDFDINGGIKVSKSDGSKRWTLIKDRTAFYNSWSPTERHVIYTSLGPIFSPARIAVQIARIKFDPSDLTADKEDLPCDVKILTLENTGNNAFPSCSPDGKSIVFRSGRSGHKNLYIVDAVNGESNGGGIRRLTDGPWIDTMPCWSPKGDLIGFSSNRHNPENTAVFGAYVVRPDGTGLRRIQISGPEGSEEAARERVNHVSFNKDGDWLVFAANLSGVTAEPVTMPNQFQPYGDLYVVKLDGTGLRRLTWNGYEDGTPTWHTADELDLSQLNLNGQDGDKLEGQFEEPLWISCDI

SEQ ID NO: 5771 - protein, 801 aa, Arabidopsis thaliana
  Clone ID: ARATH-23APR03-C13643_1.p
MEALSHVGIGLSPFQLCRLPPATTKLRRSHNTSTTICSASKWADRLLSDFNFTSDSSSSSFATATTTATLVSPPPSIDRPERHVPIPIDFYQVLGAQTHFLTDGIRRAFEARVSKPPQFGFSDDALISRRQILQAACETLSNPRSRREYNEGLLDDEEATVITDVPWDKVPGALCVLQEGGETEIVLRVGEALLKERLPKSFKQDVVLVMALAFLDVSRDAMALDPPDFITGYEFVEEALKLLQEEGASSLAPDLRAQIDETLEEITPRYVLELLGLPLGDDYAAKRLNGLSGVRNILWSVGGGGASALVGGLTREKFMNEAFLRMTAAEQVDLFVATPSNIPAESFEVYEVALALVAQAFIGKKPHLLQDADKQFQQLQQAKVMAMEIPAMLYDTRNNWEIDFGLERGLCALLIGKVDECRMWLGLDSEDSQYRNPAIVEFVLENSNRDDNDDLPGLCKLLETWLAGVVFPRFRDTKDKKFKLGDYYDDPMVLSYLERVEVVQGSPLAAAAAMARIGAEHVKASAMQALQKVFPSRYTDRNSAEPKDVQETVFSVDPVGNNVGRDGEPGVFIAEAVRPSENFETNDYAIRAGVSESSVDETTVEMSVADMLKEASVKILAAGVAIGLISLFSQKYFLKSSSSFQRKDMVSSMESDVATIGSVRADDSEALPRMDARTAENIVSKWQKIKSLAFGPDHRIEMLPEVLDGRMLKIWTDRAAETAQLGLVYDYTLLKLSVDSVTVSADGTRALVEATLEESACLSDLVHPENNATDVRTYTTRYEVFWSKSGWKITEGSVLAS

SEQ ID NO: 5772 - protein, 304 aa, Arabidopsis thaliana
  Clone ID: ARATH-23APR03-C137642_1.p
MKKSLTLLILLLCTLLFSTVLSNLLVEPVQPNTVPAFPVETQAQSCRLDLSNELFGGVNEACGRNLDRSRCCPVLAAWLFAAHARSALQLPAPAPTPESSDPDEPMKPDDSQKCVNTLQSALLTKQIKIPQPNSSCDAILCFCGIRLHQISSLSCPAAFNVSSGFKNATPTAAVKNLEKECRNSSYSGCTRCLGALQKLKVRGGNKKTTTERGTKMMSKDCQLMGLTWLLARNKTAYIPTVSAVLRAIMYSPHPPHLNKCSPDQENMPLAVDSLQFQKSFSSSSHLFGVLPFLPLVLCIFLFLL

SEQ ID NO: 5773 - protein, 545 aa, Arabidopsis thaliana
  Clone ID: ARATH-23APR03-C1379_1.p
MADQQTLDSSTPPPTQSDDLSHSHSTSSTTSASSSSDPSLLRSLSLSRLNAGAPEFVPGRTTPPLPQPPRMIIPPPPPHGMLHMYHHQPPFNTPVLGPVPIQPHLVPVQNHHPHHRFHQHHHHNRHQNQQYVPVRNHGEYQQRGGVGGEQEPDLVSKKNDRRDHSKRESKNDQVTETGASVSIDSKTGLPEDSIQKIVNQVEYYFSDLNLATTDHLMRFICKDPEGYVPIHVVASFKKIKAVINNNSQLAAVLQNSAKLFVSEDGKKVRRISPITESAIEELQSRIIVAENLPEDHCYQNLMKIFSTVGSVKNIRTCQPQNNGSGAPPAARSAAKSDGTLFSNKVHAFVEYEIVELAERAVTELSEAGNWRSGLKVRLMLKHQTKEPKQGQGRGRKGHDADVEHEEDDATTSEQQPIEKQSDDCSGEWDTHMQEQPIGEDQGNEKAAGQRKGRNRGRGKGRGRGQPHQNQNQNNNHSHNQNHNHNGRGNHHHHHHHQVGTQPSNNPMNNMEQPGMGKQQPPGPRMPDGTRGFSMGRGKPVMVQAE

SEQ ID NO: 5774 - protein, 310 aa, Arabidopsis thaliana
  Clone ID: ARATH-23APR03-C13873_1.p
MAAKEGSRIFVGGLSPEVTDRDLERAFSRFGDILDCQIMLERDTGRSRGFGFITFADRRAMDESIREMHGRDFGDRVISVNRAEPKLGRDDGESHGSRGGRDSGYSIAGKGSFGGGGGGGGRVGEDECFKCGRVGHWARDCPSAGGGRGGPVGGFSSRASAYGGSDGRVDRYADRDRYVDRERYIDDRYDGAARYGARDRFDSREAYIPRDRYASDRYAAPADRFAGGDRYSRGSDRYPPGSYDKARSFERDIAPSAGSDRYGGGRAGGPIRGGGEEGRGFRSRAGAPYERPSRSGGGGAYPSSSTFDRY

SEQ ID NO: 5775 - protein, 360 aa, Arabidopsis thaliana
  Clone ID: ARATH-23APR03-C1388_1.p
MEVSGVVLRQIPCVSSGSVAGLRLVSEFSGNTRTVGFRTRRFRGIVCNNEFAARGHVNYYIEPTRCGEEKEKVKVMEKEKKALKKKAKVLKSLSKNLDMFSSIGFGLDPEAGLVGEIQTKTISEATEILVKQLEQLKAEEKILKKQRKEEKAKAKAMKKMTEMDSESSSSSESSDSDCDKGKVVDMSSLRNKAKPVLEPLQPEATVATLPRIQEDAISCKNTSEALQIALQTSTIFPSMANPGQTLKTVEAVSVVGLPLNRVEVCMGGKCKRSGGALLLDEFQRAMTGFEGSAVACKCMGKCRDGPNVRVVKETDAVMTDSVRTPSKTLCVGVGLQDVETIVTSFFDEECSREGLGSVSY

SEQ ID NO: 5776 - protein, 3795 aa, Arabidopsis thaliana
  Clone ID: ARATH-23APR03-C139250_1.p
MSPIQNFEQHSRRLVDLDLPIPTRLEMVVEVRDSLEIAHTAEYLNFLKCYFPAFSVILLQITKPQFIDNPEHKLRNIVVEILNRLPHSEVLRPFVQDLLKVAMQVLTADNEENGLICIRIIFDLLRNFRPTLENEVQPFLDFVCKIYSIFRFTVSHFFDNVKMEEVKPMEMPTSSDQSLTPTPPIGNVQLNPSTRSFKIITESPLVVMFLFQLYSRLVQTNIPHLLPLMVAAISVPGPENVPSHLKPQFIELKGAQVKELLVSLKHVLGTDFKRGLFPLIDTLLDERVLVGTGRACFESLRPLAYSLLAEIVHHVRGDLSLAQLSRIIYLFSRNMHDSTLSLSIHTTCARLMLNLVEPIFEKGVDQQSMDEARILLGRILDAFVGKFSTFKRTIPQLLEEGEVGKDRVTLRSKLELPVQVPVEHSKEVNDCKNLIKTLVMGMKTIIWSITHAHLPRPQGFKGMREDEVWKASGVLKSGVHCLALFKEKDEEKEMLNLFSQILAIMEPRDLMDMFSLCMPELFESMINNNQLVQIFAALLQAPKVYKPFADVLINLLVSSKLDVLKNPDSAATKLVLHLFRCIFGAVTKTPSDFERILQHHVPVIMEVCMKNATEVEKPLGYMQLLRTVFRGLAGCKYELLLRDLIPMLLPCLNILLTMLEGPAGEDMKDLLLELCLTLPARLSSLLPYLPRLMKPLVFCLRGSDELVSLGLRTLEFWVDSLNPDFLEPSMANVMSEVILALWSHLRPVPYPWGKKALQILGKLGGRNRRFLKEPLTLECKDNPEHGLRLVLTFEPSTPFLVPLDKFINLAVAAVIQRNHGMDIYYRKQALKFLRVCLLSQLNLPGCVTDVGQTPRQLSTLLRSSVDSSWHRSEAVEIKADLGVKTKTQLMAEKSIFKTLLITILAASSDPDLSDTDDDFVENICRHFAIILHVDYTSSNASTSTSSLGGSVISTSSRSKSNQSSNLKQLDPLIFLDALVDVLADENRLHAKAALNALNVFAETLLFLARVKHADVLMARGGHNASMIVSSPSTNPVYSPHPSVRIPVFEQLLPRLLHGCYGSTWQAQMGGVMGLGALVGKVNVETLCYFQVKIVRGLVYVLKRLPVYASKEQEETSQVLMQILRVVNNVDEANSEARRKSFQDVVEYLATELFNPNASIPVRKNVQNCLALLASRTGSEVTELLEPLYQLLLQPLIMRPLRSKTVDQQVGTVAALNFCLALRPPLLKVTPELVNFLQEALQIAEADETVWAVKLMNPKVLTSLNRLRTACIELLCTTMAWTDFRTQTHNELRAKIISMFFKSLTCRAPEIVAVAKEGLRQVINQQRMPKELLQSSLRPILVNLAHTKNLSMPLLQGLARLLELLSNWFNVTLGGKLLEHLKKWLEPEKLAQSQKAWKAGEEPKIAAAIIELFHLLPHAASKFLDELVTLTIDLEAALPPGQVYSEINSPYRLPLTKFLNRYAALAVDYFLSRLSEPKYFRRFMYIIRSDAGQPLREELAKSPQKILSYAFPEISPKPDPTLSTTASTPPATSSGDENHISVKLESSNVASTKANIASDAYFQGLYLIKTMVKLIPSWLQSNRSVFDTLVLIWKSPARISRLQNEQELNLVQVKESKWLVKCFLNYLRHEKSEVNVLFDILSIFLFHSRIDYTFLKEFYIIEVAEGYPPNMKRALLLHFLNLFHSKQLGHDHLVQAMQMLILPMLAHAFQNGQTWEVIDPDIVKTIVERLLDPPEEVSAEYDEPLRIELLQLATLLLKYLQSDLVHHRKELIKFGWNHLKREDSASKQWAFVNVCHFLDAYQAPEKIILQVFVALLRTCQPENKMLVKQALDILMPALPKRLPLGDSRMPIWIRYTKKILVEEGHSIPNLIHIFLLVVRHSDLFYSCRAQFVPQMVNSLSRLGLPYNTTAENRRLAIELAGLVVSWERQRQNEMKMVTDTDGTSQITDEMHTSSGADPKRSTDGSATSEDPSKRVKIEPGLQSICVMSPGGASSIPNVETPGSATQPDEEFKPNAAMEEMIINFLIRVALVIEPKDRETNTMYKQALDLLSQALEVWPSANVKFNYLEKLLSSMPPSQSDPSTALAQGLDVMNKVLEKQPHLFIRNNINQISQILEPCFKHKMLDAGKSLCSLLKMVFTAFPLDAANTPPDIKLLYQKVNELINKHVNTVTAPQTSGDDNSFGSISFVLLVIKTLANVHKNFVDSYVLVRILQRLARDLGSAVGSHPRQGQRTDSDSAVTSSRQTADVGAVICNIKSVLELIDETVMLIADCKRSVTQILNTLLSEKGTDASVLLCILDMIKRWVEDDFSKTGASGLSGSFLTQKDVLTFLNKLSYIDKQHFSSEALEEWDQKYLQLLYGLCADSTKYPLGLRQEVSLKVERHFMLGLRASHPGMRRKFFLLYHESLGKTLFARLQYIIQIQDWEALSDVFWLKQGLDLLLAILVEDKPISLAPNSARVLPLLPSDNPGIQHQAPANLEGPEEVTSMFDSIVMKHAQFLSATSKLQVADVVIPLRELAHTDANVAYHLWVLVFPIVWVTLLKEEQVALAKPMISLLSKDYHKKQQGHRPNVVQALLEGLQLSHPQPRMPSELIKYIGKTYNAWHLALALLESHVMLFMNDSKCAESLAELYRLLNEEDMRFGLWKKRSITAETRAGLSLVQHGFWQRAQSLFYQAMVKATQGTYNNTVPKAEMCLWEEQWLHCASQLSQWDALVDFGKSIENYEILLDSLWKLPDWAYLKDHVIPKAQVEETPKLRLVQSYFALHDRNSNGVGDAENTVGKGVDLALEQWWQLPEMSVHARVPLLQQFQQLVEVQESARIHVDIANGNKVSGNTAVGGLGNRYADLKDILETWRLRTPNEWDNMTVWYDMLQWRNEMYNVVIDAFKDFATSNSPLHHLGFRDKAWNVNKLARIARKQGLYDVCVQILEKMYGHSTMEVQEAFVKIREQAKAYLEMKGERASGLNLINSTNLEYFPDKIKAEIFRLKGDFHLKLNDTESANIAYSNAITLFKNLPKGWISWGSYCDMAYQETQEEIWLEYAVSCFLQGIRFGVSNSRSHIARVLYLLSFDTANEPVGKVFDKHLDQVPHWVWLSWIPQLLLSLQRTEAPHCKLVLLKIAAVFPQALYYWLRTYLLERRDAVNKSELGRLVLAQRMQQNATGAGHGGSNLPSENQIHQGAQTSGAGGTHDSGNPHGQESERSTTENNLHPGSDQPMHQSSSAINDNNENTVRRNGASLAISAAGAFDAAKDIMEALRGKHNNLASELEVLLTEIGSRFVTLPEERLLAVVNALLHRCYKYPTATTAEVPQPLKKELSGVCRACFSADAVTKHVEFVKEYKQDFERHLDPESTTTFPATLAELTARLKKWKNILQSNVEDRFPAVLRLEDESRVLRDFNVVDVEIPGQYFADQEVAPDHTVKLDRVGADVPIVRRHGSSFRRLTLIGSDGSQKHFIVQTSLTPNARSDERILQLFRVMNQMFDKHKESRRRHIGIHTPIIIPVWSQVRMVEDDLMYNTFLEVYENHCARNDREADLPITHFKEQLNQAISGQISAEAIGDLRLQAYIDITKTLVNDSIFSQYMYKTLMSGSHMWAFKKQFAVQLAVSSFMSFMLQIGGRSPNKVLFAKNTGKMFQTDFHPAYDANGMIEFNEPVPFRLTRNMQAFFSQFGVEGLLMSSMCSAAQAVISSKQNEHLRYQLAMFFRDELLSWFGRRPLGVPIPPVGGIATLNPAELKHKVNANVEDVIKRIRGIAPQYFSEEDENTVEPPQSVQRGVNELVEAALSPRNLCMMDPTWHPWF

SEQ ID NO: 5777 - protein, 449 aa, Arabidopsis thaliana
  Clone ID: ARATH-23APR03-C13928_1.p
KLDISVVTILILALTSVIPIYANVHGAGKICDELGRRSLSTRPHSVSITDFGAVGDGKTLNTLAFQNAVFYLMSFADKGGAQLYVPPGHWLTGSFSLTSHLTLFLENGAVIVASQDPSHWEVVDPLPSYGRGIDLPGKRYKSLINGNKLHDVVVTGDNGTIDGQGLVWWDRFTSHSLKYNRPHLIEFLSSENVIVSNLTFLNAPAYSIYSIYSSHVYIHKILAHSSPKSPYTIGIVPDSSDYVCIQNSTINVGYDAISLKSGWDEYGIAYSRPTENVHIRNVYLRGASGSSISFGSEMSGGISDVVVDNAHIHYSLTGIAFRTTKGRGGYIKEIDISNIDMLRIGTAIVANGSFGSHPDDKYDVNALPLVSHIRLSNISGENIGIAGKLFGIKESPFSSVTLSNVSLSMSSGSSVSWQCSYVYGSSESVIPEPCPELKRDADAYGRAAV

SEQ ID NO: 5778 - protein, 262 aa, Arabidopsis thaliana
  Clone ID: ARATH-23APR03-C13966_1.p
MGCCASNTAGGSKANRISRWRSTGIVGLRDSKLKTFPDEVIEMERAVRTLDLTHNKIADVPGEISKLINMQRLLIADNLVERLPGNLGKLQSLKVLMLDGNRISCLPDELGQLVRLEQLSISRNMLIYLPDTIGSLRNLLLLNVSNNRLKSLPESVGSCASLEEVQANDNVVEELPASLCNLIQLKSLSLDNNQVNQIPDGLLIHCKSLQNLSLHNNPISMDQFQLMEGYQDFEERRKKKFDKQIDSNVMMGSKALDVGVDK

SEQ ID NO: 5779 - protein, 262 aa, Arabidopsis thaliana
  Clone ID: ARATH-23APR03-C1397_1.p
MEEIADKTFFRYCLLTLIFAGPPTAVLLKFLQAPYGKHNRTGWGPTVSPPIAWFVMESPTLWLTLLLFPFGRHALNPKSLLLFSPYLIHYFHRTIIYPLRLFRSSFPAGKNGFPITIAALAFTFNLLNGYIQARWVSHYKDDYEDGNWFWWRFVIGMVVFITGMYINITSDRTLVRLKKENRGGYVIPRGGWFELVSCPNYFGEAIEWLGWAVMTWSWAGIGFFLYTCSNLFPRARASHKWYIAKFKEEYPKTRKAVIPFVY

SEQ ID NO: 5780 - protein, 182 aa, Arabidopsis thaliana
  unsure (1)..(182): unsure at all Xaa locations
  Clone ID: ARATH-23APR03-C13993_1.p
MAKRFLLLLPLLSSILLLAVSVTAYSTTTPYQGYKPEKFTHLHFYFHDVITGDKPTAIKVAEARRTTSLNVNFGVIMIADDPLTEGPDPSSKXVGRAQGMYASTAMKDIVFTMVFNYVFTAGEFNGSTIAVYGRNDIFSKVRELPIIVGTGAFRFARGYALPKTYKIVGLDAVVEYNVFIWH

SEQ ID NO: 5781 - protein, 204 aa, Arabidopsis thaliana
  unsure (1)..(204): unsure at all Xaa locations
  Clone ID: ARATH-23APR03-C13998_1.p
FGIHKVVSVFRSSSFSEFRVSKIVSSYSNPLSHLSQFXFSSEKNQLXLMVDDTSPFLEVFCEVSGKDYRFTTGTKAEFAVSVINRKLGSLKPRVIYIEAAKEGEEPISFGDNASLLNYGLGWKLKTVVDADLPGTEKNNRQQRFSSVFSTGFANDSTPEIGEQSLKYIGRIFFAFVLMFILGGLFTVALENLPRLILLFNNSFV

SEQ ID NO: 5782 - protein, 346 aa, Arabidopsis thaliana
  Clone ID: ARATH-23APR03-C13999_1.p
MGTSSDPIQDGSDEQQKRSEIYTYEAPWHIYAMNWSVRRDKKYRLAITSLLEQYPNRVEIVQLDESNGEIRSDPNLSFEHPYPPTKTIFIPDKECQRPDLLATSSDFLRLWRIADDHSRVELKSCLNSNKNSEFCGPLTSFDWNEAEPRRIGTSSTDTTCTIWDIEREAVDTQLIAHDKEVFDIAWGGVGVFASVSADGSVRVFDLRDKEHSTIIYESSEPDTPLVRLGWNKQDPRYMATIIMDSAKVVVLDIRFPALPVVELQRHQASVNAIAWAPHSSCHICTAGDDSQALIWDISSMGQHVEGGLDPILAYTAGAEIEQLQWSSSQPDWVAIAFSTKLQILRV

SEQ ID NO: 5783 - protein, 312 aa, Arabidopsis thaliana
  Clone ID: ARATH-23APR03-C14017_1.p
MATERHHFELAKGINGLDKIVLRESRGRSAEVYLYGSHVTSWKNENGEELLHLSSKAIFKPPKPIRGGIPLCFPQFSNFGTLESHGFARNRIWEVEANPPPLPLNSCSSAFVDLILRPTEDDLKIWPNNFEFRLRIALGTEGELTLTSRIRNTNSDGKPFTFTFAYHTYFSVSDISEVRVEGLETLDYLDNLKDRERFTEQGDAITFESEVDKIYLSTPTKIAILDHEKKRTFVIRKDGLADAVVWNPWDKKSKTISDLGDEDYKHMLCVEAAAIERPITLKPGEEWKGRLELSAVPSSYSSGQLDPKKVLE

SEQ ID NO: 5784 - protein, 363 aa, Arabidopsis thaliana
  Clone ID: ARATH-23APR03-C14033_1.p
DWPVAAPVVSLSFASSSSKAMALCSICPRIPLRFRPKPISPFLSKPQICLAYRVYSSLQSTTPSTRDELGTVSIGFLGMGIMGSPMAQNLIKAGCDVTVWNRTKSKCDPLVGLGAKYKSSPEEVTATCDLTFAMLADPESAIDVACGKNGAIFGISSGKGYVDVSTVDVASSILISKQIKDTGALFLEAPVSGSKKPAEDGQLIFLTAGDKPLYEKAAPFLDIMGKSKFYLGEVGNGAAMKLVVNMIMGSMMASFAEGILLSQKVGLDPNVLVEVVSQGAINAPMYSLKGPSMIKSVYPTAFPLKHQQKDMRLALGLAESVSQSTPIAAAANELYKVAKSYGLSDEDFSAVIEALKAAKSREA

SEQ ID NO: 5785 - protein, 423 aa, Arabidopsis thaliana
  Clone ID: ARATH-23APR03-C14037_1.p
MSSRVFRATPDNNYLVPRRSKDQQDTSPDRNRIWSEPRLKPVVNRKVPVVYYLCRNGQLDHPHFIEVTLSSHDGLYLKDVINRLNDLRGKGMASLYSWSSKRSYKNGFVWHDLSEDDFIFPVQGQEYVLKGSEVLDSCLISNPRSLLETSSFRDPRSLNPDKNSGDDIPAVINRRRNQSWSSIDLSEYKVYKATESSAESTQRLAADASTQTDDRRRRRRPAKEEIEEVKSPASYENQSTELSRDEISPPPSDSSPETLENLIKADGRLILRPSESSTDHRTVESLSSGRMRASAVLMQLISCGTMSFKECGPVLLKDQGLALNGRSGCTITRGAEDNGEERVDKELKSFGRVQLEDKEYFSGSLIETKKELVPALKRSSSYNADRCSRMGPTTEKDEEEAVRAKCIPRKPKPVAKRNNGGQQ

SEQ ID NO: 5786 - protein, 455 aa, Arabidopsis thaliana
  Clone ID: ARATH-23APR03-C14066_1.p
MSTASSWIQQPPFRYLPDRGGFSKPSSRSARQFSSGVVSASASSPSPSSSCSCGYSEILNFDFGSNRSWNQQGRRVQAMSSTAQRKFSLAKGDSDDKNEPDHLLVLAHGILASPSDWLYVEAELKRRLGRRFLIYASSSNTFTKTFGGIDGAGKRLAEEVRQVVQKSKSLKKISFLAHSLGGLFSRHAVAVLYSAAMAQVSDVAVSQSGNSNLLRGRIAGLEPINFITLATPHLGVRGRKQLPFLLGVPILEKLAAPIAPFFVGRTGSQLFLTDGKADKPPLLLRMASDGEDLKFLSALGAFRSRIIYANVSYDHMVGWRTSSIRRETELIKPSRRSLDGYKHVVDVEYCPPVSSDGAHFPPEAAKAKEAAQSSPSPQNTLEYHEIVEEEMIRGLQRLGWKKVDVSFHSTFWPYLAHNNIHVKSERLYKAGAGVIAHVADSIKQQESSTFITASL

SEQ ID NO: 5787 - protein, 424 aa, Arabidopsis thaliana
  Clone ID: ARATH-23APR03-C14112_1.p
MDPCPFVRLTIDSLALRLPETATNKQIGGEVHPSSTPCYCKLRIKHFPSQKALLPLSSFSDASSPPESSTSAPGFHLDADAIRRISGKKISLRVSVYAGRTGHTCGVASGKLLGKVEVAVDLAAALSRTVAFHNGWKKLGGDGDKPSARLHLLVCAEPDPRFVFQFGGEPECSPVVYQIQDNLKQPVFSCKFSSDRNGRSRSLPSGFTYSSRGWITRTLSGDQWEKKQARERKGWMITIHDLSGSPVAAASMITPFVASPGSDRVSRSNPGAWLILRPHGTCVSSWKPWGRLEAWRERGAIDGLGYKFELVRDNSTSTGIPIAEGTMSTKQGGKFSIDRRVSGQGESPAISSPVKGFVMGSSVEGEGKVSKPVVHVGAQHVTCMADAALFVALSAAVDLSVDACQLFSRKLRKELCHDDQSSLT

SEQ ID NO: 5788 - protein, 489 aa, Arabidopsis thaliana
  Clone ID: ARATH-23APR03-C1411_1.p
MTETGLILMWFPLIILGLFVLKWVLKRVNVWIYVSKLGEKKHYLPPGDLGWPVIGNMWSFLRAFKTSDPESFIQSYITRYGRTGIYKAHMFGYPCVLVTTPETCRRVLTDDDAFHIGWPKSTMKLIGRKSFVGISFEEHKRLRRLTSAPVNGPEALSVYIQFIEETVNTDLEKWSKMGEIEFLSHLRKLTFKVIMYIFLSSESEHVMDSLEREYTNLNYGVRAMGINLPGFAYHRALKARKKLVAAFQSIVTNRRNQRKQNISSNRKDMLDNLIDVKDENGRVLDDEKIIDLLLMYLNAGHESSGHLTMWATILMQEHPMILQKAKEEQERIVKKRAPGQKLTLKETREMVYLSQVIDETLRVITFSLTAFREAKSDVQMDGYIIPKGWKVLTWFRNVHLDPEIYPDPKKFDPSRWEGYTPKAGTFLPFGLGSHLCPGNDLAKLEISIFLHHFLLKYRVERSNPGCPVMFLPHNRPKDNCLARITRTMP

SEQ ID NO: 5789 - protein, 346 aa, Arabidopsis thaliana
  Clone ID: ARATH-23APR03-C14136_1.p
MASNTLKEMNSLHVTEKISDCKASLTKPCVGKMNGKSEDRPLPNSASLDSSDSKVVEAEKPEPEIAIVEVEYIESENLDNVDDADAVLKSVLAGLESKDWISLCDALNNVRRLSIFHKEEMMHMLEKVIPLVVKSLKNPRSAVCKTACMTSADIFSAYNNHITDLLEPLLTQLLLKSSQDKRFVCEAAEKALTAMTKYVSPTLLLPKLQPCLKNRNPRIRAKASLCFSRSVPRLGVEGIKEYGIDKLVQAAASQLSDQLPESREAARTVLLELQSVYEKAHPLINPETSSPEEQQIPEVEPITWETFCKSKLSALSAQAVLRVTNVVTVTAREGLVTTGSSSSSQL

SEQ ID NO: 5790 - protein, 709 aa, Arabidopsis thaliana
  Clone ID: ARATH-23APR03-C14146_1.p
MVGGGGGSSGRGGGSGSGSSKQQRGFSMNPKDYKLMEEIGHGASAVVYRAIYLPTNEVVAIKCLDLDRCNSNLDDIRRESQTMSLIDHPNVIKSFCSFSVDHSLWVVMPFMAQGSCLHLMKTAYSDGFEESAICCVLKETLKALDYLHRQGHIHRDVKAGNILLDDNGEIKLGDFGVSACLFDNGDRQRARNTFVGTPCWMAPEVLQPGNGYNSKADIWSFGITALELAHGHAPFSKYPPMKVLLMTIQNAPPGLDYDRDKKFSKSFKEMVAMCLVKDQTKRPTAEKLLKHSCFKHTKPPEQTVKILFSDLPPLWTRVKSLQDKDAQQLALKRMATADEEAISQSEYQRGVSAWNFDVRDLKTQASLLIDDDDLEESKEDEEILCAQFNKVNDREQVFDSLQLYENMNGKEKVSNTEVEEPTCKEKFTFVTTTSSLERMSPNSEHDIPEAKVKPLRRQSQSGPLTSRTVLSHSASEKSHIFERSESEPQTAPTVRRAPSFSGPLNLSTRASSNSLSAPIKYSGGFRDSLDDKSKANLVQKGRFSVTSGNVDLAKDVPLSIVPRRSPQATPLRKSASVGNWILEPKMPTAQPQTIKEHSSHPTSSSPIMPQLQHLFQQNSIQQDLIMNLLNSLQPVEATEGSQSGKLPPLPRSDSNGNVEPVASERERLLLSSISDLRARLDDLTEELDIEKSKYSQLQQKLKAFTGREH

SEQ ID NO: 5791 - protein, 230 aa, Arabidopsis thaliana
  Clone ID: ARATH-23APR03-C14157_1.p
MASSNSEKINENLYAVLGLKKECSKTELRSAYKKLALRWHPDRCSSMEFVEEAKKKFQAIQEAYSVLSDSNKRFLYDVGAYNTDDDDDQNGMGDFLNEMATMMNQSKPSDNNTGDSFEQLQDLFNEMFQGDAAAFPSSSSCSTSNFTSSRSFVFDTNSQRSSSFATSSMGMNNDPFGYDPRAHSFSLGVDHQQEFKKGKNNGGRRNRRKNNVPSAGHETSSSNNYGVPTS

SEQ ID NO: 5792 - protein, 623 aa, Arabidopsis thaliana
  Clone ID: ARATH-23APR03-C14158_1.p
MGIANKLRLSSSSLSRILHRRILYSSAVRSFTTSEGHRPTIVHKQGLDILHDPWFNKGTAFTMTERNRLDLRGLLPPNVMDSEQQIFRFMTDLKRLEEQARDGPSDPNALAKWRILNRLHDRNETMYYKVLINNIEEYAPIVYTPTVGLVCQNYSGLFRRPRGMYFSAEDRGEMMSMVYNWPAEQVDMIVVTDGSRILGLGDLGVHGIGIAVGKLDLYVAAAGINPQRVLPVMIDVGTNNEKLRNDPMYLGLQQRRLEDDDYIDVIDEFMEAVYTRWPHVIVQFEDFQSKWAFKLLQRYRCTYRMFNDDVQGTAGVAIAGLLGAVRAQGRPMIDFPKMKIVVAGAGSAGIGVLNAARKTMARMLGNTETAFDSAQSQFWVVDAQGLITEGRENIDPEAQPFARKTKEMERQGLKEGATLVEVVREVKPDVLLGLSAVGGLFSKEVLEAMKGSTSTRPAIFAMSNPTKNAECTPQDAFSILGENMIFASGSPFKNVEFGNGHVGHCNQGNNMYLFPGIGLGTLLSGAPIVSDGMLQAASECLAAYMSEEEVLEGIIYPPISRIRDITKRIAAAVIKEAIEEDLVEGYREMDAREIQKLDEEGLMEYVENNMWNPEYPTLVYKDD

SEQ ID NO: 5793 - protein, 173 aa, Arabidopsis thaliana
  Clone ID: ARATH-23APR03-C1415_1.p
MATNPKVYFDMTVGGKSAGRIVMELYADTTPETAENFRALCTGERGIGKQGKPLHYKGSSFHRVIPKFMCQGGDFTAGNGTGGESIYGSKFKDENFIKKHTGPGILSMANAGANTNGSQFFICTEKTSWLDGKHVVFGQVVEGLNVVRDIEKVGSDSGRTSKPVVIADCGQIS

SEQ ID NO: 5794 - protein, 792 aa, Arabidopsis thaliana
  Clone ID: ARATH-23APR03-C14163_1.p
MSLPTKRSTFSAASASDDSSYSSPPMKKAKNDLHHSPQHPNTADKVVGFHMEEDPTPAAANLSRKKATLPQPTKKFVIKLNKAKPTLPTNFEENTWEKLQSAIRAIFLKKKISFDLESLYQAVDNLCLHKLDGKLYDQIEKECEEHISAALQSLVGQNTDLTVFLSRVEKCWQDFCDQMLMIRSIALTLDRKYVIQNPNVRSLWEMGLQLFRKHLSLAPEVEQRTVKGLLSMIEKERLAEAVNRTLLSHLLKMFTALGIYMESFEKPFLEGTSEFYAAEGMKYMQQSDVPEYLKHVEGRLHEENERCILYIDAVTRKPLITTVERQLLERHILVVLEKGFTTLMDGRRTEDLQRMQTLFSRVNALESLRQALSSYVRKTGQKIVMDEEKDKDMVQSLLDFKASLDIIWEESFYKNESFGNTIKDSFEHLINLRQNRPAELIAKFLDEKLRAGNKGTSEEELESVLEKVLVLFRFIQGKDVFEAFYKKDLAKRLLLGKSASIDAEKSMISKLKTECGSQFTNKLEGMFKDIELSKEINESFKQSSQARTKLPSGIEMSVHVLTTGYWPTYPPMDVKLPHELNVYQDIFKEFYLSKYSGRRLMWQNSLGHCVLKADFSKGKKELAVSLFQAVVLMLFNDAMKLSFEDIKDSTSIEDKELRRTLQSLACGKVRVLQKNPKGRDVEDGDEFEFNDEFAAPLYRIKVNAIQMKETVEENTSTTERVFQDRQYQIDAAIVRIMKTRKVLSHTLLITELFQQLKFPIKPADLKKRIESLIDREYLEREKSNPQIYNYLA

SEQ ID NO: 5795 - protein, 381 aa, Arabidopsis thaliana
  Clone ID: ARATH-23APR03-C14210_1.p
IIYFSSDFPKLVSVSNSGISLRIQNSKPISPVFALEATSSRRVVCKAAAGVSGDLPESTPKELSQYEKIIELLTTLFPLWVILGTLVGIFKPSLVTWLETDLFTLGLGFLMLSMGLTLTFEDFRRCLRNPWTVGVGFLAQYMIKPILGFLIAMTLKLSAPLATGLILVSCCPGGQASNVATYISKGNVALSVLMTTCSTIGAIIMTPLLTKLLAGQLVPVDAAGLALSTFQVVLVPTIIGVLANEFFPKFTSKIITVTPLIGVILTTLLCASPIGQVADVLKTQGAQLILPVALLHAAAFAIGYWISKFSFGESTSRTISIECGMQSSALGFLLAQKHFTNPLVAVPSAVSVVCMALGGSGLAVFWRNLPIPADDKDDFKE

SEQ ID NO: 5796 - protein, 841 aa, Arabidopsis thaliana
  Clone ID: ARATH-23APR03-C1435_1.p
MPPRCPFLRHLFFLLLLLSPWIMSPCGGAADDVTYPIVPSSPGRRSILQIRREPPTEPNTKLVVDRDGKVFLKQQPKETPYWSFSTGSPMHSLYQAPANNNTENATEITRPHIIVEYLNNSKAATTVDGYHNWTVQEFFRQKPLVTDDGVTLGSETTSAYLVDGRSGRLIHVYKSTGDTKITNALVKPASTEDFVNEPLLIRRTDSKLEHFSKTTGKLVWNLTVSHFRAALLCDPVFNSGYDLGPKLQTGIYMPLLCGSQIDVRGPEIVIRVLHDQPMNVKMLPSPSLNHFESENSIMPFGKARESRKLQEQHKQKYTYLFGQWSPVKLLAPLVLLGVVVSVFIKKFSSRGSDVSLKAGPSKKKKNRKSAKDTNRQSVPRGQDQFELIEGGQMLLGFNNFQSGATDGRKIGKLFLSSKEIAKGSNGTVVFEGIYEGRPVAVKRLVRSHHEVAFKEIQNLIASDQHTNIIRWYGVEYDQDFVYLSLERCTCSLDDLIKSYLEFSMTKVLENNDSTEGVAAYKIQLDSLEGVIKGNNFWKVGGHPSPLMLKLMRDIVCGIVHLHELGIVHRDLKPQNVLISKDMTLSAKLSDMGISKRMSRDMSSLGHLATGSGSSGWQAPEQLLQGRQTRAVDMFSLGCVIFYTITGCKHPFGDDLERDVNIVKNKVDLFLVEHVPEASDLISRLLNPDPDLRPSATEVLLHPMFWNSEMRLSFLRDASDRVELENREADSEILKAMESTAPVAIGGKWDEKLEPVFITNIGRYRRYKYDSIRDLLRVIRNKLNHHRELPPEIQELVGTVPEGFDEYFAVRFPKLLIEVYRVISLHCREEEVFRKYFKCDII

SEQ ID NO: 5797 - protein, 294 aa, Arabidopsis thaliana
  Clone ID: ARATH-23APR03-C14365_1.p
ISFSCINLLEDVKRGKQVPMKKENGQTALVPLFHSQDTISGKVCIEPYQGKKVEHNGVKVELLGQIEMYFDRGNFYDFTSLVRELDVPGEIYERKTYPFEFPTVEMPYETYNGVNVRLRYVLKVTVTRGYAGSILEYQELVVRNYAPLPAINNSIKMEVGIEDCLHIEFEYNKSKYHLKDVILGKIYFLLVRIKMKNMDLEIRRRESTGAGANTHVETETLAKFELMDGTPVRGESIPVRLFLAPYDLTPTHRNINNKFSVKYYLNLVLVDEEDRRYFKQQEITLYRLKEDASS

SEQ ID NO: 5798 - protein, 346 aa, Arabidopsis thaliana
  Clone ID: ARATH-23APR03-C14385_1.p
MAIRWSELCIVLFALSYAICVLAGKSYYDVLQVPKGASDEQIKRAYRKLALKYHPDKNQGNEEATRKFAEINNAYEVLSDEEKREIYNKYGEEGLKQFSANGGRGGGGGGMNMQDIFSSFFGGGSMEEEEKVVKGDDVIVELEATLEDLYMGGSMKVWREKNVIKPAPGKRKCNCRNEVYHRQIGPGMFQQMTEQVCDKCPNVKYEREGYFVTVDIEKGMKDGEEVSFYEDGEPILDGDPGDLKFRIRTAPHARFRRDGNDLHMNVNITLVEALVGFEKSFKHLDDHEVDISSKGITKPKEVKKFKGEGMPLHYSTKKGNLFVTFEVLFPSSLTDDQKKKIKEVFA

SEQ ID NO: 5799 - protein, 1113 aa, Arabidopsis thaliana
  Clone ID: ARATH-23APR03-C14407_1.p
MENLTLLLRICLVSSVLVAASSSGSELLSPLSSPPSPLPETSKGFGQAPSNSPESHKSDNVPPSKASSQPSLPPLADLAAPPPSDSVGGKAPAGVPVVFVPNAPAPATIPVKDLPVASPPVLQPITPIASPPRFIPGDAPKEPPFSGRVTPAPVSSPVSDIPPIPSVALPPPTPSNVPPRNASNNHKPPPIEKSIAPVASPPTISIDIAPPVHPVIPKLTPSSSPVPTSTPTKGSPRRNPPTTHPVFPIESPAVSPDHAANPVKHPPPSDNGDDSKSPGAAPANETAKPLPVFPHKASPPSIAPSAPKFNRHSHHTSPSTTPPPDSTPSNVHHHPSSPSPPPLSSHHQHHQERKKIADSPAPSPLPPHLISPKKSNRKGSMTPPPQSHHAPSPPIPDSLISPAHAPVSFSMKRISPALAPSPTQVFPLRSSSRPSKSRKFPLGPPLQAFPPPPPNSDCSSTICLEPYTNTPPGSPCGCVWPIQVELRLSMALYDFFPMVSEFAREISAGVFMKQSQVRIMGANAASEQPEKSIVLIDLVPLGDKFDNMTAMLTYQRFWSKKVYIDEPIFGGYDVIYVRYPGLPASPPTSGMTIIDQGPYSGNNNGRAVKPLGVDVPRKPRKKELNGGSIAVIVLSAAAFIGLCFVIVWFLVFRRQRDRRRLSKRTPLARPSLPSLSKPSGSARSLTGSRFSSTSLSFESSIAPFTLSAKTFTASEIMKATNNFDESRVLGEGGFGRVYEGVFDDGTKVAVKVLKRDDQQGSREFLAEVEMLSRLHHRNLVNLIGICIEDRNRSLVYELIPNGSVESHLHGIDKASSPLDWDARLKIALGAARGLAYLHEDSSPRVIHRDFKSSNILLENDFTPKVSDFGLARNALDDEDNRHISTRVMGTFGYVAPEYAMTGHLLVKSDVYSYGVVLLELLTGRKPVDMSQPPGQENLVSWTRPFLTSAEGLAAIIDQSLGPEISFDSIAKVAAIASMCVQPEVSHRPFMGEVVQALKLVSNECDEAKELNSLTSISKDDFRDDTQAESSCGDSSARMARYPLLPNYDSEPDTERGLSTSEMYTGSGRFERQSNSGPLTSGRGKSFWQKMRRLSTGSLSEHGTPTVMLRSGSR

SEQ ID NO: 5800 - protein, 367 aa, Arabidopsis thaliana
  Clone ID: ARATH-23APR03-C1440_1.p
MAVYHLLLSSPPSLLLLPPSPRRPNLTLIRRIPAHPRLGNSTSLLSSSSPVIRKILVRSTLREDQPIASDYESSPTLLIGEDSAAFELGKQKLVSWVYFGVVLGVVLFILNVVWIDNSTGFGKSFIDAVSNISGSPEVAMLMLILIFAIVHSGLASLRDIGEKLIGERAFRVLFAGISLPLAMSTIVYFINHRYDGSQLWQLQGVPGVHEAIWVANFVSFFFLYPSTFNLLEVAAVDKPKMHLWETGIMRITRHPQMVGQIVWCLAHTLWIGNTVAASASLGLIAHHLFGAWNGDRRLAKRYGEDFESIKKRTSVIPFAAIFEGRQVLPEDYYKEFVRLPYLAITALTVGAYFAHPLMQGASFRLHW

SEQ ID NO: 5801 - protein, 687 aa, Arabidopsis thaliana
  Clone ID: ARATH-23APR03-C14536_1.p
MVELSFSQLLVLLLSLLFLFTTLASSSKTPRFKYSLEKPHHPLDPLTTPEIKRVQTILSGHDPGFGSGSTIIHAMALDEPDKQRVIRWKKGDRLPPRRAEILAMSNGESHVLTVDLKSGRVVSDLVNPTFGYPILTMKDIIAVSQVPYKSVEFNRSIEARGIPFSGLICITPFAGWYGPDEEGRRVIKIQCFSKQDTVNFYMRPIEGLYLTVDMDKLEIIKIVDNGPVPVPKSTGTEYRYGFLNETVYMDRVNPMSMEQPDGPSFQVEDGYLVKWANWKFHIKPDQRAGMIISQATVRDSKTGEARSVMYKGFASELFVPNMDPGEGWYSKAYMDAGEFGLGPSSMPLVPLNDCPRNAYYIDGFFASPEGIPILQPNMICLFERYAGDTSWRHSEILLPGVDIRESRAKVTLVARMACSVGNYDYIFDWEFQMDGVIRVTVAASGMLMVKGTAYDNVEDLGEKEDDSGPLISENVIGVVHDHFISFHLDMDIDGSANNSFVKVHLEKQRLPPGESRRKSYLKVKKYVAKTEKDAQIKMSLYDPYEFHLVNPNRLSRLGNPAGYKLVPGGNAASLLDHDDPPQMRGAFTNNQIWVTRYNRSEQWAGGLLMYQSRGEDTLQVWSDRDRSIENKDIVLWYTLGFHHVPCQEDFPVMPTIASSFELKPVNFFESNPVLGISPFFEKDLPVC

SEQ ID NO: 5802 - protein, 647 aa, Arabidopsis thaliana
  Clone ID: ARATH-23APR03-C14541_1.p
MRLFFTPSMSNLSIFFSILLLSLPLPSIGDLAADKSALLSFRSAVGGRTLLWDVKQTSPCNWTGVLCDGGRVTALRLPGETLSGHIPEGIFGNLTQLRTLSLRLNGLTGSLPLDLGSCSDLRRLYLQGNRFSGEIPEVLFSLSNLVRLNLAENEFSGEISSGFKNLTRLKTLYLENNKLSGSLLDLDLSLDQFNVSNNLLNGSIPKSLQKFDSDSFVGTSLCGKPLVVCSNEGTVPSQPISVGNIPGTVEGSEEKKKRKKLSGGAIAGIVIGCVVGLSLIVMILMVLFRKKGNERTRAIDLATIKHHEVEIPGEKAAVEAPENRSYVNEYSPSAVKAVEVNSSGMKKLVFFGNATKVFDLEDLLRASAEVLGKGTFGTAYKAVLDAVTLVAVKRLKDVTMADREFKEKIEVVGAMDHENLVPLRAYYYSGDEKLLVYDFMPMGSLSALLHGNKGAGRPPLNWEVRSGIALGAARGLDYLHSQDPLSSHGNVKSSNILLTNSHDARVSDFGLAQLVSASSTTPNRATGYRAPEVTDPRRVSQKADVYSFGVVLLELLTGKAPSNSVMNEEGMDLARWVHSVAREEWRNEVFDSELMSIETVVSVEEEMAEMLQLGIDCTEQHPDKRPVMVEVVRRIQELRQSGADRVG

SEQ ID NO: 5803 - protein, 166 aa, Arabidopsis thaliana
  Clone ID: ARATH-23APR03-C146_1.p
MRLLLSSDPQPELTSTCTSHSCGWKPYSHSNDFAANAFLLLIILFCSFICVLSLHAAIRCCLRPVLQHVPKPDPDLEATHPDAPPTLVYSPGLNLAGNEAECIICLSEFQDGDTLRVLERCKHGFHVYCIQKWLSSSHSSCPTCRTNIFSSPPQLHSQSLPLTSTP

SEQ ID NO: 5804 - protein, 744 aa, Arabidopsis thaliana
  Clone ID: ARATH-23APR03-C14719_1.p
MAEKEGKASGTDNDNRVKTKRSSHSRRKECVNKSLEHNDELVKYMSKLPGYLQRIERGEESVHQSNVLNVGVLDWESLQRWKHGRAKGGEISGRSERKVSTIATTSTSGVVVPNDSANRCKIDDQVHTCSNLGKVKASRDLQYSLEPQLASRDSLNKQEIATCSYKSSGRDHKGVEPRKSRRTHSNRESTTGLSSEMGNSAGSLFRDKETQKRAGEIHAKEARERAKECVEKLDGDEKIIGDSEAGLTSEKQEFSNIFLLRSRKQSRSTLSGEPQISREVNRSLDFSDGINSSFGLRSQIPSSCPLSFDLERDSEDMMLPLGTDLSGKRGGKRHSKTTSRIFDREFPEDESRKERHPSPSKRFSFSFGRLSRNFSLKDISAGQPLSSSEDTIMSGSMRFDGSVCPSQSSNPENQNTHCRSRVSPLRRFLDPLLKPKASESVLPSKARSSSSNPKPITNSNVPLQDEKKQDASRTLAIFQLTIRNGIPLFQFVVDDNSSSSRSILGATMKSSDSSFKDDSVQYCTFYSVNEVKKKKSGSWLIHGHREKHCGFVYNIIGQMQLGNSMSVDISEQKSLITESVLFDESEQVKGRKEVAAVVIKKKPVEGSYTSFEETSVIIPGGVHSFPEKGAPSPLISRWRSGGLCDCGGWDVGCKLHVLSNKTVLHKFNQSFTLFDQEVSEQDSSPALAMTELKTGIYRVEFGSFVSPLQAFFVCVTVLTCASKAKTTGKSSSPMAPPLSPVGRV

SEQ ID NO: 5805 - protein, 671 aa, Arabidopsis thaliana
  unsure (1)..(671): unsure at all Xaa locations
  Clone ID: ARATH-23APR03-C14730_1.p
MVQYNFKRITVVPNGKEFVDIILSRTQRQTPTVVHKGYKINRLRQFYMRKVKYTQTNFHAKLSAIIDEFPRLEQIHPFYGDLLHVLYNKDHYKLALGQVNTARNLISKISKDYVKLLKYGDSLYRCKCLKVAALGRMCTVXKRITPSLAYLEQIRQHMARLPSIDPNTRTVLICGYPNVGKSSFMNKVTRADVDVQPYAFTTKSLFVGHTDYKYLRYQVIDTPGILDRPFEDRNIIEMCSITALAHLRAAVLFFLDISGSCGYTIAQQAALFHSIKSLFMNKPLVIVCNKTDLMPMENISEEDRKLIEEMKSEAMKTAMGASEEQVLLKMSTLTDEGVMSVKNAACERLLDQRVEAKMKSKKINDHLNRFHVAIPKPRDSIERLPCIPQVVLEAKAKEAAAMEKRKTEKDLEEENGGAGVYSASLKKNYILQHDEWKEDIMPEILDGHNVADFIDPDILQRLAELEREEGIREAGVEEADMEMDIEKLSDEQLKQLSEIRKKKAILIKNHRLKKTVAQNRSTVPRKFDKDKKYTTKRMGRELSAMGLDPSSAMDRARSKSRGRKRDRSEDAGNDAMDVDDEQQSNKKQRVRSKSRAMSISRSQSRPPAHEVVPGEGFKDSTQKLSAIKISNKSHKKRDKNARRGEADRVIPTLRPKHLFSGKRGKGKTDRR

SEQ ID NO: 5806 - protein, 451 aa, Arabidopsis thaliana
  Clone ID: ARATH-23APR03-C147907_1.p
MEKEATKMVNGGVKSKSPKGSPDFLGYNLRYVKLGYIYLLSLSRTFCFFLPPLLLLFIFVSRFLPILAFPLSTFFILLIYHYLTPSSVFLLDFSCYRPPDHLKITKSDFIELAMKSGNFNETAIELQRKVLDQSGIGEESYMPRVVFKPGHRVNLRDGREEAAMVIFGAIDELLAATKINVKHIKILVLNCGVLNTTPSLSAMVINHYKLRHNTESYNLGGMGCSAGVIAIDLAKDLLNAHQGSYALVVSTEIVSFTWYSGNDVALLPPNCFFRMGAAAVMLSSRRIDRWRAKYQLMQLVRTHKGMEDTSYKSIELREDRDGKQGLYVSRDVMEVGRHALKANIATLGRLEPSFEHICVLASSKKVLDDIHKDLKLTEENMEASRRTLERFGNTSSSSIWYELAYLEHKAKMKRGDRVWQIGFGSGFKCNSVVWKALKNIDPPRHNNPWNL

SEQ ID NO: 5807 - protein, 254 aa, Arabidopsis thaliana
  Clone ID: ARATH-23APR03-C149483_1.p
MGVFPGFGSWINQNTQQLPHKAESERSENAKFKSKSETNTHEARDEMKQQLKLWRDTEKKEQWNDAPPNVKVERRNDLEWGMSTIEMQFTLGLPPQAAYNVLTNPDNQPYFRIIKGRQLLENISRKVVSPDTGKGQLVDTKKAVAWNFLWLSGTIPIIANFIEHRQVLTYKVEPLYVDSERLCKQKKPKSTEEYERCSRGPGRIGSKVTLDQMFKPSFIFNLPPISWYVRRITIKTMKTLIEDLQITSAMIRGI

SEQ ID NO: 5808 - protein, 274 aa, Arabidopsis thaliana
  Clone ID: ARATH-23APR03-C149535_1.p
MAAMSFTPSTFRIAISLLLLVAIVSAVIFLPVEQKLKDFLLWIKEDLGPFGPLALALAYIPLTIVAVPASVLTLGGGYLFGLPVGFVADSLGATLGATAAFLLGRTIGKSYVTSKIKHYPKFQAVSVAIQKSGFKIVLLLRVVPILPFNMLNYLLSVTPVRLGEYMLATWLGMMPITFALVYVGTTLKDLSDITHGWHEVSVFRWVIMMVGVALAVILIICITRVAKSSLDKALAENGTELDGKKNDDASVLPIAEPPPDLQEPLVIRIDPSNT

SEQ ID NO: 5809 - protein, 557 aa, Arabidopsis thaliana
  unsure (1)..(557): unsure at all Xaa locations
  Clone ID: ARATH-23APR03-C149707_1.p
MSFFILSVVVFVSLAFFSLPHSVDSSVSASQDPLRLILGSPNFGTWKGGISLAPGPESDDVVSDYLLLAAHRTKRPDILRAFKPYHGGWNITNNHYWASVGFTGAPGFILAVIWLLSFGSLLVVYHCFKWRICDKAKGSSFDTRRICFILLIVFTCVAAVGCILLSVGQDKFHTEAMHTLKYVVNQSDYTVEILQNVTQYLSLAKTINVTQIVIPSDVMGEIDKLNVNLNTAAVTLGETTTDNAAKIKRVFYAVRSALITVATVMLILSFVGLLLSVLRHQHVVHIFVVSGWILVAVTFVLCGVFLILNNAISDTCVAMKEWVDNPHAETALSSILPCVDQQTTNQTLSQSKVVINSIVTVVNTFVYAVANTNPAPGQDRYYNQSGPPMPPLCIPFDANMEDRQCSPWELSIENASSVWENYKCEVTPSGICTTVGRVTPDTFGQLVAAVNESYALEHYTPPLLSFRDCNFVRETFMSITSDYCPPLVRNLRIVNAGLGLISVGVLLCLVLWIFYANXPQREEVFADPHPQRKDDSFGNGLDTHHSDDEPKLSVECV

SEQ ID NO: 5810 - protein, 577 aa, Arabidopsis thaliana
  Clone ID: ARATH-23APR03-C14984_1.p
MNYFPDEVIEHVFDFVASHKDRNSISLVCKSWHKIERFSRKEVFIGNCYAINPERLIRRFPCLKSLTLKGKPHFADFNLVPHEWGGFVHPWIEALARSRVGLEELRLKRMVVTDESLDLLSRSFANFKSLVLVSCEGFTTDGLASIAANCRHLRELDLQENEIDDHRGQWLNCFPDSCTTLMSLNFACLKGETNVAALERLVARSPNLKSLKLNRAVPLDALARLMSCAPQLVDLGVGSYENEPDPESFAKLMTAIKKYTSLRSLSGFLEVAPLCLPAFYPICQNLISLNLSYAAEIQGNHLIKLIQLCKRLQRLWILDSIGDKGLAVVAATCKELQELRVFPSDVHGEEDNNASVTEVGLVAISAGCPKLHSILYFCKQMTNAALIAVAKNCPNFIRFRLCILEPHKPDHITFQSLDEGFGAIVQACKGLRRLSVSGLLTDQVFLYIGMYAEQLEMLSIAFAGDTDKGMLYVLNGCKKMRKLEIRDSPFGNAALLADVGRYETMRSLWMSSCEVTLGGCKRLAQNSPRLNVEIINENENNGMEQNEEDEREKVDKLYLYRTVVGTRKDAPPYVRIL

SEQ ID NO: 5811 - protein, 467 aa, Arabidopsis thaliana
  Clone ID: ARATH-23APR03-C15000_1.p
MRNVELIFIPTPTVGHLVPFLEFARRLIEQDDRIRITILLMKLQGQSHLDTYVKSIASSQPFVRFIDVPELEEKPTLGSTQSVEAYVYDVIERNIPLVRNIVMDILTSLALDGVKVKGLVVDFFCLPMIDVAKDISLPFYVFLTTNSGFLAMMQYLADRHSRDTSVFVRNSEEMLSIPGFVNPVPANVLPSALFVEDGYDAYVKLAILFTKANGILVNSSFDIEPYSVNHFLQEQNYPSVYAVGPIFDLKAQPHPEQDLTRRDELMKWLDDQPEASVVFLCFGSMARLRGSLVKEIAHGLELCQYRFLWSLRKEEVTKDDLPEGFLDRVDGRGMICGWSPQVEILAHKAVGGFVSHCGWNSIVESLWFGVPIVTWPMYAEQQLNAFLMVKELKLAVELKLDYRVHSDEIVNANEIETAIRYVMDTDNNVVRKRVMDISQMIQRATKNGGSSFAAIEKFIYDVIGIKP

SEQ ID NO: 5812 - protein, 321 aa, Arabidopsis thaliana
  Clone ID: ARATH-23APR03-C15001_1.p
MGIYGVMTGKKGKSGFGSASTAEDVTQAIDASHLTAIITGGTSGIGLEAARVLAMRGAHVIIAARNPKAANESKEMILQMNPNARVDYLQIDVSSIKSVRSFVDQFLALNVPLNILINNAGVMFCPFKLTEDGIESQFATNHIGHFLLTNLLLDKMKSTARESGVQGRIVNLSSIAHTYTYSEGIKFQGINDPAGYSERRAYGQSKLSNLLHSNALSRRLQEEGVNITINSVHPGLVTTNLFRYSGFSMKVFRAMTFLFWKNIPQGAATTCYVALHPDLEGVTGKYFGDCNIVAPSKFATNNSLADKLWDFSVFLIDSISK

SEQ ID NO: 5813 - protein, 459 aa, Arabidopsis thaliana
  unsure (1)..(459): unsure at all Xaa locations
  Clone ID: ARATH-23APR03-C15005_1.p
MSMERSLEAXWEEVLRYGQDLADRLAQGFTGLIHINPPSFPWPPNHHHLHKAKLFSPNQSTEQFSVIRDSRFXGQAGVDFGAGLNVMVQQFFRRLPIPFLHEDNNKLVVSVDGDKSTRSHRAYVITKGDLGMATERLRDSGFSKTDDTASVTMSEEEVADSYLRAAGLLGRSKGTIDTSSSYDSRTNGMEHSLAARGDLWRVEASHSSSTASDGNSSLFLLQLGPLLFLRDSTLLLPLHLSKQHLLWYGYDRKKGMHSLCPAIWSKHRRWLMMSMLSLNPLACSFMDLQFPNGQLTYVSGEGLTTSAFVPFCGGLLQAQGQYPGDMRFSYSCKNKCGTRITPMVHWPDKSFGLDLSQPLAWRRSGLLMKPTIQVSVCPTFGGSNPGIKAEVIHSLSDDLNLICGYALNAHPSAFASVAFGRSKWNGNIGRTGIVVRADTPLASIGQPSFSIQLNNAFEF

SEQ ID NO: 5814 - protein, 404 aa, Arabidopsis thaliana
  Clone ID: ARATH-23APR03-C15015_1.p
MEEREGTNINNNITSSFGLKQQHEAAASDGGYSMDPPPRPENPNPFLVPPTTVPAAATVAAAVTENAATPFSLTMPTENTSAEQLKKKRGRPRKYNPDGTLVVTLSPMPISSSVPLTSEFPPRKRGRGRGKSNRWLKKSQMFQFDRSPVDTNLAGVGTADFVGANFTPHVLIVNAGEDVTMKIMTFSQQGSRAICILSANGPISNVTLRQSMTSGGTLTYEGRFEILSLTGSFMQNDSGGTRSRAGGMSVCLAGPDGRVFGGGLAGLFLAAGPVQVMVGTFIAGQEQSQLELAKERRLRFGAQPSSISFNISAEERKARFERLNKSVAIPAPTTSYTHVNTTNAVHSYYTNSVNHVKDPFSSIPVGGGGGGEVGEEEGEEDDDELEGEDEEFGGDSQSDNEIPS

SEQ ID NO: 5815 - protein, 404 aa, Arabidopsis thaliana
  Clone ID: ARATH-23APR03-C15016_1.p
MAFASPSLRLLPQSPLGRITSKLHRFSTAKLSLFSFHHDSSSSLAVRTPVSSFVVGAISGKSSTGTKSKSKTKRKPPPPPPVTTVAEEQHIAESETVNIAEDVTQLIGSTPMVYLNRVTDGCLADIAAKLESMEPCRSVKDRIGLSMINEAENSGAITPRKTVLVEPTTGNTGLGIAFVAAAKGYKLIVTMPASINIERRMLLRALGAEIVLTNPEKGLKGAVDKAKEIVLKTKNAYMFQQFDNTANTKIHFETTGPEIWEDTMGNVDIFVAGIGTGGTVTGTGGFLKMMNKDIKVVGVEPSERSVISGDNPGYLPGILDVKLLDEVFKVSNGEAIEMARRLALEEGLLVGISSGAAAVAAVSLAKRAENAGKLITVLFPSHGERYITTALFSSINREVQEMRY

SEQ ID NO: 5816 - protein, 306 aa, Arabidopsis thaliana
  unsure (1)..(306): unsure at all Xaa locations
  Clone ID: ARATH-23APR03-C15021_1.p
MAIARTGVYVDDYLEYASTFPAELQRLLNTVRELDERSQSLINQTRQQTKYCLGLASQSSKKGNGNHYNNGGLDEEETIEKMRKEIESSQENALSLCTEKVLLARQAYDLIDSHVKRLDEDLNNFAEDLKQEGKIPPDEPSVLPPLPIVRKTANRKACYCTSQXNRYRDEEETRPPGSNLKALLPTERNRKDPKPIADHPFDPMYLTDCVACEVSFGDMICCDNEYVGLVSQHLTIYFLMYSCXDETFCYCFTSTKEANGFTIHALASHLRPDSKGNGTAPPADSSHSHTNIICTCEKVLLYYHQN

SEQ ID NO: 5817 - protein, 629 aa, Arabidopsis thaliana
  Clone ID: ARATH-23APR03-C15034_1.p
MSISKAAFLNHLQTLSRSYRHRVPPQPFLAVRYMSFATQEEAAAERRRRKRRLRMEPPVNSFNRSQQQQSQIPRPIQNPNIPKLPESVSALVGKRLDLHNHILKLIRENDLEEAALYTRHSVYSNCRPTIFTVNTVLAAQLRQAKYGALLQLHGFINQAGIAPNIITYNLIFQAYLDVRKPEIALEHYKLFIDNAPLNPSIATFRILVKGLVSNDNLEKAMEIKEDMAVKGFVVDPVVYSYLMMGCVKNSDADGVLKLYQELKEKLGGFVDDGVVYGQLMKGYFMKEMEKEAMECYEEAVGENSKVRMSAMAYNYVLEALSENGKFDEALKLFDAVKKEHNPPRHLAVNLGTFNVMVNGYCAGGKFEEAMEVFRQMGDFKCSPDTLSFNNLMNQLCDNELLAEAEKLYGEMEEKNVKPDEYTYGLLMDTCFKEGKIDEGAAYYKTMVESNLRPNLAVYNRLQDQLIKAGKLDDAKSFFDMMVSKLKMDDEAYKFIMRALSEAGRLDEMLKIVDEMLDDDTVRVSEELQEFVKEELRKGGREGDLEKLMEEKERLKAEAKAKELADAEEKKKAQSINIAALIPPKAVEEKKETAKLLWENEAGGVEEADVVEMAKGVEAGGSNGQDPPSC

SEQ ID NO: 5818 - protein, 348 aa, Arabidopsis thaliana
  Clone ID: ARATH-23APR03-C15048_1.p
MAGLLAWAADVVGKNGKEGDDEKDRIPLVFTEEQQKYVDELGRKATNLSRSIQDLRLRLPPPDISQRLPDLHAHSLASNAALTLQLDSHSATREQAHMREQTLLEENSAYENAISTCETKIEEKRNEADSLLRKLKELEAVEENLKTEQDNAQASLDARQSKSSSETVIQPDGNGKDGADTEAMKSFMLEKLESKKNDMSLMEEKVQDLERSWAVIQERALKQPSPAQREKTLDKQLHSLIEQLAAKQAQAEGIVGEIHLNEMELERLNNLWRRYESFNVEGNAARNRFKRTNSDREFTSDHEVDGHSYLPYSSATRNGTQTRLMYLRSAFVVYILALQVLVFIRISF

SEQ ID NO: 5819 - protein, 388 aa, Arabidopsis thaliana
  unsure (1)..(388): unsure at all Xaa locations
  Clone ID: ARATH-23APR03-C15057_1.p
MATRASTSSRVSPAFTFLVIFFLLSLTASVEAAGRGVNNDKKGGGLGASFIFGDSLVDAGNNNYLSTLSRANMKPNGIDFKASGGTPTGSVPQXGRSSGDRVGEELGDLRLPDDLLGTRFLGQRLSKGKAFLAGVSYASXGKGKEVIXNATGRIFVNRLXSDVQVDFLNTTRKQFDDQLGKEKAKDYIAKKSIFSITIGANDFLNNYLFPLLSVAYMISIFLRSNASERETKVPERSETKKXIISRFNAFSSVNQKFETLELVSKIWFIKDXNHFRIVLESSLEDLNXKLSRAIFVHANVYDLVMELITNYDKYGFKSATKACCGNGGQYAGIIPCGPTSSLCEERDKYVFWDPYHPSEAANVIIAKQLLYGDVKVISPVNLSKLRDM

SEQ ID NO: 5820 - protein, 678 aa, Arabidopsis thaliana
  Clone ID: ARATH-23APR03-C15069_1.p
MANGADEDAVLSDVESDEPAPVVLKDSPREEASDERITELIAELDREKKAREAAESSKSELQVSFNRLKALAVEAIKKRDESKRERDEALKEKENLTNELENVNKGKDEMSKKLDEALRSRDGLKAEIENSSHMLVSGIEKISGKVSSFKNFSNGGLPKSQKYTGLTSVAYGVIKRTKKIVDGIGRQIDTTAKSRNEAREQMDQRNYEIAIEVSQLESAISNLRLEVAEKASIVDDLERGVSEKEKRIAELEKGNLEKVSLLEGEVVELKQLVDEYDGKLKTMELKMVAQRPLLMDQLNLVSRIHDQLYEVVRIVDGNSSEQSDLSESFFMPQETEMEENIRASLAGMESIFELTKVVSGKAQSLVEEKSHELKNLNETVGLLVKEKEHIGTLLRSALSKRVIGEQPSQKRELFQAAENGLRDGGTDSKFAKLLKDGKVQDSRSDNTHDHSKEDNEIYSLASTLENIVKASQLEIVELQHLLEASREETSSLRKQLDTQTKELNQRMRQIEELKEKERIANENVEGLMTDIAAAEEEITRWKVAAEQEAAAGGAVEQDFTSQLYVLKEELEEAKQAIIESEKKLKFKEETAAAAMGARDAAERSLRLADNRATKLRERIQELNRKVEELETHRDMNTSNRARYACWPWQLLGIDFVGSRRIESGQESANEMELAEPLL

SEQ ID NO: 5821 - protein, 516 aa, Arabidopsis thaliana
  Clone ID: ARATH-23APR03-C15072_1.p
MASFSLPHSATYFPSHSETSLKPHSAASFTVRCTSASPAVPPQTPQKPRRSPDENIRDEARRRPHQLQNLSARYVPFNAPPSSTESYSLDEIVYRSQSGALLDVQHDFAALKRYDGEFWRNLFDSRVGKTNWPYGSGVWSKKEWVLPEIDDDDIVSAFEGNSNLFWAERFGKQYLQMNDLCVRGRVGSHTGSFKDLGMSVLVSQVNRLRKMNKPVIGVGCASTGDTSAALSAYCASAGIPSIVFLPADKISMAQLVQPIANGAFVLSIDTDFDGCMHLIREVTAELPIYLANSLNSLRLEGQKTAAIEILQQFNWQVPDWVIVPGGNLGNIYAFYKGFHMCKELGLVDRIPRLVCAQAANANPLYLHYKSGFKEDFNPLKANTTFASAIQIGDPVSIDRAVYALKKSNGIVEEATEEELMDATALADSTGMFICPHTGVALTALMKLRKSGVIGANDRTVVVSTAHGLKFTQSKIDYHSKNIKEMACRLANPPVKVKAKFGSVMDVLKEYLKSNDK

SEQ ID NO: 5822 - protein, 338 aa, Arabidopsis thaliana
  Clone ID: ARATH-23APR03-C15073_1.p
MSSDNESTPSQATVEMMATSPAKIKEYPEPLALHEVVVKDSSVFWDTLRRFHSIMSTKFMIPVIGGKELDLHVLYVEVTRRGGYEKVVVEKKWREVGGVFRFSATTTSASFVLRKHYLNLLFHYEQVHLFTARGPLLHPIATFHANPSTSKEMALVEYTPPSIRYHNTHPPSQGSSSFTAIGTIEGKFDCGYLVKVKLGSEILNGVLYHSAQPGPSSSPTAVLNNAVVPYVETGRRRRRLGKRRRSRRREDPNYPKPNRSGYNFFFAEKHCKLKSLYPNKEREFTKLIGESWSNLSTEERMVYQDIGLKDKERYQRELNEYRETLRLRDGDMTNGKAF

SEQ ID NO: 5823 - protein, 1202 aa, Arabidopsis thaliana
  Clone ID: ARATH-23APR03-C15103_1.p
MGDGTEFVVGSDREDKKLAEDRISDEQVVKNELVRSDEVRDDNEDEVFEEAIGSENDEQEEEEDPKRELFESDDLPLVETLKSSMVEHEVEDFEEAVGDLDETSSNEGGVKDFTAVGESHGAGEAEFDVLATKMNGDKGEGGGGGSYDKVESSLDVVDTTENATSTNTNGSNLAAEHVGIENGKTHSFLGNGIASPKNKEVVAEVIPKDDGIEEPWNDGIEVDNWEERVDGIQTEQEVEEGEGTTENQFEKRTEEEVVEGEGTSKNLFEKQTEQDVVEGEGTSKDLFENGSVCMDSESEAERNGETGAAYTSNIVTNASGDNEVSSAVTSSPLEESSSGEKGETEGDSTCLKPEQHLASSPHSYPESTEVHSNSGSPGVTSREHKPVQSANGGHDVQSPQPNKELEKQQSSRVHVDPEITENSHVETEPEVVSSVSPTESRSNPAALPPARPAGLGRASPLLEPASRAPQQSRVNGNGSHNQFQQAEDSTTTEADEHDETREKLQLIRVKFLRLAHRLGQTPHNVVVAQVLYRLGLAEQLRGRNGSRVGAFSFDRASAMAEQLEAAGQDPLDFSCTIMVLGKSGVGKSATINSIFDEVKFCTDAFQMGTKRVQDVEGLVQGIKVRVIDTPGLLPSWSDQAKNEKILNSVKAFIKKNPPDIVLYLDRLDMQSRDSGDMPLLRTISDVFGPSIWFNAIVGLTHAASVPPDGPNGTASSYDMFVTQRSHVIQQAIRQAAGDMRLMNPVSLVENHSACRTNRAGQRVLPNGQVWKPHLLLLSFASKILAEANALLKLQDNIPGRPFAARSKAPPLPFLLSSLLQSRPQPKLPEQQYGDEEDEDDLEESSDSDEESEYDQLPPFKSLTKAQMATLSKSQKKQYLDEMEYREKLLMKKQMKEERKRRKMFKKFAAEIKDLPDGYSENVEEESGGPASVPVPMPDLSLPASFDSDNPTHRYRYLDSSNQWLVRPVLETHGWDHDIGYEGVNAERLFVVKEKIPISVSGQVTKDKKDANVQLEMASSVKHGEGKSTSLGFDMQTVGKELAYTLRSETRFNNFRRNKAAAGLSVTHLGDSVSAGLKVEDKFIASKWFRIVMSGGAMTSRGDFAYGGTLEAQLRDKDYPLGRFLTTLGLSVMDWHGDLAIGGNIQSQVPIGRSSNLIARANLNNRGAGQVSVRVNSSEQLQLAMVAIVPLFKKLLSYYYPQT

SEQ ID NO: 5824 - protein, 625 aa, Arabidopsis thaliana
  Clone ID: ARATH-23APR03-C15112_1.p
MPNSILFLLLSFLYLTNCVAQSPSQTCPLDFSHVLTIPWNTTDCQKSDKSADSKNSCCQSLLTLIGIPLAHRLKQTSNFRLPNLATSISCLNNLQTKLSSLSLSSNLTSLCFDPNQFVINNETCAGIQTTQDWVSRLGPSTALDSACSSGLTDLTRCDACVAAGFRVQKQLITLDGNSSHGVYCYHFVVTYAAGIVNKKGPESDDALSCLFSLSLRSPLNSKKKRHTVALALGITGAIFGALVIAGLICLYFRFGKAVKGGEVGWEDQGSRPKWRPNTGSIWFKIEELEKATNNFSQKNFIGRGGFGFVYKGVLPDGSVIAVKKVIESEFQGDAEFRNEVEIISNLKHRNLVPLRGCSMVDDDSESQRYLVYDYMSNGNLDDHLFPRGETTKMPLSWPQRKSIILDVAKGLAYLHYGVKPAIYHRDIKGTNILLDVDMRARVADFGLAKQSREGESHLTTRVAGTHGYLAPEYALYGQLTEKSDVYSFGVVILEIMCGRKALDLSTSGSPNTFLITDWAWSLVKAGKTEEALEQSLLREEGSGLSNPKGIMERFLQVGILCAHVLVVLRPTILDALKMLEGDIEVPPIPDRPVPLAHPSYRMDGNGFTISPALSGLQIHSGDMLR

SEQ ID NO: 5825 - protein, 180 aa, Arabidopsis thaliana
  Clone ID: ARATH-23APR03-C151408_1.p
MEAVRFAVAVVLVFCYVTSSNAQMTSPPSGGAGGDAHSLPCIQKLMPCQPYLHLATPPPATCCMPLNEIVAKDATCLCAVFNNVDMLKSLNLTKENALDLPKACGAKADVSLCKTSAGTNSSSTPPATPKTPPASSTSTGTGSGSTGNAAPSTAKPTSSAPAINFGGLSFASAVVATLFF

SEQ ID NO: 5826 - protein, 146 aa, Arabidopsis thaliana
  Clone ID: ARATH-23APR03-C151488_1.p
MSRRACKRVSFNPNPEATDEPIFPKHDGLSSSHHSRRRVVLVGILSFGLRSSPAARKLIQRIGARFAKTLRFISFRRNTTDRRKTSSFLLPSSSSSSSSSAIYMKRSKSVNETESHRAEAIEDCIEFLNSSFPLSRSNSVSTWSSS

SEQ ID NO: 5827 - protein, 483 aa, Arabidopsis thaliana
  Clone ID: ARATH-23APR03-C15167_1.p
MSPNYSFFFFIFFLTSHSSVFSRILPETSTTTTSILNVADSIHRTKYTSSFRLNQQEEQTHSASSSFSLQLHSRVSVRGTEHSDYKSLTLARLNRDTARVKSLITRLDLAINNISKADLKPISTMYTTEEQDIEAPLISGTTQGSGEYFTRVGIGKPAREVYMVLDTGSDVNWLQCTPCADCYHQTEPIFEPSSSSSYEPLSCDTPQCNALEVSECRNATCLYEVSYGDGSYTVGDFATETLTIGSTLVQNVAVGCGHSNEGLFVGAAGLLGLGGGLLALPSQLNTTSFSYCLVDRDSDSASTVDFGTSLSPDAVVAPLLRNHQLDTFYYLGLTGISVGGELLQIPQSSFEMDESGSGGIIIDSGTAVTRLQTEIYNSLRDSFVKGTSDLEKAAGVAMFDTCYNLSAKTTVEVPTVAFHFPGGKMLALPAKNYMIPVDSVGTFCLAFAPTASSLAIIGNVQQQGTRVTFDLANSLIGFSSNKC

SEQ ID NO: 5828 - protein, 286 aa, Arabidopsis thaliana
  Clone ID: ARATH-23APR03-C15193_1.p
MTTSSFLLPASPPSAAFLRRRFFRHSWLSSKIHHRLPQVMNDSTRTEVSIDKSEVDKLVDKIDFGELCNDFECTSSPQVESTARQLVRDILEIREGNRAFACYAVSVKYKDPVRSFTGREKYKRPMWITSGLENPTVTVQEMVMLSTSVLRIKWTVKGKPKSILAAVSGDLIVKVKSEFTLNQISGQVFEHEESWDLSSSSPIAQAYFWTSRRLFAASESAKDVADVTKDLTANLTTRKEDTDIYRDPTDPNKFFQRDNSFERDVYQIALFLAIVYFVVQFLKNTI

SEQ ID NO: 5829 - protein, 385 aa, Arabidopsis thaliana
  unsure (1)..(385): unsure at all Xaa locations
  Clone ID: ARATH-23APR03-C15199_1.p
ESKQNSMSQSRFLLGSALSNPPSLAIGSALSNPPALAVAYSYSXSSTSASSAVDLETPKTRVCLVGSRPGPYTAANYASRASLTPVLFQRRMANDIAPGGQLTTTTDVENFPGFPEGILGIDIVEKFRKQSERFGTTIFTETVNKVDFSSKPFKLFTDSRTVLADSVIISTGAVAKRLSFTGSGEGNGGFWNRGISACAVCDGAAPIFRNKPLVVIGGGDSAMEEANFLTKYGSKVYIIHRRDTFRASKIMQQRALSNPKIEVIWNSAVVEAYGDENGRVLGGLKVKNVVTGDVSDLKVSGLFFAIGHEPATKFLDGQLXELDEDGYVVTKPGTTKTSVVGVFAAGDVQDKKYRQAITAAGTGCMAALDAEHYLQEIGSQEGKSD

SEQ ID NO: 5830 - protein, 476 aa, Arabidopsis thaliana
  Clone ID: ARATH-23APR03-C15231_1.p
MVQNHQTVLAVDMPQTGGSKYLDDDGKNKRTGSVWTASAHIITAVIGSGVLSLAWATAQLGWLAGPVVMLLFSAVTYFTSSLLAACYRSGDPISGKRNYTYMDAVRSNLGGVKVTLCGIVQYLNIFGVAIGYTIASAISMMAIKRSNCFHKSGGKDPCHMNSNPYMIAFGLVQILFSQIPDFDQLWWLSILAAVMSFTYSSAGLALGIAQVVVNGKVKGSLTGISIGAVTETQKIWRTFQALGDIAFAYSYSIILIEIQDTVKSPPSEEKTMKKATLVSVSVTTMFYMLCGCMGYAAFGDLSPGNLLTGFGFYNPYWLLDIANAAIVIHLIGAYQVYCQPLFAFIEKQASIQFPDSEFIAKDIKIPIPGFKPLRLNVFRLIWRTVFVIITTVISMLLPFFNDVVGLLGALGFWPLTVYFPVEMYIAQKKIPRWSTRWVCLQVFSLGCLVVSIAAAAGSIAGVLLDLKSYKPFRSEY

SEQ ID NO: 5831 - protein, 382 aa, Arabidopsis thaliana
  Clone ID: ARATH-23APR03-C15246_1.p
MSSYQLSKFLDRNKMEDNKRKVLDEEAKASLDIWKYVFGFADIAAAKCAIDLKIPEAIENHPSSQPVTLAELSSAVSASPSHLRRIMRFLVHQGIFKEIPTKDGLATGYVNTPLSRRLMITRRDGKSLAPFVLFETTPEMLAPWLRLSSVVSSPVNGSTPPPFDAVHGKDVWSFAQDNPFLSDMINEAMACDARRVVPRVAGACHGLFDGVTTMVDVGGGTGETMGMLVKEFPWIKGFNFDLPHVIEVAEVLDGVENVEGDMFDSIPACDAIFIKWVLHDWGDKDCIKILKNCKEAVPPNIGKVLIVESVIGENKKTMIVDERDEKLEHVRLMLDMVMMAHTSTGKERTLKEWDFVLKEAGFARYEVRDIDDVQSLIIAYRS

SEQ ID NO: 5832 - protein, 332 aa, Arabidopsis thaliana
  Clone ID: ARATH-23APR03-C15254_1.p
MSIPDPNSSASLTVSPSLSTASETPVTPVNTVRPPPSQPPPAPPPLPPPTYRPIAPLRHPNPFQQQSAYSNNLYAHSIPVRRQIQDPSAVLYPFALPGRGFSARPVRGFVADPSVTAGNLSGYPPRPSFTYDPGPYEQRQMESLLQQFIRERNPQIRPLPRLGLGSPVGLGPIRASPQFLQPRVAPPPTSILDTSRNRKARSKDGALAVVRGRKVRITEGSSSLYSLGRSWLKNGAHVGIQPQRSGIMKPLPKPLPVDLTTETSVPDDPDEESADEDKEDEEAVKQLSEKDLLKRHIERAKKVRAQLREERSRRIRRYKERITLILAQSEDR

SEQ ID NO: 5833 - protein, 374 aa, Arabidopsis thaliana
  Clone ID: ARATH-23APR03-C15270_1.p
MEALIASTSFFVPISNSSSSHIINNRFFPSFYSPNLNFGTFRKTSLSSSHLVFSSSAISAPPSSTVLTRNSYWMVLLDKPPHWVSSKSAMVDYYVEILAKVLGNEKDAQVSIYDASFDTHFGFCCHIDEDASRQLASLPGVVSIRPEQDYSSEKKNYGIGSHKGVSLFDHGTVKHWMVRIDKPGVGIVTKAQMVDHCVQLLSKVLWNEKDAQMCLYHVSWQSDFGFCCDLDERSAVELAGVPGVLAVVPDNSFESLNKDYEGDSTQDSRDQDDSESPPVKTKKLFITGLSFYTSEKTLRAAFEGFGELVEVKIIMDKISKRSKGYAFLEYTTEEAAGTALKEMNGKIINGWMIVVDVAKTKPFRQNRSQPSFGL

SEQ ID NO: 5834 - protein, 535 aa, Arabidopsis thaliana
  unsure (1)..(535): unsure at all Xaa locations
  Clone ID: ARATH-23APR03-C15278_1.p
MKFWSRPLTFLIIIIYLIIQQVNSSPPSLSIPEHFLRCLDTQPSDHGSPNSRTAVIPTNSSFSTNLMNGVRNLRFASVSTRKPEVIVAAVTETHIRATISCLQTSLNLEEVVMFXCLDNAGISNNSPVPFVILDMYNFNKIDINMKDETVWIQSGASLGQLYXNMNYNAGVXATYEGAKIYGDSYFKGNYLRLVKIKARFDRTNFFRSQQGIPVLAYVAMGEDVFWAIRGGGGGSYGVILAWKIKLVRVPEKVTVFKLERTVREGAVDLVHKWQQVAPVIDRDLFIRLEIKPINRKISKGKTIKVSFIGMFLGLPERLLNITKQSFPELHLTKEDCMVKKWIESSVFWANYPEKAPIELLLKRVSTNEYYWKRTSDFVQAPISKQGLAKIFQTMIDHSPLPRRVWMQWNPWGGKMAEIASDATAFVHRGGNVFMIEHFMNWYRPGDELEEKFLAIARSFKEAMAPFVSKNPREAFFNYRDVDIGITTPGYNATYEGAKVYGDSYFKGNYLRLVKIKARFDRTNFFRSQQGIPVLA

SEQ ID NO: 5835 - protein, 1024 aa, Arabidopsis thaliana
  unsure (1)..(1024): unsure at all Xaa locations
  Clone ID: ARATH-23APR03-C15321_1.p
MALIKYLLKRTLVIPRRRTQKSIEDMVHNAYDSFQLLKDCPARIDAVESYGSKLFAGCYDGSLRIYSPPESSASDPSELHQETYVLEKTVAGFSKKPIVAMEVLASRELLLSLSESIAFHGLANLETLAVLTKAKGANAYSSDDPQIFRPELIIEXSSLSAGLIQCLSWSILCLSCKAVQLKPSSLFLSGNISADLVNSYLKQHAPYMQGRYLELRMAMNDTAVSGNLQNEMVQIYLSEVLDLYAAKSAQQKWDEKDHPPERKKLLSALESISGYSPQPLLKRLPRDALYEERAVILGKMNQHELALSIYVHKLHAPDLALAYCDRIYESVTYLPSGKPSSNIYLTVLQIYLNPKKSAKDFAKRIVALGSFESSDTTKMMDSVLSSKAKGGRSKKIVAIEGAEDMRVGLSSSTDSGRSDVDTEEPLEGXDSTVMISEVLDLLSQRWERINGAQALKLLPSETKLHVNVLNLTYTYPITTXSILLKLPYSXVGKTYGANDSSKSKKSSKGRGMIPLNSGAREMAAILDTALLQALLHTGQSGAAIELLKGVNYSDVKICEEILMKSKNYSALLELFKSNSMHHEALKLLNQLADESKTNQSQTDVTQIFSPELIIEYLKPLCRTDPMLVLEYSMLVLESCPTQTIDLFLSGNISADLVNSYLKQHAPNMQGRYLELMMAMNDTAVSGNLQNEMVQIYLSEVLDLYAAKSAQQKWDEKDHPPERKKLLSALESISGYSPQPLLKRLPRDALYEERAVILGKMNQHELALSIYVHKLHAPDLALAYCDRIYESVTYLPSGKPSSNIYLTVLQIYLNPKKSAKDFAKRIVALGSFESSDTTKMMDSVLSSKAKGGRSKKIVAIEGAEDMRVGLSSSTDSGRSDVDTEEPLEEGDSTVMISEVLDLLSQRWERINGAQALKLLPRETKLHNLLPFLAPLLRNSSEAHRNFSVIKSLRQSENLQVKEELYKHRKGVAQVTSESMCSLCNKKIGTSVFAVYPNGKTLVHFVCFRDSQGMKAVSKTTHGRRR

SEQ ID NO: 5836 - protein, 348 aa, Arabidopsis thaliana
  Clone ID: ARATH-23APR03-C15337_1.p
MSKSGDNQPVDRYLRRQILGEGTYGVVYKATDTKTGKTVAVKKIRLGNQKEGVNFTALREIKLLKELNHPHIVELIDAFPHDGSLHLVFEYMQTDLEAVIRDRNIFLSPGDIKSYMLMTLKGLAYCHKKWVLHRDMKPNNLLIGENGLLKLADFGLARLFGSPNRRFTHQVFATWYRAPELLFGSRQYGAGVDVWAAGCIFAELLLRRPFLPGSTEIDQLGKIFQAFGTPVPSQWSDMIYLPDYMEFSYTPAPPLRTIFPMASDDALDLLAKMFIYDPRQRITIQQALDHRYFSSSPSPTEPGKLQIPASKGDALEPKASEQNQHGNSPAVLSPPGKMRRVMGPEGFT

SEQ ID NO: 5837 - protein, 183 aa, Arabidopsis thaliana
  Clone ID: ARATH-23APR03-C153877_1.p
MVKAYRQEHVYKHPWERVSAASWRKFADPENKRILSHILEVDTLNRKLDTETGKLHTTRALTIHAPGPWFLHRIIGQDICHCVESTVVDGKSRSMQLTTKNISLKKFIEVEERIRYDPHPDNPSAWTVCSQETSIRIKPLSALASMAEKVEQKCAEKFMQNSAKGREVMERICKYMEAESARI

SEQ ID NO: 5838 - protein, 1266 aa, Arabidopsis thaliana
  Clone ID: ARATH-23APR03-C15415_1.p
MGTVIEGKLRFCIDRGGTFTDVYAEIPGHSDGHVLKLLSVDPSNYDDAPVEGIRRILEEYTGKKIPRTSKIPTDKIQWIRMGTTVATNALLERKGERIALCVTKGFKDLLQIGNQARPDIFDLTVAKPSNLYEEVIEVDERVVLALEDDDDDEGSLIKGVSGEFLRVVKPFDGEGLKPLLKGLLDKGISCLAVVLMHSYTYPKHEMDVEKLALEMGFRHVSLSSALTPMVRAVPRGLTATVDAYLTPVIKEYLSGFISKFDDDLGKVNVLFMQSDGGLAPESRFSGHKAVLSGPAGGVVGYSQTLFGLETEKPLIGFDMGGTSTDVSRYDGSYEQVIETQIAGTIIQAPQLDINTVAAGGGSKLKFQFGAFRVGPDSVGAHPGPVCYRKGGELAVTDANLVLGFVIPDYFPSIFGPNEDQPLDVAATREAFEKLAGQINIYRKSQDPSAKDMSVEEIAMGFVSVANETMCRPIRQLTEMKGHETKNHALACFGGAGPQHACAIARSLGMKEVLVHRYCGILSAYGMGLADVIEDAQEPYSAVYGPESLSEVFRRETVLLREVREKLQEQGFGDGNISTETYLNLRYDGTDTAIMVKGKKTGDGSAFDYAAEFLKLFEQEYGFKLQNRNLLICDVRVRGIGVTSILKPRAVEAAPVTPKVERHYKVYFEGGWHDTPLFKLENLGFGHEILGPAIIMNGNSTVIVEPQCKAIITKYGNIKIEVEPATSSVKLAENVADVVQLSIFNHRFMGIAEQMGRTLQRTSISTNIKERLDFSCALFSPDGGLVANAPHVPVHLGAMSSTVRWQLKHWGENLNEGDVLVTNHPCAGGSHLPDITVITPVFDKGKLVFFVASRGHHAEVGGITPGSMPPFSKAIWEEGAAIKAFKVVEKGVFQEEGIVKLLQFPSSDETTTKIPGTRRIQDNLSDLQAQIAANQRGISLIKELIEQYGLGTVQAYMKYVQLNAEEAVREMLKSVANRVSSETPNSRVGNSVTIEEEDYMDDGSIIHLKLTIDADKGEASFDFTGTSPEVYGNWNAPEAVTSAAVIYCLRCLVNVDIPLNQGCLAPVEIRIPAGSFLSPSEKAAVVGGNVLTSQRVTDVVLTAFQACACSQGCMNNLTFGDDTFGYYETIGGGCGAGPTWNGTSGVQCHMTNTRMTDPEIFEQRYPVLLHRFGLRENSGGNGLHKGGDGLVREIEFRKPVVVSILSERRVHSPRGLNGGQNGLRGANYLITKDKRRIYLGGKNTVHVEAGEILQILTPGGGGFGSNI

SEQ ID NO: 5839 - protein, 282 aa, Arabidopsis thaliana
  Clone ID: ARATH-23APR03-C154176_1.p
MSRYQSHSFDDGEINPFANPTSVPAATSKLSPLPPEPYDRGATMDIPLDSGKDLKAKEKELREKEAELKRREQEIKRKEDAIAQAGIVIEEKNWPPFFPLIHHDISNEIPIHLQRIQYVAFTSMLGLVVCLLWNIVAVTTAWIKGEGPTIWFLAIIYFISGVPGAYVMWYRPLYRAMRTDSALNFGWFFFTYLFHIAFCVFAAVAPPIIFKGKSLTGILPAIDVLSGNILVGIFYFIGFGFFCLESLVSIWVIQQVYMYFRGSGKAAEMKQEATRRAMMAAL

SEQ ID NO: 5840 - protein, 668 aa, Arabidopsis thaliana
  Clone ID: ARATH-23APR03-C15441_1.p
MRYQQWRLMLLRSYHRSHLPYLSPCSQVTSISSRSFSSFIHPGIGALQQSEQLCPLRSPMTSSGNLVKSVGRSFSSEPAVEEKSSAEATVIDIFSRLSGEDEIRKELESSGVVISQDLALKVLRKLESNPDVAKSFFQWIKEASPEELSSKNYNMMLRILGGNGLVDEFWGLVDVMKKKGHGLSANVRDKVGDKFQKDGLESDLLRLRKLFTSDCLDNSAENVCDRVCKIVMKEEWGDDVEKRVRDLNVEFKSDLVKMIVERLDVEPRKALLFFRWIDESDLFKHDEKTYNAMARVLGKEKFLDRFQNIVVEMRSAGYEVEIETYVRVSTRFCQTKLIKEAVDLFEIAMAGSSSSNNPTPHCFCLLLKKIVTAKILDMDLFSRAVKVYTKNGNALTDSLLKSVLKSLRSVDRVEQSNELLKEMKRGGYVPSGDMQSMIASSLSRKGKKDEADEFVDFMESSGNNLDDKAMASLVEGYCDSGNLDEALVCFEKMVGNTGVSYADYSFEKLVLAYCNKNQVRDAYKLLSAQVTKNQLKPRHSTYKSLVTNLLTKKIARDGGFEEALSLLPIMKDHGFPPFIDPFMSYFSSTGKSTEALGFLKAMTSNNFPYISVVLRVFETMMKSARHSEAQDLLSLCPNYIRNNPDVLELFNTMKPNESAVEKPLAASA

SEQ ID NO: 5841 - protein, 1754 aa, Arabidopsis thaliana
  unsure (1)..(1754): unsure at all Xaa locations
  Clone ID: ARATH-23APR03-C15442_1.p
MVFPWNIAKSAEEAFSRWAVKRVVKFLLKKKLGKLILGDIDLDQLDIQLRDGTIQLSDLAINVDYLNDKFDAPLVIKEGSIGSLLVKMPWKTNGCQVEVDELELVLAPRLESNKSSSNEASTSASTREDLHNIRLEIGKHENEMLMNAAKSASIDVHEGVKTVAKIVKWFLTSFHVKIKNLIIAFDPDFGKKQSEAGPRPTLVLRMTEIECGISEEQVSANEVSPDNFLGINRLANCVKFQGAVVELLNMDDDDDGDKTCDKKTSNDVTLIMTGVGGGFSGSLNFSIPWKNGSLDIRKVDADISIDPVEVRFQPSTIRWFLQLWKTFTSFGSDCFPSVSHSDFLTDSPTIPTNVMVTPPATLSLSGGQELEHDTTPNLQFIPDWFPSSFSKKEEDGEVDIGASVDQFFECFDAMRSYQSASGSQGMWNWTSSVFTAINAASSLASGSLLLPSEQQHVETSCKVSFAGVSVVLFFQDEVNWKGVSTRIHYLGAELRDISVSFQVCLHDLRLEGEVNSMEIADYCQGGNVVDTANAESQTCLIKDLQAKVQTSLPPFASSDMHSDSERLSEIVSDGFLFRNKGFAVKTLLVIAAGGSGFQFTVNFQSSKASHRGSNSFSLSLPPTTFWLNLHSVEMLVNLFNDVSESIPITSHERNQVASSSKSESLRGSVSICNARVILWFPFESISERFCNSLGQQFIVVDLSSSPPSDKERAKERSPGEMHFPSATRSICFSVGDASIYLVTSDLKDSETNSYHRQVEFSAYNILHTNNKTRHQLSTIGMFWQDRPTVSPWLVERAKMLATQEESIQTDKSGGRGLEFAAVATPKDQDDIYSRSRKEIILASSFCLYVHLLPLAIHLDSWQYSKLCNLIEEAKNWLSRMAANTAEQTEESVVCQTSLVVDCDSIDILVRPEPRMGIKKQLQTELPGSWIQFNLRVQKLNLMSVPNLGSVSGADFFWLAHGEGTLLGSVTGLPDQELLLLSCNNSAIKRGNGGGSNALSSRFAGLDFLHLQEPGICNDYLAVSARGCTISAVGGRLDWIEVATSFFSFEDEKKTQEINSSSSSGSSFILNFVDVGLSYEPHHENTDHLRQASDPWVACLVAASSFSLSKKSLVDSIRNDYRIRIQDLGLLLSVDFDLSKLGGTYSSEHLHESGYVKVANDSLIEAILRTNSENGLLWELECSKSHLVIETCSDTTSGLIRLATQLQQLLAPDLEESAVHLQTRWDSIQQANARNDLDISDRLSSSDSSGEMKYLRLESENETGVIGLMDEINEDAFQFDVNPTYQSDSVECQNNYMSPHGISHGQAYNWVPATEKLPSNQSICGSSSRINSESSQVFLERESLPEIFENYCLSEFRPSSEVPQEGDSSGRELFPETDLRRGNSGWYDDASLRIVEDHVSEATEEDHEEHILDGECSSFGQTSYSAVAANGRILLTXLTIIEEALLPYFQKFDIWPVNVRVDYSPHHVDIAALTGGKYAELVNLVPWKHNLLITEEQMQGIELQLKHVHAAGIYGWGNVCETILGEWLEDVSQNQIHQLLKGIPTVRSLSALYAAALKLVSSPVESYRKDRRLVKGVQRGTVAFLRSISLEAVGLGVHLAAGAHDILLRAEYIFASSPSLPQPQGRTKTNVRHNQPRNAKQGMLKACESIGDGIGKTASALVRTPLKKYQRGDGAGSAFATVVQGVPTAAIAPASACAKAVHSALVGIRNRSVHIKYFGNTAGNICYLQSIKDSCRLFLLSVLILNIKRNPWKNT

SEQ ID NO: 5842 - protein, 459 aa, Arabidopsis thaliana
  Clone ID: ARATH-23APR03-C156494_1.p
MPGFDRISELPESLITQILLCLPTKDSVKTSVLSTRWKNLWLNVPGLDLTCSDFPFEDEEYEQVFINFIDRFLEFNPESRLQTFEVDYKRREIRGFKDRIGTAINRGIRLLDAVSSTMYWEEECIMYPYLEFMPLNLFTSKTLVTLKLRDSALNDPGLVSMPCLKFMILREVRWSGTMSLEKLVSGCPVLEELTLVRTLICDIDDDELAVTRVRSRSLKTFYVPLAYGVGCRSRVPDKVLEIDAPGLENMTLKEDHFDGIVVKNLTSLFMIELNIKFAVDYRRSFDPEDLSKRNEIGDFLTGISRARHMIISQKTVKALESYSKVGSIPKFNNLSHLKAVFPSPLLPFLPAFLESFPNLKNLILKIAFAKDDETEELNLINVPRCIVSTLECVEIKGLFEWEEEEMKIARYFLENAAVLKKLTMSFIDYPRYASNSDVYEDLDKLTKRSQQCRIIVDDE

SEQ ID NO: 5843 - protein, 226 aa, Arabidopsis thaliana
  Clone ID: ARATH-23APR03-C1566_1.p
MSSSDSVNNGVNSRMYFRNPSFSNVILNDNWSDLPLSVDDSQDMAIYNTLRDAVSSGWTPSVPPVTSPAEEDKPPATKASGSHAPRQKGMQYRGVRRRPWGKFAAEIRDPKKNGARVWLGTYETPEDAAVAYDRAAFQLRGSKAKLNFPHLIGSCKYEPVRIRPRRRSPEPSVSDQLTSEQKRESHVDDGESSLVVPELDFTVDQFYFDGSLLMDQSECSYSDNRI

SEQ ID NO: 5844 - protein, 429 aa, Arabidopsis thaliana
  Clone ID: ARATH-23APR03-C156_1.p
MISYQQASKMGEEEENPNSIDILPELLEEVLLRLPTKSILKCRIVSKQWRSLLESSRFAERHMSLQNSRRRILAAYNCDCGGRRKLLPESRFEGDEEIVYLHCDASRPSMTCQGVICFPEQDWIIVLNPSTSQLRRFPSGLNHNCRFRIGLWKTFSPGNWVMGFGRDKVNGRYKVVRMSFAFWRVRQEEPVVECGVLDVDTGEWRKLSPPPYVVNVGSKSVCVNGSIYWLHIQTVYRILALDLHKEEFHKVPVPPTQITVDTQMVNLEDRLVLAITRVSPEWILEVWGMDTYKEKWSKTYSISLDHRVVSWRRQKRWFTPVAVSKQANLVFYDNKKRLFKYYPVKDEIRCLSLDICVLSPYVENLVPLPLKPSHPHPTPKNSDFEMRISRCRLFSTPGSWISKILKWNVMTLEILFTSLAIVGYICLPL

SEQ ID NO: 5845 - protein, 355 aa, Arabidopsis thaliana
  Clone ID: ARATH-23APR03-C1583_1.p
MRRINSLYGRIGLLKRVPEKSTKQAHTFLASLSFSTEGAYGGDGEFQQNSSKVKIFDRDLKRIHRDRAAWLSRQKNDSFVDAVADNLLDRLEDCKKSFPTAFCLGGSLGAVKRLLRRRGGIEKLIMMDTSYDMIKSCRDAQDDSLDNSIETSYFVGDEEFLPVKESSVDLIISSLGLHWTNDLPGSMIQCKLALKPDGLFLAAILGGETLKELRIACTLAHMEREGGISPRLSPLAQVRDAGNLLTRAGFSLPGVDVDEYVVKYKRAMDLIEHLRAMGETNALLERNKILNRETAVATAAIYDSMFATEDGTIPATFQVIYMTGWREHSSHPQAKRRGSATVSFTDLQKQFGGQS

SEQ ID NO: 5846 - protein, 309 aa, Arabidopsis thaliana
  Clone ID: ARATH-23APR03-C1589_1.p
MEKYEKLEKVGEGTYGKVYKAMEKGTGKLVALKKTRLEMDEEGIPPTALREISLLQMLSTSIYVVRLLCVEHVHQPSTKSQSTKSNLYLVFEYLDTDLKKFIDSYRKGPNPKPLEPFLIQKLMFQLCKGVAHCHSHGVLHRDLKPQNLLLVKDKELLKIADLGLGRAFTVPLKSYTHEIVTLWYRAPEVLLGSTHYSTGVDMWSVGCIFAEMVRRQALFPGDSEFQQLLHIFRLLGTPTEQQWPGVSTLRDWHVYPKWEPQDLTLAVPSLSPQGVDLLTKMLKYNPAERISAKTALDHPYFDSLDKSQF

SEQ ID NO: 5847 - protein, 420 aa, Arabidopsis thaliana
  Clone ID: ARATH-23APR03-C1590_1.p
MLALSPATRDGCDGASEFLDTSCGFTIINPEEEEEFPDFADHGDLLDIIDFDDIFGVAGDVLPDLEIDPEILSGDFSNHMNASSTITTTSDKTDSQGETTKGSSGKGEEVVSKRDDVAAETVTYDGDSDRKRKYSSSASSKNNRISNNEGKRKVKVDWTPELHRRFVEAVEQLGVDKAVPSRILELMGVHCLTRHNVASHLQKYRSHRKHLLAREAEAANWTRKRHIYGVDTGANLNGRTKNGWLAPAPTLGFPPPPPVAVAPPPVHHHHFRPLHVWGHPTVDQSIMPHVWPKHLPPPSTAMPNPPFWVSDSPYWHPMHNGTTPYLPTVATRFRAPPVAGIPHALPPHHTMYKPNLGFGGARPPVDLHPSKESVDAAIGDVLTRPWLPLPLGLNPPAVDGVMTELHRHGVSEVPPTASCA

SEQ ID NO: 5848 - protein, 1273 aa, Arabidopsis thaliana
  Clone ID: ARATH-23APR03-C16051_1.p
MADQRSKTNRWNWEVSGFEPRKSSSNASFAESTGHRTTGPLLRRNSISTPSLPPKQAIASKVNGLKEKVKLAKEDYLELRQEATDLQEYSNAKLDRVTRYLGVLAEKSRKLDQFVLETEARISPLINEKKRLFNDLLTAKGNIKVFCRARPLFEDEGPSVIEFPGDCTICVNTSDDTLSNPKKDFEFDRVYGPHVGQAALFSDVQPFVQSALDGSNVSILSYGQTNAGKTYTMEGSNHDRGLYARCFEELFDLANSDSTSTSRFSFSLSVFEIYNEQIRDLLSETQSNLPNINMDLHESVIELGQEKVDNPLEFLGVLKSAFLNRGNYKSKFNVTHLIVSIHIYYSNTITGENIYSKLSLVDLAGSEGLIMENDSGDHVTDLLHVMNSISALGDVLSSLTSGKDSIPYDNSILTRVLADSLGGSSKTLMIVNICPSVQTLSETISCLNYAARARNTVPSLGNRDTIKKWRDVASDARKELLEKERENQNLKQEVVGLKKALKDANDQCVLLYSEVQRAWKVSFTLQSDLKSENIMLVDKHRLEKEQNSQLRNQIAQFLQLDQEQKLQMQQQDSAIQNLQAKITDLESQVSEAVRSDTTRTGDALQSQDIFSPIPKAVEGTTDSSSVTKKLEEELKKRDALIERLHEENEKLFDRLTERSMAVSTQVLSPSLRASPNIQPANVNRGEGYSAEAVALPSTPNKNNGAITLVKSGTDLVKTTPAGEYLTAALNDFDPEEYEGLAAIADGANKLLMLVLAAVIKAGASREHEILAEIRDSVFSFIRKMEPRRVMDTMLVSRVRILYIRSLLARSPELQTIRVSPVECFLEKPNTGRSKSTSRGSSPGRSPVRYLDTQIHGFKVNIKAERRNKLASVVSRMRGLEQDAGRQQVTGVKLREMQDEAKSFAIGNKALAALFVHTPAGELQRQIRLWLAENFEFLSVTSDDVSGGNGGQLELLSTAIMDGWMAGLGAAVPPHTDALGQLLSEYAKRVYTSQMQHMKDIAGTLAAEEAEDAGQVSKLRSALESVDHKRRKILQQMKSDAALLNLEEGSSPIPNPSTAAEDSRLASLISLDGILKQVKEITRQASVHVLSKSKKKALLESLDELTERMPSLLDIDHPCAQREIATAHQLVETIPEQEDTNILEQSHDRRPSLESISSGETDVSQWNVLQFNTGSSAPFIIKCGGNNNSELVIKADARVQEPKGGEIVRVVPRPSVLVNMSLEEMKQMFVQLPEALSLLALARTADGTRARYSRLYKTLAMKVPSLKDLVSELE

SEQ ID NO: 5849 - protein, 633 aa, Arabidopsis thaliana
  Clone ID: ARATH-23APR03-C1605_1.p
MFSSIIVTFKSDLIKSEEYLETLLARKAPLGQIWMAATLHAKINRKKLDKLDIIQICEEILNPSVPMALRLSGILMGGVVIVYERKVKLLFDDVNRFLVEINGAWRTKSVPDPTLLPKGKTHARKEAVTLPENEEADFGDFEQTRNVPKFGNYMDFQQTFISMRLDESHVNNNPEPEDLGQQFHQADAENITLFEYHGSFQTNNETYDRFERFDIEGDDETQMNSNPREGAEIPTTLIPSPPRHHDIPEGVNPTSPQRQEQQENRRDGFAEQMEEQNIPDKEEHDRPQPAKKRARKTATSAMDYEQTIIAGHVYQSWLQDTSDILCRGEKRKVRGTIRPDMESFKRANMPPTQLFEKDSSYPPQLYQLWSKNTQVLQTSSSESRHPDLRAEQSPGFVQERMHNHHQTDHHERSDTSSQNLDSPAEILRTVRTGKGASVESMMAGSRASPETINRQAADINVTPFYSGDDVRSMPSTPSARGAASINNIEISSKSRMPNRKRPNSSPRRGLEPVAEERPWEHREYEFEFSMLPEKRFTADKEILFETASTQTQKPVCNQSDEMITDSIKSHLKTHFETPGAPQVESLNKLAVGMDRNAAAKLFFQSCVLATRGVIKVNQAEPYGDILIARGPNM

SEQ ID NO: 5850 - protein, 183 aa, Arabidopsis thaliana
  Clone ID: ARATH-23APR03-C160996_1.p
MDSRALPFSVLVILIATAVLANAYTPPPPPPTTAYPAVKTVEAAVEGMVYCQSCDKFGSWSLAGAEAIAGAKISIICKNHRQQVSFYKVFRTDSYGHFYGELKGFKMTPHFLDHPLHSCRAKLVSSPREDCNLFSNINNALDGAPLRYEEKRLKWTNYEAVIYAAGPLAFRPDHCPATAPPTY

SEQ ID NO: 5851 - protein, 309 aa, Arabidopsis thaliana
  Clone ID: ARATH-23APR03-C1614_1.p
MASFVMGYFLLFAVAFMCLDARTDKTQDYTSFQYHKGALLTGDVSINLIWYGKFKPSQRAIVTDFVASLSSSRRSTMAQNPSVATWWKTVEKYYQFRKMTTTRGLSLSLGEQILDQGYSMGKSLTEKNLKDLAAKGGQSYAVNVVLTSADVTVQGFCMNRCGSHGTGSGSGKKGSRFAYIWVGNSETQCPGQCAWPFHAPVYGPQSPPLVAPNNDVGLDGMVINLASLMAATATNPFGDGYYQGPKTAPLEAGSACTGVYGKGSYPGYAGELLVDATTGGSYNVKGLNGRKYLLPALFDPKTDSCSTLF

SEQ ID NO: 5852 - protein, 242 aa, Arabidopsis thaliana
  Clone ID: ARATH-23APR03-C161510_1.p
MEKDDATASFSPSFSTYSGDRLVEIAERVCYKEKSDAEFEFSTAATSSSGDGGLVFPVFNKNLISGDVSPEKVIPLKDLFLRERNDQQPPQQTYSSSSDEEEEDDEFDSIPSEIYCPWTPARSTADMSPSGGCRKSKSTGSSSTSTWSTKRWRLRDFLKRSKSDGKQSLKFLNPTNRDDDDESSKSKKKVSVSVTVSAHEKFYLRNKAIKEEDKRKSYLPYKQDLVGLFSNIHRYGKTFPPF

SEQ ID NO: 5853 - protein, 147 aa, Arabidopsis thaliana
  Clone ID: ARATH-23APR03-C1622_1.p
MATSVATLSSPPPVSLPLLSSSRSSFFSNCFTVTTRPNTRSLVAIGRRIRQEPTRKPLTCNALFGLGVPELAVIAGVAALLFGPKKLPEIGKSIGKTVKSFQQAAKEFESELKTEPEESVAESSQVATSNKEEEKKTEVSSSSKENV

SEQ ID NO: 5854 - protein, 394 aa, Arabidopsis thaliana
  Clone ID: ARATH-23APR03-C16336_1.p
MEKKKNNNNGGDFGEEESSIDGDILESILSYLPLLDLDSACQVSKSWNRAVFYSLRRLKTMPWLFVYNQRNSPPYTMATMAMAYDPKSEAWIELNTASSPVEHVSVARSSHSTLLYALSPARFSFSTDAFHLTWQHVAPPRVWRIDPIVAVVGRSLIIAGGVCDFEEDRFAVELFDIESGDGAWERCESMPDFLYESASSTWLSVAVSSEKMYVTEKRSGVTCSFNPVTRSWTKLLDLCPGECSLYSRSIGFSVNRLIMAGIIGDEYNPTGIELWEVIDSDESHLKFESIGSMPETYLEKLRGINSDWPLTSIVLNAVGDMVYVHGAAENGGEIVAAEIEGGKLCKWRTLPNADATWKKSHAAERVIVACSNVGFSDLKLAFRNNLSFLSTSKY

SEQ ID NO: 5855 - protein, 307 aa, Arabidopsis thaliana
  Clone ID: ARATH-23APR03-C16341_1.p
MAIVSVSNSFLTFNSPNQLRFSRRRFSAMASSTTGVRVAEGEGNLPKLVLTSPQNSEAEIYLFGGCITSWKVASGKDLLFVRPDAVFNKIKPISGGIPHCFPQFGPGLIQQHGFGRNMDWSVVDSQNADDNAAVTLELKDGPYSRAMWDFAFQALYKVIVGADSLSTELKITNTDDKPFSFSTALHTYFRASSAGASVRGLKGCKTLNKDPDPKNPIEGKEDRDAVTFPGFVDTVYLDAPNELQFDNGLGDKIIIKNTNWSDAVLWNPHTQMEACYRDFVCVENAKLGDVKLEPGQSWTATQLLSIS

SEQ ID NO: 5856 - protein, 441 aa, Arabidopsis thaliana
  Clone ID: ARATH-23APR03-C16376_1.p
MNRSTMMIMRIEESAIVLSLLKSDLRPMEDVLSEFDSKFESGRYLSVCNSLSMMLQDQQMFKNTERLIAFGIIYQCYSSQKPSFNPFLSEMISAACNEQLEKSERAFLLHLLQWNSYNNVKEILKHSAVDYIRSFDPSTHDFPELGELQREYGDKADPGPSSHIFADYSLKKLLHDPDVPRGCDPNSPEFDVQAGVNPRIGSGDRDEALSGFLGNLTMGGLGPRWIRPCPPRYPVHQSELLWIDPDNKHELVWDDKMCADTSSGATVRDLLVKGLKVTLSPTEQEDIITELANDPKLVFHCGITPRKLPQLVEHNPQIAVEILTKLNNSTEINDYYEALGNMDMSLHSMEVVNRLTTAVELPKDFIRMYITNCISSCENAKQDKYMQNRLVRLVCVFLQSLIRNKIINVKDLFIEVQAFCIEFSRVREAAGLFRLLKQLDE

SEQ ID NO: 5857 - protein, 236 aa, Arabidopsis thaliana
  Clone ID: ARATH-23APR03-C16440_1.p
MGSVDPSRLSLVLFARLSGLVVAVSVLYWALFLPNLGLSYSTLHPLLMVIGFILVSGEAILIHRWLPGSRKTKKAVHLWLQGMALASAVFGIWTKFHYQRGVFANFYSLHSWMGLLSVSLFAAQWVTGFMSFWHRGEVRTTRTTFLPWHVFLGLYTYGLAIATAETGLLEKLTFLQTKRNVPRRGSESMTVNGLGLGLALLGCIVITAAILPKYQSHSRDEKLVYSSQDRPKCLSS

SEQ ID NO: 5858 - protein, 1055 aa, Arabidopsis thaliana
  unsure (1)..(1055): unsure at all Xaa locations
  Clone ID: ARATH-23APR03-C16494_1.p
MPRSRDEDDELDGDYEALDLEEEEEEDEEEEEERGRGGGGSRRKRGRSNFIDDYAEEDSQEEDDDDEDYGSSRGGKGAASKRKKPSASIFLDREAHQVDDEDEEEEDEAEDDFIVDNGTDLPDERGDRRYERRFLPRDENDEDVEDLERRIQERFSSRHHEEYDEEATEVEQQALLPSVRDPKLWMVKCAIGREREVAVCLMQKFIDRGADLQIRSVVALDHLKNFIYVEADKEAHVKEAIKGMRNIYANQKILLVPIREMTDVLSVESKAIDLSRDTWVRMKIGTYKGDLAKVVDVDNVRQRVTVKLIPRIDLQALASKLDGREVSKKKAFVPPPRFMNIDEARELHIRVERRRDHMTGDYFENIGGMLFKDGFHYKQVSLKSITVQNVTPTFDELEKFNKPSENGEGDFGGLSTLFANRKKGHFMKGDAVIVIKGDLKNLKGWVEKXDEENVLIRSEVKGLPDPLAVNERELCKYFEPGNHVKVVSGTHEGATGMVVKVDQHVRVFADHVVESSEVTTGVTKIGDYELHDLVLLDNLSFGVIIRLENEAFQVLKGVPDRPEVALVKLREIKCKLEKKINVQDRYKNAIAVKDDVRVIEGPSKGKQGPVKHIYKGVLFIYDRHHLEHAGFICAKCTSCIVVGGSRSGANRNGGDSLSRYGNFKAPAPVPSSPGRFQRGRGGGYNNSGGRHGGGRGRGDDSLLGTTVKIRLGPFKGYRGPVVEVKGNSVRVELEMKIVTGNPLDSPHNVATSPCRTNSNNSSYMQLIGVQYQIMLRQHRXRDTSRYSMGSETPMHPSRTPLHPYMTPMRDSGATPIHDGMRTPMRDRAWNPYTPMSPPRDNWEDGNPGSWGTSPQYQPGSPPSRAYEAPTPGSGWASTPGGSYSDAGTPRDHGSAYANAPSPYLPSTPGQPMTPSSASDFPGTPGGQPMTPGTALDVMSPVIGGDAEAWFMPDILVDIHKAGEDTDVGVIRDVSDGTCKVSLGSSGEGDTIMALPSELEIIPPRKSDRVKIVGGQYRGSTGKLIGIDGSDGIVKIDDNLDVKILDLALLAKFVQP

SEQ ID NO: 5859 - protein, 167 aa, Arabidopsis thaliana
  Clone ID: ARATH-23APR03-C1669_1.p
METSMRYTSNSKSMKIHAKEKVPVNSKTHLQLHGELDTGTGAPSYFCAMIRHFFPEASTGLGVGLHYDKRQKLRCLVRGKKEFPVRADKRVTFNIKGRCDIDQDLNQKNPKGAAEFAWNIMDFKEDQDVRIKVGYEMFDKVPYMQIRENNWTLNANMKGKWNLRYDL

SEQ ID NO: 5860 - protein, 463 aa, Arabidopsis thaliana
  Clone ID: ARATH-23APR03-C16707_1.p
MLTTTTDEEIDLSCDGGVTEPQKVAIIFAFCGVGYQGMQKNPGAKTIEGELEEALFHAGAVPESIRGKPKLYDFARSARTDKGVSAVGQVVSGRFIVDPLGFVNRLNSNLPNQIRIFGYKHVTPSFSSKKFCDRRRYVYLLPVFALDPISHRDRETVMASLGPGEEYVKCFECSERGRKIPPGLVGKWKGTNFGTKSLDFQSDISSNNSSALRSDIKIEALSSNLAGLCSSAHASGRIQEDSCKLNTNSSETKVKSKFCYGEKEKERFSRILSCYVGSYNFHNFTTRTKADDPTANRQIISFTANTVINLDGIDFIKCEVLGKSFMLHQIRKMMGLAVAIMRNCASESLIQSAFSKDVNITVPMAPEVGLYLDECFFTSYNRNFEDSHEEVSMEAYKEEAEAFKLKHIYSHIGATERKYGNMALWLHSLNYRNYPDLNFGSCGQNTDQVLVHKKIDERASHSL

SEQ ID NO: 5861 - protein, 329 aa, Arabidopsis thaliana
  Clone ID: ARATH-23APR03-C1673_1.p
MALSMEFGFSIGSCFKAPNPPVLISASPNKINFTLRRRKKRFLLRVSAVSYKEFAESALEETRKRIVLEPSHLQEKYSSMTGLDGKTELQMLAFKSSKIRLLRSMAIENETMQVFDFAGFMEPEYDTPIFCANFFTSTNVNIVVLDLNPLHQLTDQTDYQDKYYNKIMSIYHKYAETFPWGGKLTGESIKFFSPLVMWTRFSSSKEKHKALFSAFLEYYQAWLEMTIQVREEMEPSHVRANCEAQHKYLTWRAQKDPGHGLLKRLVGEAKAKELLRDFLFNGVDELGTKTFIDYFPEYQTEDGTVSDKRSIIGKSYETRPWDLTGQFIG

SEQ ID NO: 5862 - protein, 263 aa, Arabidopsis thaliana
  Clone ID: ARATH-23APR03-C16842_1.p
MAWLSRVRGVSPVTRLAAIRRSFGSAAALEFDYDSDDEYLYGDDRRLAEPRLGLDGSGPDRGVQWVLMGAPGAWRHVFAERLSKLLEVPHISMGSLVRQELNPRSSLYKEIASAVNERKLVPKSVVFALLSKRLEEGYARGETGFILHGIPRTRFQAETLDQIAQIDLVVNLKCSEDHLVNRNETALPQQEFLGSMLHSPVAINARRESVGVYAQEVEEYYRKQRKLLDFHVGGATSADTWQGLLAALHLKQVNLTTSQKLTL

SEQ ID NO: 5863 - protein, 725 aa, Arabidopsis thaliana
  Clone ID: ARATH-23APR03-C16861_1.p
MSIFSLASSSDSQRDDLIMALKAVVIVYCVVSLVSVQLADAQHEGLPVSPTLSPSTSPVITDLPLPAEFPRFHRKYFAPQQAEAPQHSPPYSRLVASDHPPTSSHFSKPSMKRNAQSPGAGLADIAPAQSSNGVLPDALTQPPLSPSISNCCKSDMVLKRRSIGCHCVYPIKLDILLLNVSETPSWNMFLNEFATQLGLLPHQIELINFYVLSLSRMNISMDITPHSGISFSASQASAINSSLISHKIQFSPTLVGDYKLLNLTWFEAPAPSQAPLVASSPHKAPSQGSSATTSVRSPGKKRHPNLILIFSIAAGVLILAIITVLVICSRALREEKAPDPHKEAVKPRNLDAGSFGGSLPHPASTRFLSYEELKEATSNFESASILGEGGFGKVYRGILADGTAVAIKKLTSGGPQGDKEFQVEIDMLSRLHHRNLVKLVGYYSSRDSSQHLLCYELVPNGSLEAWLHGPLGLNCPLDWDTRMKIALDAARGLAYLHEDSQPSVIHRDFKASNILLENNFNAKVADFGLAKQAPEGRGNHLSTRVMGTFGYVAPEYAMTGHLLVKSDVYSYGVVLLELLTGRKPVDMSQPSGQENLVTWTRPVLRDKDRLEELVDSRLEGKYPKEDFIRVCTIAAACVAPEASQRPTMGEVVQSLKMVQRVVEYQDPVLNTSNKARPNRRQSSATFESEVTSSMFSSGPYSGLSAFDHENITRTTVFSEDLHEGR

SEQ ID NO: 5864 - protein, 662 aa, Arabidopsis thaliana
  Clone ID: ARATH-23APR03-C16868_1.p
MSFSDSGSSSYGGDYKNFRQITRERLLCEMLRPERNGSSKLTWKVLVMDKFTVKIMSSACKMSEITQGGISLVEVITKHRQPMTAMEVIYFIQPTEENVTAFLSDMTGKSPLYKKAFVFFSSPVSRSLVNVIKKDMRAMKRIGGLKEMNLEYISMDIQGFVTNNENALEELFCDDENHQRADACLNVVAKRIATVLASLKEYPFVRYRGAKALDATTMTTYRELIPTKLAASVWNCLARYKQTIEDFPQTETCELLILDRSIDQIAPLIHEWTYDAMCHDLLNMEGNKYTHEVPSKTGDKPEKKEVLLDEEDSIWVELRDAHIADASERLHEKMTNFVSKNKAAQLKHSSKDFGDLSSKDLQKMVHALPQYSEQIDKLSLHVEIARTINRTIMEQGLRDLGQLEQDLVFGDAGRKDVIKFLSTNHIISHESKLRLIMIVAAIYPKKFEGEKGRKMMELAKLSGDDVVAVNNMRLLGPVHTECKKSTTGSFPLKFDVLKTKRAARRDRVGETQTWQLSRFYPIVEELVEKLSKGHLPKQDYPCMNEPKPTFYSGSLSPSASPVLPHSRRTPTWARRHLSDDGYFSDSVLGRASSGFKRKGQRIFVFIVGGATRSELRVCHKLTEKLDREVILGSSSFLDPLTFLTKMKQLNEEEEISLDDIVI

SEQ ID NO: 5865 - protein, 402 aa, Arabidopsis thaliana
  Clone ID: ARATH-23APR03-C16909_1.p
MMRSVDVYVKTLGPPVRSILYSIFTSQQKPSSLPSLPFHFSLRSSSNIPTRCFSNVVAKSNSPIYDFQGFRNLFTERAISSSTTTPVASAQPQQLQNQNQHPAEVDEEISMGLEDEAKLSIPVRAYFFSTSVDLRSLIEQNKQNFIPPTSRMTNYVVLKFGNHSDPTDTTRGRISGSESIYMVVFHYGSIVLFNVREHEVDEYLKVVERHASGLLPEMRKDEYEVRENPNLDTWMEVGRDFIRLQFLNTDGIRTIGCVLGQSIALDYYGRQVDGMVAEFTEINRQLEITGTFTMKRKKLFQLVGKANVILADVILKLGLFERSDIAWKDAKYGQIWEFLRDEFELTQSFANLDYKLKFVEHNVRFLQEILQNRKSATLEWLIIILISMEIAISFYNMSRASL

SEQ ID NO: 5866 - protein, 366 aa, Arabidopsis thaliana
  Clone ID: ARATH-23APR03-C1690_1.p
MATSSAHLSFLAGRISPFSSERIGLFPLRGEFRPRMTRFRCSAGPSGFFTRLGRLIKEKAKSDVEKVFSGFSKTRENLAVIDELLLFWNLAETDRVLDELEEALLVSDFGPKITVRIVERLREDIMSGKLKSGSEIKDALKESVLEMLAKKNSKTELQLGFRKPAVIMIVGVNGGGKTTSLGKLAHRLKNEGTKVLMAAGDTFRAAASDQLEIWAERTGCEIVVAEGDKAKAATVLSKAVKRGKEEGYDVVLCDTSGRLHTNYSLMEELIACKKAVGKIVSGAPNEILLVLDGNTGLNMLPQAREFNEVVGITGLILTKLDGSARGGCVVSVVEELGIPVKFIGVGEAVEDLQPFDPEAFVNAIFS

SEQ ID NO: 5867 - protein, 625 aa, Arabidopsis thaliana
  unsure (1)..(625): unsure at all Xaa locations
  Clone ID: ARATH-23APR03-C16921_1.p
QFGKVFCGTALIERYEYEKKKYVLKNLRLXAQQHKRRRSSARQXVVLFSKIRHPFVGEKKALLGGTWVVMMGIAYNELAKSAEVGISYQEXPMASGLFSKMMGRGYFRSXHILHRDVKCSNIFLTKEQDIRLGDFGLAKILTSDDLTSSVVGTPSYMCPELLADIPYGSKSDIWSLGCCIYEMAYLKPAFKAFDMQALINKINKTIVSPLPAKYSGPLXSFVLLVPSYISLFVYSNIFXNLVFSRGLVKSMLRKNPEVRPSASDLLRHPHLQPYVLDVKLRLNNLRRKTLPPELPSSKRIMKKAHFSEPAVTCPAFGERQHRSLWNDRALNPEAEEDTASSIKCISRRISDLSIESSSKGTLICKQVSSSACKVSKYPLAKSSVTSRRIMETGRRSDHLHPVSGGGTTSKIIPSARRTSLPLTKRATNQEVAAYNPIVGILQNVKSPEYSINEPQVDKIAIFPLAPYEQDIFFTPMQRKTSSKSSSVSDRSITKDKCTVQTHTTWQGIQLNMVDNISDGSSSSDQNATAGASSHTTSSSSRRCRFDPSSYRQRADALEGLLEFSARLLQEGRYDELNVLLKPFGPGKVSPRETAIWIAKSLKENRDKTKMVDLNVSREIPHVGLL

SEQ ID NO: 5868 - protein, 848 aa, Arabidopsis thaliana
  Clone ID: ARATH-23APR03-C16923_1.p
MVTGSRTSGNRGVGLDDEAKKMIQSIKEVVDSHSDADIYTALKEANMDANEAVEKLIHQDPFHEVKRKRDRKKEDTVFVEPANIKKPLENVTSEVKVRTQPEHNVRRGGYSRNFFPRNAAQRNASPRNPATGSNKEFRVVRDNRSNPNVDEELKHSSAQSSGSNINKVVATVNKLGSRGGLGNRNSSGAQDSTDECNAPADARLRQAEIRPLHCPVNKELGGVTLPSTNSVLGVYSSSKDPVHVPSPVSRSSPVGAIKREVRGGGLGGKPSENVGKDPSVPSFSGSSIRKNGPPNAHRPSSPTSKIDHSRTTARESVMPSGVEKNRSYLNRQRGNRGSQYARTQQVGGHTKGASQNKEWKPKSNQKPVGHNPGVIGTPTKSQARRPADNSINVETEAVKLQNKLSHVHISESQNVIIADHIRVPETDRCQLTFGSFVQEFNSSRNSESAFEESHSSEEVRESDRSSPVTCPEASADGPGVLPITIDDHVRVSRSDSPVSAVSEPQLPEQKETHRSDNLDAYSGIELLNRNGPPYTPLEFEQQQDPPELQKFSQAYDNHGSYEFPYFSPAMDETVRVQGLPSPHEQGLSAHMLNNAPPSTIPMLQQQQQASMQQMYPQVHVSHFPNLMPYRQFLSPVYVPQMPMPGYSGNPAAYAHPSNGNSYVLMPGGGSHLGSNGVKYGIHQQYKPVPTGGPAGFGTYNNPNGYPTNPPNVVGNATGLEDPSRMINKHGNIYVPNPQAETSEIWMQNPRDLSSLQSPYYNVAGQSPHGAYLSSHTAHQSFNPTAQSSHMQFQGLFHPSQPGTMANPHHMGPGLSGNVGVGVVPSPPPSQIGTYQQSQLGHPNWPSNF

SEQ ID NO: 5869 - protein, 603 aa, Arabidopsis thaliana
  Clone ID: ARATH-23APR03-C16976_1.p
MKSGKQSSQPEKGTSRILSLTVLFIAFCGFSFYLGGIFCSERDKIVAKDVTRTTTKAVASPKEPTATPIQIKSVSFPECGSEFQDYTPCTDPKRWKKYGVHRLSFLERHCPPVYEKNECLIPPPDGYKPPIRWPKSREQCWYRNVPYDWINKQKSNQHWLKKEGDKFHFPGGGTMFPRGVSHYVDLMQDLIPEMKDGTVRTAIDTGCGVASWGGDLLDRGILSLSLAPRDNHEAQVQFALERGIPAILGIISTQRLPFPSNAFDMAHCSRCLIPWTEFGGIYLLEIHRIVRPGGFWVLSGPPVNYNRRWRGWNTTMEDQKSDYNKLQSLLTSMCFKKYAQKDDIAVWQKLSDKSCYDKIAKNMEAYPPKCDDSIEPDSAWYTPLRPCVVAPTPKVKKSGLGSIPKWPERLHVAPERIGDVHGGSANSLKHDDGKWKNRVKHYKKVLPALGTDKIRNVMDMNTVYGGFSAALIEDPIWVMNVVSSYSANSLPVVFDRGLIGTYHDWCEAFSTYPRTYDLLHLDSLFTLESHRCEMKYILLEMDRILRPSGYVIIRESSYFMDAITTLAKGIRWSCRREETEYAVKSEKILVCQKKLWFSSNQTS

SEQ ID NO: 5870 - protein, 392 aa, Arabidopsis thaliana
  Clone ID: ARATH-23APR03-C1698_1.p
MEPPKEQQNTPEKSISDAPATISSAFPPSGCCTNCGGPTISEAPPPLASFPEMSPPPNYRPIRAPAINLPHNSQAIILSPVPHAEQVPVVSPPYHFQSPVKRIHSPDDIRRFHESASCKNFLGFVVSLSESIRGFKISDPCHISPTVAAIVSILETLLQWIDEIPPAQQSARYGNVSFRSWHERLRERGESLILEFLPEEFKESVIEIVPYFFDSFGNSSRIDYGTGHETNFAAWLYCLARMGIVKEEDYHSLVARVFVKYLELMRKLQMVYCLEPAGSHGVWGLDDYHFLPFIFGSSQLIDHKYMKPKSIHNDDILENFSSEYMYLSCIAFVKKVKKGLFAEHSPLLDDISGVPNWKKVNSGLLKMYRVEVLEKVPIMQHFLFGWLIKWEE

SEQ ID NO: 5871 - protein, 883 aa, Arabidopsis thaliana
  unsure (1)..(883): unsure at all Xaa locations
  Clone ID: ARATH-23APR03-C169977_1.p
MPWWSKSKDEKKKTNKESIIDAFNRKLGFASEDRSSGRSRKSRRRRDEIVSERGAISRLPSRSPSPSTRVSRCQSFAERSPAVPLPRPIVRPHVTSTDSGMNGSQRPGLDANLKPSWLPLPKPHGATSIPDNTGAEPDFATASVSSGSSVGDIPSDSLLSPLASDCENGNRTPVNISSRDQSMHSNKNSAEMFKPVPNKNRILSASPRRRPLGTHVKNLQIPQRDLVLCSAPDSLLSSPSRSPMRSFIPDQVSNHGLLISKPYSDVSLLGSGQCSSPGSGYNSGNNSIGGDMATQLFWPQSRCSPECSPVPSPRMTSPGPSSRIQSGAVTPLHPRAGGSTTGSPTRRLDDNRQQSHRLPLPPLLISNTCPFSPTYSAATSPSVPRSPARAEATVSPGSRWKKGRLLGMGSFGHVYLGFNSESGEMCAMKEVTLCSDDPKSRESAPQLGQEISVLTRLRHRNIVPSHAPDPAEDMRDPHLAXGSGASIXKLLQGDGPPGEKARRDDTRPTVPPLPSPHAKNTVHRDIKGANILVDPHGRVKVADFGMAKHITAQSGPLSFKGSPYWMAPEVIKNSNGSNLAVDIWSLGCTVLEMATTKPPWSQYEGVPAMFKIGNSKELPDIPDHLSEEGKDFVRKCLQRNPANRPTAAQLLDHAFVRNVMPMERPIVSGEPAEAMNVASSTMRSLDIGHARSLPCLDSEDATNYQQKGLKHGSGFSISQSPRNMSCPISPVGSPIFHSHSPHISGRRSPSPISSPHALSGSSTPLTGCGGAIPFHHQRQTTVNFLHEGIGSSRSPGSGGNFYTNSFFQEPSRQQDRSRSSPRTPPHVFWDNNGSIQPGYNWNKDNQPVLSDHVSQQLLSEHLKLKSLDLRPGFSTPGSTNRGP

SEQ ID NO: 5872 - protein, 357 aa, Arabidopsis thaliana
  unsure (1)..(357): unsure at all Xaa locations
  Clone ID: ARATH-23APR03-C16998_1.p
MASLCFQSPSKPISYFQPKSNPSPPLFAKVSVFRCRASVQTLVAVEPEPVFVSVKTFAPXTVANLGPGFDFLGCAVDGLGDHVTLRVDPSVRAGEVSISEITGTTTKLSTNPLRNCAGIAAIATMKMLGIRSVGLSLDLHKGLPLGSGLGSSAASAAAAAVAVNEIFVRIGRSDQLVLAGLESXAIMGGFVLIRNYEPLDLKPLRFPSDKDLFFVLVSPDFEAPTKKMRAALPTEIPMVHHVWNSSQAAALVAAVLEGDAVMLGKALSSDKIVEPTRAPLIPGMEAVKKAALEAGAFGCTISGAGPTAVAVIDSEEKGQVIGEKMVEAFWKVGHLKSVASVKKLDNVGARLVNSVSR

SEQ ID NO: 5873 - protein, 668 aa, Arabidopsis thaliana
  Clone ID: ARATH-23APR03-C17020_1.p
MQICQTKLNFTFPNPTNPNFCKPKALQWSPPRRISLLPCRGFSSDEFPVDETFLEKFGPKDKDTEDEARRRNWIERGWAPWEEILTPEADFARKSLNEGEEVPLQSPEAIEAFKMLRPSYRKKKIKEMGITEDEWYAKQFEIRGDKPPPLETSWAGPMVLRQIPPRDWPPRGWEVDRKELEFIREAHKLMAERVWLEDLDKDLRVGEDATVDKMCLERFKVFLKQYKEWVEDNKDRLEEESYKLDQDFYPGRRKRGKDYEDGMYELPFYYPGMVCEGTVTTLHLYQGAFVDIGGVHEGWVPIKGNDWFWIRHFIKVGMHVIVEITAKRDPYRFRFPLELRFVHPNIDHMIFNKFDFPPIFHRDGDTNPDEIRRDCGRPPEPRKDPGSKPEEEGLLSDHPYVDKLWQIHVAEQMILGDYEANPAKYEGKKLSELSDDEDFDEQKDIEYGEAYYKKTKLPKVILKTSVKELDLEAALTERQHHNKLMMEAKARGEGYKIDKLRRNIEMDEYDFLHWRRSLEEREALLRDISSRQALGLPLEEPGRYKPGSFFGKDQYDPTSALYQYDYWGEPKNSEISKQERMKDAHNKSIVGKGNVWYDMSYDDAIKQTIEKRKEGSTLASQEEETESEEEEEDDDDFDDFDYSILSDESSIGYSEQQPLVNGTQVLTD

SEQ ID NO: 5874 - protein, 408 aa, Arabidopsis thaliana
  Clone ID: ARATH-23APR03-C17056_1.p
MGNCWCRFEPLNHRVSANAKSESPKEQSPTVEDKHIKEVQKLPSNPKEVEDLRRDSAANPLIAFTYEELKNITSNFRQDRVLGGGGFGSVYKGFIKEDLGDQEVPEPLPVAVKVHDGDNSFQGHREWLAEVIFLGQLSHPNLVKLIGYCCEDNHRVLIYEYMARGSVENNLFSRVLLPLSWAIRMKIAFGAAKGLAFLHEAKKPVIYRDFKTSNILLDMDYNAKLSDFGLAKDGPVGDKSHVSTRIMGTYGYAAPEYIMTGHLTPGSDVYSFGVVLLELLTGRKSLDKSRPTREQNLIDWALPLLKEKKKVLNIVDPKMNCEYPVKAVQKAAMLAYHCLNRNPKARPLMRDIVDSLEPLQATEEEALLVPPVQKAVITIIDEMPKNGLKKVEELKKVEEVKKVIEDAC

SEQ ID NO: 5875 - protein, 578 aa, Arabidopsis thaliana
  Clone ID: ARATH-23APR03-C17067_1.p
MVSHKCVEEFGYASYLVPSNARAPRSARKRRSIEKRISKEDDNMCAIDLLATVAGHLSFESGSSLMSIDKLIEDHRVKEEFPEEEKPLMPVALSPYRGSLSPCGFSSVINGKVENEVDGFSYSGGSDACQVGNFSQDVKPDIDGDAVVLDARPNVVVSLGSSSRTEVPSIGNCVSHGVRDDVNLFSRDDDENFSKYIHPRVTKHSPRTVPRIGDRRIRKILASRHWKGGSRHSDTKPWRNYYLHQQRSYPIKKRKNFDHISDSVTDDYRMRTKMHRGSRKGQGASFVASDSHVKLRIKSFRVPELFIEIPETATVGSLKRMVMEAVSTLLSDGHRVGLMVQGKKVRDDNKTLHQTGISQDNSHLDSLDFSLEPSSEMPQLLTSHPLGHACEELLPVCQATKIDNVLESDHHDSALFPSDSLGNNNVTEDSKAMISVALNELSSQSQPPSRKSRRSEQQQQQAAQRRIRRPFSVAEVEALVQAVEKLGTGRWRDVKLCAFEDADHRTYVDLKDKWKTLVHTAKISPQQRRGEPVPQELLNRVLNAHGYWTQQQMQQLQQNVNKLEQETQSQTTEGLLLL

SEQ ID NO: 5876 - protein, 278 aa, Arabidopsis thaliana
  Clone ID: ARATH-23APR03-C17076_1.p
MALPSTVSSPSFKSTPPYLSAFNPKPLHLPATYRSINRRSCKLLSFRCSSSSFSEKHHNNANPPKSDDLVELPLFPLPLVLFPGATIPLQIFEFRYRVMMQTLLQSDLRFGVVYSDAVSGSAAGIGCVGEIVKHERLVDDRFFLICKGQERFRVTDLVRTKPYLVAKVTWLEDRPSGEENLDELANEVEVLMKEVIRLSNRLNGKPDKESQDLRKNQFPTPFSFFVGSTFEGAPMEQQALLELEDTAARLKRERETLRNTLNYLTAASAVKDVFPSQP

SEQ ID NO: 5877 - protein, 836 aa, Arabidopsis thaliana
  Clone ID: ARATH-23APR03-C17086_1.p
MNKQRRRNVQAHGCLARMVNLFDFGTVGNGKKLLTEKPHFDHGSIKGNQFDQIEDKVDVRNGGVNGTPMKMLLEQEMSKEMEVKLSSTNLVAKLMGLDSFPQTQSAPRSYSSKPRLKRSLSHGEYKNVYEIWQKEGELSSNGVEGLSKKKMDIVREKFLEAKRLVTDDELRHSKEFQEAMEVLSSNKELFLEFLQESNNFFSHHLHSFQSTDPPTSEKSKRITILKPSKTVADEKFGNEPAIESSRDGSKSGKGLDFFKWPVEEEYPTKQSTRIVVLKPNGQVTKASSCPTSPRGFEGRESRDVARRVKSQILKEETLQSSVFSNGYICDDSSLNDYADSEIMSPVSRHSWDYINKYDSPFSSSPFSRASGSPESSSVCREAKKRLSERWALMAAANENLQEAKVIEKKGSNISLGDMLALPDLREDLITEEEETSNGNEQEGPKVSASCFDGNFSREEGKLKPPKGLTRSKSLPESSTSLGHKSLDSSNKSKSSRVPEELTKSKSLKWSLKGKVSNFLFSRSKKASKERSYEESPEILDSRCNNEYDASVSARIMTSREGGLSITKPTIFGNSSEWRDEPSPISVLETSFDEEDGIFFNSSILNRSSSSLEREMKSNLLGKSPPIGSIGRTLSFDDSTVARCYSSKRSTTSARDEEEDLRLLINTLLSAADLDAISDNLLSKWHSSESPLDPSLRNSYADSTEQKRLGSNVKNLVFDLVNTLLLELTPSYLGPRSSPMILSGKPLGVYVINRMQECLTGNGRVEDRWWDEDGDLSSLAVNKVVRIEVAEIGSQESLRLEMDSMGEELELKLLEELVEEALMDLSEQSKLFIPSIC

SEQ ID NO: 5878 - protein, 378 aa, Arabidopsis thaliana
  Clone ID: ARATH-23APR03-C17092_1.p
MEPFVVKENIVASASSPMKKRRIDHTESADGSAINASNSSSIGGNDTVMNMAEFGNDNSNNQESQQVCTFFKKPTKSKNIRKRTIDADEEDGDSKSESSILQNLKKVAKPDSNLYFSSGPSTRTSGAPERPVFHYDSSKEIQVQNDSGATATLETETDFNQDARAIRERVLKKADHALKGNKKKASDEKLYKGIHGYTDHKAGFRREQTISSEKAGGSHGPLRASAHIRVSARFDYQPDICKDYKETGYCGYGDSCKFLHDRGDYKPGWQIEKEWEEAEKVRKRNKAMGVEDDDDEADKDSDEDENALPFACFICRDPFLDPVVTKCKHYFCEHCALKHHTKNKKCFVCNQPTMGIFNAAHEIKKRMAEERSKAEQGL

SEQ ID NO: 5879 - protein, 429 aa, Arabidopsis thaliana
  Clone ID: ARATH-23APR03-C1713_1.p
MAASTSSSSSSSSSSLSSPSPCTWRYMTFTSFHGPDVRNTFLSHLRKQFNTNGITMFDDQRMERSQTLAPTLTQAIRESKIYIVLLSKNYASSSWCLDELLEILNCKEKRGQRVMTIFYGVNPSDVRKQTGEFGIAFNETCARKTEEERRKWSHALTCVGNITGVHVQDRDDEANMIEKIATDVSEKLNATESKDFDEMVGIKAHLTKIESLLSLDYDKVKIVGISGPAGIGKSTIARALHNLLSSSFHLSCFMENLISQSNPHSSLEYSSKLSLQEQLLSQVLNEKDIRIRHLGAIQERLHDQRVLIILDDVTSLEQLEVLANIKWYGPGSRIIVITKKKDILVQHGICDIYHVGFPTDADALKIFCLSAYRQTSPPDGSMKIHECEMFIKICGNLPLHLHVLGSALRGRSYGRVQSLCNLVSLADFV

SEQ ID NO: 5880 - protein, 351 aa, Arabidopsis thaliana
  Clone ID: ARATH-23APR03-C172184_1.p
MKKQYLKSGSGTRKEKDKAKRWFLDNGSIFLRELVADCNGKSIPIRSFSPEQILKATNNFDSSCFVSQDVYYKWYRGEIEDRSYMIKRFSEDEITGKRHRVKEVYNDIVLSARMSNHSNFLQLLGCCLEFPFPVLVFEFAEHGAMNQRGGVIVNGEESLLPWSVRLKIGKEIANAVTYLHTAFPKIIIHRDVKPMHVFLDKNWTAKLSDLSFSISLPEGKSRIEAEWVLGTFGYIDPLYHKTCFVTEYTDVYSFGICLLVIITGKPAIMTISDGDLQGILSLVRELCENGKLDEVIDPRLMKDITSGQRLQVEACVVLALRCCKERDEDRPKMIQVAKELKQIEASLKNSS

SEQ ID NO: 5881 - protein, 1013 aa, Arabidopsis thaliana
  Clone ID: ARATH-23APR03-C172367_1.p
MEESSMAQASLICLLLSFSIIMLSNAADISIDCGSSSSHIDADNRTWVGDTDFVATGLTSKFVPFSKFPAELTTLRYFPTGETNCYTNIPVEKGGKVLVRTRFLYGDYDEESTYPTFDVVYDGKHRYSVVTTTFETVTESEAIFIPENGNISVCFFRTLSSKTPFVSTIEVRRLDDSMYTDLGPKEGFILQQRIAYGAQELVSDYQFALYHVVHGRIKPELTIFGKLTVRRSKVKEQPTSIWFPYDPYDRIWMPASVFASHLTSSATSIDTTGADNRPPEIILRTSWSQKDMAFYDIKLPFSGVTFYIVIYFSEPLSLGSDQKRSFNVYYEDKQVGSDLIVPPFGAVTQASLRDVVKTELAYLTFEATPDSTLDPLINALELYVISNSGGSGNGTNSTSTSGGGSPSPGGGSGSPPSTGGGSGSPPSTGGGGGSPSKGGGGGKSGKSGEEKSSSNLALPLGISLPTLLSLGAGGWGVWKYFIKPRRHPESECSATQTEYKFTSEYGKRNSSECWAMTTTYIYYMRIHLHSSPFNTGKVLQFRRSRFSHTPSSSSSRYRTLVAQLGFRPDSFDFIKDHAENLLYTIADAAVSSSETFESVAGTTTKTTQSNDWFSGIANYMETILKVLKDGLSTVHVPYSYGFAIILLTVLVKAATFPLTKKQVESAMAMKSLTPQIKAIQERYAGDQEKIQLETARLYKLAGINPLAGCLPTLATIPVWIGLYRALSNVADEGLLTEGFFWIPSLAGPTTVAARQNGSGISWLFPFIEGHPPLGWPDTLAYLVLPLLLVFSQYLSIQIMQSSQSNDPAMKSSQAVTKLLPLMIGYFALSVPSGLSLYWLTNNILSTAQQVWLQKYGGAKNPVEKFTNLVTKEDKTQQIENSFSEPLVQKSVSELKIPREKGGEKVTPECPKPGERLLKEQEAKRRREKEERQKAEAALSNQNTDKAHEQDEKSDTAIVAEDDKKTELSAVDETSDGTVAVNGKPSIQKDETTNGTFGIGHDTEQQHSHETEKR

SEQ ID NO: 5882 - protein, 629 aa, Arabidopsis thaliana
  Clone ID: ARATH-23APR03-C172675_1.p
MALSVFAFPSYINRNPSLKYLKPSSMSSTKYSKVRATTFSEKGEYYSNRPPTPLLDTINHPMHMKNLSIKELKVLSDELRSDVIFNVSKTGGHLGSNLGVVELTVALHYIFNTPHDKILWDVGHQSYPHKILTGRRGKMKTIRQTNGLSGYTKRRESEHDSFGTGHSSTTLSAGLGMAVGRDLKGMNNSVVSVIGDGAMTAGQAYEAMNNAGYLHSNMIVILNDNKQVSLPTANLDGPTQPVGALSCALSRLQSNRGMIRETSSTLFEELGFHYVGPVDGHNIDDLVSILETLKSTKTIGPVLIHVVTEKGRGYPYAERADDKYHGVLKFDPETGKQFKNISKTQSYTSCFVEALIAEAEADKDIVAIHAAMGGGTMLNLFESRFPTRCFDVGIAEQHAVTFAAGLACEGLKPFCTIYSSFMQRAYDQVVHDVDLQKLPVRFAIDRAGLMGADGPTHCGAFDVTFMACLPNMIVMAPSDEAELFNMVATAAAIDDRPSCFRYHRGNGIGVSLPPGNKGVPLQIGRGRILRDGERVALLGYGSAVQRCLEAASMLSERGLKITVADARFCKPLDVALIRSLAKSHEVLITVEEGSIGGFGSHVVQFLALDGLLDGKLKVYRTWITNGSTS

SEQ ID NO: 5883 - protein, 341 aa, Arabidopsis thaliana
  Clone ID: ARATH-23APR03-C17373_1.p
MMKIQPINNDLPANRVESSTKPVLKSRLKRLLDRPFTRISNSEKLLISGDGVVAGTEFEPSLAKMVQNYMEENNDKQTKNGRNTHRCNCFNGNNDISDDELDFFDYDNFKSLIQCGSFVEKSLLVEATKIIEKNKSVKRKDELRKIVVDELSSLGYDSSICKSKWDKTRSIPAGEYEYIDVIVNGERLIIDIDFRSEFEIARQTSGYKELLQSLPLIFVGKSDRIRQIVSIVSEASKQSLKKKGMHFPPWRKADYMRAKWLSSYTRNSGEKKPTVTSAAKVVAEPELDSSEIELIFEEKVLLPPLKSPITSVGRDDDDVAESVKKEAKVVTGLALLFKENH

SEQ ID NO: 5884 - protein, 399 aa, Arabidopsis thaliana
  Clone ID: ARATH-23APR03-C173921_1.p
MDVYEATRIVLSRIQNLDPANASKIIGLLLLQDHGEKEMIRLAFGPQNLLHSVIAKAKKDLEERLSFLTPRTAEDFESDLGFGWGHRKEVLRSNSVPPRLANQFTGYPFSPKGVNLQQSEAQRAAALMMGDDLHKLGIWRPERIDLSATACPASRQIYLTFPADSIFREEDVSDYFSTFGPVQDVRIPYQQKRMFGFVTFMYPETVKSILAKGNPHFVCHSRVLVKPYKEKGKVPDKYRTKPSRDIMDFQLDLLWKRRFEERALELQSTRLMNLQLLDVEKQFQLNFDQTLLVSPRLVSNNQRVCTKENDEDTIKLPESLEDDRLVDSPIVSPKHHFLECGVAAETKGSGLSSPSFDQDESSTGTLKEPLKSLKCQMPRLSMMGITQGSSGPTTCRVGI

SEQ ID NO: 5885 - protein, 466 aa, Arabidopsis thaliana
  Clone ID: ARATH-23APR03-C174037_1.p
MLYEGYLKYMKAKYGERSQGTYFMAGEDLISKLPDSLITQILLYLPIKDIVRTSSLSSRWKSLWLLIPRLDLDSEEFQDYNAFVGFMNKFIDFSGEEKICLDKLKLSSRKTVNDLPCVTRWIDFVVRRKLKHLDVECLVNRKFLEEMPLSLYVCDTLVNLRLHRVLLGKFEAVSLPCLKTMRLEENVSANEVVLASLISPCPVLKDLIILRMFEDNVKVLRVHSLTLTSLNIDFNFGEGDDFVDGFDKKVSGVLIDAPRLKYLKFQDDLSGSKIITNSGSLAKVNVVYVFNENDCADVVDIPRRNMVRNFLTSISGVSDMKISQHFVEFLYYYKDFDPLPQFCNLSRLKAEISLYFLEILPTILESCPNLKSLVMVLEFYLQEEDEPIIFSSVPRCLVSSLESVEIKKFNGRPAKMEVARYFLENSGVLQKLVLHLRCSTHEDGFYILKDLLALPRGSSTCRIVVC

SEQ ID NO: 5886 - protein, 583 aa, Arabidopsis thaliana [sequence omitted]

SEQ ID NO: 5887 - protein, 583 aa, Arabidopsis thaliana
  Clone ID: ARATH-23APR03-C1751_1.p
MEVQSSSNNGGHSSFSSLRVYLNSLSATPSRLSRRAISVSTSSDEMSRVRAVSGEQMRRTLRWYDLIGLGIGGMVGAGVFVTTGRASRLDAGPSIVVSYAIAGLCALLSAFCYTEFAVHLPVAGGAFSYIRITFGEFPAFFTGANLVMDYVMSNAAVSRSFTAYLGTAFGISTSKWRFVVSGLPKGFNEIDPVAVLVVLVITVIICCSTRESSKVNMIMTAFHIAFIFFVIVMGFIKGDSKNLSSPANPEHPSGFFPFGAAGVFNGAAMVYLSYIGYDAVSTMAEEVENPVKDIPVGVSGSVAIVTVLYCLMAVSMSMLLPYDLIDPEAPFSAAFRGSNGWEWVTKVVGIGASFGILTSLLVAMLGQARYMCVIGRSRVVPFWFAKIHPKTSTPVNASTFLGIFTAALALFTDLNVLLNLVSIGTLFVFYMVANALIFRRYVPVGPTKPWPTLCFLTLFSITSLVFTLIWKLVPEGKPKAFMLGASAVVAIAIVLSFQCVVPQARKPELWGVPFMPWTPCVSIFLNIFLLGSLDAPSYVRFGFFSGLIVLVYLFYGVHASSDAEANGSFGVKDGQVMKELIEV

SEQ ID NO: 5888 - protein, 1192 aa, Arabidopsis thaliana
  Clone ID: ARATH-23APR03-C17733_1.p
MAFLTALFLFLFFSFSSSAIVDLSSETTSLISFKRSLENPSLLSSWNVSSSASHCDWVGVTCLLGRVNSLSLPSLSLRGQIPKEISSLKNLRELCLAGNQFSGKIPPEIWNLKHLQTLDLSGNSLTGLLPRRLSELPQLLYLDLSDNHFSGSLPPSFFISLPALSSLDVSNNSLSGEIPPEIGKLSNLSNLYMGLNSFSGQIPSEIGNISLLKNFAAPSCFFNGPLPKEISKLKHLAKLDLSYNPLKCSIPKSFGELHNLSILNLVSAELIGLIPPELGNCKSLKSLMLSFNSLSGPLPLELSEIPLLTFSAERNQLSGSLPSWMGKWKVLDSLLLANNRFSGEIPHEIEDCPMLKHLSLASNLLSGSIPRELCGSGSLEAIDLSGNLLSGTIEEVFDGCSSLGELLLTNNQINGSIPEDLWKLPLMALDLDSNNFTGEIPKSLWKSTNLMEFTASYNRLEGYLPAEIGNAASLKRLVLSDNQLTGEIPREIGKLTSLSVLNLNANMFQGKIPVELGDCTSLTTLDLGSNNLQGQIPDKITALAQLQCLVLSYNNLSGSIPSKPSAYFHQIEMPDLSFLQHHGIFDLSYNRLSGPIPEELGECLVLVEISLSNNHLSGEIPASLSRLTNLTILDLSGNALTGSIPKEMGNSLKLQGLNLANNQLNGHIPESFGLLGSLVKLNLTKNKLDGPVPASLGNLKELTHMDLSFNNLSGELSSELSTMEKLVGLYIEQNKFTGEIPSELGNLTQLEYLDVSENLLSGEIPTKICGLPNLEFLNLAKNNLRGEVPSDGVCQDPSKALLSGNKELCGRVVGSDCKIEGTKLRSAWGIAGLMLGFTIIVFVFVFSLRRWAMTKRVKQRDDPERMEESRLKGFVDQNLYFLSGSRSREPLSINIAMFEQPLLKVRLGDIVEATDHFSKKNIIGDGGFGTVYKACLPGEKTVAVKKLSEAKTQGNREFMAEMETLGKVKHPNLVSLLGYCSFSEEKLLVYEYMVNGSLDHWLRNQTGMLEVLDWSKRLKIAVGAARGLAFLHHGFIPHIIHRDIKASNILLDGDFEPKVADFGLARLISACESHVSTVIAGTFGYIPPEYGQSARATTKGDVYSFGVILLELVTGKEPTGPDFKESEGGNLVGWAIQKINQGKAVDVIDPLLVSVALKNSQLRLLQIAMLCLAETPAKRPNMLDVLKALKEI

SEQ ID NO: 5889 - protein, 463 aa, Arabidopsis thaliana
  Clone ID: ARATH-23APR03-C1773_1.p
MVIGSGVFLTRTCYLRLQPPSLVLRRRFCAATTACSVPLNGNKKKKSEKEKVIVISGPTGAGKSRLAMELAKRLNGEIISADSVQVYKGLDVGSAKPSDSDRKVVPHHLIDILHPSQDYSVGQFYDDGRQATKDILNRGRVPIVTGGTGLYLRWFMYGKPDVPKPSPEVIAEAHDMLVGFQTEYNWDAAVELVVNAGDPKASSLPRNDWYRLRRSLEILKSTGSPPSSFRIPYDSFRVNLVAPDADDFLEDGSSADISIQNIETDLDYDFLCFFLSSPRVALYRSIDFRCEDMLSGPNGVLSEARWLLDLGLLPNSNPATRAIGYRQAMEYLLQCRRYEGESSPREFYAFLNKFQTASRNFAKRQMTWFRCEPMYHWLNASKPLDSILQCIYDAYESEAEMVEIPESLRMSKDVRDSREASELKGYRSKNRHFVRREDCSSVLEWIRSEGCKSEASCVESAIA

SEQ ID NO: 5890 - protein, 133 aa, Arabidopsis thaliana
  unsure (1)..(133): unsure at all Xaa locations
  Clone ID: ARATH-23APR03-C17780_1.p
GKGAHANKREGGPPXRAAPGQPPKGAGREGGGKXSGKTKXPQETTKAEISPPPKFSPPSPTPNPPPPPPNPPPPPGGAPRGSGPPPPFFVTSPPPPPPPSSLLQPFPLLRFLKNLLLAYLVLILSFVGFRLFD

SEQ ID NO: 5891 - protein, 326 aa, Arabidopsis thaliana
  Clone ID: ARATH-23APR03-C17790_1.p
MDQAKGKVCVTGASGFLASWLVKRLLLEGYEVIGTVRDPGNEKKLAHLWKLEGAKERLRLVKADLMEEGSFDNAIMGCQGVFHTASPVLKPTSNPEEEILRPAIEGTLNVLRSCRKNPSLKRVVLTSSSSTVRIRDDFDPKIPLDESIWTSVELCKRFQVWYALSKTLAEQAAWKFSEENGIDLVTVLPSFLVGPSLPPDLCSTASDVLGLLKGETEKFQWHGQMGYVHIDDVARTHIVVFEHEAAQGRYICSSNVISLEELVSFLSARYPSLPIPKRFEKLNRLHYDFDTSKIQSLGLKFKSLEEMFDDCIASLVEQGYLSTVLP

SEQ ID NO: 5892 - protein, 316 aa, Arabidopsis thaliana
  Clone ID: ARATH-23APR03-C17871_1.p
MATFHTVRDAVKLFDAGISGGKHLNKGQEEGVLVEETNLCLWNKEVNKLKEKIKNAVKTKIEALLELEEAKKTVEQLSQELGIKRNMINDEKDLDLSSSVRVVTSELGVAKESIHRVAEEESELCMLMESLKLELQNVEKAHSELKEIEQRERDHQAIEDLKKETKDAKTQLSLLEEELKIAVFEAQEAKDAEEHARERLNVAVLESDFRSLAVVKESAAEELTETEALRACRDETLKTLEMSEREIEDIKAATQDALKKAEMAQEATIVVDVELKRRRKAASRILAESKMCAKSTKEVLKSKPRSSSKEGCLVKC

SEQ ID NO: 5893 - protein, 406 aa, Arabidopsis thaliana
  Clone ID: ARATH-23APR03-C17873_1.p
MAVISSLLFPPVLTRRTITICSNSSKSMAAKKQIGEETSKRVFVCGGGVIGVCTAYFLAKKGIAVTLVEKSAVACAASGKAGGFLAFDWCDGSPVAHLARASFKLHRSLAEELNGVESYGYRALTTLSVTVTESKPGSGGLGLPDWVNGPAKSTSTIGTTQTTAQVHPQLFTRKLLSTAREKYGVEVVIGKLEEVRVESGRVNSVVLEGGRVIDTDVVVLAMGPWSSKFELLSSIFRVYCTKAHSIVLEPKEPNAITPHALFLTYRPAHGGEALDPEVYPRPTGEVYICGMSSQEEVPDDADQVTSNPESIQVLKRVAKTVSSYLNEENALVKAEQACFLPSTEDGVPVIGEIPGIKGCYVGTGHSCWGILNGPATGAALAELIVDGVATSVDLSRFSPSRFSKRR

SEQ ID NO: 5894 - protein, 1011 aa, Arabidopsis thaliana
  Clone ID: ARATH-23APR03-C17876_1.p
MLLPLFHQQPLILAKTFPDRIFPPFLVPNTLVSRRNVSRANSGIFCSSASGRKTLPQSAIQRIAEKLRSLGFVEEKHDSPTRRITGEESGKNSPGEIFVPLPKQLPIHRVGHTIDTSWSTPSYPVPKPGSGTAISRYHELKRVWKKETEMERKKEEKVPSLAELTLPPAELRRLRTVGIRLTKKLKIGKAGITEGIVNGIHERWRTTEVVKIFCEDISRMNMKRTHDVLETKTGGLVIWRSGSKILLYRGVNYQYPYFVSDRDLAHEAASGASSMDQGVVDSREKQSIAESSAPSITNKMVKPMLTQGVGSPDKVRFQLPGEVQLVEEADRLLEGLGPRFTDWWAYDPLPVDGDLLPAVVPDYRRPFRLLPYGVSPKLTDDEMTTIRRLGRPLPCHFALGRNRNLQGLAVAIVKLWEKCELAKIAVKRGVQNTNSELMAEELKWLTGGTLISRDKDFIVLYRGKDFLPSAVSSAIEERRRQTMIMENSSVHGNKLTENEEEIKPRAVKEDIELEAKDQKDHIQTHQMKSRQRNSPEAILEKTSMKLSMALEKKANAEKVLADLENRESPQLSDIDKEGITNDEKYMLRKIGLKMKPFLLLGRRGVFDGTIENMHLHWKYRELVKIICNEYSIEAAHKVAEILEAESGGILVAVEMVSKGYAIIVYRGKNYERPQCLRPQTLLSKREALKRSVEAQRRKSLKLHVLKLSNNIEELNRQLVEDSATNETWSDGESSNMMVEEETENQHTEPEKAREKIELGYSSDLSVPSSGEENWEDDSEGEVDPLTTSSQEYQEDESESASSQRHEGNSLDSTANLSVFAETGSANASSFHDRSLPHNSFLNANRKLPGSSTGSGSQISALRERKSENDGLVTDLSNRERLILRKQALKMKKRPPFAVGRSNVVTGLARTLKMHFQKNPLAIVNVKGRANGTSVQEVIAKLKEETGALLVSQEPSKVILYRGWGAEEEMKSFYPNNNVKSSINLPSTRSFVDDPPHVSPALIEAIRLECGL

SEQ ID NO: 5895 - protein, 506 aa, Arabidopsis thaliana
  unsure (1)..(506): unsure at all Xaa locations
  Clone ID: ARATH-23APR03-C17878_1.p
MTRVKCIGRHSIFGNLDRQISLQRDGDPSVSADVEFASSRFPKFIIEAKYQIIVIRCEPKVMSMKEVVTCGTGQNICQXKRSSIHVLAHKFEAGXAAADKLSEEVYLKVASLIDIHGLLKKLRDYLESLXDIWHLLRCNXIEEAIAMVEALSFQLNQREGELFIEKAEVKKLASFLKQASEDAKKLVDEERAFARAEIESARAAVQRVEEALREHEQMSRASGKQDMEDLMKEVQEARRIKMLHQPSRVMDMEYELRALRNQLAEKSKHFLQLQKKLAMCRKSEENISLVYEIDGTEALGSCLRVRPCSNDAPDLSKCTIQWYRSSSDGSKKELISGATKSVYAPEPFDVGRVLHADIIYDGHSLSLSTVGKIDPAAGLGSYVEALVRKHDVDFNVVVTQMSGEDHTSESIHLFHVGKMRIKLCKGKTVIAKEYYSSAMQLCGVRGGGNAAAQALYWQAKKGVSFVIAFESERERNAAIMLARRFACDCNVTLAGPEDRTETGQSP

SEQ ID NO: 5896 - protein, 927 aa, Arabidopsis thaliana
  Clone ID: ARATH-23APR03-C1787_1.p
MKSNSKVNINNNGDNHNQTKNNGTNGFLPNSLKFISTCIRTASSGVRSASASVAASLSSDSHELKDQVLWSSFDRLHTSESSFKNVLLLGYTNGFQVLDIDDSNDVTEFVSRRDDPVTFLQMQPLPAKCDGVEGFRSSHPILLAVADEAKGSGPIVTSRDGSVRNGYEDPLALSPTVVRFYSLRSHNYVHVLRFRSTVYMVRCSPRIVAVGLGSQIYCFDALTLENKFSVLSYPVPQLGNQGISGVNVGYGPMAVGARWLAYASNSPLSSSIGRLSPQNVTPPGVSPSTSPNNGNLVARYAMESSKHLAAGLLNLGDKGYKTISKYCQDLKHDGPGPSLSSSPGRKVGRVGSHSAESDVVGTVIVKDFESRAIIAQFRAHTSPISALCFDPSGTLLVTASIHGNNINVFRIMPTPTKNGPGAQSYDWSSSHVPLYKLHRGMTSAVIQDICFSSYSQWIAIVSSKSTCHIYVLSPFGGENVLEIRNSQFDGPTLAPTLSLPWWSSPSFMTTHFSYPPPASVTLSVVSRIKCNNFFHAASSVVGKPTFPSGCLAAVFHQSVPQESQSSSPALDYLLVYTPSGHVVQYKLIPSLGGDQAESNTRNGATSGLTSEEELRVKVEPVQCWDVCRRADWPEREENICGLTYGGRKNAELTVDTSDSEDQTKPLEKHHVYLANAEVLINSGRKPIWQNSEISFYPMYPPDSDGKNLNSHQGGGETEIGKVSANEVDIRRKDLLPVYDNFHSVYTSMRNRGFSGERDSDSSSSSDPGQVKEMHPFNGMVYPEDEERRGSAHFALTPNQNPHTGIVTFKQPVVSISSAVKDTDYIDDDAHVLPKNASLPAETKIENSSGISGDSNVSSNRSDMSMNAADEGEGPIDGSPNFEQFFEEVVSNETVTETEHKDAPSDGKLDDDEDDDMLGGVFAFSEEG

SEQ ID NO: 5897 - protein, 608 aa, Arabidopsis thaliana
  Clone ID: ARATH-23APR03-C17880_1.p
MKASIEKLRRLTSHSHKVDVKEKGDVMATTQIDELDRAGKDMQDMRECYDRLLAAAAATANSAYEFSESLGEMGSCLEQIAPHNDEESSRILFMLGKVQSELQRLLDTYRSHIFETITSPSEALLKDLRYVEDMKQQCDGKRNVYEMSLVKEKGRPKSSKGERHIPPESRPAYSEFHDEATMCIFRLKSLKEGQARSLLIQAVRHHTAQMRLFHTGLKSLEAVERHVKVAVEKQHIDCDLSVHGNEMEASEDDDDDGRYMNREGELSFDYRTNEQKVEASSLSTPWATKMDDTDLSFPRPSTTRPAAVNADHREEYPVSTRDKYLSSHSAPLFPEKKPDVSERLRQANPSFNAYVLPTPNDSRYSKPVSQALNPRPTNHSAGNIWHSSPLEPIKSGKDGKDAESNSFYGRLPRPSTTDTHHHQQQAAGRHAFSGPLRPSSTKPITMADSYSGAFCPLPTPPVLQSHPHSSSSPRVSPTASPPPASSPRLNELHELPRPPGHFAPPPRRAKSPGLVGHSAPLTAWNQERSTVTVAVPSATNIVASPLPVPPLVVPRSYSIPSRNQRVVSQRLVERRDDIVASPPLTPMSLSRPLPQATGVAQTSQIRGY

SEQ ID NO: 5898 - protein, 599 aa, Arabidopsis thaliana
  unsure (1)..(599): unsure at all Xaa locations
  Clone ID: ARATH-23APR03-C1788_1.p
MATLRISSALIYQNTLTHHFRLRRPHRFVCKSMTKTTPDTNPVELRRRSGNYQPSSWDHCYLLSIENKYVSEKEVITRDVLKKKVKSMLEDEKKSRLEQLELIDDLQKLGVSYHFEIEINDILTDLHLKMGRNSWKCDKEEDLHATSLEFRLLRQHGFXDVSENIFDVIIDQIESNTFKTNNINGIISLYEASYLSTKSDTKLHKVIRPFATEQIRKFVDDEDTKNIEVREKAYHALEMPYHWRMRRLDTRWYIDAYEKKHDMNLVLIEFAKIDFNIVQAAHQEDLKYVSRWWKDTCLTNQLPFVRDRIVENYFWTVGLIYEPQFGYIRRIMTIVNALVTTIDDIYDIYGTLEELELFTSMVENWDVNRLGELPEYMRLCFLILYNEINGIGCDILKYKKIDVIPYLKKXDLCRTYLVEAKWYKRGYKPSLEEYMQNAWISISAPTILIHFYCVFSDQISVQNLETLSQHRQHIVRCSATVLRLANDLGTSPTELARGDVLKSVQCYMHETGASEERARDHVHQMISDMWDDMNSETKTACNSSSRSRGFKEAAMNLARMSQCMYQYGDGHGCPEKAKTIDRVQSLLVDPIPLDVNRLG

SEQ ID NO: 5899 - protein, 1038 aa, Arabidopsis thaliana
  Clone ID: ARATH-23APR03-C17904_1.p
MGTENQGYPNFPARPASSPFASAPPPGIPPQSGGPPTGSEAVGFRPFTPSASQPTRPFTASGPPPAPPVGTMRPGQPSPFVSQIPGSRPPPPSSNSFPSPAYGPPGGAPFQRFPSPPFPTTQNPPQGPPPPQTLAGHLSPPMSLRPQQPMAPVAMGPPPQSTTSGLPGANAYPPATDYHMPARPGFQQSMPPVTPSYPGVGGSQPSFPGYPSKQVLQAPTPFQTSQGPPGPPPVSSYPPHTGGFAQRPNMAAQQNLHPNYAPPPSNVQGLTEDFNSLSLSSIPGSLEPGLDHKSFPRPLDGDVEPNSFAEMYPMNCHSRYLRLTTSAIPNSQSLASRWHLPLGAVVCPLAETPEGEEVPLIDFGSTGIIRCRRCRTYVNPFVTFTDSGRKWRCNICSMLNDVPGEYFSHLDATGRRMDMDQRPELTKGSVEIIAPTEYMVRPPMPPIYFFLIDVSISATKSGMLEVVAQTIKSCLDNLPGYPRTQIGFITYDSTLHFYNMKSSLSQPQMMVVSDLDDIFVPLPDDLLVNLSESRTVVDAFLDSLPLMFQDNFNVESAFGPALRAAFMVMNQLGGKLLIFQNSLPSLGAGRLKLRGDDPRVYGTDKEYALRVAEDPFYKQMAADCTKFQIGINVYAFSDKYTDIASLGTLAKYTGGQVYYYPGFQSSVHGDKLRHELARDLTRETAWEAVMRIRCGKGIRFSSYHGNFMLRSTDLLALPAVDCDKAYAMQLSLEETLLTSQTVYFQVALLYTASCGERRIRVHTSVAPVVTDLGEMYRQADTGSIVSLYARLAIEKSLSAKLDDARNAIQQKIVKALKEYRNLHAVQHRLGSRLVYPESLKFLPLYGLAITKSTPLLGGPADTSLDERCAAGFTMMALPVKKLLKLLYPNLFRVDEWLLKPSAAHDDFKDVLRRLPLAAESLDSRGLYIYDDGFRLVLWFGRMLSPDIAKNLLGVDFAADLSRVTFQEQENGMSKKLMRLVKKLRESDPSYHPMCFLVRQGEQPREGFLLLRNLIEDQMGGSSGYVDWILQLHRQVQQN

SEQ ID NO: 5900 - protein, 192 aa, Arabidopsis thaliana
  Clone ID: ARATH-23APR03-C17907_1.p
METATGEITIVCNHCDRDIPSLNIDLHRVHCARNLEKCKICGDMVPKKHAEEHYLNTHAPIACSMCKETIEREIFDSHKGEICPKRIVTCEFCEFPLPAVDLAEHQEVCGNRTELCYQCNSYVRLRERYNHETKCPGTVESSRRIPRAAEGDGNGRRRRDGNGVSNKRLFFTIAITGIAVIIGSLFFQRKPE

SEQ ID NO: 5901 - protein, 516 aa, Arabidopsis thaliana
  Clone ID: ARATH-23APR03-C17940_1.p
MAEKKELGLPKPSINLKEQLARTTLKNLRLQGHTYIELREDGKRFVFFCTLCLAPCYSDTILLGHLNGNLHKERLACARITLLGTNPWPFSDGVLFFDSSTGEEEEKSPVSGGEGVPDTLEHCSDDERFAIVKYDNNKTNGDNVPAAVTDDEPSHAADDLLISGVLIKERTLDVEAKFIGFGRIAARLFETKGRTTWIDKLWCEWLGDEGPSDEEKATIPEHDFAIVTFSYFYNLGRLGLLDDPGRLLTSSQSESGNGEDSGRKRKKSFSDPEDTSESLCNQYDSSEEVSSGHNSNSSRDLIADYDDSLMSKRVVKNRTVRRELRRQQRIFSERICEVCKQKMLPGKDAAAILNMKTGNLACGSRNLLGAFHLFHVSCVVHWFLFCESEILGNKMVSGKGKKRCTKHSGQTGVKWNELANDVSWQIFSVFCPECQGTGINIEGAVIERDTFPLSQTWRFQVKVSEGRKAWVKNPERLKNCSTGFHFPQQAEETEQIPVQEERVQMMKLVRFYRVEL

SEQ ID NO: 5902 - protein, 1067 aa, Arabidopsis thaliana
  Clone ID: ARATH-23APR03-C17941_1.p
MAILHFSLPLIVSFLRPHASPRFFLLPRSLSQSPFLSRRRFHRTSAVSSAAVHHQSYRNPDDDVTRAVSVPTFQQAIQRLQEYWASVGCAVMQPSNTEVGAGTMNPCTFLRVLGPEPWNVAYVEPSIRPDDSRYGENPNRLQRHTQFQVILKPDPGNSQQLFINSLSALGIDVTAHDIRFVEDNWESPVLGAWGLGWEIWMDGMEITQFTYFQQAGSLPLSPVSVEITYGLERIIMLLQEVDHFKKILYADGITYGELFLENEKEMSSYYLEHASVDRLQKHFDYFDEEARSLLALGLPIPAYDQLLKTSHAFNILDARGFIGVTERARYFGRMRSLARQCAQLWLATRESLGHPLGVASEPVPPVCHRAALEKVAEKVSEDPRSFIIEIGTEEMPPQDVINASEQLRVLVLELLENQRLRHGAVKAFGTPRRLVVLVDAMSSKQLEEEVEVRGPPASKAFDDEGNPTKAAEGFSRRYGVPLEKLYRKVSGKTEYVHARVTEPARLALEVLSEDLPGILAKISFPKSMRWNSSVMFSRPIRWVMALHGDLVVPFSFAGISSGNVSCGLRNTASASLLVQNAESYEDTMRNSGINIEIEERKKIILEKSNALAKSVSGRLVVPQNLLNEVANLVEAPVPLIGKFKESFLELPEELLTIVMQKHQKYFSIIDESGQLLPYFIAVANGAINEDVVKKGNEAVLRARYEDAKFFYEVDTRKRFSEFRDQLQGILFHEKLGTMLDKMNRLKKMVSKLCLALKIDEDLLPVVEDAASLAMSDLATAVVTEFTALSGIMARHYALRDGYSEQIAEALLEITLPRFSGDVIPKTDAGMVLAIGDRLDSLVGLFAAGCQPSSTNDPFGLRRISYGLVQILVEKDKNVNFKRVLELAASVQPTKVEANTVEDVYQFVTRRLEQLLVDNGVSPEVVRSVLAERGNNPCLAARTAYKTEKLSKGEMFPKIVEAYSRPTRIVRGKDVGVGVEVDENAFETPQERTLWSTYTSIKDRIHTGIEIEDFTEISMQLVEPLEDFFNNVFVMVEEERVRKNRLALLNNIANLPKGVIDLSFLPGF

SEQ ID NO: 5903 - protein, 407 aa, Arabidopsis thaliana
  Clone ID: ARATH-23APR03-C1794_1.p
MELGSRRIYTTMPSKLRSSSSLLPRILLLSLLLLLFYSLILRRPITSNIASPPPCDLFSGRWVFNPETPKPLYDETCPFHRNAWNCLRNKRDNMDVINSWRWEPNGCGLSRIDPTRFLGMMRNKNVGFVGDSLNENFLVSFLCILRVADPSAIKWKKKKAWRGAYFPKFNVTVAYHRAVLLAKYQWQARSSAEANQDGVKGTYRVDVDVPANEWINVTSFYDVLIFNSGHWWGYDKFPKETPLVFYRKGKPINPPLDILPGFELVLQNMVSYIQREVPAKTLKFWRLQSPRHFYGGDWNQNGSCLLDKPLEENQLDLWFDPRNNGVNKEARKINQIIKNELQTTKIKLLDLTHLSEFRADAHPAIWLGKQDAVAIWGQDCMHWCLPGVPDTWVDILAELILTNLKTE

SEQ ID NO: 5904 - protein, 562 aa, Arabidopsis thaliana
  Clone ID: ARATH-23APR03-C17986_1.p
MLTKTNDSRLIDRSSGFDQRTGIYHSLRPSLSLPPIDQPLSAAEFALSLLLKSSPPATAGKNIEALTYLVNSSSGDNLTYGELLRRVRSLAVSLRERFPSLASRNVAFILSPSSLDIPVLYLALMSIGVVVSPANPIGSESEVSHQVEVSEPVIAFATSQTVKKLQSSSLPLGTVLMDSTEFLSWLNRSDSSSVNPFQVQVNQSDPAAILFSSGTTGRVKGVLLTHRNLIASTAVSHQRTLQDPVNYDRVGLFSLPLFHVFGFMMMIRAISLGETLVLLGRFELEAMFKAVEKYKVTGMPVSPPLIVALVKSELTKKYDLRSLRSLGCGGAPLGKDIAERFKQKFPDVDIVQGYGLTESSGPAASTFGPEEMVKYGSVGRISENMEAKIVDPSTGESLPPGKTGELWLRGPVIMKGYVGNEKASAETVDKEGWLKTGDLCYFDSEDFLYIVDRLKELIKYKAYQVPPVELEQILHSNPDVIDAAVVPFPDEDAGEIPMAFIVRKPGSNLNEAQIIDFVAKQVTPYKKVRRVAFINAIPKNPAGKILRRELTKIAVDGNASKL

SEQ ID NO: 5905 - protein, 394 aa, Arabidopsis thaliana
  Clone ID: ARATH-23APR03-C17998_1.p
MSSLSRFLLRGNFSFSTHTNRRFFSAVTAAAATPSPPKPSLITLVNDERDPKFITEKFKKACQAEWFRKNIAVYERTVRRLAAAKKFEWVEEILEEQNKYPNMSKEGFVARIINLYGRVGMFENAQKVFDEMPERNCKRTALSFNALLNACVNSKKFDLVEGIFKELPGKLSIEPDVASYNTLIKGLCGKGSFTEAVALIDEIENKGLKPDHITFNILLHESYTKGKFEEGEQIWARMVEKNVKRDIRSYNARLLGLAMENKSEEMVSLFDKLKGNELKPDVFTFTAMIKGFVSEGKLDEAITWYKEIEKNGCRPLKFVFNSLLPAICKAGDLESAYELCKEIFAKRLLVDEAVLQEVVDALVKGSKQDEAEEIVELAKTNDYLQCKLRLFPKE

SEQ ID NO: 5906 - protein, 1126 aa, Arabidopsis thaliana
  Clone ID: ARATH-23APR03-C18040_1.p
MMPPELQPRLFRPHITASTSEPTQSSSSYSPHMSPASTRNFIDRATPTSRSNNSRFSPSSFAYNGRIAIALVPCAAFLLDLGGTPVVATLTIGLLISYIVDSLNVKFGGFLGIWMSLLAAQISFFFSSSLFSSFNSVPLGLLAAFLCAQTTFLIGCWTSLQFKWLQLENPSIVVALERLLFACVPFTASSFFAWATISAVGMNNSSYYFLLFACVFYWIFAIPRVSSFKTKQEVKYHGGEIPDDSFILGQLESCFLSLNLMFMPLLFHVASHYSVIFSSAASVCDLLLLFFIPFLFQLYASTRGGLWWVTKDSHQLQSIRIVNGAIAMVIIVICLEIRVVFRSFGKYIQVPPPLNYLLVTTTLLGGAAGAGASVLGMISSALSSAFFTALSVIVSSAGAIVVGFPVLFTPLPAVAGLYFARFFTKKSVPSYFAFVALGSLMVIWFVMHNYWDLNIWLAGMFLKSFCKLIVANIIIAMVIPGLVLLPSKFHFLTEAGMVTHALLLCYIEDRFFNYSSIYYYGMEDDVMYPSYMVILTSLIGLAVVRRLFADHRIGQKAVWILTCLYSAKLAMLFLSSKSIVWVSAALLLAVSPPLLLYKMCREKSKSASKMKPWQGYAHAVVVAVSVWFCRETIFDALQWWHGRPPSDGLLLGSCIVLIGLACIPIVAFHFSHVLSAKRSLVLVVATGCMFILMQPPMPMTWSYHSDMIKAARQSADDISIYGFMASKPTWPSWLLIVSLLLILAAATSLIPIKYVVELRAFYSIAMGLALGVYISAEFFLQAAVLHALIVVTLVCASVFVIFTHFPSASSTKLLPWVFALLVALFPVTYLLEGQVRIKNDLNENVTWGWDTREEDKKVTTMLAIEGARTSLLGLYAAIFMLIALLIKFELTSLLREKFSERSGQSKTQGGARGIFPTRMRLMQQRRATSIQSFAVEKMSEEGAAWMPSVGNVATIMCFAICLILNIHLSGGSSQAIFFLAPILLLLNQDSDLLSGFGDKQRYFPVTVAISTYLALSSLYTVWEEVWFGGNTGWGVEIGGREWFFAVKNLALLILTAPGHIIFNRYVWSYTTKHTDASPMLTVPLSFAAVIITDVFQVRVLGVLGIVYSAAQYVISRQQYMKGLRYI

SEQ ID NO: 5907 - protein, 586 aa, Arabidopsis thaliana
  Clone ID: ARATH-23APR03-C18048_1.p
MATLTEPSSSLSFTSSHFSYGSIGSNHFSSSSASNPEVVSLTKLSSNLEQLLSNSDCDYSDAEIIVDGVPVGVHRCILAARSKFFQDLFKKEKKISKTEKPKYQLREMLPYGAVAHEAFLYFLSYIYTGRLKPFPLEVSTCVDPVCSHDCCRPAIDFVVQLMYASSVLQVPELVSSFQRRLCNFVEKTLVENVLPILMVAFNCKLTQLLDQCIERVARSDLYRFCIEKEVPPEVAEKIKQLRLISPQDEETSPKISEKLLERIGKILKALDSDDVELVKLLLTESDITLDQANGLHYSVVYSDPKVVAEILALDMGDVNYRNSRGYTVLHFAAMRREPSIIISLIDKGANASEFTSDGRSAVNILRRLTNPKDYHTKTAKGRESSKARLCIDILEREIRKNPMVLDTPMCSISMPEDLQMRLLYLEKRVGLAQLFFPTEAKVAMDIGNVEGTSEFTGLSPPSSGLTGNLSQVDLNETPHMQTQRLLTRMVALMKTVETGRRFFPYGSEVLDKYMAEYIDDDILDDFHFEKGSTHERRLKRMRYRELKDDVQKAYSKDKESKIARSCLSASSSPSSSSIRDDLHNTT

SEQ ID NO: 5908 - protein, 753 aa, Arabidopsis thaliana
  Clone ID: ARATH-23APR03-C18064_1.p
MSRLQKRGKQEKPVVSDGAQRVIVAVKASREIPKTALIWALTHVVQPGDCITLIVVVPSHNSGRKLWGFTKSFPMFAGDCASGHRKSHSEALPEIKSDLTDTCSQMILQLHDVYDPNKINVKIKIVSGSPCGAVAAESKKAQANWVVMDKHLKQEEKRCMDELQCNIVVMKRSQAKVLRLNLVGSPKKDAGKECPLPSGPEAASEKHSKNTKGLLDADRGLPVTPTSSPELGTPFTSTEAGTSSVSSSDLGTSPFFTLGMNGYMKKDGALVIKENDGLDDSGSETESENQSLASTSMRFQPWISEYIGTHRHSSQEAEESLLWKNDDRAQISTTKALLEKFSKLDVEVGLSSSRRMDLEFSGNVRDAISLSRSAPPGPPPLCSICQHKAPVFGKPPRLFTYAELELATGGFSQANFLAEGGYGSVHRGVLPEGQVVAVKQHKLASSQGDVEFCSEVEVLSCAQHRNVVMLIGFCIEDSRRLLVYEYICNGSLDSHLYGRQKETLEWPARQKIAVGAARGLRYLHEECRVGCIVHRDMRPNNILITHDNEPLVGDFGLARWQPDGEMGVDTRVIGTFGYLAPEYAQSGQITEKADVYSFGVVLVELVTGRKAIDITRPKGQQCLTEWARPLLEEYAIDELIDPRLGNRFVESEVICMLHAASLCIRRDPHLRPRMSQVLRILEGDMIMDGNYASTPGSEAGNRSGRFWADHYSGQLTNDGSDRFSERLSVETPRLALRERERSQRFELNHNKQY

SEQ ID NO: 5909 - protein, 716 aa, Arabidopsis thaliana
  Clone ID: ARATH-23APR03-C1807_1.p
MRWLPQISFSSPSSSPSSSLKPVASYSESPDPDRNQDRDRFHRRLFRFNRGRLTRQRKLRHLTDDDVLLGERRASTSSSTFDSGLTRSPSAFTAVPRSPSAVPLPLPLPLPEVAGIRNAANARGLDDRDRDPERLISDRTSSGPPLTSVNGGFARDSRKATENSSYQDFSPRNRNGYWVNIPTMSAPTSPYMSPVPSPQRKSTGHDLPFFYLPPKSNQAWSAPDMPLDTSGLPPPAFYDITAFSTDNSPIHSPQPRSPRKQIRSPQPSRPSSPLHSVDSSAPPRDSVSSPLHPRLSTDVTNGRRDCCNVHPLPLPPGATCSSSSAASVPSPQAPLKLDSFPMNSQWKKGKLIGRGTFGSVYVASNSETGALCAMKEVELFPDDPKSAECIKQLEQEIKLLSNLQHPNIVQYFGSETVEDRFFIYLEYVHPGSINKYIRDHCGTMTESVVRNFTRHILSGLAYLHNKKTVHRDIKGANLLVDASGVVKLADFGMAKHLTGQRADLSLKGSPYWMAPELMQAVMQKDSNPDLAFAVDIWSLGCTIIEMFTGKPPWSEFEGAAAMFKVMRDSPPIPESMSPEGKDFLRLCFQRNPAERPTASMLLEHRFLKNSLQPTSPSNSDVSQLFNGMNITEPSSRREKPNFKLDQVPRARNMTSSESESGQQQQQQQYRSPDLTGTVNRLSPRSTLEAIPSPCPSQRPKPSSSDRRRTGVTSDHL

SEQ ID NO: 5910 - protein, 882 aa, Arabidopsis thaliana
  Clone ID: ARATH-23APR03-C18091_1.p
MAAWSPSVGIGSCCLNNGITRTWKFPSARLFTGRKNKIKLGSETLMFTRKRFMGDLVTSALQSYQFSKICASKTSIELREALSSRRAEADDLKKVTSYSFRTKAGALVKVKVEKKREKYSILVYVSSLELSGDDKSRLVMVWGVYRSDSSCFLPLDFENSSQDSQTHTTETTFVKSSLSELMLGLEFDGKESPFYLSFHLKLVSGRDPDGREMLTHRDTDFCIPVGFTAGHPLPLGLSSGPDDDSWNFSFFSRSSTNVVLCLYDDSTTDKPALELDLDPYVNRTGDVWHASVDNTWDFVRYGYRCKETAHSKEDVDVEGEPIVLDPYATVVGKSVSQKYLGSLSKSPSFDWGEDVSPNIPLEKLLVYRLNVKGFTQHRSSKLPSNVAGTFSGVAEKVSHLKTLGTNAVLLEPIFSFSEQKGPYFPFHFFSPMDIYGPSNSLESAVNSMKVMVKKLHSEGIEVLLEVVFTHTADSGALRGIDDSSYYYKGRANDLDSKSYLNCNYPVVQQLVLESLRYWVTEFHVDGFCFINASSLLRGVHGEQLSRPPLVEAIAFDPLLAETKLIADCWDPLEMMPKEVRFPHWKRWAELNTRYCRNVRNFLRGRGVLSDLATRICGSGDVFTDGRGPAFSFNYISRNSGLSLVDIVSFSGPELASELSWNCGEEGATNKSAVLQRRLKQIRNFLFIQYISLGVPVLNMGDECGISTRGSPLLESRKPFDWNLLASAFGTQITQFISFMTSVRARRSDVFQRRDFLKPENIVWYANDQTTPKWEDPASKFLALEIKSESEEEETASLAEPNEPKSNDLFIGFNASDHPESVVLPSLPDGSKWRRLVDTALPFPGFFSVEGETVVAEEPLQQLVVYEMKPYSCTLFETINTTA

SEQ ID NO: 5911 - protein, 523 aa, Arabidopsis thaliana
  Clone ID: ARATH-23APR03-C18101_1.p
MGVCFSAIRVTGASSSRRSSQTKSKAAPTPIDTKASTKRRTGSIPCGKRTDFGYSKDFHDHYTIGKLLGHGQFGYTYVAIHRPNGDRVAVKRLDKSKMVLPIAVEDVKREVQILIALSGHENVVQFHNAFEDDDYVYIVMELCEGGELLDRILSKKGNRYSEKDAAVVVRQMLKVAGECHLHGLVHRDMKPENFLFKSAQLDSPLKATDFGLSDFIKPGKRFHDIVGSAYYVAPEVLKRRSGPESDVWSIGVITYILLCGRRPFWDRTEDGIFKEVLRNKPDFSRKPWATISDSAKDFVKKLLVKDPRARLTAAQALSHAWVREGGNATDIPVDISVLNNLRQFVRYSRLKQFALRALASTLDEAEISDLRDQFDAIDVDKNGVISLEEMRQALAKDLPWKLKDSRVAEILEAIDSNTDGLVDFTEFVAAALHVHQLEEHDSEKWQLRSRAAFEKFDLDKDGYITPEELRMHTGLRGSIDPLLDEADIDRDGKISLHEFRRLLRTASISSQRAPSPAGHRNLR

SEQ ID NO: 5912 - protein, 397 aa, Arabidopsis thaliana
  unsure (1)..(397): unsure at all Xaa locations
  Clone ID: ARATH-23APR03-C1811_1.p
MPGIRGPSEYSQEPPRHPSLKVNAKEPFNAEPPRSALVSSYVTPVDLFYKRNHGPIPIVDHLQSYSVTLTGLIQNPRKLFIKDIRSLPKYNVTATLQCAGNRRTAMSKVRNVRGVGWDVSAIGNAVWGGAKLADVLELVGIPKLTASTNLGARHVEXFLVLTRCKEETWGPXYKASICLSXQAINPETEVLLAYVVNGATLNREHGFPLRVVVPGVIGARSVKWLDSIXNVIAEESQGFFMQKDYKMFPPSVNWDNINWSSRRPQMDFPVQSAICSVEDVQMVKPGKVSIKGYAVSGGGRGIERVDISLDGGKNWVEASRTQEPGKQYISEHSSSDKWAWVLFEATIDVSQTTEVIAKAVDSAANVQPENVESVWNLRGVLNTSWHRVLLRLGHSNL

SEQ ID NO: 5913 - protein, 290 aa, Arabidopsis thaliana
  Clone ID: ARATH-23APR03-C18135_1.p
MAANLISPPVACPCVKAFLVLLTMATKLISPPLSCPWVTSREVIIKGLPRRRREWMVTKRNRVSAVTAMIVEPLSVVSSSAIQIHQWWEQNPNSLLLMTEATGGYSLASYYTSLGLFVISVPGLWSLIKRSVKSKIVRKTFVVNDVKKEPKQVAGEILSFFTRKNFNITDRGETITFEGKMVPSRGQAALLTFCTCISLASVGLVLTITVPDFGNNWFFIILLSPLAGVYYWKKASRKEEIKVKMMVGSKGRLDEIVVQGDDVQVEEMRKELQLNEKGMVYVKGLFERSS

SEQ ID NO: 5914 - protein, 730 aa, Arabidopsis thaliana
  Clone ID: ARATH-23APR03-C18163_1.p
MGAQKKGGAAARVSEDAEVQSRHRLQAILLADSFATKFRPVTLERPKVLLPIVNVPMIDYTLAWLESAGIEEVFVFCCAHSMQVIEYLEKSEWYSHPNLLVRTIESHKSISAGDALRYMYEQQTETSQIQGDFVLVSGDTVSNMPLADLIQEHRERKKKDEKAIMTMVIKQSKSSPLTHQSRLGTDQLFIAVDPLTKQLLHYEEDKIDHPSGSVCLEKSLLDTNPSVLVCNDMQDCYIDICSPEVLSLFEDNFDYQHLRRHFVKGVLVDDIMGYKIFTHEIHSSYAGRIDNFRSYDTVSKDIIQRWTYPYVPDINFSGNRPLKLGRQGIYKASDVVQSRSADVGASTVIGYGTKIGHGDKIMNSVIGNGCSIGSNVVIEGSYIWNNVTIEDGCEIRNAIVCDGVKIRAGAVLQPGVVLSFNVVVGRDFVVPAYSKVSLLQQPTTEDSDEELEYADSSSGTADHLSGLNLQMESKASELGPDGAGYIWEVCEGAHDEEWKHSVAPIPKDKLSEITQAIDDDDTDDESVVPTSGELKSDADSINTDVNDPNDDYYYFEKEVEGTVLRAVEENIKVDLVTMEINGLRLSFNMESADCAGATFFSMIKLALDTPHNSGSELYKNAASIITKWKDLLGFYAKKIDEQIEVIMKFEEMCQESHKELGPLFTQILHLLYDKDVLQEDAILRWEEEKAGADEADKVYLKQCDTFIQWLKEASEEEDEDDEDEEEEEDN

SEQ ID NO: 5915 - protein, 349 aa, Arabidopsis thaliana
  Clone ID: ARATH-23APR03-C1816_1.p
MGVDYYNVLKVNRNANEDDLKKSYRRMAMKWHPDKNPTSKKEAEAKFKQISEAYDVLSDPQRRQIYDQYGEEGLKSTDLPTAAETAAHQQQRSYSSSNSEFRYYPRDAEDIFAEFFGESGDAFGGGSSGRTRGDGGDGGGRRFKSAEAGSQANRKTPPTNKKTTPPANRKAPAIESKLACTLEELYKGAKKKMRISRVVPDDFGKPKTVQEILKIDIKPGWKKGTKITFPEKGNQEPGVTPADLIFVVDEKPHSVFKRDGNDLILEKKVSLIDALTGLTISVTTLDGRSLTIPVLDIVKPGQEIVIPNEGMPTKDPLKRGDLRVTFEILFPSRLTSEQKNDLKRVLGGS

SEQ ID NO: 5916 - protein, 482 aa, Arabidopsis thaliana
  Clone ID: ARATH-23APR03-C1817_1.p
MKKSIETPLLLNTKQSQDEDKEKIRWEKMKKVASMAAPMVAVNMSQYLLQATSTMIVGHRSELALAGIALGSSFANVTGFGVLFGLSGSLETLCGQAYGAKQYHKLGSYTFTSIVFLLIISVPISILWMFMNQILLLLHQDPQIAELAGVYCLWLVPALFGYSVLESLVRYFQSQSLIYPMVLSSLAALSFHVPLCWLMVHKFDFGAKGAAASIGISYWLNAVFLWVYMKRSSRCVETRIYMSKDVFVHTNIFFQFAIPSAMMCCLEWLAFEVITLLSGLLPNSKLETSVISICLTTSSLHYNLVNGIGDAASTNVANELGAGNPRGARDSAAAAIIIAAVESVIVSSSLFLSRSVWPYAYSNVEEVISYVTDITPILCISILMDSFLTVLSGIVRGTGWQKIGAYVNITSYYVIGIPVGLLLCFHLHFNGKGLWAGLVTGSTLQTLILFLVIGFTNWSKEAIKARERIGDEKVWRHDSLLN

SEQ ID NO: 5917 - protein, 621 aa, Arabidopsis thaliana
  Clone ID: ARATH-23APR03-C18184_1.p
MTLISRFLISRVISRTLFSNQNNRTAINVSVKLPQFRIQSNGYHTLGLLHNVKGRFLGSNHHQLARRSYSIAVASNVVKQHAQVSWGRLVQRVTLSRSWNLPRISQIAQACSLSLARSHFLLPGLLALTYRQVAYAQRVVPNPVVYSPSHISPYRSSINFPIVLSSLVFSAVKGVVLIGRALYLAILFSPNVIMALLGFACGPRYRQLQYEVLHRTLEKAGPAFIKFGQWIATRPDRFNKDLCLQLSKLHSNAPEHSFAFTKKSIENAFGRKLSEIFEEFDEAPVASGSIAQVHRASLKFQYAGQKVKSSEVAVKVRHPCVEETMKRDFVIINFVARLTTFIPGLNWLRLDECVQQFSVYMLSQVDLSREASHLSRFIYNFRGWKDVSFPKPIYPLIHPAVLVETYEHGESVARYVDGSEGQEKLKAKVAHIGTNALLKMLLVDNFIHADMHPGNILVRPNNTRRGLFRSRKPHIVFLDVGMTAELSKTDRDNLLGFFKAVARRDGRTAAERTLKLSKQQNCPDPQAFIKEVEEAFTFWGTEEGDLVHPADCMHELFEKMRSHRVNIDGNVSTVMFTTLVLEGWQRKLDPGYDVMRTLQTMLLKTDWMKSLSYTIDGLMAP

SEQ ID NO: 5918 - protein, 393 aa, Arabidopsis thaliana
  Clone ID: ARATH-23APR03-C181961_1.p
MMGGKSSKSKKNVEFGSPSTPVQIKINSEYTEHLSSYERACSEDPKLESFDSALHERTNRVINKLASGVEIKSLSFDSLREVTQCLLDMNQDVVKVILQDKEDIWNNQDLFSLVNLYFESTAKTMDFCSELENCLNRARRSQVIIQFAVNQFEEENEDKENRKYEKTLEELKRFKVAGEPFTKEFFALFDLVYKQQVMMLEELHKLKRKLDKRLRNIKTWRRVSNMVFVTAFVSVLIFSVVAAAVAAPPVVAAIAGALAVPVGSVGKWCNTLWTKYEKVVRGQKEIITSIRIGTYISVKEMDNISILVRKVEVEIESLLKKAEFAITEEKEVRLAIDEIKKKLDVFTETIEELGEHAGKYCSDVTKARTVILQRIIRYPAGSPKDEAPWTEMM

SEQ ID NO: 5919 - protein, 355 aa, Arabidopsis thaliana
  Clone ID: ARATH-23APR03-C18197_1.p
MAAASARAFFMLSRVTDLSKKKLILHQPPPSSSPHRLPYAPNRAVSSSAVISCLSGGGVSSDDSYVSTRRSKLDRGFAVIANLVNRIQPLDTSVISKGLSDSAKDSMKQTISSMLGLLPSDQFSVSVTISEQPLYRLLISSIITGYTLWNAEYRVSLRRNFDIPIDPRKEEEDQSSKDNVRFGSEKGMSEDLGNCVEEFERLSPQVFGDLSPEALSYIQLLQSELSSMKEELDSQKKKALRIECEKGNRNDLLDYLRSLDPEMVTELSQLSSPEVEEIVNQLVQNVLERLFEDQTTSNFMQNPGIRTTEGGDGTGRKVDTSRDYLAKLLFWCMLLGHHLRGLENRLHLSCVVGLL

SEQ ID NO: 5920 - protein, 477 aa, Arabidopsis thaliana
  Clone ID: ARATH-23APR03-C1819_1.p
MMEIAYQPRIDSEIESLVERINPPRVCVDNDSDPECTLIKVDSANKYGILLDMVQVLADLDLVISKCYISSDGEWFMDVFHVTDQLGNKLTDRSLILYIQQAICSSRTGGITKEMQSNLKREVQQRHVSTEHTAFEITGINRPGLLSEISAVLSDIGCHVTAAVAWTHHERAAMVIYLEDGFNGGPIIDPIRKAQVKDHLDTVMEAHHIVGDVSHVVVRVVEAKGVPVGWAHTERRLHELMYGEGDYENCFDCDCFGDRCDALWRGRCERIHVTIEACNGYSMVNVKCRDRPKLLFDTVCALKELQFVVFHAVAGAKGSTAEQEYFIRKKNGGTLETEGQRERLRHCLVAAISRRASQGLKLEIRTENKMGLLSDVTRVVRENGLSITRAEMCTQGEIAVGSFYVTDVNGGETGPSEVEAVVRELGGAVVSAVKGVGMMPRRIGSTSDSVEQDKAKSSIGRMFWSKLERLSTSIRSL

SEQ ID NO: 5921 - protein, 103 aa, Arabidopsis thaliana
  Clone ID: ARATH-23APR03-C18321_1.p
MEKRESSGGSGSGDAEVRKGPWTMEEDLILINYIANHGEGVWNSLAKSTSSRKNGKSCRLRWLNYLRPDVRRGNITPEEQLTIMELHAKWGNRCKNIETQLLL

SEQ ID NO: 5922 - protein, 461 aa, Arabidopsis thaliana
  Clone ID: ARATH-23APR03-C1832_1.p
MAKTKNVISFKLSLIFLLNIFIVATIAAAAAVNAGTKGLDSRPSKTRRPWPFKKLNKPVVLMISCDGFRFGYQFKTDTPNIDLLISGGTEAKHGLIPVFPTMTFPNHYSIATGLYPAYHGIIMNKFTDPVTGEVFNKGLQPKWWLGEPLWVTAVNQGLKAVTYFWPGSEVLKSSWTCPEGYCPHFNLSVPLEERVDSVLSHFDHLEDEVPDLLMLYFDEPDQSGHNYGPDDPRVTTAVSRVDKMIGRVIKGLKQREIFDEVHVILLGDHGMVTNCECNEKAIYIDDLADWIKIPAAWIQAYSPVLAINPQWGKDVENQSEKNAEVVAKMNEALSSGKVKNGEFLKVYLKEKLPERLHFSESYRIPPIIGIVGEGLMVRQNRTNAQVCYGDHGYDNELFSMRTIFVGHGSRFSRGKKVPSFENVQIYNVVAELLGLRPAPNNGSSLFPRSILLPSGATREVK

SEQ ID NO: 5923 - protein, 1516 aa, Arabidopsis thaliana
  Clone ID: ARATH-23APR03-C18367_1.p
MWLLSSSPWLSELSCSYSAVVEHTSSVPVPIQWLRFVLLSPCPQRALFSAVDFIFLLCFALHKLFSSPSSSSEINGHAEIRKPLIGIRGRTPTRTTAWFKTTVAVTVLLSFCSVVLCVLAFTGKRRTQRPWNLIDPLFWLIHAVTHLVIAVLVLHQKRFAALNHPLSLRIYWISSFVLTSLFAVTGIFHFLSDAATSLRAEDVASFFSFPLTAFLLIASVRGITGLVTAETNSPTKPSDAVSVEKSDNVSLYASASVFSKTFWLWMNPLLSKGYKSPLTLEQVPTLSPEHKAERLALLFESSWPKPSENSSHPIRTTLLRCFWKEILFTAILAIVRLGVMYVGPVLIQSFVDFTSGKRSSPWQGYYLVLILLVAKFVEVLTTHQFNFDSQKLGMLIRSTLITALYKKGLKLTGSARQNHGVGQIVNYMAVDAQQLSDMMLQLHAIWLMPLQVTVALVLLYGSLGASVITAVIGLTGVFVFILLGTQRNNGYQFSLMGNRDSRMKATNEMLNYMRVIKFQAWENHFNKRILKFRDMEFGWLSKFLYSIAGNIIVLWSTPVLISALTFATALALGVKLDAGTVFTTTTIFKILQEPIRTFPQSMISLSQAMISLGRLDSYMMSKELSEDAVERALGCDGNTAVEVRDGSFSWDDEDNEPALSDINFKVKKGELTAIVGTVGSGKSSLLASVLGEMHRISGQVRVCGSTGYVAQTSWIENGTVQDNILFGLPMVREKYNKVLNVCSLEKDLQMMEFGDKTEIGERGINLSGGQKQRIQLARAVYQECDVYLLDDVFSAVDAHTGSDIFKKCVRGALKGKTVLLVTHQVDFLHNVDCILVMRDGKIVESGKYDELVSSGLDFGELVAAHETSMELVEAGADSAAVATSPRTPTSPHASSPRTSMESPHLSDLNDEHIKSFLGSHIVEDGSKLIKEEERETGQVSLGVYKQYCTEAYGWWGIVLVLFFSLTWQGSLMASDYWLAYETSAKNAISFDASVFILGYVIIALVSIVLVSIRSYYVTHLGLKTAQIFFRQILNSILHAPMSFFDTTPSGRILSRASTDQTNVDILIPFMLGLVVSMYTTLLSIFIVTCQYAWPTAFFVIPLGWLNIWYRNYYLASSRELTRMDSITKAPIIHHFSESIAGVMTIRSFRKQELFRQENVKRVNDNLRMDFHNNGSNEWLGFRLELVGSWVLCISALFMVLLPSNVIRPENVGLSLSYGLSLNSVLFFAIYMSCFVENKMVSVERIKQFTDIPSESEWERKETLPPSNWPFHGNVHLEDLKVRYRPNTPLVLKGITLDIKGGEKVGVVGRTGSGKSTLIQVLFRLVEPSGGKIIIDGIDISTLGLHDLRSRFGIIPQEPVLFEGTVRSNIDPTEQYSDEEIWKSLERCQLKDVVATKPEKLDSLVVDNGENWSVGQRQLLCLGRVMLKRSRLLFLDEATASVDSQTDAVIQKIIREDFASCTIISIAHRIPTVMDGDRVLVIDAGKAKEFDSPARLLERPSLFAALVQEYALRSAGI

SEQ ID NO: 5924 - protein, 441 aa, Arabidopsis thaliana
  Clone ID: ARATH-23APR03-C1858_1.p
MERDEEASGPMMEMCTNGGEETSNRRPIISGEPLDIEAYAALYKGRTKIMRLLFIANHCGGNHALQFDALRMAYDEIKKGENTQLFREVVNKIGNRLGEKYGMDLAWCEAVDRRAEQKKVKLENELSSYRTNLIKESIRMGYNDFGDFYYACGMLGDAFKNYIRTRDYCTTTKHIIHMCMNAILVSIEMGQFTHVTSYVNKAEQNPETLEPMVNAKLRCASGLAHLELKKYKLAARKFLDVNPELGNSYNEVIAPQDIATYGGLCALASFDRSELKQKVIDNINFRNFLELVPDVRELINDFYSSRYASCLEYLASLKSNLLLDIHLHDHVDTLYDQIRKKALIQYTLPFVSVDLSRMADAFKTSVSGLEKELEALITDNQIQARIDSHNKILYARHADQRNATFQKVLQMGNEFDRDVRAMLLRANLLKHEYHARSARKL

SEQ ID NO: 5925 - protein, 362 aa, Arabidopsis thaliana
  unsure (1)..(362): unsure at all Xaa locations
  Clone ID: ARATH-23APR03-C186663_1.p
MTISTVIAFMSMFLVFVMSGPIVVEGRAFFVFGDSLVDSGNNNYLVTTARADSPPYGIDFPTRRPTGRFSNGLNIPDLISEAIGNEEPPLPYLSPELRGRSLLNGANFASAGIGILNDTGFQFINIIRMYQQLDYFQQYQQRVSRLIGKPQTQRLVSQALVLITVGGNDFVNNYFLFPYSARSRQFTLPDYVRLLISEYKKILLRLNSLGVGRVLVTGAGPLGCAPAELARSGTSNGRCSAELQRAASLYDPQLLQMINELNKKIGRNVFIAANTNQMQEDFLSTPRRYGFVTSKVACCGQGPYNGMGLCTVLSNLCPNRELYVFWDAFHPTEKAXRMIVRHILTGTTKYMNPMNLSSALAL

SEQ ID NO: 5926 - protein, 232 aa, Arabidopsis thaliana
  Clone ID: ARATH-23APR03-C1880_1.p
MAKDEAKGLLKSEELYKYILETSVYPREPEVLRELRNITHNHPQAGMATAPDAGQLMGMLLNLVNARKTIEVGVFTGYSLLLTALTLPEDGKVIAIDMNRDSYEIGLPVIKKAGVEHKIDFKESEALPALDELLNNKVNEGGFDFAFVDADKLNYWNYHERLIRLIKVGGIIVYDNTLWGGSVAEPDSSTPEWRIEVKKATLELNKKLSADQRVQISQAALGDGITICRRLY

SEQ ID NO: 5927 - protein, 472 aa, Arabidopsis thaliana
  Clone ID: ARATH-23APR03-C18838_1.p
MASPALTGGYRNLTAPVSLLRTLASTRVTTPLFRSNKHSPRFISSPKRFTCLSLLKTDSQNQTTLSSSSNSGYHEYNRLMPCPAYNLPPRIEHMVVLEDDVLVSEFISKQLDLPPLYVADLIRFGAVHYALVCPKPPPTATPEEIILFEEVTSPSVLKKRSSIKGKTVREAQKTFRVTHTNQYAEAGTYLRVHVHPKRSPRCYEIDWKSRIVAVTDSYVILDKPAGTTVGGTTDNIEESCATFASRALDLPEPLKTTHQIDNCTEGCVVFARTKEYCSVFHTKIRNKEVKKLYRALAAAPLPIGIISHYMRPKNMAPRLVAEDSIQGWHLCQLEVLECKKIPWPDAATEKKHDIEDCGWTSKEFAYECTINLLTGKTHQIRAQLAACGAPLVGDSMYMPAAIAEMGNPDTNPYGKAKKHYTMEENQKETAVAEWIDRHGKEPRVGIGLQACQISWDDDDGEHFYEAGTPWWR

SEQ ID NO: 5928 - protein, 631 aa, Arabidopsis thaliana
  Clone ID: ARATH-23APR03-C18864_1.p
MHEVGFPLDLSVFTRLIATLFFLAVGVFYFLKNTAAKYFDIGAAAAGGFDRDFMAVDAEDCSVCGNFSTKKCSRCKSVRYCSAECQRSDWSSGHQRNCRDYGITTLTPSAKNGLRFRASPFGDSSASSIALISERGQNKSSLKPREVLFPYEEFVEYFNWDNPELAPCGLMNCGNSCFANVILQCLSWTRPLVAYLLEKGHKRECMRNDWCFLCEFQTHVERASQSRFPFSPMNIISRLTNIGGTLGYGRQEDAHEFMRYAIDMMQSVCLDEFGGEKIVPPRSQETTLIQYIFGGLLQSQVQCTVCNHVSDQYENMMDLIVEMHGDAGSLEECLDQFTAEEWLHGDNMYKCDRCSDYVKACKRLTIRRAPNILTIALKRYQGGRYGKLNKRISFPETLDLNPYMSEGGDGSDVYKLYAVIVHLDMLNASFFGHYICYIKDFCGNWYRIDDSEIESVELEDVLSQRAYMLLYSRIQARSSSSCLRSEVKDEKKTDTLDTESCVKELVESSMVGAIESRSSTHATIEDPVCEQSPSPSPSPSPSPSPSPSPSVLASECCSEVERIDTLDSESNSSIDDSATDHQEDVANGNKDPEVKYQAADSWSDPTTSTPLVCTKSKPPVRDMDTKMIDAQ

SEQ ID NO: 5929 - protein, 491 aa, Arabidopsis thaliana
  Clone ID: ARATH-23APR03-C1889_1.p
MLAMEKEFDSKLVLQGNSSNGANVSRSKSFSFKAPQENFTSHDFEFGKIYGVGSYSKVVRAKKKETGTVYALKIMDKKFITKENKTAYVKLERIVLDQLEHPGIIKLYFTFQDTSSLYMALESCEGGELFDQITRKGRLSEDEARFYTAEVVDALEYIHSMGLIHRDIKPENLLLTSDGHIKIADFGSVKPMQDSQITVLPNAASDDKACTFVGTAAYVPPEVLNSSPATFGNDLWALGCTLYQMLSGTSPFKDASEWLIFQRIIARDIKFPNHFSEAARDLIDRLLDTEPSRRPGAGSEGYVALKRHPFFNGVDWKNLRSQTPPKLAPDPASQTASPERDDTHGSPWNLTHIGDSLATQNEGHSAPPTSSESSGSITRLASIDSFDSRWQQFLEPGESVLMISAVKKLQKITSKKVQLILTNKPKLIYVDPSKLVVKGNIIWSDNSNDLNVVVTSPSHFKICTPKKVLSFEDAKQRASVWKKAIETLQNR

SEQ ID NO: 5930 - protein, 368 aa, Arabidopsis thaliana
  Clone ID: ARATH-23APR03-C189153_1.p
MREKRGNRKALDPVGEDGVTGKDGKGFFACYLLTSLSPRHKGQTYIGFTVNPRRRIRQHNGEITSGAWRTKKKRPWEMVLCIYGFPTNVSALQFEWAWQHPRESVAVREAAAAFKSFSGVASKIKLVYTMLNLPAWNSLNLTVNYFSSKYAHHGGKSPSLPLHMKVQVCAMEDLQYFTKVDDSSQPEDEESPEVNEEDDDDDDDDSSNLSQPGNSNTSSSDDRHFEKAKEPVTVFDEEDRLANFSGFGLLDEEETVEDEVSHITVGSIRATEKEPETVFNDRLASFTCFGLVEIVEDEVSHGTIGSTEAMEKECRKRRNHITSTTTEVDVEVIDLMTPSPSCRAGSSMKRRRVSEFIDLTMSPNFIES

SEQ ID NO: 5931 - protein, 846 aa, Arabidopsis thaliana
  Clone ID: ARATH-23APR03-C18965_1.p
MASSSLSNLMLAIHEKKTSSVDLYRPLRNYVTFTYSEREAQLIDDDLETLKQLRSDIERVSDPSPAARRDLLISYYKVLCLVETRFPISPDKDHVNAVSFVWYDAFKQKHKATQQNIHLEKAAVLFNLGASYSQIGLGHDRTTVDGRRQASHAFMAAAGAFAHLRDNESIKATIGPSTTVDVSVECVGMLERLMVAQAQECVFENTIAKGSTPGVSAKIARQVGIFYEEALSALIISPLKDHFDKGWISHVQLKAALFYGEACFRYGKELHEKEEIAEEIARLRSGASRLAEAKKSSRGAPAQLIEAMNTLESSIDGNLDRAVKENDRVYLMRVPSPSSLSPLPAFSMVKPMNMTDILDASKEKMFSILVPDSSAKALSRYTEMVDDVIRTQAERLQQASELTRVRLKEMDLPDSILAVDGNSALPVDLKEDVEAVQISGGPAGLEAELQQLRDLKRVNQELLVHTEELLQKEATEDSQFRSQFGTRWTRPQSSTLTKNLQDRLNRFAANLKQAGESDVKIERSVRDNSALMSILDRRPIESAVPTLARPIMSLDATEDAIVGTLKQSLRQLENLGAQRAGLEDMLKEMKRKDDILPKLMTITGSYEDMFRKEISKYDHICEDISQNIEVQEQLLMQIQAQNEEFSTIFNLEDYKASKEKCYKQIQAAIMKYREIKENINEGLKFYVTLQDAITNVQQQCSDFVMTRSIQCRDMIEDVQRQMSGLSFQDHRSSGPYPSVHQPTASSPPPPPETQNPSHPHPHAPYYRPPEQMSRPGYSIPPYGPPPPYHTPHGQAPQPYPPQAQQQPHPSWQQGSYYDPQGQQPRPPYPGQSPYQPPHQGGGYYRQ

SEQ ID NO: 5932 - protein, 166 aa, Arabidopsis thaliana
  Clone ID: ARATH-23APR03-C18_1.p
MGFPVGYSELLLPKIFFYLLSFLGLIRKLISTMFKIIGLPDFLEPEPVSTSWPDPPPTLTKPDSAAILAGEMLPVVRFSDINRPESECCAVCLYDFENDDEIRRLTNCRHIFHRGCLDRWMMGYNQMTCPLCRTQFIPDHLQLEFNQRLWSQSSAVSSQLLDESSS

SEQ ID NO: 5933 - protein, 454 aa, Arabidopsis thaliana
  Clone ID: ARATH-23APR03-C19124_1.p
MRPGRRQTAPEVLMLVTAPVIPLNDCEWKPKRFAGEFRLLMEQRVQLRVGTMETISNEGDVDREQVLETFGIENETGKETNGSRSFDVGYSSGDTLETLPKASKVDISPADVLKTLFFILVWYTFSTFLTLYNKTLLGDDLGKFPAPLLMNTIHFSIQAVLSKMITWYWSGRFQPDVTISWRDYFVRVVPTALGTAMDINLSNESLVFISVTFATMCKSAAPIFLLLFAFAFRLESPSLKLFGIISVISAGVLLTVAKETEFEFWGFVFVMLAAVMSGFRWCMTQVLLQKETFGLKNPFIFMSCVAPVMAIATGLLSLLLDPWSEFRDNKYFDSGAHFARTCFLMLFGGALAFCMVLTEYVLVSVTSAVTVTIAGVVKEAVTIVVAVFYFHDEFTWLKGVGLMIIMVGVSLFNWYKYDKLQKGHKTEEEKQLQAPSQTGKYVILDEMDDQENSP

SEQ ID NO: 5934 - protein, 783 aa, Arabidopsis thaliana
  Clone ID: ARATH-23APR03-C19134_1.p
MDAIKCSSSFLHHTKLNTLFSNHTFPKISAPNFKPLFRPISISAKDRRSNEAENIAVVEKPLKSDRFFISDGLPSPFGPTVRDDGVNFSVYSTNSVSATICLISLSDLRQNKVTEEIQLDPSRNRTGHVWHVFLRGDFKDMLYGYRFDGKFSPEEGHYYDSSNILLDPYAKAIISRDEFGVLGPDDNCWPQMACMVPTREEEFDWEGDMHLKLPQKDLVIYEMHVRGFTRHESSKIEFPGTYQGVAEKLDHLKELGINCIELMPCHEFNELEYYSYNTILGDHRVNFWGYSTIGFFSPMIRYASASSNNFAGRAINEFKILVKEAHKRGIEVIMDVVLNHTAEGNEKGPIFSFRGVDNSVYYMLAPKGEFYNYSGCGNTFNCNHPVVRQFILDCLRYWVTEMHVDGFRFDLGSIMSRSSSLWDAANVYGADVEGDLLTTGTPISCPPVIDMISNDPILRGVKLIAEAWDAGGLYQVGMFPHWGIWSEWNGKFRDVVRQFIKGTDGFSGAFAECLCGSPNLYQGGRKPWHSINFICAHDGFTLADLVTYNNKNNLANGEENNDGENHNYSWNCGEEGDFASISVKRLRKRQMRNFFVSLMVSQGVPMIYMGDEYGHTKGGNNNTYCHDNYMNYFRWDKKEEAHSDFFRFCRILIKFRDECESLGLNDFPTAKRLQWHGLAPEIPNWSETSRFVAFSLVDSVKKEIYVAFNTSHLATLVSLPNRPGYRWEPFVDTSKPSPYDCITPDLPERETAMKQYRHFLDANVYPMLSYSSIILLLSPIKDP

SEQ ID NO: 5935 - protein, 589 aa, Arabidopsis thaliana
  Clone ID: ARATH-23APR03-C192000_1.p
MEIPPSPPPETAAYTLTTSSISYTIPKTSLSLLRFPATEPPSFILRNITLTAHPTEILAVVGPSGAGKSTLLDILASKTSPTSGSILLNSIPINPSSYRKISSYVPQHDSFFPLLTVSETFSFAACLLLPNPSLVSETVTSLLSELNLTHLSHTRLAQGLSGGERRRVSIGLSLLHDPCFLLLDEPTSGLDSKSAFDVIHILKSIAVSRQRTVILSIHQPSFKILSIIDRLLLLSKGTVAYHGRLDSLEGFLLFKGFTVPPQLNSLEYAMEILQELRESDGNTDATDLPSIENRKQREKQSIVRYRKSRITEISLLARRFWKIIYRTRQLLLTNALEALVVGLVLGTIYINIGIGKAGIEKRFGMFAFTLTFLLSSTTETLPIFINERPILLRETSSGVYRLSSHILANTLVFLPYLFVISIIYSVSVYFLIGLCPTWQAFGYFVLVIWIILLMANSFVLFLSSLAPNYITGTSLVTILLAAFFLFSGYFISKESLPKYWLFMYFFSMYKYALDALLINEYSCLASKCLVWLEEAQTKICMVTGGDVLKKKGLHEKQRWFNVYVLLGFFVLYRVLCFLALLRRVSGSKR

SEQ ID NO: 5936 - protein, 272 aa, Arabidopsis thaliana
  Clone ID: ARATH-23APR03-C19349_1.p
MANSDKRLFEKVAIITGGARGIGAATARLFTENGAYVIVADILENEGILVAESIGGCYVHCDVSKEADVEAAVELAMRRKGRLDVMFNNAGMSLNEGSIMGMDVDMVNKLVSVNVNGVLHGIKHAAKAMIKGGRGGSIICTSSSSGLMGGLGGHAYTLSKGAINGVVRTTACELGSHGIRVNSISPHGVPTDILVNAYRKFLNNDKLNVAEVTDIIAEKGSLLTGRAGTVEDVAQAALFLASQESSGFITGHNLVVDGGYTSATSTMRFIYN

SEQ ID NO: 5937 - protein, 372 aa, Arabidopsis thaliana
  Clone ID: ARATH-23APR03-C193620_1.p
MNPILSSLFALSLLSSLSPSTHAHQCHFPAIFNFGDSNSDTGGLSAAFGQAGPPHGSSFFGSPAGRYCDGRLVIDFIAESLGLPYLSAFLDSVGSNFSHGANFATAGSPIRALNSTLRQSGFSPFSLDVQFVQFYNFHNRSQTVRSRGGVYKTMLPESDSFSKALYTFDIGQNDLTAGYFANKTVEQVETEVPEIISQFMNAIKNIYGQGGRYFWIHNTGPIGCLAYVIERFPNKASDFDSHGCVSPLNHLAQQFNHALKQAVIELRSSLSEAAITYVDVYSLKHELFVHAQGHGFKGSLVSCCGHGGKYNYNKGIGCGMKKIVKGKEVYIGKPCDEPDKAVVWDGVHFTQAANKFIFDKIAPGLSKACKRQ

SEQ ID NO: 5938 - protein, 481 aa, Arabidopsis thaliana
  Clone ID: ARATH-23APR03-C1942_1.p
MNRQNGGGQRLRSARPTTIHDCALSGDLIALQRLLKDNPSLLNERNPVMYHTPLHVSAGNGNVDIVKYLLAWTGSDKVELEAMNTYGETPLHMAAKNGCNEAAKLLLESGAFIEAKASNGMTPLHLAVWYSITAKEISTVKTLLDHNADCSAKDNEGMTPLDHLPQGQGSEKLRELLRWFLQEQRKRSALEQCGKTKAKMELLEDELSNIVGLSELKTQLRKWAKGMLLDERRRALGLNIGTRRPPHMAFLGNPGTGKTMVARVLGKLLNTVGILPTDKVTEVQRTDLVGEFVGHTGPKTRRKIQEAEGGILFVDEAYRLIPMQKADDKDYGLEALEEIMSVIDTGKIVVIFAGYSEPMKRVIASNEGFCRRVTKFFNFSDFSAKELAQILHIKMNNQGEDTLFYGFRLHESCTLQEIASLIEAETTEKQRKEMNGGLVDTLLVNARENLDLRLSFECVDTEEICTIKLEDLEAGLRVFSQ

SEQ ID NO: 5939 - protein, 326 aa, Arabidopsis thaliana
  Clone ID: ARATH-23APR03-C19459_1.p
MNCLIAIALSVSFFLVGMVGPIQAQLQMNFYANSCPNAEKIVQDFVSNHVSNAPSLAAALIRMHFHDCFVRGCDGSVLINSTSGNAERDATPNLTVRGFGFIDAIKSVLEAQCPGIVSCADIIALASRDAVVFTGGPNWSVPTGRRDGRISNAAEALANIPPPTSNITNLQTLFANQGLDLKDLVLLSGAHTIGVSHCSSFTNRLYNFTGRGGQDPALDSEYAANLKSRKCPSLNDNKTIVEMDPGSRKTFDLSYYQLVLKRRGLFQSDSALTTNPTTLSNINRILTGSVGSFFSEFAKSMEKMGRINVKTGSAGVVRRQCSVANS

SEQ ID NO: 5940 - protein, 279 aa, Arabidopsis thaliana
  Clone ID: ARATH-23APR03-C19463_1.p
MASSSSSSYRFQSGSYPLSSSPSLGNFVERIKDACHFLVSAVLGTIISAILTFFFALVGTLLGALTGALIGQETESGFIRGAAIGAISGAVFSIEVFESSLDLWKSDESGFGCFLYLIDVIVSLLSGRLVRERIGPAMLSAVQSQMGAVDTAFDDHTSLFDTGGSKGLTGDLVEKIPKMTITGNNNTDASENTDSCSVCLQDFQLGETVRSLPHCHHMFHLPCIDNWLLRHGSCPILTSQFRYFYSSYIKSLLCSSSLLLEFHSHCRTPSSLMYKETQK

SEQ ID NO: 5941 - protein, 610 aa, Arabidopsis thaliana
  Clone ID: ARATH-23APR03-C19467_1.p
MESLIALVNKIQRACTALGDHGEGSSLPTLWDSLPAIAVVGGQSSGKSSVLESVVGKDFLPRGAGIVTRRPLVLQLHRIDEGKEYAEFMHLPKKKFTDFAAVRQEISDETDRETGRSSKVISTVPIHLSIFSPNVVNLTLVDLPGLTKVAVDGQPESIVQDIENMVRSFIEKPNCIILAISPANQDLATSDAIKISREVDPKGDRTFGVLTKIDLMDQGTNAVDILEGRGYKLRYPWVGVVNRSQADINKSVDMIAARRRERDYFQTSPEYRHLTERMGSEYLGKMLSKHLEVVIKSRIPGLQSLITKTISELETELSRLGKPVAADAGGKLYMIMEICRAFDQTFKEHLDGTRSGGEKINSVFDNQFPAAIKRLQFDKHLSMDNVRKLITEADGYQPHLIAPEQGYRRLIESCLVSIRGPAEAAVDAVHSILKDLIHKSMGETSELKQYPTLRVEVSGAAVDSLDRMRDESRKATLLLVDMESGYLTVEFFRKLPQDSEKGGNPTHSIFDRYNDAYLRRIGSNVLSYVNMVCAGLRNSIPKSIVYCQVREAKRSLLDIFFTELGQKEMSKLSKLLDEDPAVQQRRTSIAKRLELYRSAQTDIEAVAWSK

SEQ ID NO: 5942 - protein, 128 aa, Arabidopsis thaliana
  Clone ID: ARATH-23APR03-C19548_1.p
MSWAGPEEIYLSTSLASYLDRKLLVLLRDGRKLMGTLRSFDQFANAVLEGACERVIVGEQYCDIPLGLYVIRGENVVLIGELDTEREELPPHMIRVSEAEIKRAQKVEREASELRGTMRKRMEFLDFD

SEQ ID NO: 5943 - protein, 443 aa, Arabidopsis thaliana
  unsure (1)..(443): unsure at all Xaa locations
  Clone ID: ARATH-23APR03-C19552_1.p
MVPPIIYKYKRRKDRRLGRDDDSSVMMTRRRPDSDFIEVSDENRSFALFKEDDEKNRDLGLVDDGSTNLVLQCHDDGCSLEKDNSNSLDDLFSGFVYKGVRRRKRDDFGSITTSNLVSPQIADDDDDSVSDSHIERQEWSEFHVEVRRVSPYFQGSTVSQQSKEGCDSDSVCSKEGCSKVQAKVPRVSPYFQASTISQCDSDIVSSSQSGRNYRKGSSKRQVKVRRVSPYFQESTVSEQPNQAPKGLRNYFKVVKVSRYFHADGIQVNESQKEKSRNVRKTPIVSPVLSLSQKTDDVYLRKTPDNTWVPPRSPCNLLQEDHWHDPWRVLVICMLLNKTSXTRGVISDLFGLCTDAKTATEVKEEEIENLIKPLGLQKKRTKMIQRLSLEYLQESWTHVTQLHGVGKYAADAYAIFCNGNWDRVKPNDHMLNYYWDYLRIRYKL

SEQ ID NO: 5944 - protein, 497 aa, Arabidopsis thaliana
  unsure (1)..(497): unsure at all Xaa locations
  Clone ID: ARATH-23APR03-C19558_1.p
MPPSLPSLQLRRLLLRSFISSSSVNTLQSQPRIISSKPLFSPLPPSRSSIFSTRPSRFSSSPSSAVSAASDADAVALASSEVPPAFPDALSRTPAPGSHPSSPRFTPSPALIPPTPDLSPQARRPAPGSARGVQAFTNCSHPNPTFSPPVEHFRFSASYLGXFSLTKSEMPPSLPSLQLRRLLLRSFISSSSVNTLQSQPRIISSKPLFSPLPPSRSSIFSTFPSRFFSSETNAESESLDSNEIALSFSMVISGEPICRAKXLDAARLAGEMSSRGFEIGTKAYNMMLDCVCKLCRKKDPFKLQPEVEKVLLEMEFRGVPRNTETFNVLINNLCKIRRTEEAMTLFGRMGEWGCQPDAETYLVLIRSLYQAARIGEGDEMIDKMKSAGYGELLNKKEYYGFLKILCGIERLEHAMSVFKSMKANGCKPGIKTYDLLMGKMCANNQLTRANDLXKEEADSNVKKRETLPEKTARKKKRLKQINMSFVKKPHNKMRRRM

SEQ ID NO: 5945 - protein, 183 aa, Arabidopsis thaliana
  Clone ID: ARATH-23APR03-C19575_1.p
MPSSSEEIVSAGESSEIEEAVASLTMSSNKILLTSSDGESFEIDEAVARKFLIIVHMMEDNCAGEAIPLENVTGDILSKIIEYAKMHVNEPSEEDEDEEAKKNLDSWDAKFMEKLDLETIFKIILAANYLNFEGLLGFASQTVADYIKDKTPEEVREIFNIENDFTPEEEEEIRKENAWTFNE

SEQ ID NO: 5946 - protein, 218 aa, Arabidopsis thaliana
  Clone ID: ARATH-23APR03-C19584_1.p
MATNNIVRLIAPSRSVSSRFLEPVSRFLSSGTPPPPQAPSPNQDLNRDVKPDQNLQQNLQMQKEEEEEGEGGGGGEFVNEDTGEIGGPRGPEPTRYGDWEQRACSYIFLGKMEINSFYVFMYLQNNGENGRKCSRTSNSLPLFGSSFSGDLVIPVIVNKFFLRKLPPLCLANRGVLSSVLSLPGGYMSSGPSLGMAAWVSEMMSRYFCCSTTLQCALL

SEQ ID NO: 5947 - protein, 324 aa, Arabidopsis thaliana
  unsure (1)..(324): unsure at all Xaa locations
  Clone ID: ARATH-23APR03-C1961_1.p
MASNSALLMKTIFLVLIFVSFAISPATSTAPEECGSESANPCVNKAKALPLKVIAIFVILIASMIGVGAPLFSRNVSFLQPDGNIFTIIKCFASGIILGTGFMHVLPDSFEMLSSICLEENPWHKFPFSGFLAMLSGLITLAIDSMATSLYTSKNAVXGIMPHGHGHGHGPANDVTLPIKEDDSSNAQLLRYRVIAMVRTHXIYIPCFHQMFEAMGLGGCILQAEYTNMKKFVMAFFFAVTTPFGIALGIALSTVYQDNSPKALITVGLLNACSAGLLIYMALVDLLAAEFMGPKLQGSIKMQFKCLIAALLGCGGMSIIAKWA

SEQ ID NO: 5948 - protein, 364 aa, Arabidopsis thaliana
  unsure (1)..(364): unsure at all Xaa locations
  Clone ID: ARATH-23APR03-C19636_1.p
MATDEMKSETKKTEHKQKQSTQIKQDLPPPTIPPLPLPYKSCTLKVSIHCEGCKRKVKKILTSIEGVFKVDIDVKQHKVTVIGIISPEILLKKLNKAGKNAEQLPEIPDPVDNKPKPVDPKEKNKKKKKEEKVQITNEATSSGIDNPEKPGSGECDKPESEKPVDEKCLSGDGGETSGPVKEEKKDVLKEKDSGKEESPSPPADSSAPAAEKKAEDTGGAVPDNGKVGKKXKKKGQSLATTNNPTDGPARTQSLPPPTATDYDRPINQINDHHITTTNNPPRHDLYPYPAQGYYAPQVMYGVSYNVAQPPVSVDAASYYTPPPPYSYAYMHNGYQPSDQNPCQPRPSDSFELFSDENPNGCAIM

SEQ ID NO: 5949 - protein, 221 aa, Arabidopsis thaliana
  Clone ID: ARATH-23APR03-C19637_1.p
MAYVGQSRNVIRHVVSRGTAYHKYENAIHHPLLFACQGVRYRKLEVILTTGIEKLGKAGETVKVAPGYFRNHLMPKLLAVPNIDKYAYLIREQRKMYNHEEVKEEVKVVHKTSEVQTKEYEKAAKRLANANLVLRKLVDKEKFKNRSSKDDKPDVQTPITKEEIVSEVARQLCVKIDPDNVVLAAPLETFGEYEVPLKFPKTIPLPQGTVQWILKVKVRGH

SEQ ID NO: 5950 - protein, 198 aa, Arabidopsis thaliana
  Clone ID: ARATH-23APR03-C19673_1.p
MASSSTRKYETRKRDPNSKIAALLVIDMQNHFSSMAKPILNNVLTTIDICRRASVPVFFTRHNHKSPTDHGMLGEWCNGDVILDGTTDSEIIQEIQGQVTGPDEMVEKNTYSAFNKTRLQENLEKIGVKEVIVIGVMTNLCCETTAREAFIKGFRVFFSTDATATFNEELHEATLMNLAFGFAYLVDCDKLRRSLLGN

SEQ ID NO: 5951 - protein, 686 aa, Arabidopsis thaliana
  Clone ID: ARATH-23APR03-C19696_1.p
MIHPVKAEDADVKREDNFLNFPTPLASLQIIYIYRKQKKVVLKTSYICDIRVCVCVIYNNSFAFGKSKPFEVYKRRTTVVVSREIFVNVVCDALAEYKYVGHDQRADLILSCRIRERKESVTVLLCGTSGCGKSTLSALLGSRLGITTVVSTDSIRHMMRSFVDEKQNPLLWASTYHAGEYLDPVAVAESKARRRRAKKMDSIEDEKAKASEGGKAKNTQQTDVGSTKNTPVLLSPKQMAVEGFKAQSEMVIDNLDRLITAWEERKESVIVEGVHLSLNFVMGLMKKHPSIVPFMVYIANEEKHLERFAVRAKYMTLDPEKNKYVKYIRNIRTIQDYLCKRADKHLVPKINNTNVDKSVAAIHATVFSCLRRREAGEHLYDATTNTVSVIDDEYRNQCTANSLSSKGMFQLIQRKGSSRHLMALLNTDGTFARTWPVTGKVDESGKPVFCNEMIEENGMEHPVYGYLQKAEPVNLQFGLFGISAWPSDGATSRAGSVDDCKADMAETSSRYYSSCCSSPRMSEGTSKELKEDQSVHGSDEEVEDDPPEPDTDFSDDDNKRDHDEVGSVDEQSTKSDEEYDDLAMEDKSYWTDEEEESRDTIAIMSEKNNKQATKEDKYIQNLDLFLRTANQQLVEPLQLCASLLTCENGNTRLWLGKEKMRKRSLSISAIGKHGSGLGDAILLGAP

SEQ ID NO: 5952 - protein, 688 aa, Arabidopsis thaliana
  Clone ID: ARATH-23APR03-C19707_1.p
MEVERSKKDDDLNNGSKSNEEEEISVERIFEESNEIPPPWQKQLTFRALIVSFILAILFTFVVMKLNLTTGIIPSLNISAGLLGFFFVKSWTKILNKAGFLKQPFTRQENTVIQTCVVASSGIAFSGGFGSYLFGMSDVVAKQSAEANTPLNIKNPHLGWMIGFLFVVSFLGLFSVVPLRKIMIVDFKLTYPSGTATAHLINSFHTPQGAKLAKKQVRALGKFFSFSFLWGFFQWFFATGDGCGFANFPTFGLKAYENKFYFDFSATYVGVGMICPYLINVSLLIGAILSWGVMWPLIGAQKGKWYAADLSSTSLHGLQGYRVFIAIAMILGDGLYNFIKVLGRTVFGLYKQFKNKDVLPINDHTSTAPVTISYDDKRRTELFLKDRIPSWFAVTGYVVLAIVSIITVPHIFHQLKWYHILIMYIIAPVLAFCNAYGCGLTDWSLASTYGKLAIFTIGAWAGASNGGVLAGLAACGVMMNIVSTASDLMQDFKTGYMTLASPRSMFLSQAIGTAMGCVISPCVFWLFYKAFPDFGQPGTAYPAPYALVYRNMSILGVEGFSALPKHCLMLCYIFFAAAVIVNGIRDALGPKWARFIPLPMAMAIPFYLGGYFTIDMCLGSLILFIWRKLNKPKADAYSSAVASGLICGEGIWTLPSSILALAGVKAPICMKFLSMASNNKVDAFLNPS

SEQ ID NO: 5953 - protein, 534 aa, Arabidopsis thaliana
  Clone ID: ARATH-23APR03-C19725_1.p
MEVSSVKKLEQLEYSLESVTDLSSSSVSSSSPAVATFSYVDGVTELRFLQSDSTHCFNFDLASAQLFKLGPVHFICVSDGSSSSEEKSFSKGVNIKFKNEKDSKDFCESFEEWRNDSVVQGSSLQNGTVSANKSKFDNKIEASSAKMYFHYYGQLLHQQNMLQDYVRTGTYYAAVMENHSDFAGRVVVDVGAGSGILSMFAAQAGAKHVYAVEASEMAEYARKLIAGNPLFADRITVIKGKVEDIELPEKADILISEPMGTLLVNERMLESYVIARDRFMTPKGKMFPTVGRIHMAPFSDEFLFIEMANKAMFWQQQNYYGVDLTPLYGSAHQGYFSQPVVDAFDPRLLVASPMFHMIDFTQMKEEDFYEIDILLKFTASMCTTMHGLACWFDVLFDGSTVQRWLTTAPGAPTTHWYQIRCVLSHPIYLMASQEITGRLHLIAHSAQSYTIDLTLSAKMWGPGASQGGILQSSTCKFDLKEPYYRMSQPQAYPVAQEPPLQPQPELSTQDIQTPNDELEEELLQQLPQNPSAQL

SEQ ID NO: 5954 - protein, 451 aa, Arabidopsis thaliana
  Clone ID: ARATH-23APR03-C19728_1.p
MAPITFRKSYTIVPAEPTWSGRFPLAEWDQVGTITHIPTLYFYDKPSESFQGNVVEILKTSLSRVLVHFYPMAGRLRWLPRGRFELNCNAEGVEFIEAESEGKLSDFKDFSPTPEFENLMPQVNYKNPIETIPLFLAQVTKFKCGGISLSVNVSHAIVDGQSALHLISEWGRLARGEPLETVPFLDRKILWAGEPLPPFVSPPKFDHKEFDQPPFLIGETDNVEERKKKTIVVMLPLSTSQLQKLRSKANGSKHSDPAKGFTRYETVTGHVWRCACKARGHSPEQPTALGICIDTRSRMEPPLPRGYFGNATLDVVAASTSGELISNELGFAASLISKAIKNVTNEYVMIGIEYLKNQKDLKKFQDLHALGSTEGPFYGNPNLGVVSWLTLPMYGLDFGWGKEFYTGPGTHDFDGDSLILPDQNEDGSVILATCLQVAHMEAFKKHFYEDI

SEQ ID NO: 5955 - protein, 252 aa, Arabidopsis thaliana
  Clone ID: ARATH-23APR03-C19733_1.p
MPPCTVVTTVTHVASSILTSSTALAVSTRIFPAVSLSLLDFSNLRRRVNAPSPRRLVVRAARTESAGVKLGARAPNFELPEPLTGNLWKLEDFELYPSLLVMFICNHCPFVIHLKKDIVKLCNFYMKKGLAVVAISSNSVVTHPQDGPEFMAEDAKVFKYPFPYLYDESQEVAREFGAVCTPEFFLYKKDGRRPFELVYHGQFDDSRPSSNSPVTGRDLSLAIDLSLSCQPIPSNQKPSVGCSIKWHPETKS

SEQ ID NO: 5956 - protein, 277 aa, Arabidopsis thaliana
  unsure (1)..(277): unsure at all Xaa locations
  Clone ID: ARATH-23APR03-C19753_1.p
FHWWPKSGGCHSFFGKDQDFFSHSTAPIRGEYXQKSECPSNPXQCTKLPNSLSDAWVHYVXSEITPQQTRTRXSVSKRVLDKKSPCNFLVFGLGHDSLMWASLNHGGRTLFLEEDEAWIETVTKKFPNLESYHVVYDTKVKDSNKLMELKRTEDCKAVSDPRDSKCALSLKGFPADVYETQWDVIMVDAPTGYHDEAPGRMSAIYTAGLLARNRYDGGETDVFVHDINRPVEDEFSVAFLCGGYMKEQQGRLRHFNIPSHRASFGTPFCPADISRRF

SEQ ID NO: 5957 - protein, 98 aa, Arabidopsis thaliana
  Clone ID: ARATH-23APR03-C19800_1.p
WIRPNRPSSNSSRTGKLFSFVSLVIEFEKLCCAVVKEMAKSKNHTAHNQSAKAHKNGIKKPRRHRHTPTRGMDPKFLRNQRYARKHNVKSGENAGVEE

SEQ ID NO: 5958 - protein, 169 aa, Arabidopsis thaliana
  Clone ID: ARATH-23APR03-C19815_1.p
MAYATILMIFSVVALMSGERAHAAVDCSSLILNMADCLSFVTSGSTVVKPEGTCCSGLKTVVRTGPECLCEAFKNSGSLGLTLDLSKAASLPSVCKVAAPPSARCGLSVSGDPPATAPGLSPTAGAGAPALSSGANAATPVSSPRSSDASLLSVSFAFVIFMALISSFY

SEQ ID NO: 5959 - protein, 339 aa, Arabidopsis thaliana
  Clone ID: ARATH-23APR03-C198279_1.p
MKPKSKVAESTAASCFLVMSLLCSCIIGDQMETNNEGLSYSYYEKTCPKVEEIVRSSLSSMFILDPTSPAALLRLMFHDCQVQGCDASILLEPIRDQQFTELDSAKNFGIRKRDLVGSIKTSLELECPKQVSCSDVIILAARDAVALTGGPLISVPLGRKDSLSTPSKHVADSELPPSTADVDTTLSLFANKGMTIEESVAIMGAHTIGVTHCNNVLSRFDNANATSENMDPRFQTFLRVACPEFSPTSQAAEATFVPNDQTSVIFDTAYYDDAIAGRGNLRIDSEIGADPRTRPFVEAFAADQDRFFNAFSSAFVKLSSYKVLTGNEGVIRSVCDKVD

SEQ ID NO: 5960 - protein, 297 aa, Arabidopsis thaliana
  Clone ID: ARATH-23APR03-C1982_1.p
MVPYQELTLQRSFSYNSRKINPVTSPARSSHVRSPSSSALIPSIPEHELFLVPCRRCSYVPLSSSSSASHNIGKFHLKFSLLLRSFINIINIPACKMLSLPSPPSSSSSVSNQLISLVTGGSSSLGRRVTGTLYGHKRGHVTFSVQYNQRSDPVLLLDLAMSTATLVKEMSSGLVRIALECEKRHRSGTKLFQEPKWTMYCNGRKCGYAVSRGGACTDTDWRVLNTVSRVTVGAGVIPTPKTIDDVSGVGSGTELGELLYMRGKFERVVGSRDSEAFYMMNPDKNGGPELSIFLLRI

SEQ ID NO: 5961 - protein, 307 aa, Arabidopsis thaliana
  Clone ID: ARATH-23APR03-C19830_1.p
MEGRLNNMWRLTVNESKFVESALQSELRVDGRGLYDYRKLTIKFGKEYGSSQVQLGQTHVMAFVTAQLVQPYKDRPSEGSFSIFTEFSPMADPSFEPGHPGESAVELGRIIDRALRESRAVDTESLCVLAGKLVWSVRIDLHILDNGGNLVDAANVAALAALMTFRRPDCTVGGDNSQDVIIHPPEEREPLPLIIHHLPIAFTFGFFNKGSILVMDPTYVEEAVMCGRMTVTVNANGDICAIQKPGEEGVNQSVILHCLRLASSRASATTKIIRDAVEAYNRERSSQKVKRHHTLAKSEVLGPIVVV

SEQ ID NO: 5962 - protein, 386 aa, Arabidopsis thaliana
  Clone ID: ARATH-23APR03-C19848_1.p
MSVHVKEEPVLVPNCDVENTELAVFNGNGESELENFGTCVDEITDRVNQLEQKVVEVEHFYSTKDGAAQTNTSKSNSGGKKIAISQPNNSKGNSAGKEKSKGKHVSSPDLMRQFATMFRQIAQHKWAWPFLEPVDVKGLGLHDYYKVIEKPMDLGTIKKKMESSEYSNVREIYADVRLVFKNAMRYNEEKEDVYVMAESLLEKFEEKWLLIMPKLVEEEKKQVDEEAEKHANKQLTMEAAQAEMARDLSNELYEIDLQLEKLRESVVQRCRKLSTQEKKGLSAALGRLSPEDLSKALKMVSESNPSFPAGAPEVELDIDVQTDVTLWRLKVFVQEALKAANKSSGGTNAQNNNNTGTGEINKNNAKRRREISDAINKASIKRAKKA

SEQ ID NO: 5963 - protein, 234 aa, Arabidopsis thaliana
  Clone ID: ARATH-23APR03-C19858_1.p
MWVGVPVAAAVTTVGGHRIPVLVAASGKRSMASNSGSFTTLKETVSVEKEIKKSKFIAIAGPISSEQSAQMFLSQVRDPRASHNCWAYKIGDHHHRCSDDGEPSGTAGKPIQSAILSSGLDRVMVVVIRYFGGIKLGTGGLVRAYGGVTSDCLKTAPSCLVKSKVQMGVEVTFDLLGVLYNQLQSCHAEDIKEDYDTGKDGTAMVSFKVEFDLVDKLEDAIKSNCRRDLVFYKT

SEQ ID NO: 5964 - protein, 209 aa, Arabidopsis thaliana
  Clone ID: ARATH-23APR03-C19868_1.p
MKLAKLIPKRFFIRSKDRSTVSKSPTAFSFGSASSSSGQDCKNSGGDGGGGSVTPTSILPEVPSPYSYVEILQAFKLIDRDNDGAVSRHDLESLLSRLGPDPLTEEEINVMLKEVDCDGDGTIRLEELASRVVSLDPARDSTELKETFEFFDADRNGLISADELLRVFSTIGDERCTLDDCKRMIADVDEDGDGFVCFTEFSRMMDLQR

SEQ ID NO: 5965 - protein, 239 aa, Arabidopsis thaliana
  Clone ID: ARATH-23APR03-C19879_1.p
MEIDREDGRTPNQLRPLACSRNILHRPHGSASWSQGDTKVLAAVYGPKAGTKKNENAEKACFEVIWKPKSGQIGKVEKEYEMILKRTIQSICVLTVNPNTTTSVIIQVVHDDGSLLPCAINAACAALVDAGIPMKHLAVAICCCLAENGYLVLDPNKLEEKKMTAFAYLVFPNTTLSVLPEGSSVAEGEPVEHGIITSITHGVMSVDDYFLCVENGRAATASLSAFFRKNFQQSSSKAG

SEQ ID NO: 5966 - protein, 326 aa, Arabidopsis thaliana
  Clone ID: ARATH-23APR03-C19892_1.p
MRFNKGTKVEVLSKSSVPSGAWRSAEIISGNGHYYTVMYDHNDGTERVPRKSMRPEPPRLQVLDAWCPGDILEVFQSCSWKMAIVSKVLGNGCFLVRLLGSSLKFKVTKSDIRVRQSWQDNEWIMIGQGTSRLSAQTSTGELRRKVNPKGDYISSESKDKLDESDVPLSVGLKKRTYSLVEPHNQTRALAAYPPRFREEVKEEEEDRESVASSVGSCCMDTDGLSAVSFNPIETGNSSDTESSSCGYGKVKKLVVPRKGSEAADVHRLELDAYRSSIERLHASGPIITWEQETWITNLRLKLNISNEEHLMQIRNLISDDNSTIYR

SEQ ID NO: 5967 - protein, 104 aa, Arabidopsis thaliana
  Clone ID: ARATH-23APR03-C19920_1.p
MTGKAKPKKHTAKELQAKADAALTNRGGGKAGLADRTGKEKGGHAKYECPHCKITVPDLKTMQIHHESKHPKLTYEEPRNLHEALAAPAESSKPKPGIRGSLKK

SEQ ID NO: 5968 - protein, 1368 aa, Arabidopsis thaliana
  Clone ID: ARATH-23APR03-C19926_1.p
MGEKAIDEDKVEAMKSSKTSLVFAINGQRFELELSSIDPSTTLVDFLRNKTPFKSVKLGCGEGGCGACVVLLSKYDPLLEKVDEFTISSCLTLLCSIDGCSITTSDGLGNSRVGFHAVHERIAGFHATQCGFCTPGMSVSMFSALLNADKSHPPPRSGFSNLTAVEAEKAVSGNLCRCTGYRPLVDACKSFAADVDIEDLGFNAFCKKGENRDEVLRRLPCYDHTSSHVCTFPEFLKKEIKNDMSLHSRKYRWSSPVSVSELQGLLEVENGLSVKLVAGNTSTGYYKEEKERKYERFIDIRKIPEFTMVRSDEKGVELGACVTISKAIEVLREEKNVSVLAKIATHMEKIANRFVRNTGTIGGNIMMAQRKQFPSDLATILVAAQATVKIMTSSSSQEQFTLEEFLQQPPLDAKSLLLSLEIPSWHSAKKNGSSEDSILLFETYRAAPRPLGNALAFLNAAFSAEVTEALDGIVVNDCQLVFGAYGTKHAHRAKKVEEFLTGKVISDEVLMEAISLLKDEIVPDKGTSNPGYRSSLAVTFLFEFFGSLTKKNAKTTNGWLNGGCKEIGFDQNVESLKPEAMLSSAQQIVENQEHSPVGKGITKAGACLQASGEAVYVDDIPAPENCLYGAFIYSTMPLARIKGIRFKQNRVPEGVLGIITYKDIPKGGQNIGTNGFFTSDLLFAEEVTHCAGQIIAFLVADSQKHADIAANLVVIDYDTKDLKPPILSLEEAVENFSLFEVPPPLRGYPVGDITKGMDEAEHKILGSKISFGSQYFFYMETQTALAVPDEDNCMVVYSSTQTPEFVHQTIAGCLGVPENNVRVITRRVGGGFGGKAVKSMPVAAACALAASKMQRPVRTYVNRKTDMITTGGRHPMKVTYSVGFKSNGKITALDVEVLLDAGLTEDISPLMPKGIQGALMKYDWGALSFNVKVCKTNTVSRTALRAPGDVQGSYIGEAIIEKVASYLSVDVDEIRKVNLHTYESLRLFHSAKAGEFSEYTLPLLWDRIDEFSGFNKRRKVVEEFNASNKWRKRGISRVPAVYAVNMRSTPGRVSVLGDGSIVVEVQGIEIGQGLWTKVKQMAAYSLGLIQCGTTSDELLKKIRVIQSDTLSMVQGSMTAGSTTSEASSEAVRICCDGLVERLLPVKTALVEQTGGPVTWDSLISQAYQQSINMSVSSKYMPDSTGEYLNYGIAASEVEVNVLTGETTILRTDIIYDCGKSLNPAVDLGQIEGAFVQGLGFFMLEEFLMNSDGLVVTDSTWTYKIPTVDTIPRQFNVEILNSGQHKNRVLSSKASGEPPLLLAASVHCAVRAAVKEARKQILSWNSNKQGTDMYFELPVPATMPIVKEFCGLDVVEKYLEWKIQQRKNV

SEQ ID NO: 5969 - protein, 556 aa, Arabidopsis thaliana
  Clone ID: ARATH-23APR03-C19932_1.p
MQRFCVCSPSSYRLNPITSMATGSGSLIWFRKGLRVHDNPALEYASKGSEFMYPVFVIDPHYMESDPSAFSPGSSRAGVNRIRFLLESLKDLDSSLKKLGSRLLVFKGEPGEVLVRCLQEWKVKRLCFEYDTDPYYQALDVKVKDYASSTGVEVFSPVSHTLFNPAHIIEKNGGKPPLSYQSFLKVAGEPSCAKSELVMSYSSLPPIGDIGNLGISEVPSLEELGYKDDEQADWTPFRGGESEALKRLTKSISDKAWVANFEKPKGDPSAFLKPATTVMSPYLKFGCLSSRYFYQCLQNIYKDVKKHTSPPVSLLGQLLWREFFYTTAFGTPNFDKMKGNRICKQIPWNEDHAMLAAWRDGKTGYPWIDAIMVQLLKWGWMHHLARHCVACFLTRGDLFIHWEQGRDVFERLLIDSDWAINNGNWMWLSCSSFFYQFNRIYSPISFGKKYDPDGKYIRHFLPVLKDMPKQYIYEPWTAPLSVQTKANCIVGKDYPKPMVLHDSASKECKRKMGEAYALNKKMDGKVDEENLRDLRRKLQKDEHEESKIRNQRPKLK

SEQ ID NO: 5970 - protein, 607 aa, Arabidopsis thaliana
  unsure (1)..(607): unsure at all Xaa locations
  Clone ID: ARATH-23APR03-C19942_1.p
MSQQISGNNNIPLSEVYWSLVNKADKKFSKIRDLPFYERSRYENYFFKVFKVYTQLWKFQQENRQKLVEAGLKRWEIGEIASRIAQLYYGHYMRTSDAGYLSESYVFYEAILTREYFKDGLFQDLNIANKQLRFLARFLMVCLVLGRREMVHQLVDQFKRLIDECKRTFQETDFKEWKVVAQEIVRFLKSDTAFMNIRPLRYSLVLDPNLDAGTPRASRSLRLTDAILSSYYCNEVKYSELTLDSFRMLQCLEWEPSGSLYQSTGAKMGQNAPVGVARINSQSMNDPTLPPNPRKAVLYRPSITHFLAVLATICEELPSHGILLLYLSASGKIEQISSSPLSARSATSVEENILRDFESHTIKQETEPSLQITPSGQSLRQISEDAVSTPCGLSFGSHGLTGSSYIYPSDLVPFTRKPLFIIIDSDSSTVFKNICGAEKGEPAXLLLSPSHTPPLISADFSRQPSGSLFTIFLTSPVQAFCLLSEISASDMETDIFTKAEKLLSSSMNEWASTLATSDTLHPVWSQILKDPFLRRLLLRFIFCRAVLALYTPVFNNKQNQPECCPSLPESLLPTAPAVQSAVFQMANVFGATSKFTIPQDITMLESF

SEQ ID NO: 5971 - protein, 500 aa, Arabidopsis thaliana
  unsure (1)..(500): unsure at all Xaa locations
  Clone ID: ARATH-23APR03-C19945_1.p
MEFSSFLFTILLFSLNISPLVSAHGSNHEDFLKCLSYRMNDNTVEPKVIHTSKDSSFFSILDSSIQNPRFSVSETPKPVSIITPVKASDVQTVIRCAQLHGIHVRTRSAGHCYEGLSYIAYNKPFAVIDLRNLRSISLDVDNXRTGWVQTGSNAWGIVVXIGKTSKSQAILAGIDPTVCVGGQFRGGGNCSLLWKYGLAADNIIDALVVDASGRILDRQAMGEDYFWAIRGGGGSSFGVILSWKVKLVDVPSTITVFKVQKTSKTEAVRIIKKWQYAADKVPDDLFIRTTLERSNKNAVHALFTGLYIGPVNNLLALMEEKFPELGLEKEGCEEMSWIESVLWFADFPKGESLGVLTNRERTSLSFKGKDDFVQEPIPEAAIQEIWRRLEAPEARLGKIILTPFGGKMSEMAEYETPFPHRGGNLYEIQYVAYWREEEDKNKTETDKYLKWVDSCLQNLMTPDMIRNLKEVAYVNFKDMDWGMYFGKKXTKYERGKSWGV

SEQ ID NO: 5972 - protein, 345 aa, Arabidopsis thaliana
  Clone ID: ARATH-23APR03-C1996_1.p
MAEACGVRRMKLGSQGLEVSAQGLGCMGLSAFYGAPKPENEAIALIHHAIHSGVTLLDTSDIYGPETNEVLLGKALKDGVREKVELATKFGISYAEGKREVRGDPEYVRAACEASLKRLDIACIDLYYQHRVDTRVPIEITMGELKKLVEEGKIKYIGLSEASASTIRRAHAVHPITAVQIEWSLWTRDVEEEIIPTCRELGIGIVAYSPLGRGFFASGPKLVENLEKDDFRKALPRFQEENLDHNKIVYEKVCAISEKKGCTPGQLALAWVHHQGDDVCPIPGTTKIENLKQNIGALSVKLTPEEMTELEAIAQPGFVKGDRYSNMIPTFKNAETPPLSAWKAA

SEQ ID NO: 5973 - protein, 486 aa, Arabidopsis thaliana
  Clone ID: ARATH-23APR03-C199_1.p
MKIPASSPQDTTNNNNNTNSTDSNHLSMDEHVMRSMDWDSIMKELELDDDSAPNSLKTGFTTTTTDSTILPLYAVDSNLPGFPDQIQPSDFESSSDVYPGQNQTTGYGFNSLDSVDNGGFDFIEDLIRVVDCVESDELQLAQVVLSRLNQRLRSPAGRPLQRAAFYFKEALGSFLTGSNRNPIRLSSWSEIVQRIRAIKEYSGISPIPLFSHFTANQAILDSLSSQSSSPFVHVVDFEIGFGGQYASLMREITEKSVSGGFLRVTAVVAEECAVETRLVKENLTQFAAEMKIRFQIEFVLMKTFEMLSFKAIRFVEGERTVVLISPAIFRRLSGITDFVNNLRRVSPKVVVFVDSEGWTEIAGSGSFRREFVSALEFYTMVLESLDAAAPPGDLVKKIVEAFVLRPKISAAVETAADRRHTGEMTWREAFCAAGMRPIQLSQFADFQAECLLEKAQVRGFHVAKRQGELVLCWHGRALVATSAWRF

SEQ ID NO: 5974 - protein, 284 aa, Arabidopsis thaliana
  Clone ID: ARATH-23APR03-C20054_1.p
MMIARCSLFPPPCFSAVRIRCFAGETSDTGILFREKLIYLQDLNVDPHKALRVNPSLRSAPISSVVSVETLLSSTGLSRPAVGRILDMFPDLLTSDPESEILPVLRFLSNEISISEQDIPKSISRCPRLLISSVDYQLRPALTFLKTLGFVGRDTITSRNTVLLVSNVERTLIPKIEYLEEGLGFTREEVAKMVVRSPALLTYSVDNNLVPKVEFFIEEMRGDVKELKRFPQYFSFSLERKIKPRHRLLKEHGILMPLSEMLKVSDGQFNHWLLELRLRSAERR

SEQ ID NO: 5975 - protein, 221 aa, Arabidopsis thaliana
  Clone ID: ARATH-23APR03-C2012_1.p
MEKRGVIDTWIDKHRSIYTASTRQAHVVLIRVRSVHFKSFGTWLGQDYLFVRRFVPFVASVLIRACKDSGESSDMEVVLGGIASLNDEIEWFKREGSKWDVDFSTVVPQRANQEYGRFLEDLMSSEVKYPVIMTAFWAIEAVYRMLFPHCLEDGILILAESLERELGSKTKTESQYCSSVKNIAERCLENASGEVLGEAEDVLVRVLELEVAFWEMSRGGQ

SEQ ID NO: 5976 - protein, 163 aa, Arabidopsis thaliana
  Clone ID: ARATH-23APR03-C20266_1.p
MTQIDEEMASLSTSLLGIRRGSSNKNKAEDKTKNAVFCKKHPKHRQSPGVCSLCLNERLSLFIKAASSRRPRSRQILSTSSSTTSSLSSDGSSSVSSCPSPIVDRRRYLLMSGGSGRGEKVISWMTKSRSVAYKVDDEKRRKKKTKTNSGFFFGLVMGTKKRQ

SEQ ID NO: 5977 - protein, 217 aa, Arabidopsis thaliana
  Clone ID: ARATH-23APR03-C20285_1.p
MEETKSRFKRICVFCGSSSGKKPSYQEAAIQLGNELVERRIDLVYGGGSVGLMGLVSQAVHHGGRHVLGVIPKTLMPREITGETIGEVKAVADMHQRKAEMARQADAFIALPGGYGTLEELLEVITWAQLGIHRKPVGLLNVDGYYNSLLTFIDKAVDEGFISPMARRIIVSAPNAKELVRQLEEYEPEFDEITSKLVWDEVDRISYVPGSEVATAT

SEQ ID NO: 5978 - protein, 131 aa, Arabidopsis thaliana
  Clone ID: ARATH-23APR03-C203195_1.p
MERVCCMCGDVGFSDKLFSCGHCRCRFQHSYCSNYYGQFAEPTEICDWCRSDDRKLSNVARHGGSSSKKPSSSVKYENDFSNRSEYSPGHRIKHNNNRHDQVAKGVAGDGGGVTSPKTATRRYKLLKDVMC

SEQ ID NO: 5979 - protein, 320 aa, Arabidopsis thaliana
  Clone ID: ARATH-23APR03-C2031_1.p
MSNPLKESREDIANSTPHMRDNEYVRLVVAHEASPAETVLSLSQSEVQSKKFMWWLKALGICAVALLLTLVFGKWGVPFVFQKVLIPILQWEATAFGRPMLAIVLVVSLALFPVFLIPSGPSMWLAGMIFGYGLGFVIIMVGTTIGMVLPYLIGLMFRDRLHQWLKRWPRQAAVLRLAAEGSWFHQFRVVAIFRVSPFPYTIFNYAIVVTSMRFWPYFFGSIAGMIPEAFIYIYSGRLIRTFADVQYGHQRLTTVEIVYNVISLVIAVVTTVAFTVYAKRALRELQNAEANEDEEVQVRKVRFEMKNVVQHEEDNHQRLP

SEQ ID NO: 5980 - protein, 394 aa, Arabidopsis thaliana
  Clone ID: ARATH-23APR03-C20340_1.p
MDSSYLRISLSFLFWALLLSPAVSQSSSCSSQTFSGVKSYPHCLDLPDLKAILHYSYDASNTTLAVVFSAPPSKPGGWIAWAINPKSTGMAGSQALVASKDPSTGVASVTTLNIVSYSSLVPSKLSFDVWDVKAEEAANDGGALRIFAKVKVPADLAASGKVNQVWQVGPGVSNGRIQAHDFSGPNLNSVGSLDLTGTTPGVPVSGGGGAGNSRIHKRNIHGILNAVSWGLLFPIGAMIARYMRIFESADPAWFYLHVSCQFSAYVIGVAGWATGLKLGSESKGIQYNTHRNIGICLFSIATLQMFAMLLRPRKDHKFRFVWNIYHHGVGYSILILGIINVFKGLSILNPKHTYKTAYIAVIGTLGGITLLLEVVTWVIVLKRKSAKSTKPLKA

SEQ ID NO: 5981 - protein, 238 aa, Arabidopsis thaliana
  unsure (1)..(238): unsure at all Xaa locations
  Clone ID: ARATH-23APR03-C20345_1.p
MPRPGPRPYDCIRRAWHSDRHQPMRGLLIQEIFRIVCEIHSQSTRKNTEWQEKLPVVVLRAEEIMYSKANSXAEYMDMKTLLDRTNDAINTIIRLDETTETGEFLQPCIEAALHLGCTPRRASRSQRNINPRCYLSQDSTNLDNMLSQVFMKPNNFAPKNLAVAQENCPVSKYSAYPLCYSFRPISDSCKSKNSRPASLIDATNGITFGGCECDLSLRLGPLGPPTQKRSKISSNNNN

SEQ ID NO: 5982 - protein, 81 aa, Arabidopsis thaliana
  Clone ID: ARATH-23APR03-C203465_1.p
MGGNGIRALVGVIASLGLIVFLLVGILANSAPSVPSSENVKTLRFSGKDVNLFHVSKRKVPNGPDPIHNRKAETSRRPPRV

SEQ ID NO: 5983 - protein, 464 aa, Arabidopsis thaliana
  Clone ID: ARATH-23APR03-C20377_1.p
MMSNGGDSSEIVRELEELKLKKAEIEHRISTLEAKLQDTAAVELYDAVSNGDSYLTAPELEHGLSPDQIYRYSRQLLLPSFAVEGQSNLLKSSVLVIGAGGLGSPALLYLAACGVGQLGIIDHDVVELNNMHRQIIHTEAFIGHPKVKSAAAACRSINSTIKVDEYVEALRTSNALEILSQYDIIVDATDNPPSRYMISDCCVLLGKPLVSGAALGMEGQLTVYNHNGGPCYRCLFPTPPPTSACQRCSDSGVLGVVPGVIGCLQALETIKLASLVGEPLSERMLLFDALSARMRIVKIRGRSSQCTVCGDNSSFNKQTFKDFDYEDFTQFPLFAGPLNLLPAESRISSKEFKEILQKKEQHVLLDVRPSHHYKIVSLPDSLNIPLANLETRLNELTSALKEKGNGHANTESCTNPSVFVVCRRGNDSQRAVQYLRESGFDSAKDIIGGLEAWAANVNPNFPTY

SEQ ID NO: 5984 - protein, 68 aa, Arabidopsis thaliana
  Clone ID: ARATH-23APR03-C203804_1.p
MATKASNLVVFLLSLLLLFLLISFQVGVADATRNKRQGQEQRVDYDYPRPPTAPIYLPPSKSRKGKGP

SEQ ID NO: 5985 - protein, 344 aa, Arabidopsis thaliana
  Clone ID: ARATH-23APR03-C20385_1.p
MDTSLSHHGSLPFPPSRRNFVKQNRGGDCVFLPSRRKFRYDSLVVVSAASSGQSIDAPLVPRSPQGRFLSSVLVKKRQLFHFAVADLLKQLADDKEASLSRMFLSYGSDEASLHRRIAQLKESDCQIAIEDIMYMLILYKFSEIRVPLVPKLPSCIYNGRLEISPSKDWELESIHSFDVLELIKEHSNAVISLRVNSSLTDDCATTEIDKNRLSKVYTASVLYGYFLKSASLRHQLECSLSQHHGSFTKQLRHYISEFDPKILRRCAKPRSHEAKSLIEKQSLALFGPEESSKESIVTSFSSLKRLLLEAVAFGTFLWDTEEYVDGAFKLKENENAEEETNSSV

SEQ ID NO: 5986 - protein, 352 aa, Arabidopsis thaliana
  Clone ID: ARATH-23APR03-C20405_1.p
MEPPSSVVDDAEFWLPTEFLTDDDFLVEKENNSVGIDDSLFPYEPRHGFGTFGSTVKPNTVKEDDEESFLAGLTRQMVMSSLKDDFSGGVCGNHAFPAGNDHKAWEMNRSPPCVAGTGCCCLNQRFNQNLNSRVSSWDLYCAAERMSINDEPYHSGRGLLGSPAKLSATVKNHSNNGTGYYNNHQSLQYQKLQAIQFQQLKQQQLMKHRRQLVRQNRGVRVNGNKNVGPVDLSSSAWSNQFPRRDVMRAVFIGDHTGKRGSTGTGVFLPRSVNHTSRTETREKPTISTVLVPARLAQVLNLNLGEPVRSTATLNDVSWRQRSNNGGFSSQMVGGVRAEQSVQEPRLPSEWAY

SEQ ID NO: 5987 - protein, 476 aa, Arabidopsis thaliana
  Clone ID: ARATH-23APR03-C20417_1.p
MARRLFLLLLAVTAGLSLTGTTVRAVGINWGTEASHPLPPSKVVELLKSNGIVKVKLFDADPKVLRALSGSNIGVTIGIQNSMLKSLNASVKVAESWVHDNVTRYFNGGNRVRIEYVAVGEEPFLQSYGNQYKPFVIGAAMNIQNALVKANLANEVKVVVPSSFDSFLSESGRPSSGHFRADLNKTMIELLSFLTKHHSPFFVTISPFLSFHQNKNISLDFSLFKETAKAHKDGRKTYRNSFDLSYDTLVSALFTIGFSEVDIVVSKIGWPTDGAENATSLTAEAFFKGLIVHLEKKTASLPRPPVETYIESLLDEDQRNLSAGNFERHWGVFTFDGQAKYNFSFNHKNQVNAQNVQYLPPKWCVVNNNKDLSNASARALEACAVADCTSILPGGSCSGIRWPGNVSYAFNSLYQQNDHSAESCNFGGLGLITTVDPSEDNCRFSIQLDTSHSSSQTPNFFQSWPLLLLFLLSGLF

SEQ ID NO: 5988 - protein, 205 aa, Arabidopsis thaliana
  Clone ID: ARATH-23APR03-C20428_1.p
MAPPQNLFLVAIAFAVIFTASIVHGRHNGAEDIVHSSCEHASYPSLCVRTLSSYSGPTITNRRDLAQAAIKISLSHAQSAAKKLAVVRDSVGKKKQEKAALVDCVEMIGDSVDELSRTLGVLKHLRVSGGSAKEFRWQMSNAQTWASAALTDDDTCLDGFQGMDDGEIKTEVKQWMTKVARVTSNALYMVNQLDETRGKPHDVHL

SEQ ID NO: 5989 - protein, 377 aa, Arabidopsis thaliana
  Clone ID: ARATH-23APR03-C20431_1.p
MDFVNNLDTDTSLSILSCLDDPSDIVRASAVSRSWRQFVVKYSLSKNLCLKLFHQLSNVDHIIETSNDRNGESSEAGSSSLMDTRLLEKEHRAFALLARGCMSSPIESCIADAIRASSTDNYPVESILNTLEKRDRIGRTPSYWSSTGQHKTTVPESLLYKLIGDLCLITEVSIHPFQAYFQRGHPIYSSHYVRFRLGHEKDNSPHYNNSQDKKGEPGKSSIESNYVWTYTSQEFSMAQENRLQSFQLPEPVLCIGGYLLVEFLGRVQTQEMDGQYYICVSHVKVEGRSLAKSFRVENVDDNGKFGLKVLSYNDPKKMEEMDAEAGQDMDAEAGQSQLRNLEQLLNLLHRHPLDVVDYVWPDESDDEYAESEDEAEP

SEQ ID NO: 5990 - protein, 191 aa, Arabidopsis thaliana
  Clone ID: ARATH-23APR03-C20443_1.p
MCAPQPSNEFPLIFRKDGKTCVFWDVEDYPIPAGLHPRSIRRRIVKDVKKYGCDAEVLIHAYANDNTVSVTMRRQFSAAGIKLEVFTQAGDKYARHCSLYGDIMLWSLENPPPSNIIVIAKIIDDDLADRIGCLTTVWSYGLLISQVKPEWLERLFPVGSYPSFLAAIFDGGLPKSSKANKDRFPLDESDD

SEQ ID NO: 5991 - protein, 716 aa, Arabidopsis thaliana
  unsure (1)..(716): unsure at all Xaa locations
  Clone ID: ARATH-23APR03-C20452_1.p
MILRTPQPKRLRSDAGESPVPTGATGSGNQVVIYEDSPLPAPAPAPLXSSHDHPADQHLCLYQCRQMVKADVLDALSKEEKQVDESQTKFLTLNVHFTXLDSERKHFXDKFLYXMPQEQLLMEINNSQERYTKELQSCHELEVKLQNEMNLRKKAESSAATAEEKAKLLEDKLTELSGSVDREKKRLNNDIAQLGKEAKLSVARIGADLERMXCRAQNAETESNLLRSQLEHLKLIFDECLQEKTEVDKKLSSFTSEAASSSDNSVLVKHLQEELKRYEAEVREARKLKSRHLDAELLNVNLLEEQSRRERAESELSKFHDLQLSMEKLENELSSWKSLLNDIPGVSCPDDIVMRFSVLQNEVVQSTMKIGEASTRIKQLEETLEAIQLGRQNAVSEAALAKEKSEALKTDVKRIEVMLTLVTEEKEQLKAVVNELRKSNSEGSVSGAADGALIQGFESSLAKKENYIKDLEQDLNQLKDVNNRQRTEIELLNEKLVDEARRNKSLERDSDRLRSEISLLESKLGHGDYSAANTRVLRMVNTLGVENEAKQTIEALQAELQKTKERLQAVEELKSQSGDAGKLVDSHITGKIAQLKEQNATLEKREERYKTVFADRISVFRRACCELFGYKIVMDEHQRPNGIPVTRFTLQSIYAQSDDEKLEFEYESGNTSILNNEYASQGDIAKQIEIFIRKFNSIPAFTANLTMESFNRRTLY

SEQ ID NO: 5992 - protein, 280 aa, Arabidopsis thaliana
  unsure (1)..(280): unsure at all Xaa locations
  Clone ID: ARATH-23APR03-C204538_1.p
MVSDGGGENNRAEADQLLATSEKLLASSDFHGPKTFAIRACEXDPSRTDAADYILAIADTHLAGETTIGDSKVPDWYAVLRISRLTQSPEHVATQYRRLTLLLKLNINRLPFADQALKLVSDAWYVLSDPPRKSIYDRELQLSQTGQSEKFQDSPLQSQAETLENPTATSFWTACPYCFSLFEYPKGYEECTLRCQMCRKAFEAVKTQTPPVESNGEGVYFGSWAMFPVGLTSHPNTSNWSPISHLSVCTGQSSSDQQSNLKATPRNDDVDIYIAISDDD

SEQ ID NO: 5993 - protein, 382 aa, Arabidopsis thaliana
  Clone ID: ARATH-23APR03-C20461_1.p
MAHEEKRPWEFSLSLPWELIEEILSRVPPESLLRFKTVSKQWNALFRDKTFINNHKMTFRFILATKSKIYSVSIDPKIVVRELTLDIPGLESHEIPKKLVDCDKLLLCDMEKGVVLWNPWLRHSTWIDQGSNHTRMESYGIGYNNKGSYKIFAFCDRKENHTQRLLTIHDSASDAWKDREPIDNSQGKQIVHNIYTKISGVSLNGNLYLVTYFETTDLVYHLIEINSSSESVVKFCDLPCGTSNFLKDAFVLRVFEGDRFSLLKQCHATKKIEIWVSKYKINNNLDRDVEWIKFMEVSSPNLPDLVDGFDSQPSYFIEDKRLVVCSCNETGRAWIYVFGENKLISKTQIDSVVDLWPSHWTFIPSLVPVPRAQREEPAELQV

SEQ ID NO: 5994 - protein, 628 aa, Arabidopsis thaliana
  unsure (1)..(628): unsure at all Xaa locations
  Clone ID: ARATH-23APR03-C20463_1.p
MQTSVTPDAISTVLSNPSFDSSSDRSEIVVQVVDLKPIGNRYTFSANDGKTKVKAMFTASLTPEIISGKIQNLGLIRLIDFTVNDISSKSTKYFLVTKCEAVGSVLDSEINLDSKSGEEEAREPKKQKLEHSPVSPLNDVVSTGITLKPKQEFVAKSASQIMSEQRGNAAPAARMAMTRRVHPLVSLNPYQGNWTIKVRVTNKGVMRNYKNARGEGCVFNVELTDEEGTXQATMFNDAARKFFDRFQLGKVYYISRGSLKLANKQFKTVQNDYEMTLNENSEVEEASSEEMFIPETKFNFVPIEELGLYVNQKELIDLIGVVQSVSPTMSIRRRTDNEMIPKRDITLADESRKTVVVSLWNDLATGIGQELLDMADQSPVIAIKSLKVGDFQGVSLSTISRSNVVINPESPEAKKLKSWFDSEGKEISMSSIGSGMSPSAKNGSRSLYTDRVLLSHITSNPSLFEEKPVFFSTRAYISFIKPDQTMWYQACKTCNKKVTEALDSGYWCEGCQRKYEECSLRYIMAVKVTDSSGETWISSFNDEAEKILGCSADELNKLKSEEGEVNEYQTKLKEATWSSHVFRVSVTQNEYNGEKRQRVTVKGVAPLDFAAETRLLLQDISNKNKTSQ

SEQ ID NO: 5995 - protein, 115 aa, Arabidopsis thaliana
  Clone ID: ARATH-23APR03-C20484_1.p
MKVIAAFLLAKLGGNENPTSNDLKKILESVGAEIDETKIDLLFSLIKDHDVTELIAAGREKMSALSSGGPAVAMVAGGGGGGAASAAEPVAESKKKVEEVKDESSDDAGMMGLFD

SEQ ID NO: 5996 - protein, 234 aa, Arabidopsis thaliana
  Clone ID: ARATH-23APR03-C20495_1.p
VDWPTTTLISRRICNLLIFFVKLNHKNLSIDSDNPQHSAMKPDPTRRRNRALSSSSPSKTRPELSSGSPNRNTGEARGGKVKTSATLLDREEMGLFPGSGYGDPNPEPRSFPYSVKQQCWEKAEKIKGRDPERWRRDHLGNIVFRKLVGCPGCLCHDYDHIVPYSKGGKSTLENCQVLQAKVNRSKGNKTDISRSELIQRSSYCRVAGRDMDLIELTAYGNVQRAPTSSGCRIQ

SEQ ID NO: 5997 - protein, 586 aa, Arabidopsis thaliana
  Clone ID: ARATH-23APR03-C20528_1.p
MEPPTGILASLWQFILFIPYFTGLLLLGVIKGIVLCPLICLTVAIGNSAIILGLLPVHAIWTLYSIASAKQLGPILKIFLCLCVPLGVILWLVVSILGSVLGGAIYGFLSPIFATFDAVGEGKSNPFFHCFYDGTWSTVQGSFTVVCDFKDVCFHSYFSFMDDLRTSTANRHYYEIRLLQIPGAVIVAVLGILVDFPVISLLALCKSPYMLFKGWHRLFHDLIGREGPFLETMCVPIAGLVILLWPLAVVGAVLGSVVSSVFLGAYGGVVSYQESSFFFGLCYVVASVSIYDEYSNDVLDMPEGSCFPRPIYRRNEEGASTAFSGGLSRPNSFKTTPSRGGSNKGPMIDLKPLDLLEALFVECRRHGEIMVTKGIINSKDIEEAKSSKGSQVISFGLPAYSLLHELLRSIKSNSTGLLLGDGVTEITTRNRPKDAFFDWFLNPFLILKDQIEAANLSEEEEEYLGKLVLLFGDSERLKSSIVESESPPLTELRKAELDAFARRLQGLTKSVSRYPTFRRHFVELVKKLSNDLDNKHNRFEGGSRSVPRPGKTVSRIFSQKSFKKKTSSNGSDQDSPNRGLRDIDIV

SEQ ID NO: 5998 - protein, 118 aa, Arabidopsis thaliana
  Clone ID: ARATH-23APR03-C205362_1.p
MSRSLALVYLSLLCLQTHLSISVTVPIPSVNGEIDAMLNRNGVIGEEEGEEMMPSEISRRVMMMRKQYISYETLRRDMVPCQKPGASYYACRSGQANAYNRGCSVITRCARDTNDIKT

SEQ ID NO: 5999 - protein, 608 aa, Arabidopsis thaliana
  Clone ID: ARATH-23APR03-C20577_1.p
MLGKEDADITGISGVKMIPFGVGRRICPGLAMATVHVHLMLVRMFQEFAWCPHPPGSLIDFAGKLEFTVVMKKPVESPWSKTKLSEKKKKNKKLKMSILSFPHTFFNISPSLFYTILISSLVLLILTRRSAKSKIVKLPPGPPGWPVVGNLFQFARSGKQFYEYVDDVRKKYGPIYTLRMGSRTMIIISDSALVHDVLIQRGPMFATRPTENPTRTIFSSNTFTVNASAYGPVWRSLRKNMVQNMLSSIRFREFGSLRQSAMDKLVERIKSEAKDNDGLVWVLRNARFAAFCILLEMCFGIEMDEESILNMDQVMKKVLITLNPRLDDYLPILAPFYSKERARALEVRCGQVDFIVKLIERRRRAIQKPGTDKTASSFSYLDTLFDLKTEGRITTPSNEELVSLCSEFLNGGTDTTGTAIEWGIAQLIVNPEIQSRLYDEIKSTVGDREVEEKDVDKMVFLQAVVKEILRKHPPTYFTLTHSVTEPTTVAGYDVPVGINVEFYLPGINEDPKLWSDPKKFNPDRFISGKEEADITGVTGVKMMPFGIGRRICPGLAMATVHVHLMLAKMVQEFEWSAYPPESEIDFAGKLEFTVVMKKPLRAMVKPRV

SEQ ID NO: 6000 - protein, 286 aa, Arabidopsis thaliana
  Clone ID: ARATH-23APR03-C20580_1.p
MPAYISEEKLFFNKKPFGSKISDNNEIEELDQENLVVTRQEVNDDSKVAPRDVVATSTSVSKKALTLGDILSLEDSQSPPNKNNTNGPEENMVHHNPHLEITEESEADNSCDDNNLLKRNLPNGFGEISFCEAKSSLDYITYCGPLSGSENLSIRSDGTSASSFALPILQSEWNSSPVRMGKAEETQLRMVIAEERKVRKDKAEKTQLRKEKAEESQLREVKAEETQLRMVKAEETQLRKEKAEETQLRMVIAEERQLRKEKDEKRQLRKGKKGWRHYSSLLCCRF

SEQ ID NO: 6001 - protein, 405 aa, Arabidopsis thaliana
  Clone ID: ARATH-23APR03-C20585_1.p
MGGLAMEEMPLSVLFEQARKIHLAASESGVDQDVVKKGCEMFQKCEDMIGKLALFSSNETKEDISTNNLKYLLVPYYLAELTEKIIQEDRIQIVKASYAKLKEFFSFCEAMELVPDEELEASSRGGSGAPADRRALKIARFKRQKAAEAKLLEIKERKERRGRSTKASALSTPVESGEDDIPDDDSEEEREAWLSSINLAICKAIDLLEMLKREEEMLSAIKERQLKDGEGGFSRDALDDRTKKAETWHRDAAARIQYSKPAQPITCATFAQDVLEGRASVSQGHEHKNQPLIFGPASIVGGPLSTERERMIAQVFQPSHRMPTMCIEDAGLTEMNIMNDWQEQTKKAIEEATTSWYNDKPLRRKEEDEEDDDEDEEAVMKARAFDDWKDDNPRGAGNKKLTPCG

SEQ ID NO: 6002 - protein, 317 aa, Arabidopsis thaliana
  Clone ID: ARATH-23APR03-C20589_1.p
MANRDVERVGKKNRGANNNYFYDESSGETHWTSWLIPAIVVANLAVFIAVMFVNDCPKKITGPNKECVARFLGRFSFQPLKENPLFGPSSSTLEKMGALEWRKVVHEHQGWRLLSCMWLHAGIIHLLTNMLSLIFIGIRLEQQFGFIIVGLIYLISGLGGSILSSLFLQESISVGASGALFGLLGAMLSELLTNWTIYANKAAALITLLFIIAINLALGMLPRVDNFAHIGGFLTGFCLGFVLLVRPQYGWEASRTSTSRTKRKYSIYQYVLFVVAVVLLVVGLTVALVMLFKGENGNKHCKWCHYLSCFPTSKWTC

SEQ ID NO: 6003 - protein, 761 aa, Arabidopsis thaliana
  Clone ID: ARATH-23APR03-C20590_1.p
MDSDLEPVALTPQKQDSAWKHCEVYKYGDRVQMRCLYCRKMFKGGGITRVKEHLAGKKGQGTICDQVPDEVRLFLQQCIDGTVRRQRKRRKSSPEPLPIAYFPPCEVETQVAASSDVNNGFKSPSSDVVVGQSTGRTKQRTYRSRKNNAFERNDLANVEVDRDMDNLIPVAISSVKNIVHPTSKEREKTVHMAMGRFLFDIGADFDAANSVNVQPFIDAIVSGGFGVSIPTHEDLRGWILKSCVEEVKKEIDECKTLWKRTGCSVLVQELNSNEGPLILKFLVYCPEKVVFLKSVDASEILDSEDKLYELLKEVVEEIGDTNVVQVITKCEDHYAAAGKKLMDVYPSLYWVPCAAHCIDKMLEEFGKMDWIREIIEQARTVTRIIYNHSGVLNLMRKFTFGNDIVQPVCTSSATNFTTMGRIADLKPYLQAMVTSSEWNDCSYSKEAGGLAMTETINDEDFWKALTLANHITAPILRVLRIVCSERKPAMGYVYAAMYRAKEAIKTNLAHREEYIVYWKIIDRWWLQQPLYAAGFYLNPKFFYSIDEEMRSEIHLAVVDCIEKLVPDVNIQDIVIKDINSYKNAVGIFGRNLAIRARDTMLPAEWWSTYGESCLNLSRFAIRILSQTCSSSIGSVRNLTSISQIYESKNSIERQRLNDLVFVQYNMRLRRIGSESSGDDTVDPLSHSNMEVLEDWVSRNQVCIEGNGSSDWKSLEFIKRSEEVAVVIDETEDLGSGFDDAEIFKGEKEASYEGGYSENLFT

SEQ ID NO: 6004 - protein, 189 aa, Arabidopsis thaliana
  Clone ID: ARATH-23APR03-C20602_1.p
MTNYGAIPTSSHPSPAIDLEYISRAKHRIKSGLATRRPWKSMFDFESMTLPHGFFDAISRIKTNLGYFRANYAIGVLFILFLSLLYHPTSLIVLSILVVFWIFLYFLRDEPLVVFGYQIDDRTVLIGLSVLTVVMLLLTHATSNILGSLLTAAVLVLIHAAVRRSDNLFLDEEAAAVTEASGLMSYPSS

SEQ ID NO: 6005 - protein, 450 aa, Arabidopsis thaliana
  Clone ID: ARATH-23APR03-C20617_1.p
MDSSSSVKIVSKSFVKPKTLPEESKQPYYLSPWDYAMLSVQYIQKGLLFHKPPLDSIDTLLEKLKDSLAVTLVHFYPLAGRLSSLTTEKPKSYSVFVDCNDSPGAGFIYATSDLCIKDIVGAKYVPSIVQSFFDHHKAVNHDGHTMSLLSVQVTELVDGIFIGLSMNHAMGDGTAFWKFFTAWSEIFQGQESNKNNDLCLKNPPVLKRYIPEGYGPLFSLPYSHPDEFIRTYESPILKERMFCFSSETIRLLKTKVNQICGTTSISSFQSLTAVIWRCITRARRLPLDRETSCRVAADNRGRMYPPLHKDYFGNCLSALRTAAKAGELLENDLGFAALKVHQAVAEHTSEKVSQMIDQWLKSPYIYHIDRLFEPMSVMMGSSPRFNKYGCEFGMGKGVTLRSGYAHKFDGKVSAYPGREGGGSIDLEVCLVPEFMEALESDEEFMSLVSL

SEQ ID NO: 6006 - protein, 349 aa, Arabidopsis thaliana
  Clone ID: ARATH-23APR03-C20633_1.p
MARFSVCGGDDGEGPSNNNHQSRKRQRLPSIDENEEDAETSDAGSSGEEDEDETQNQGMRPESEDRGSTSDDSDREVVIEERRFGKFVNSQSSSSSKDSPLSVTLLDPDVLDCPICCEPLKIPIFQCDNGHLACTLCCTKVRNRCPSCTLPIGYVRCRAMEKVIEASRVSCLNAKYGCKESTSYGNRFSHEQVCVFTPCSCPILDCHYTGYYKDLNNHVRAEHKDDLISFVWNTRLTISLDLNKKTTILQEENDGHVIVVQVFRALHAVYVSVSCIAPLTPGVGRLSCRLAKITVDSLLKQGFMVKNIQKVTNEHPEDGFMLIPSYLFSGNDNLNLQIWIGHGRIFVHS

SEQ ID NO: 6007 - protein, 355 aa, Arabidopsis thaliana
  Clone ID: ARATH-23APR03-C20639_1.p
MPMTVVSGRFSTALLPTCFSLSRLHSVKYAAQRRVVFVSRSAHASSASVSVETNSNSNVDFVIEKKDKNRGEKKILACPICYNSLAWISQPNGLIESAASGIQVQCNTCKRSYSGNETHLDLAVASGSKRYSEPMPLSTELFRTPLVSFLYERGWRQNFIWGGFPGPEKEFEMAKAYLKPVLGGNIIDASCGSGMFSRLFTRSDLFSLVIALDYSENMLRQCYELLNKEENFPNKEKLVLVRADIARLPFLSGSVDAVHAGAALHCWPSPSSAVAEISRVLRPGGVFVATTFIYDGPFSFIPFLKNLRQEIMRYSGSHIFLNERELEDICKACGLVNFTRVRNGPFIMLSATKPS

SEQ ID NO: 6008 - protein, 336 aa, Arabidopsis thaliana
  Clone ID: ARATH-23APR03-C206411_1.p
MCLLMEINNNANNTNTTIDNHKAKMSLVLSTDAKPRLKWTCDLHHKFIEAVNQLGGPNKATPKGLMKVMEIPGLTLYHLKSHLQKYRLGKSMKFDDNKLEVSSASENQEVESKNDSRDLRGCSVTEENSNPAKEGLQITEALQMQMEVQKKLHEQIEVQRHLQVKIEAQGKYLQSVLMKAQQTLAGYSSSNLGMDFARTELSRLASMVNRGCPSTSFSELTQVEEEEEGFLWYKKPENRGISQLRCSVESSLTSSETSETKLDTDNNLNKSIELPLMEINSEVMKGKKRSINDVVCVEQPLMKRAFGVDDDEHLKLSLNTYKKDMEACTNIGLGFN

SEQ ID NO: 6009 - protein, 364 aa, Arabidopsis thaliana
  Clone ID: ARATH-23APR03-C20654_1.p
MSRNLIYRRNRALCFVLILFCFPYRFGARNTPEAEQSTAKATQIIHVSNSTWHDFSRLVDVQIGSHVSGVSELKRYLHRFGYVNDGSEIFSDVFDGPLESAISLYQENLGLPITGRLDTSTVTLMSLPRCGVSDTHMTINNDFLHTTAHYTYFNGKPKWNRDTLTYAISKTHKLDYLTSEDVKTVFRRAFSQWSSVIPVSFEEVDDFTTADLKIGFYAGDHGDGLPFDGVLGTLAHAFAPENGRLHLDAAETWIVDDDLKGSSEVAVDLESVATHEIGHLLGLGHSSQESAVMYPSLRPRTKKVDLTVDDVAGVLKLYGPNPKLRLDSLTQSEDSIKNGTVSHRFLSGNFIGYVLLVVGLILFL

SEQ ID NO: 6010 - protein, 371 aa, Arabidopsis thaliana
  Clone ID: ARATH-23APR03-C20703_1.p
MAAAMSSSCCASSLRLIPFKRTLFSSIHYPAKTLLLRPLKPSEVPSFRRTIITFQKISTGIVPPPSASSSPSSYGDLQPIEELPPKLQEIVKLFQSVQEPKAKYEQLMFYGKNLTPLDSQFKTRENKVEGCVSQVWVRAFFDEERNVVYEADSDSVLTKGLAALLVKGLSGRPVPEILRITPDFAVLLGLQQSLSPSRNNGLLNMLKLMQKKALHLEVKGEEDSSSGESSESSFVSIPETKDEANVPEVDLESKPDLVEDLGTEKIDDSESGSNVVALGSRGMRIREKLEKELDPVELEVEDVSYQHAGHAAVRGSAGDDGETHFNLRIVSDAFQGKSLVKRHRLIYDLLQDELKSGLHALSIVAKTPAEV

SEQ ID NO: 6011 - protein, 476 aa, Arabidopsis thaliana
  Clone ID: ARATH-23APR03-C207299_1.p
MTPFALFLFTLLALSSSCCSAIGPQNNRTVLALASRIGINYGKLGNNLPFPYQSINLIKTIKAGHVKLYDADPETLKLLSTTNLYVTIMVPNNQIISIGADQAAADNWVATNVLPFHPQTRIRFVLVGNEVLSYSSDQDKQIWANLVPAMRKVVNSLRARGIHNIKVGTPLAMDALRSSFPPSSGTFREDIAVPMMLPLLKFLNGTNSFFFLDVYPYFPWSTDPVNNHLDFALFESNSTYTDPQTGLVYTNLLDQMLDSVIFAMTKLGYPNISLAISETGWPNDGDIHETGANIVNAATYNRNLIKKMTANPPLGTPARRGAPIPTFLFSLFNENQKPGSGTERHWGILNPDGTPIYDIDFSGTRSFSGFDSLPKPSNNVPFKGNVWCVAVDGADEAELGQALNFACGRSNATCAALAPGGECYAPVTVTWHASYAFSSYWAQFRNQSSQCYFNGLARETTTNPGNERCKFPSVTL

SEQ ID NO: 6012 - protein, 96 aa, Arabidopsis thaliana
  Clone ID: ARATH-23APR03-C20758_1.p
MAEPKTKVAEIREWIIEHKLRTVGCLWLSGISGSIAYNWSKPAMKTSVRIIHARLHAQALTLAALAGAAAVEYYDHKSGATDRIPKFLKPDNLNKD

SEQ ID NO: 6013 - protein, 304 aa, Arabidopsis thaliana
  Clone ID: ARATH-23APR03-C207654_1.p
MDPTSSSSSALRWKILRQALLRRSDSQSQTETKRISRKATQGFNLIPCQVVDSSPQSDKSREASVCYTLPITGSPKLYLTQRVDNCSDLNDFEISNRYNIDNTGLVCQWPSEEVLAYFCKSQPERFRGKRVIELGSGYGLAGLVIAAATEASEVVISDGNPQVVNYIKRNIETNSMAFGGTSVKAMELHWNQHQLSELTNTFDIIVASDCTFFKEFHKDLARTIKMLLKAKKASEALFFSPKRGDSLEKFMKEIKDIGLHYILTENYDAQVWKRHETLVKGDEAWPNYDKNHCYPLLIQITNQI

SEQ ID NO: 6014 - protein, 470 aa, Arabidopsis thaliana
  Clone ID: ARATH-23APR03-C207656_1.p
MGKQGPCYHCGVTSTPLWRNGPPEKPVLCNACGSRWRTKGSLVNYTPLHARAEGDETEIEDHRTQTVMIKGMSLNKKIPKRKPYQENFTVKRANLEFHTGFKRKALDEEASNRSSSGSVVSNSESCAQSNAWDSTFPCKRRTCVGRPKAASSVEKLTKDLYTILQEQQSSCLSGTSEEDLLFENETPMLLGHGSVLMRDPHSGAREEESEASSLLVESSKSSSVHSVKFGGKAMKQEQVKRSKSQVLGRHSSLLCSIDLKDVFNFDEFIENFTEEEQQKLMKLLPQVDSVDRPDSLRSMFESSQFKENLSLFQQLVADGVFETNSSYAKLEDIKTLAKLALSDPNKSHLLESYYMLKRREIEDCVTTTSRVSSLSPSNNNSLVTIERPCESLNQNFSETRGVMRSPKEVMKIRSKHTEENPRVRPRVRGRVGCGGPLVFSYEDNDISDQDLLLDVPSNGSFPQAELLNMI

SEQ ID NO: 6015 - protein, 393 aa, Arabidopsis thaliana
  Clone ID: ARATH-23APR03-C207676_1.p
MRKKKTRFQFLLNPNSKFVFFPRAISSSSSSSSDNNNDGSVSSSRQNNRQMGYDPSEELFGVDFKPRFISGDSREPRSWFGPNGQYIRELPCPTCRGRGYTSCSNCGIERSRLDCPQCKGKGIMTCLRCLGDCVIWEESIDERPWEKARSSSPFRVKEDDEVDNLEIKFSKRRKSKRIYQSPTPEVGQKISRSLKSLNAKTGLFSKRMKIIHRDPVLHAQRVAAIKKAKGTPAARKHASESMKAFFSNPVNREQRSLSMKGTKFYCKNCGQEGHRRHYCPELGTNADRKFRCRGCGGKGHNRRTCPKSKSIVTKSISTRYHKCGICGERGHNSRTCRKPTGVNPSCSGENSGEDGVGKITYACGFCKKMGHNVRTCPSKQVSDSDSCLEQEGS

SEQ ID NO: 6016 - protein, 346 aa, Arabidopsis thaliana
  Clone ID: ARATH-23APR03-C207692_1.p
MVKETEYYEILGVKTDASDAEIKKAYYLKARKVHPDKNPGDPQAAKNFQVLGEAYQVLSNPDKRAAYDKYGKEGVQQDAMVDPAAVFGMLFGSEVFEEYVGQLALAYLASIEADLESHDPEIRKQMLQDKIKALQKEREDKLAATLKNKLEPFVERQTDEFIEWANEEAKRLSSAGFGEAMMHTIGYIYTRKAAKEIGKDKRYMKVPFLAEWVRDKGHHMKSQVMAASGAVSLLQLQDEVNKLNEHQGENKEEHIQKAIEAKMDALLQSLWQINVLDIESTLSRVCQSVLKDPSVSKPTRPARAIGLKKLGTIFQGAKKPYTRGSSLRREATTVKMDTGGSSKATS

SEQ ID NO: 6017 - protein, 1235 aa, Arabidopsis thaliana
  unsure (1)..(1235): unsure at all Xaa locations
  Clone ID: ARATH-23APR03-C20772_1.p
MQPLVLLLLFILCFSGLGQPGIINNDLQTLLEVKKSLVTNPQEDDPLRQWNSDNINYCSWTGVTCDNTGLFRVIALNLTGLGLTGSISPWFGRFDNLIHLDLSSNNLVGPIPTALSNLTSLESLSLFSNQLTGEIPSQLGSLVNIRSLRIGDNELVGDIPETLGNLVNLQMLALASCRLTGPIPSQLGRLVRVQSLILQDNYLEGPIPAELGNCSDLTVFTAAENMLNGTIPAELGRLENLEILNLANNSLTGEIPSQLGEMSQLQYLSLMANQLQGLIPKXLADLGNLQTLDLSANNLTGEIPEEFWNMSQLLDLVLANNHLSGSLPKSICSNNTNLEQLVLSGTQLSGEIPVELSKCQSLKQLDLSNNSLAGSIPEALFELVELTDLYLHNNTLEGTLSPSISNLTNLQWLVLYHNNLEGKLPKEISALRKLEVLFLYENRFSGEIPQEIGNCTSLKMIDMFGNHFEGEIPPSIGRLKELNLLHLRQNELVGGLPASLGNCHQLNILDLADNQLSGSIPSSFGFLKGLGTVXMFYNNSLQGNLPDSLISLRNLTRINLSHNRLNGTIHPLCGSSSYLSFDVTNNGFEDEIPLELGNSQNLDRLRLGKNQLTGKIPWTLGKIRELSLLDMSSNALTGTIPLQLVLCKKLTHIDLNNNFLSGPIPPWLGKLSQLGELKLSSNQFVESLPTELFNCTKLLVLSLDGNSLNGSIPQEIGNLGALNVLNLDKNQFSGSLPQAMGKLSKLYELRLSRNSLTGEIPVEIGQLQDLQSALDLSYNNFTGDIPSTIGTLSKLETLDLSHNQLTGEVPGSVGDMKSLGYLNVSFNNLGGKLKKQFSRWPADSFLGNTGLCGSPLSRCNRVRTISALTAIGLMILVIALFFKQRHDFFKKVGHGSTAYTSSSSSSQATHKPLFRNGASXSDIRWEDIMEATHNLSEEFMIGSGGSGKVYKAELENGETVAVKKILWKDDLMSNKSFSREVKTLGRIRHRHLVKLMGYCSSKSEGLNLLIYEYMKXNGSIWDWLHEDKPVLXEKKKKLLYREASLRMALGLGQGVEYLHHDCLPPIVHRYIISSNVLLDSNMEAHXGDFGLAXVFTESCDANSDSKNGYACSYGYRAREYAXWLKATXKTYVYCIRRVLMEIVTGKMPTDSVFGAEMDMVRWVETHLEVAGSARDKLIDPKLKPLLPFEEDAACQVLEIALQCTKTSPQERPSSRQACDSLLHVYNNRTAGYKKL

SEQ ID NO: 6018 - protein, 440 aa, Arabidopsis thaliana
  Clone ID: ARATH-23APR03-C20793_1.p
MREEQVSDCGSITLEEWNGSSSTKLFKTATITASSSLSIQRSANRFNHVWRRVLQAFVPEGFPGSVTPDYVGFQLWDTLQGLSTYTKMMLSTQALLSAIGVGEKSATVIGATFQWFLRDFTGMLGGILFTFYQGSNLDSNAKMWRLVADLMNDIGMLMDLLSPLFPSAFIVVVCLGSLSRSFTGVASGATRAALTQHFALQDNAADISAKEGSQETMATMMGMSLGMLLARFTSGNPMAIWLSFLSLTVFHMYANYRAVRCLVLNSLNFERSSILLTHFIQTGQVLSPEQVSSMEGVLPLWATSLRSTNSKPLHKRVQLGVRVSSLPRLDMLQLLNGVGASSYKNAKYLLAHIKGNVSVILHKDSKPADVLKSYIHAIVLANLMEKSTSFYSEGEAWIDKHYDELLHKLRSGGWKTERLLSPSITWRANWISHTSAAKFD

SEQ ID NO: 6019 - protein, 412 aa, Arabidopsis thaliana
  Clone ID: ARATH-23APR03-C20823_1.p
DCLLGFTMDSPQSVVSPFKIGESENENSNSVQSSGNQSNGINSNGKDSKSCGRQDLVGALEVYVHQARDIHNICIYHKQDVYAKLCLTSDPDKSVSTKIINGGGRNPVFDDNVKLDVRVLDTSLKCEIYMMSRVKNYLEDQLLGFTLVPMSELLFKNGKLEKEFSLSSTDLYHSPAGFVQLSLSYYGSYPDVMAIPSMPSSVSIDETTKDPEGSESVPGELDKIEFPDPNVANENEKMVSEYFGISCSTIDSETSDSLVTSDAENHVTNSVTSILKQDSPESSNATNGAASPHASAHSATETPNHEHLSVVNSKASSQESESEASGETSEEKTVKSVLTVKVEPESKVVQQDIVDMYMKSMQQFTDSLAKMKLPLDIDSPTKSENSSSDSQKLPTPKSNNGSRVFYGSRPFF

SEQ ID NO: 6020 - protein, 438 aa, Arabidopsis thaliana
  Clone ID: ARATH-23APR03-C20840_1.p
MYLRLFNFGGQCLMECNAKPPFQWELENLISFGTSTAEVPRKLKPMEWEIDGFDCTSLYSSSFDAVAYGGSSGSDIAHAFSKSSKSTSISSSSAEVRTHNFTSETGESLPGEFAKGIDTSPTLELSFGSGDPVLGLKLGKRTYFEDFWEVENAKGLGLPVSLASSSVSPVKKSKSIPQRLQTPHCQVEGCNLDLSSAKDYHRKHRICENHSKFPKVVVSGVERRFCQQCSRFHCLSEFDEKKRSCRRRLSDHNARRRKPNPGRTYDGKPQVDFVWNRFALIHPRSEEKFLWPSSKPVPSRVLMPQPAKTEISNKLFTEHSRFGLLDPKTKSARAELFSKEKVTISSHMGASQDLDGALSLLSNSTTWVSSSDQPRRFTLDHHPSSNLQPVANRSAAQLSSVSGYWQPDPPAVEGPTALHRNGAGQFNENYFSLNQFYN

SEQ ID NO: 6021 - protein, 285 aa, Arabidopsis thaliana
  Clone ID: ARATH-23APR03-C20846_1.p
MEALRASYGDSSSDSDTDDLSPASPVTANSGEKDSISLPPPPLALLDSIVSTGSLDFFSTEPGVRVRNFPHVDGNYALHVYVPVCIPPLPKKEIVCFLKKVASVVPHLHLVEADVPLSILCKDDQKFERALGREFHISLGRNVPLRVHQINSVISMLRQKLQLQKRYLIDFNKWEVFVNDDHTRSFLSLEITTSGLSEISKQIDAVNEVYKLHNLPEFYKDPRPHISLVWALGDIRTSLKGAVDVELRKLRAGGCVQNRIFTSKFCGIECKIGNKTHKICKLPDE

SEQ ID NO: 6022 - protein, 147 aa, Arabidopsis thaliana
  Clone ID: ARATH-23APR03-C209511_1.p
MVGLSIVLEMTNNNNNNNNNNNNKNPLSEGVLISPKVVNKANIIVTTAVTTDTTNLRRCYQDSGFLEHCFLCRRKLLPAKDIYMYKGDRAFCSVECRSKQMIMDEEESLRREYCSLMDVKKKKFDSPATAPSRYRRDPRNQAGGFAY

SEQ ID NO: 6023 - protein, 191 aa, Arabidopsis thaliana
  Clone ID: ARATH-23APR03-C209588_1.p
MKRIKLGWKRRNYVNGKEKSSQANLLRSSFCWMAHSLSFISTNLNSFVHLNHHQCQSFGTFVSSPFKRKRRFARSIRALQETEGPTPRRLIDIIRSVPEISRNYFKKPSRRTLFGGISLLGGFYVAQTISLSFGALGVNDVIAAVLCVLLTEYVTRFYYSRTTVTFPIALLNNFKMGFTYGLFIDAFKLAS

SEQ ID NO: 6024 - protein, 371 aa, Arabidopsis thaliana
  unsure (1)..(371): unsure at all Xaa locations
  Clone ID: ARATH-23APR03-C209687_1.p
MGYEPDPDALRWGLHDLEVCTLTNAGSCSSVTRYESGGGGTQGYVREGYNQPVTGYVDNDAVIAQFYQDELSRVARAEASGINSLSPTSVVAQDWPHPHQGQENQGEAIDITQESDILHNHNGNMEDKNVARIRFEGGQSSPSRDDDSVCSVEIEEESWSEVGKRLNQMIPIAHVPKINGELPSEDEQISDHERLFQRLQLYGLVENKIEGDGNCQFRSLSDQLYRSPEHHNFVREQVVNQLAYNREIYEGYVPMAYNDYLKAMKRNGEWGDHVTLQAAADLFGVRMFVITSFKDTCYIEILPHFQKSNRLICLSFWAEVHYNSIYPEGXAADTRRQEEEEILGILSSLSADGGTKLKKSAYRYVYSFYLT

SEQ ID NO: 6025 - protein, 365 aa, Arabidopsis thaliana
  Clone ID: ARATH-23APR03-C209722_1.p
MGYCDGKWTPVIIMVMINSALGLANALVKKVLDGGVNHMVIATYRLAISTLFLAPIAFFWERKTRPTLTLNILVQLFFSALVGASLTQYFFLLGLSYTSATLACAFISMTPAITFVMALIFRVEKLNMKSKAGMGMVMGALICIGGALLLTMYKGVPLTKLRKLETHQLINNNHAMKPENWIIGCVLLFAGSSCFGSWMLIQAKVNEKYPCQYSSTVVLSFFGTIQCALLSLIKSRDITAWILTDKLDIVTIVYAGAVAQGICTVGTSWCIRKRGPIFTSIFTPVGLIFATLFDFLILHRQIFLGSVVGSGVVIFGLYIFLLGKVRLMKEECEKKLPCRFNEDDQEEDDDEQYKKGHLMVVPMTP

SEQ ID NO: 6026 - protein, 473 aa, Arabidopsis thaliana
  Clone ID: ARATH-23APR03-C21041_1.p
MTMMDTDEGKTVMCLLTDPEGTHLGSAMYIPQKAGPLQLTQLVNRFLDNEEMLPYSFYVSDEELLVPVGTYLEKNKVSVEKVLTIVYQQQAVFRIRPVNRCSQTIAGHAEAVLCVSFSPDGKQLASGSGDTTVRLWDLYTETPLFTCKGHKNWVLTVAWSPDGKHLVSGSKSGEICCWNPKKGELEGSPLTGHKKWITGISWEPVHLSSPCRRFVTSSKDGDARIWDITLKKSIICLSGHTLAVTCVKWGGDGIIYTGSQDCTIKMWETTQGKLIRELKGHGHWINSLALSTEYVLRTGAFDHTGRQYPPNEEKQKALERYNKTKGDSPERLVSGSDDFTMFLWEPSVSKQPKKRLTGHQQLVNHVYFSPDGKWIASASFDKSVRLWNGITGQFVTVFRGHVGPVYQVSWSADSRLLLSGSKDSTLKIWEIRTKKLKQDLPGHADEVFAVDWSPDGEKVVSGGKDRVLKLWKG

SEQ ID NO: 6027 - protein, 490 aa, Arabidopsis thaliana
  Clone ID: ARATH-23APR03-C21046_1.p
MKAETMTLLLVNLAGIMERADESLLPGVYKEVGLALHTDPTGLGSLTLLRSMVQAACYPLAAYMAIRHNRAHVIALGAFLWSAATFLVAFSSTFFQVAVSRALNGIGLALVAPAIQSLVADSTDDANRGTAFGWLQLTANIGSILGGLCSVLIAPLTFMGIPGWRVAFHIVGVISVIVGVLVRVFANDPHFVKDGVDVSNQPGSRKPFCTEVKDLVREADTVIKIRSFQIIVAQGVTGSFPWSALSFAPMWLELIGFSHGKTAFLMGLFVAASSLGGLFGGKMGDFLSTRLPNSGRIILAQISSASAIPLAAILLLVLPDDPSTAAIHGLILVLLGLFVSWNAPATNNPIFAEIVPEKSRTSVYALDKSFESILSSFAPPIVGILAQHVYGYKPIPEGSSRSTEIATDRENAASLAKALYTSIGLPMAACCFIYSFLYRSYPLDRDRARMEAFIDSEMRELLPESSNRDIEFSQEEDPFANHVNPNLQAR

SEQ ID NO: 6028 - protein, 311 aa, Arabidopsis thaliana
  unsure (1)..(311): unsure at all Xaa locations
  Clone ID: ARATH-23APR03-C21058_1.p
KSRINQQIKIQIVFIPSPGIGHLRSTVELAXKRLVRSDDRLSITVIIIHYPSXSHDDVETTYIASLTTASQDRLNYEAISVANQPTDNQEPSQVYIEKQKPQVRDVVARIFHSTGVNSPRVAGFVVDMFCSSMIDVANEFGVPCYMVYTSNATFLGITLHIQRMFDEKKYDVSELEDSVNELEFPFLTRPYPVKCLPDFFTSKDWLPFFLAQARCFRKMKEXKINAFAMVEELGLAVQIRKFFRGDMLVGGMEIVTTVDIERAVRCVMENDSEVRNRVKEMAEKCHVASMDGGSSQVALQKFIQDVTENVV

SEQ ID NO: 6029 - protein, 297 aa, Arabidopsis thaliana
  Clone ID: ARATH-23APR03-C21059_1.p
CPNPWVFLTIVIPSQPSKKDKFNFWWSFQKWKYNKTMSGLRRLDGKIAIITGGASGIGAEAVRLFTDHGAKVVIVDIQEELGQNLAVSIGLDKASFYRCNVTDETDVENAVKFTVEKHGKLDVLFSNAGVLEAFGSVLDLDLEAFDRTMAVNVRGAAAFIKHAARSMVASGTRGSIVCTTSIAAEIGGPGPHSYTASKHALLGLIRSACAGLGQYGIRVNGVAPYGVATGMTSAYNEEAVKMLEEYGEALGNLKGVVLKARHIAEAALFLASDDSVYISGQNLVVDGGFSVVKLMTT

SEQ ID NO: 6030 - protein, 131 aa, Arabidopsis thaliana
  Clone ID: ARATH-23APR03-C21061_1.p
MRCMRGARRLRRCGHCLFVLMDSGHLSVTMLSFVGILRSVRLLVEGILMMIFSRTTTLLLLPLPHLQTNQTMKEDVLCCLDGCMFVFKLFFSEFVLFCFYLFLRCLGAWYKTQIITSNLFTNEKEIMLIGS

SEQ ID NO: 6031 - protein, 189 aa, Arabidopsis thaliana
  unsure (1)..(189): unsure at all Xaa locations
  Clone ID: ARATH-23APR03-C2107_1.p
LRLKKLLLSASSSHLLQIEIALCLSSSPSPSPSPSLSPVSHXKMGRVRTKTXKKSSRQVIEKYYSRMTLDFHTNKKILEEGCHPSHPKRPPQARLAGFSTHLMKRIQKGPSPVGISLKLQEEERERRMDFVPDESAIKTDEIKVDKETLEMLASLGMSDTSGISAVEPQQAMAPIAAFGRATRGTLYDH

SEQ ID NO: 6032 - protein, 225 aa, Arabidopsis thaliana
  Clone ID: ARATH-23APR03-C21085_1.p
MSDSVAGDFPPDPLLASGAFISSAGDGTLDSSAKRRPIQGGIGISGSGESVRIGMANGTDQVNHQTESKSRKRAAPGDNWLPPGWRIEDKIRTSGATAGSVDKYYYEPNTGRKFRSRTEVLYYLEHGTSKRGTKKAENTYFNPDHFEGQGSNRVTRTATVPPPPPPPLDFDFKNPPDKVSWSMANAGEEGWIPNIGDVKVQDSVRRDWSTAFTFITSRNPSKVSA

SEQ ID NO: 6033 - protein, 320 aa, Arabidopsis thaliana
  Clone ID: ARATH-23APR03-C21102_1.p
MHAKTDSEVTSLSASSPTRSPRRPAYFVQSPSRDSHDGEKTATSFHSTPVLTSPMGSPPHSHSSSSRFSKINGSKRKGHAGEKQFAMIEEEGLLDDGDREQEALPRRCYVLAFIVGFSLLFAFFSLILYAAAKPQKPKISVKSITFEQLKVQAGQDAGGIGTDMITMNATLRTDMITMNATLSVHVTSSPTVFGVHVISSRIGPSFSFINIGSGSVTVVVNVLGDKIPLYGSGSTLVPPPPPAPIPKPKKKKGPIVIVEPPAPPAPVPMRLNFTVRSRAYVLGKLVQPKFYKRIVCLINFEHKKLSKHIPITNNCTVTSI

SEQ ID NO: 6034 - protein, 62 aa, Arabidopsis thaliana
  unsure (1)..(62): unsure at all Xaa locations
  Clone ID: ARATH-23APR03-C21128_1.p
MFRRNRFLSLPMVIGALVIGVVSGKAIFGPPLDQXWKEKLERERVVVAKEEVIEKSSDSSST

SEQ ID NO: 6035 - protein, 119 aa, Arabidopsis thaliana
  Clone ID: ARATH-23APR03-C21185_1.p
MALSGSQKKVFLLVIAIACLSSSLAEAWSWSSSDGNGWGWGFDGSSTSTSGPGSTPGDSNSGGSNPGGPNSGGFSSPWGSWGWGWGSHGSGSPAPSDALFLLVIIKKKNLSDFLFYYIM

SEQ ID NO: 6036 - protein, 133 aa, Arabidopsis thaliana
  Clone ID: ARATH-23APR03-C21201_1.p
MASKSVVVFLFLALVASSVVAQAPGPAPTISPLPATPTPSQSPRATAPAPSPSANPPPSAPTTAPPVSQPPTESPPAPPTSTSPSGAPGTNVPSGEAGPAQSPLSGSPNAAAVSRVSLVGTFAGVAVIAALLL

SEQ ID NO: 6037 - protein, 131 aa, Arabidopsis thaliana
  Clone ID: ARATH-23APR03-C21205_1.p
MATAFANTTSSSNLYLHRCRKNHPLPSPSFFSPFRSSPLPSQTLFLVPTPKPVRRIAVAPLGPPTPPSPDPPPPKNTTELTSLVGVASMIQDRVKIFLSVLIWISLFFWASALQGRGSKGNGKGKKGSRFK

SEQ ID NO: 6038 - protein, 208 aa, Arabidopsis thaliana
  Clone ID: ARATH-23APR03-C212148_1.p
MSGVFAGVDGISGVVTGDVAAIYGASAETGGWFDGVVAGDSIEVVGLIIGAEIGDFPGIVVGGDTGEVAGVETGVVDVVGEETGEVTGDETGDFRGDAMVRDVTGEVAGDETGDFNGEAMVREETGEFVGVKTGDFDGDAVVQDGEVAGERTGDIDGVTKAAGEETEDFSGDFEGDVCFVEDGASGDFWITGGCKVGVKGDFDGEITR

SEQ ID NO: 6039 - protein, 111 aa, Arabidopsis thaliana
  Clone ID: ARATH-23APR03-C21224_1.p
MEYYTFTENDEERVSRNHHVKNTWVKERYESDEEDGEVNKLILKEDEETKDMVTSPSGERMMLTSKVRYLTYGALKHDTAASAASGGGGRALPHPSNKYNRGHPKYYRCRG

SEQ ID NO: 6040 - protein, 138 aa, Arabidopsis thaliana
  Clone ID: ARATH-23APR03-C21232_1.p
MQTFAPGTRVYHLIIIVFFFFFFFCLSSFFASIVMADEYTGEATGSSEAKVHIIYTEKPTDEEPKTYHLRTLSSALGSEEAAKDALIYSYKEAASGFSAKLTPEQVAEISKQPGVIQVVPSQTYQLHKPGGGGGFKLT

SEQ ID NO: 6041 - protein, 121 aa, Arabidopsis thaliana
  Clone ID: ARATH-23APR03-C21262_1.p
MATTRSKSFQLITSLRKHLVNTRASTRATASALFPSRRSGHSSAYDKNVEDELHASAVPDEVIKPDSDKYWSPHPKTGVFGPSTTEHSATAEGAHQDTAVLEETAWFRPTSLEDSDKTHHV

SEQ ID NO: 6042 - protein, 169 aa, Arabidopsis thaliana
  Clone ID: ARATH-23APR03-C21274_1.p
MQFFGGSEISPSPPVPTASGNNAHMMYVFNRNGVCLLYKEWNRPLHTLNPQQDHKLMFGLLFSLKSLTAKMDPVNADKGNLGVPQLPGQGCSFHSFRTNTYKLSFMETPSGIKIILVTHPKTGDLRESLKYIYSLYVEYVVKNPIYSPGSPIKSELFNTALDQYVRSIS

SEQ ID NO: 6043 - protein, 354 aa, Arabidopsis thaliana
  Clone ID: ARATH-23APR03-C21281_1.p
MHIRRQIFVKSPDCQKVVALQLDPAQSLLTLSGITSLLESSQRISFSACSITLDGKLLNGSTRIQVSKLPSVSMLTLFPRLRGGGGDGGATGAESRDCYLNMYAEKKPDKVDPNEQRLSKWLNCALSNEPLAEPCVIDLLGNLFNKEVLVHALLSKRLPKQFSYIKGLKDMVNIKLTPVAGSDGSSQDTTSAQFQCPVSGLEFNGKYKFFALRGCGHVMSAKALKEVKSSSCLVCHADVKDSDKIVINGTEEEVDLLREKMEEEKAKLREKKGVSKKSKNGAAVVADTGAKVAKRQIEDGNVNGNGITVKKFKAADKVPVNATKEVYASLFTSSKKKSDFRETYSCRSLPLGRN

SEQ ID NO: 6044 - protein, 207 aa, Arabidopsis thaliana
  Clone ID: ARATH-23APR03-C21285_1.p
MPRYYCDYCDTYLTHDSPSVRKQHNAGYKHKANVRIYYQQFEEQQTQSLIDQRIKEHLGQTGGYQQVGAVFNQHMLARPRPPMMLPPGSMPMGMRPPVLPRPMMPPQGYMPPPGVPQMMAPPGAPLPPPPQNGILRPPGMAPIPGQGGGPPGMAPIPGQGGGPPPNYNGLPPPPPYHTNPAAPPSGNFNNPNLNNPNPSAESPESNE

SEQ ID NO: 6045 - protein, 372 aa, Arabidopsis thaliana
  Clone ID: ARATH-23APR03-C2128_1.p
MAGYPTNGSVYVSNLPLGTDENMLADYFGTIGLLKRDKRTGTPKVWLYRDKETDEPKGDATVTYEDPHAALAAVEWFNNKDFHGNTIGVFMAESKNKNAGDAVEFVEFDGGAEETNGGAGRGRGQADSSAKPWQQDGDWMCPNTSCTNVNFAFRGVCNRCGTARPAGASGGSMGAGRGRGRGGGADGGAPGKQPSGAPTGLFGPNDWACPMCGNVNWAKRLKCNICNTNKPGQNEGGVRGGRGGGYKELDEQELEETKRRRREAEEDDGEMYDEFGNLKKKYRVKTNQADTRPAVAAGRAGWEVEELGIDKDGRERSRDRQRDRGRDHHYDKDRRRSRSRERERGKERDYDYDHDRDRDRDYGRERGSRYRN

SEQ ID NO: 6046 - protein, 317 aa, Arabidopsis thaliana
  unsure (1)..(317): unsure at all Xaa locations
  Clone ID: ARATH-23APR03-C21292_1.p
MIYTNVKPDWVFVSDFLKSQFFHNKTLLFLLSAAASLNLSVICNRLKYFPQVDLKTMGKRGPKKLTNTQGGGGPNLKSVLRHEHLKNLALWSSTGDTPIPSLASLLGRRLAADTESTGITTDPDLVSCQRCETILKPGFNCNVRIEKVSANVKKKRNRCKKSNNICFPQNNVVYHCNFCSHRNLKRGTAKGQMKELYPFKPKTARSSRPKIKKEMTMPQEFQSNMLSSPERSVKDQVEEKSVGDTPKPMMLTLERDRRIRKPKTSYPSRPHLVPVIPVRGPNXTKCKAPRAGLNQSAPTLSRSEAATVQSPLLLFSL

SEQ ID NO: 6047 - protein, 348 aa, Arabidopsis thaliana
  Clone ID: ARATH-23APR03-C21297_1.p
MQTPSMAASTTSYYPIPKSFLLSPPRHKRNPNLISCSTKPICSPPPPSSSSSSPLQTTTTHRSQKQNLRLPTFEDSFLLYQFSSPTEDPGFSNRIPEQFDGEPRELVLPRVEDNNKGLAISSNMWWADLKAALGQRINIEGIVSSVSVVVKDRQFVLPHVSVKDLRYIDWEVLKRKGFKGVVFDKDNTLTAPYSLAIWPPLRPSIERCKAVFGHDIAVFSNSAGLTEYDHDDSKAKALEAEIGIRVLRHRVKKPAGTAEEVEKHFGCTSSELIMVGDRPFTDIVYGNRNGFLTVLTEPLSRAEEPFIVRQVRRLELALLKRWLRKGLKPVDHSLVSDITQFVKVPSDL

SEQ ID NO: 6048 - protein, 391 aa, Arabidopsis thaliana
  Clone ID: ARATH-23APR03-C21304_1.p
MVQISDLPRDLTEEVLSRIPVTSMRAVRFTCKKWNTLSKDRSFTKKHLRGARAAAKKKQTKEFQVIMMIQFRVYLYSVNLLNPSIERIGKLISLDVEDHVDISKIFHCGGLLLCITKDISRLVVWNPYSGQTRWIKPRNSYHRLDRYALGYEEKNKSCRCYKILRFMDDYEDDRALRLIREFEIYDLNSDSWKVVNVTPDWDVEFYHRGLSLKGNTYWFAQEKLPPLPRGRVITISDMADFLLCFDFTRERFGPRLPLPFHSFVEDTVTLSSVRDKKLAVLFQPCSASTVKIWISRKIEPNAVSWRKVFLAVDMKSLTGFQFDINAASFFVDEKKKVAMVLDKDRFSYKFTRNIAYIIGKKGYFEKVDLGESTVSSCASLVCSYVPSSVQI

SEQ ID NO: 6049 - protein, 311 aa, Arabidopsis thaliana
  Clone ID: ARATH-23APR03-C21311_1.p
MANLPPPLSMKSVALSGASSPSSSSNNDRKLSSAEQLILDLSNPELRENALHELSKKREIFQDLAPLLWHSVGTIPALLQEIIAVYPALSPPTMTPAQSNRVCNALALLQCVASHTDTRMLFLKAHLPLYLYAFLNTSSKSRPFEYLRLTSLGVIGALVKVDDTEVIRFLLQTEIVPLCLRTMENGSELSKTVATFIVQKVLLDDVGLEYMCTTAERFFALGRVLGNMVTSLAEGPSARLLKHIIRCYLRLTDNPRACDALGSCLPDLLRDATFSGCLYDDPPAMQWLQQLLHNVNVGGRAPQGLAHMFVN

SEQ ID NO: 6050 - protein, 423 aa, Arabidopsis thaliana
  Clone ID: ARATH-23APR03-C213147_1.p
MVEGIPKRWKVLSGQNKWKGLLDPLDPDLRRYIIHYGEMSQVGYDAFNWDRKSRYAGDCYYSKNRLFARTGFLKANPFRYKVTKYIYATASIKLPISFIVKSLSKDASHVQTNWMGYIAVATDQGKAMLGRRDIVVAWRGTLQPYEWANDFDFPLEPAISVFPVTDPKDNPRIGSGWLDIYTASDSRSPYDTTSAQEQVQGELKRLLELYKDEEISITFTGHSLGAVMSVLSAADLVYGKKNNININLQKKQVPITVFAFGSPRIGDHNFKNVVDSLQPLNILRIVNVPDVAPHYPLLLYSEIGEVLEINTLNSTYLKRSLNFRNYHNLEIYLHGMAGMQDTDGVFKLEIGRDISLVNKGLDALKDEYLVPSTWRCLANKGMLQMDDGTWKLDVHRRDHDDDVDADDNDDSSTSNQLQELNTD

SEQ ID NO: 6051 - protein, 670 aa, Arabidopsis thaliana
  Clone ID: ARATH-23APR03-C21321_1.p
MGDLAKQILSRPIQLADQVVKAGDEATINKQECADIKSKTEKLAALLRQAARASSDLYERPTRRILDDTENVLEKALTMVQRCRDDGYIMRLFNIIPAAAFRKMISQLENSVGDVSWLLRVSTPAGNDDDEGFGYLGLPPIAANEPILCLIWEQIAVLMTGSPEDKSDAAASLASLARDNDRYVKLIVEEGGVNPLLKLVKEGKIDGQENAARTIGLLGRDPESVEHMIQLGVCSVLSSILKEGSMKVQAVVAWAVSELVSGNHAKCQELFAQNNVIRLLVSHLAFETVQEHSKYAVVAGRATSMHHAVVMASKISSSKENLPALNEEEDDDNHIGVSSPMTNQMHSIVATTMAMKAVGSGSKSNLSSRFVTGDDDKPPEKIPEKSYSMSSQIKAYGSIAHQSRNASVTRGRELEDPVTKTYMKAMAARALWKLAVGNSSICRVITESRALLCFAVLLDKGDEETKYNTAMAIMEITAVAEENADLRRSAFRRTSPACKAVVDQLFRIVENADAGSDLLIPCVRSIGNLARTFKSAETHMIVPLVKLLDDGEPDLAAEVAIALAKFATEDNFLGKEHSRTIIEAGGSKLLVQLAYFGENGAQIPAMVLLSYVAMNVPDSEQLAKDEVLTVLEWSSKQANVLEDEDMEALLYEAKSRLELYQSRGSRGFHL

SEQ ID NO: 6052 - protein, 756 aa, Arabidopsis thaliana
  Clone ID: ARATH-23APR03-C2133_1.p
MSDLVATSPSPSSAPRSATDFFSDPYDSHPLWFKPSLFLSPNFDSESYISELRTFVPFDTLRSELRSHLASLNRELVDLINRDYADFVNLSTKLVDIDAAVVRMRAPLLELREKITGFRGSVEAALFALRNGLQQRSDAAAAREVLELLLDTFHVVSKVPTRPKVLPSTPSDWQNEDANSMGRSSMNDENSTQQDGTTMRETQSMLLERIASEMNRLKFYMAHAQNLPFIENMEKRIQSASVLLDASLGHCFIDGLNNSDTSVLYNCLRAYAAIDNTNAAEEIFRTTIVAPFIQKIITHETTTNAAGTSEDELENDYKQIKHFIAKDCKMLLEISSTDKSGLHVFDFLANSILKEVLWAIQKVKPGAFSPGRPTEFLKNYKASLDFLAYLEGYCPSRSAVTKFRAEAICVEFMKQWNVGVYFSLRFQEIAGALDSALTSPSLVFIQDSDKESSLNLILRQSDTLLECLRSCWKEDVLVFSAADKFLRLTLQLLSRYSFWVSSALNNRKSNASPSPGCEWAVSATAEDFVYVIHDVNCLVSEVCGDYLGHISQYLSSSSTEVLDVVRISIEQGGVSLEKVLPLLTKTIIDVIVDKSVEDLRQLRGITATFRMTNKPLPVRHSPYVVGLLRPVKAFLEGDKARNYLTQKTKEELLHGSVSEITRRYYELAADVVSVARKTQSSLQKLRQNAQRRGGAASGVSDQNVSETDKMCMQLFLDIQEYGRNVSALGLKPADIPEYCSFWQCVAPADRQNSISV

SEQ ID NO: 6053 - protein, 151 aa, Arabidopsis thaliana
  unsure (1)..(151): unsure at all Xaa locations
  Clone ID: ARATH-23APR03-C21394_1.p
MTLGARLVAPMIILLLFIPIELVKAEVITLTPETFSDKIKEKDTAWFVKFCLPWCIHCMKLGNKLGNLWEDLGKAMEGDDEIEVGXEVDCGTSRAVCTKVEIHSYPTFMLFYNGEEVSKYKGKRDVESLKAFVVEETEKAAEKAQLEDKEL

SEQ ID NO: 6054 - protein, 404 aa, Arabidopsis thaliana
  Clone ID: ARATH-23APR03-C214060_1.p
MLQDRVSCSLSSSKISRCVLFLSLFCFFLLTMHASANRLQRVPNPGPSPAPEPKPCPSPGPNPAPATTKRTHNTTFPAIFAFGDSILDTGNNDYILTLIKANFLPYGMNFPDKVPTGRFCNGKIPSDFIADYIGVKPVVPAYLRPGLTQEDLLTGVSFASGGSGYDPLTPIVVSAIPMSKQLTYFQEYIEKVKGFVGKEKAEHIISKGLAIVVAGSDDLANTYYGEHLEEFLYDIDTYTSFMASSAASFAMQLYESGAKKIGFIGVSPIGCIPIQRTTRGGLKRKCADELNFAAQLFNSKLSTSLNELAKTMKNTTLVYIDIYSSFNDMIQNPKKYGFDEIDRGCCGTGLLELGPLCNKYTSLLCKNVSSFMFWDSYHPTERAYKILSQKFVENDMGPFYDNSM

SEQ ID NO: 6055 - protein, 269 aa, Arabidopsis thaliana
  Clone ID: ARATH-23APR03-C214348_1.p
MQTEELLSPPQTPWWNAFGSQPLTTESLSGEASDSFTGVKAVTTEAEQGVVDKQTSTTLFTFSPGREKSSRDVPKPHVAFAMQSACFEFGFAQPMMYTKHPHVEQYYGVVSAYGSQRSSGRVMIPLKMETEEDGTIYVNSKQYHGIIRRRQSRAKAEKLSRCRKPYMHHSRHLHAMRRPRGSGGRFLNTKTADAAKQSKPSNSQSSEVFHPENETINSSREANESNLSDSAVTSMDYFLSSSAYSPGGMVMPIKWNAAAMDIGCCKLNI

SEQ ID NO: 6056 - protein, 147 aa, Arabidopsis thaliana
  Clone ID: ARATH-23APR03-C21439_1.p
MSTGEAIPRVAVVVFILNGNSILLGRRRSSIGNSTFALPGGHLEFGESFEECAAREVMEETGLKIEKMKLLTVTNNVFKEAPTPSHYVSVSIRAVLVDPSQEPKNMEPEKCEGWDWYDWENLPKPLFWPLEKLFGSGFNPFTHGGGD

SEQ ID NO: 6057 - protein, 310 aa, Arabidopsis thaliana
  unsure (1)..(310): unsure at all Xaa locations
  Clone ID: ARATH-23APR03-C21475_1.p
MGKRPPIPPDIENGPPPPARPHFRPPIPVPWVAWLVPLILAANFVTFATTMYVNDCPARSDECLLFDVLGRLSFQPIKENMLLGPSIPTLRKLGALERRLVEEGERWRLISCIWLHGGFLHLMANMISLMCIGMRLEQEFGFMRIGALYVISGLGGSXLVSCLTDSQGERVSVGASGALFGLLGAMLSELITNWTIYENKCTALMTLILIIVLNLSVGFLPRVDNSAHFGGFLAGFFLGFVLLLRPQYGYVNPKYIPPGYDMKHKKSKHKCYQHIFRFTSLAILLAGFIAGYTKLLREHTIQSMPFRDFN

SEQ ID NO: 6058 - protein, 399 aa, Arabidopsis thaliana
  Clone ID: ARATH-23APR03-C2147_3.p
MAAAAARPLVTIQTLDGDMSTDQSSTVVLPDVMTAPVRPDIVNFVHAQISNNSRQPYAVSKKAESWGTGRAVSRIPRVPGGGTHRAGQAAFGNMCRGGRMFAPTKIWRRWHRRVNVNMKRHAIVSAIAATAVPALVMARGHKIENVPEMPLVVSDSAEAVEKTSAAIKVLKQIGAYDDAEKAKNSIGIRPGKGKMRNRRYISRKGPLVVYGTEGSKIVKAFRNLPGVELCHVERLNLLKLAPGGHLGRFVIWTKSAFEKLESIYGSFEAIREEGGYVLPRAKMVNADLARIINSDEIQSVVNPIKKDAKRAVLKKNPLKNLNVMLKLNPYAKTAKRMSLLAEAQRVKAKKEKLAKKRKTVTKEEALAIKAAGKSWYKTMISDSDYTEFDNFTKWLGASQ

SEQ ID NO: 6059 - protein, 407 aa, Arabidopsis thaliana
  unsure (1)..(407): unsure at all Xaa locations
  Clone ID: ARATH-23APR03-C21496_1.p
MGSLLRILGIMGSLLPLLGISVVSAIFFLVLQQPEQSSSAIILSLKKRHGSSSGSSGNQYSSSRPSAGFQGNRSTCSLFLGTWVRDNSYPLYKPADCPGVVEPEFDCQMYGRPDSDYLKYRWQPQNCNLPTFNGAQFLLKMNGKTXQWESLICLIVSSAPSTRTEMTRGLPLSTFRFLDYGITMSFYKAPFLVDIDAVQGKRVLKLDEISGNANAWHDADLLIFNTGHWWSHTGSMQGWDLIQSGNSYYQDMDRFGGNVASTWVLWAYWGKTFAKTLVLRSRTQVLFLSISPTHDNPSDWAASSSSGSKNCYGETEPITGTAYPVSSYTDQLRSVIVEVLHGMHNPAFLLDITLLSSLRKDGHPSVYSGLISGSQRSRPDQSADCSHWCLPGLPDTWNQLLYTLLIY

SEQ ID NO: 6060 - protein, 214 aa, Arabidopsis thaliana
  Clone ID: ARATH-23APR03-C214_1.p
MIRGRGSWSGLSTRLKLYRTRRFCTKGENKLEKTESSVAHHSDTESSVSRYDETYKKLDKLDFVTAAKILFTEPPKKNKFGFDWHVVQFIIVCLPSVAVYLVAQYARRKMKIMDAELGEKKRKEEEKKEKEEAEQKALQVEAATKSHEELMEMRQRLGKIEETIKEIVLETKKPSGNAPTKTQEDQSTKLSPKEVSQPEKEHKGNVQKPGDGPH

SEQ ID NO: 6061 - protein, 337 aa, Arabidopsis thaliana
  Clone ID: ARATH-23APR03-C21500_1.p
MAKEAVKYVWEGAIPLQIHLHKSDVASHPAPPPALVLAPRIGYLPLLIPLIKPYFKDSLPPGEDSIWFDYKGFPLKWYIPTGVLFDLLCAEPERPWNLTIHFRGYPCNILIPCEGEDSVKWNFVNSLKEAQYIINGNCKNVMNMSQSDQEDLWTSVMNGDLDAYTRLSPKLKMGTVEDEFSRKTSLSSPQSQQVVPETEVAGQVKTARIPVRLYVRSLNKDFENLEDVPEIDTWDDISYLNRPVEFLKEEGKCFTLRDAIKSLLPEFMGDRAQRSGEERSIDDTEEADGSREMGEIKLVRIQGIEMKLEIPFSWVVNNLMNPEFYLHISVLVKAPQR

SEQ ID NO: 6062 - protein, 278 aa, Arabidopsis thaliana
  Clone ID: ARATH-23APR03-C21505_1.p
MSVTAAFIDSDQTQHNILMDSQSTVSGVKTVKISNVSLIVSKKDVKEFFSFSGDIQYVEMRSETQESQVAYVTFKDSQGAETAMLLTGAVIADLRVSITPAVNYQLPPEALALDSEHSFNGFSVKKAEDVVNIMVGRGYALGKDAMEKAKAFDDRHNLISNASATIASLDDKMGLSEKLSIGTTVVNEKLRDIDERYQVREITKSALAAAEETAISARTALMANPYVSSGASWFSNAFGAVTKAVKEKVENGGEGRKEIITLDPSSPKVPAVVPVKLG

SEQ ID NO: 6063 - protein, 187 aa, Arabidopsis thaliana
  Clone ID: ARATH-23APR03-C21507_1.p
MAVTSSSMLLLRNFSTVGRVAQSVRVTSRIFFSTGELIRVLPYTRSKRLICSTRAAHNEEAAAKAAASVADTGAPTIFDKIIAKEIPSDIVYEDENVLAFRDINPQAPVHVLVIPKLRDGLTSLGKAEPRHVEVLGQLLHASKIVAEKEGILDGFRVVINNGVEACQSVYHLHLHVLGGRQMKWPPG

SEQ ID NO: 6064 - protein, 116 aa, Arabidopsis thaliana
  Clone ID: ARATH-23APR03-C21547_1.p
MKPVIGTVVSNKMQKSVVVAVDRLFHNKIYNRYVKRTSKFMAHDDKDACNIGDRVKLDPSRPLSKNKHWIVAEIIKKARIYSPKAAAAAVSASASASSASTTDSSAQSQIPPSSTS

SEQ ID NO: 6065 - protein, 336 aa, Arabidopsis thaliana
  Clone ID: ARATH-23APR03-C216027_1.p
MEEMSPDNIHGVILAVSSSIFIGSSFIIKKKGLKKAGVSGARAGEGGYGYLYEPWWWAGMITMIVGEIANFAAYAFAPAILVTPLGALSIIFSAVLAHFILEEKLHMFGILGCVLCVVGSTTIVLHAPHEQGIESVKQVWHLATEPGFLAYSAVVLVVVLALIFYYEPRYGKTHMIVYVGICSLMGSLTVMSVKAVAIAIKLTFSGMNQFKYFHAWIFIIVVTICCILQINYLNKALDNFNTAVISPVYYVMFTTFTILASMIMFKDWASQSGLQIATELCGFVTILSGTFLLHKTKDMGNSTSLRGSTSHSPRDTPVFINSGSSRSSHSTRPAIL

SEQ ID NO: 6066 - protein, 289 aa, Arabidopsis thaliana
  Clone ID: ARATH-23APR03-C21652_1.p
MIALSLSVSLTSLPFSFALSSTPCKSRASPPRSTVSLSSSRRRQDRRRSIEAMSQVMELEDESDFEKLLSSDNRISITGFGSLLSERSARSTFPDLENFRIAKLQGFRRVFAHSAPIFFERGIANPETKEISSLSVEPCEGESLVVTVFEIKSSEIPAFIGRELEFRFLAVVPETLEGKPYTNSAVLCGRYSDEEFFQIRCKGNKEIYFQHYGRFKIDKIWRDDILPCRLYLRHCVLAAKNLGDEAYNNFLDHTFLGDRKTTIREYLSSTGSGIMEEEPPEALKSRYGG

SEQ ID NO: 6067 - protein, 300 aa, Arabidopsis thaliana
  Clone ID: ARATH-23APR03-C21694_1.p
MEAATVQRFQYSSWNDLRNFEGKPRGSLRYNTQRIKEDKRFRVVALTLDKRRDHRLRSVSDKNSSALLETGSLLHSPFDEEQQILKKKAEEVKPYLNGRSMYLVGMMGSGKTTVGKIMARSLGYTFFDCDTLIEQAMKGTSVAEIFEHFGESVFREKETEALKKLSLMYHQVVVSTGGGAVIRPINWKYMHKGISIWLDVPLEALAHRIAAVGTGSRPLLHDDESGDTYTAALNRLSTIWDARGEAYTKASARVSLENITLKLGYRSVSDLTPAEIAIEAFEQVQSYLEKEDGMARPDGL

SEQ ID NO: 6068 - protein, 325 aa, Arabidopsis thaliana
  Clone ID: ARATH-23APR03-C21695_1.p
ETTICAYFAYRCAITWIYLNQQRRGMGFRGLHSSLSNRLSAGNAPDVSLDNSVTDEQVRDSSDSVAAKLCTKPLKLVSGSCYLPHPDKEATGGEDAHFICAEEQALGVADGVGGWAELGIDAGYYSRELMSNSVNAIQDEPKGSIDPARVLEKAHTCTKSQGSSTACIIALTNQGLHAINLGDSGFMVVREGHTVFRSPVQQHDFNFTYQLESGRNGDLPSSGQVFTVAVAPGDVIIAGTDGLFDNLYNNEITAIVVHAVRANIDPQVTAQKIAALARQRAQDKNRQTPFSTAAQDAGFRYYGGKLDDITVVVSYVAASKEEGKH

SEQ ID NO: 6069 - protein, 423 aa, Arabidopsis thaliana
  Clone ID: ARATH-23APR03-C217000_1.p
MSFPRKFGTAIHAALSFIVFFFFDLIDAILCVVYEFVDEILEENSTGCYCTAAAPQSLTTDENELSSETLFGRRNSFREMWFLGFAREFKSKLSRKLRKSKIHQESVNRWSDCGCKSCKSWTKNEDGNLHVVVKDSTSRETEYSVQEPSENVIFIHGFMGSSHFWTETVFEHIQKDDYRLLAIDLLGFGESPKPRDSLYTLKDHVDTIERSVIKPYQLDSFHVVAHSMGCLIALALAAKHSNIVKSVTLVAPPYFPSSVDGSVLNRIARKRLWPPLAFGTAVMSWYEHIGRCVCFIICKHHKIWEWLIKLCIGKREIHWKIKDITRHTHHSAWHSMHNVICGGSKVADEHLETLIKSGVKIHLMQGDCDQIVPSHCSGNMKRTFPAVEVDIITGADHDSMISGRGEEFAEKLESIWCSFKESG

SEQ ID NO: 6070 - protein, 339 aa, Arabidopsis thaliana
  Clone ID: ARATH-23APR03-C21718_1.p
MRSYRFSDYLHMSVSFSNDMDLFCGEDSGVFSGESTVDFSSSEVDSWPGDSIACFIEDERHFVPGHDYLSRFQTRSLDASAREDSVAWILKVQAYYNFQPLTAYLAVNYMDRFLYARRLPETSGWPMQLLAVACLSLAAKMEEILVPSLFDFQVAGVKYLFEAKTIKRMELLVLSVLDWRLRSVTPFDFISFFAYKIDPSGTFLGFFISHATEIILSNIKEASFLEYWPSSIAAAAILCVANELPSLSSVVNPHESPETWCDGLSKEKIVRCYRLMKAMAIENNRLNTPKVIAKLRVSVRASSTLTRPSDESSFSSSSPCKRRKLSGYSWVGDETSTSN

SEQ ID NO: 6071 - protein, 510 aa, Arabidopsis thaliana
  Clone ID: ARATH-23APR03-C2172_1.p
MGGDDLSFTRLVITALFGLLMLLQIKETSASTSFVSSSVCKSDHLTYTKPYQQGSLFTINGNPVEKLRFCEALRFHKANGCIFEDSFSDDFCTIHSLLGRRFLEEKTVKDSKNSKPKTEYSHVKVSIAGSGFLLLCCALCCPCFHKERKANSHEVLPKESNSVHQVSSFEMSPSSEKIPQSPFRAPPSPSRVPQSPSRYAMSPRPSRLGPLNLTMSQINTATGNFADSHQIGEGGFGVVFKGVLDDGQVVAIKRAKKEHFENLRTEFKSEVDLLSKIGHRNLVKLLGYVDKGDERLIITEYVRNGTLRDHLDGARGTKLNFNQRLEIVIDVCHGLTYLHSYAERQIIHRDIKSSNILLTDSMRAKVADFGFARGGPTDSNQTHILTQVKGTVGYLDPEYMKTYHLTAKSDVYSFGILLVEILTGRRPVEAKRLPDERITVRWAFDKYNEGRVFELVDPNARERVDEKILRKMFSLAFQCAAPTKKERPDMEAVGKQLWAIRSSYLRRSME

SEQ ID NO: 6072 - protein, 397 aa, Arabidopsis thaliana
  Clone ID: ARATH-23APR03-C21756_1.p
MLSLRHIRRFCHFPSSAATGIAYVSTESNQIQGLKPLEEPALVKLKSERDPEKLYNLFKANATNRLVIENRFAFEDTVSRLAGAGRLDFIEDLLEHQKTLPQGRREGFMVRIIMLYGKAGMTKQALDTFFNMDLYGCKRSVKSFNAALQVLSFNPDLHTIWEFLHDAPSKYGIDIDAVSFNIAIKSFCELGILDGAYMAMREMEKSGLTPDVVTYTTLISALYKHERCVIGNGLWNLIVLKGCKPNLTTFNVRIQFLVNRRRAWDANDLLLLMPKLQVEPDSITYNMVIKGFFLARFPDMAERVYTAMHGKGYKPNLKIYQTMIHYLCKAGNFDLAYTMCKDCMRKKWYPNLDTVEMLLKGLVKKGQLDQAKSIMELVHRRVPPFRSKQLLSLKSIL

SEQ ID NO: 6073 - protein, 310 aa, Arabidopsis thaliana
  Clone ID: ARATH-23APR03-C217581_1.p
MKIMWETAVVFCLCSLSLVSAHSRKFTTPNVTRLTDQFSKIAIENGFSRRFGAHNIQVNGSLAKLTLDKSSGAGLVSKNKYHYGFFSARLKLPAGFASGVVVAFYLSNAETYPKSHDEIDIELLGRSRRDDWTIQTNVYANGSTRTGREEKFYFWFDPTQAFHDYTLIWNSHHTVFLVDNIPVRQFPNRGAFTSAYPSKPMSLYVTVWDGSEWATKGGKYPVNYKYAPFVVSVADVELSGCSVNNGSSTGSGPCTKSGGSISSLDPVDGQDFATLSKNQINAMDWARRKLMFYSYCSDKPRYKVMPAECN

SEQ ID NO: 6074 - protein, 431 aa, Arabidopsis thaliana
  Clone ID: ARATH-23APR03-C21779_1.p
MARCCRHLAVFLCVLLMLSLCKALSSNVDDGYGHEDGSFESDSLLKLNNDDVLSLISSDETTLEASTVSVSNFGAKGDGKTDDTQAFKKAWKKACSTNGVTTFLVPKGKTYLLKSTRFRGPCKSLRNFQILGTLSASTKRSDYKDKNHWLILEDVNNLSIDGGSTGIINGNGKTWWQNSCKIDKSKPCTKAPTALTLYNLKNLNVKNLRVKNAQQIQISIEKCNKVEVSNVEITAPGDSPNTDGIHITNTQNIRVSNSDIGTGDDCISIEDGTQNLQIFDLTCGPGHGISIGSLGDDNSKAYVSGINVDGAKFSESDNGVRIKTYQGGSGTAKNIKFQNIRMENVKNPIIIDQDYCDKDKCEDQESAVQVKNVVYKNISGTSATDVAITLNCSEKYPCQGIVLENVKIKGGTASCKNANVKNQGTVSPKCS

SEQ ID NO: 6075 - protein, 465 aa, Arabidopsis thaliana
  Clone ID: ARATH-23APR03-C21790_1.p
MSSSKIQVRGQPLLRVPARNHRMTHLVVCGVSTKRHHREINALSSNSGPSLDSVPTRTDKRQFLRGDGNGKFGRFGGKFVPETLMSRLIELEDEFNFVRCDHEFQEELTTALRDYVGRETPLYFAERLTEHYKNIVPTIEGGPEIYLKREDLSHCGSHKINNALAQAMISRRLGCSRVVAATGAGQHGVATAAACAKLSLECTVFMGAADIEKQSFNVLSMKLLGAQVISVEGTFKDASSEAIRNWVENLYTTYYLSGTVVGPHPCPIIVREFQSVIGKETRRQAKQLWGGKPDVLVACVGSGSNALGLFHEFVGDEDVRLVGVEAAGLGLDSGKHSATLAFGDVGVYHGSMSYLLQDDQGQILKPHSVGVGLEYPGVGPEISFMKETGRAEFYTATDEEAIQACMRLSRLEGIIPALEASHALAFLDKLVPTLRDGAKVVVNCSGRGDKDLDTLIQRGMPSSFC

SEQ ID NO: 6076 - protein, 458 aa, Arabidopsis thaliana
  Clone ID: ARATH-23APR03-C21812_1.p
MDDVKDKLKGFMKKVNLSSSSGKFKGQGRVLGSSSSSSAPPVNPIQNRFNSSQAPNPTPRPKPNPNPLPEKPLSSSDQKISGSTRNPDHDPVRAPQDGFDPYGAFITSSNRSQNGYSLSMFECPICKNPFTSEEEVSVHVESCLGDTNGDESSFEKDNNDNDKSEMEKLVVVYLSGKPSESSIDVLLRLFKNIVKEPENAKFRKVRMSNAKIKEAIGDVAGGVELLELVGFELKEENDEIWAVMDVPSEEQSILINKVVGYLEKRKTESSGSSAQVMEPVAPKKIDREIRVFFSVSENVASRIEVPDSFYSLSADEIKREADLRRKKIAESQLLIPRSYKEKQAKAARKRYKRSMIRVQFPDGVVLQGVFAPWEPTFALYEFVSSALKEPSLQFELLDPVLVKRRVIPHTPAPGQKPITLEDEELVPSALIRFRPIETDSLVFTGLRNELLEISEPLS

SEQ ID NO: 6077 - protein, 468 aa, Arabidopsis thaliana
  Clone ID: ARATH-23APR03-C218252_1.p
MVRGLMKFPGISTKLLNISVNSLCKFRNLERAETLLIDGIRLGVLPDVITYNTLIKGYTRFIGIDEAYAVTRRMREAGIEPDVTTYNSLISGAAKNLMLNRVLQLFDEMLHSGLSPDMWSYNTLMSCYFKLGRHGEAFKILHEDIHLAGLVPGIDTYNILLDALCKSGHTDNAIELFKHLKSRVKPELMTYNILINGLCKSRRVGSVDWMMRELKKSGYTPNAVTYTTMLKMYFKTKRIEKGLQLFLKMKKEGYTFDGFANCAVVSALIKTGRAEEAYECMHELVRSGTRSQDIVSYNTLLNLYFKDGNLDAVDDLLEEIEMKGLKPDDYTHTIIVNGLLNIGNTGGAEKHLACIGEMGMQPSVVTCNCLIDGLCKAGHVDRAMRLFASMEVRDEFTYTSVVHNLCKDGRLVCASKLLLSCYNKGMKIPSSARRAVLSGIRETVSYQAARKTHIKIKAAIECNTLMYP

SEQ ID NO: 6078 - protein, 195 aa, Arabidopsis thaliana
  unsure (1)..(195): unsure at all Xaa locations
  Clone ID: ARATH-23APR03-C21828_1.p
MSLIPSFFGNNRRINNNIFDPFSLDVWDPFKELQFPSNSSSAMLLGHQQAKEQHLAHGSHSAFGIHSRNCNSRDRSPEKLLXITNARVDWKETADAHVFKADLDGMKKVXVKVEIEDDSVLKISGERHVEKEEKQDTWHRVERSSGQFSRKFKLPENVKMDQVKASMENGVLTVTVPKVEEAKKKAQVKSIDISG

SEQ ID NO: 6079 - protein, 154 aa, Arabidopsis thaliana
  Clone ID: ARATH-23APR03-C21832_1.p
MKLSESRGETEKHRRQQHFEHELKNMISSLTHMGGDKAGPSQYDEEEDGIRVITLSGSNLGATMKTELDNNHGDRDQNGDHELDFLSTYVNSNFQAVNNSIMIGAKYETHDPGVHLDISGDVEKPSVKIPARSSRGKKGKTPARSDRRESEHTN

SEQ ID NO: 6080 - protein, 229 aa, Arabidopsis thaliana
  Clone ID: ARATH-23APR03-C21833_1.p
MVAGLRDFTLRTEDGSGKPVLDESNGEELMHVQTSVAVALGNRPIESPGTLYITSRKLIWLSDVDMAKGYAVDFLSISLHAVSRDPEAYSSPCIYTQIEVEEDEDDESDSESTEVLDLSKIREMRLVPSDSTQLETLFDVFCECAELNPEPVQEEEEESGHNWVFSADQMDVRGGDDDAEWQISQSPTSVIGHSNGDEGLNQPMLELQINDQRFEDAEEMVHESETKDH

SEQ ID NO: 6081 - protein, 383 aa, Arabidopsis thaliana
  unsure (1)..(383): unsure at all Xaa locations
  Clone ID: ARATH-23APR03-C218475_1.p
MAIWFQRIFLLLLVSCCASSDFLENPDFESPPLNLPTNSNASSVSLDQNSTLPGWTFQGTVLYVELPDTGHAVQLGEDGKINQTFIAKGDELNYILTFALIHAGQNCTSSAGLSVSGPDSNAVFSYRQNYSKVSWQSYSHNLGSWGNGEPINLVLESQAIDSDSDTNSTCWPIIDTLLIKTVGVTLVQDSGNLLINGGFESGPGFLPNSTDGVLIDAVPSLIQSPLRQWSVIGTVRYIDSEHFHVPEGKAAIEILSNTAPSGIXTATKGTSEGSRYNLTFTLGDANDACRGHFVVGAQAGSVTQNFTLESNGTGSGEKFGLVFEADKDAAQISFTSYSVTMTKENVVCGPVIDEVMVHPLGGTASVKPTWLLLIFALLYVAVL

SEQ ID NO: 6082 - protein, 119 aa, Arabidopsis thaliana
  Clone ID: ARATH-23APR03-C21857_1.p
MAGEEDWIELKFRLADGTDIGPSKYNQSMTVSSLKEKLISQWPKDKENTPKTVNDMKLINAGKILENNRTLAESRLPVCELPGMIITMHIVLRLPTLDKKSEKLQNDPPMKNRCVCTIL

SEQ ID NO: 6083 - protein, 779 aa, Arabidopsis thaliana
  Clone ID: ARATH-23APR03-C2188_1.p
MSSLSQSPPPPEMDIQPPALVNDDPSTYSSALWDWGDLLDFAADERLLVDQIHFPPVLSPPLPPLIPTQTPAESELDPSPEESGSGSDRVRKRDPRLICSNFIEGMLPCSCPELDQKLEDAELPKKKRVRGGSGVARCQVPDCEADISELKGYHKRHRVCLRCATASFVVLDGENKRYCQQCGKFHLLPDFDEGKRSCRRKLERHNNRRKRKPVDKGGVAAEQQQVLSQNDNSVIDVEDGKDITCSSDQRAEEEPSLIFEDRHITTQGSVPFTRSINADNFVSVTGSGEAQPDEGMNDTKFERSPSNGDNKSAYSTVCPTGRISFKLYDWNPAEFPRRLRHQIFQWLANMPVELEGYIRPGCTILTVFIAMPEIMWAKLSKDPVAYLDEFILKPGKMLFGRGSMTVYLNNMIFRLIKGGTTLKRVDVKLESPKLQFVYPTCFEAGKPIELVVCGQNLLQPKCRFLVSFSGKYLPHNYSVVPAPDQDGKRSCNNKFYKINIVNSDPSLFGPAFVEVENESGLSNFIPLIIGDAAVCSEMKLIEQKFNATLFPEGQEVTACSSLTCCCRDFGERQSTFSGLLLDIAWSVKVPSAERTEQPVNRCQIKRYNRVLNYLIQNNSASILGNVLHNLETLVKKMEPDSLVHCTCDCDVRLLHENMDLASDIHRKHQSPIESKARDRDPEAGLDCKERIQADCSPDSGGKETDPLLNKEVVMNVNDIGDWPRKSCIKTHSALAFRSRQTMFLIATFAVCFAVCAVLYHPNKVTQLAVAIRMRLVHKI

SEQ ID NO: 6084 - protein, 182 aa, Arabidopsis thaliana
  Clone ID: ARATH-23APR03-C21891_1.p
MADSETPYHPDPEDLRRIPVDLFASKKLPGLSSGDLGFADSSEHLVFILRKSSSSLKSLLDSSGVPLFSISRLHNGVWELHKGDVEKRKDLVLTVKRTSKRFSKTESEVSFAGESSENLVIKGVPFQKSCTIYSQDSIVAQTSLMYKLRQIYVGRSKFRLTIFPGSIDHSLVLAMVAIFLQG

SEQ ID NO: 6085 - protein, 293 aa, Arabidopsis thaliana
  Clone ID: ARATH-23APR03-C218984_1.p
MAIIGDALRQAFMPKQEYESLREEDRAWIKLQRPTLVSIVAFLCFVIFTCTIVSLKIVFPSNVLKRPFCSDIKLQPLPIYGKARDSDLFPGAFYLTDQETVDFYWMAAVVEEDVTFLVSSVYLVAGIFVAYSAPHRHEFLKVVENNYCASRRGGVRCLSILNVVFAIIYGLLAIFLGSSLLTLGSSCSVPLFWCYEISSWGLVILYAGTAFSLRRRAALTIDEGEFGNRNDQGLEMLEANPLEFTPDVERRVNEGFKAWMGPSLLSSDEEEDEPDFYNEVPNVTHTLSSRQRS

SEQ ID NO: 6086 - protein, 462 aa, Arabidopsis thaliana
  Clone ID: ARATH-23APR03-C219526_1.p
MTTETLELKTPQLADTVAVIEKDRETKKNDEVGKDEAMEEKGEENDGEKVKLPVTPVSERPIRERKRTGRYVIDTPPRSSGNKPLSITQGRGTRLKEIPNVAYKLSKRKPDDNLFLLHTILYGKKAKAQMLKKNIGQFSGFVWSEQEEEKQRAKAKEKLDKCIKEKLIDFCDVLDIPVNKSTVKKEELAVRVLEFLVCPKATRDILLADSEKETKKRKKSTSKNVTSGESSHVPAKKRRQAKKQEQPTETEGNGESDVGSEGTNDSTGEDDVAPEEENNKSEDTETEDEKDKAKEKTKSIDKKRLSKRTKKEKPAAEEKKSIKGSAKSSRKSSRQVDKSTSSSSKKQKVDKDDSSKEKGKTQTSKPQAKGSKDQGQSRKKGKKEPTRKELHVVVTKILKEVDFNTATLSDILRKLGSHFGIDLMHRKAEVKDIITDAINEMSEDDDEKEEDTEDEGEKEGKD

SEQ ID NO: 6087 - protein, 393 aa, Arabidopsis thaliana
  Clone ID: ARATH-23APR03-C219588_1.p
MRYNCFGLLDMCNGSDRLGQREAEEICTNNVRVFSYNSLRSATDSFHPTNRIGGGGYGVVFKGVLRDGTQVAVKSLSAESKQGTREFLTEINLISNIHHPNLVKLIGCCIEGNNRILVYEYLENNSLASVLLGSRSRYVPLDWSKRAAICVGTASGLAFLHEEVEPHVVHRDIKASNILLDSNFSPKIGDFGLAKLFPDNVTHVSTRVAGTVGYLAPEYALLGQLTKKADVYSFGILVLEVISGNSSTRAAFGDEYMVLVEWVWKLREERRLLECVDPELTKFPADEVTRFIKVALFCTQAAAQKRPNMKQVMEMLRRKELNLNEDALTEPGVYRGVNRGRNHRGIGLRVGQGGSSQESSSTQRDKGKSSAVPQGSTSNSNISFQSITELAPR

SEQ ID NO: 6088 - protein, 816 aa, Arabidopsis thaliana
  unsure (1)..(816): unsure at all Xaa locations
  Clone ID: ARATH-23APR03-C21989_1.p
MASMATGVSFSMTSGIGEGGYDVHRVATAARTTLKLNQKNSLSESTCMLLGMNKYRGSGAIRTVSKAVGYGQEMSKSLRVGLICGGPSAERGISLNSARSVLDHIQGDGINVSCYYIDPDLKAFAISSAQVYSNTPSDFDFKLESLAQGFSSLSELAEHLVSAVDIVFPVIHGRFGEDGGIQELLESHNIPFVGTGSRECFRAFDKYEASLELKELGFMTVPNYLVQGTGVDKSEIALWFTDNQLDLEMGKVVVKPAKAGSSIGVKVAFGVNDSIKKATELILEGIDDRVVVEVFIEDAYEFTAIVLDVGSGSVCHPVVLMPTEVQLQFHGIGDPKENAIFDYRRKYLPTQQVTYHTPPRFPIHVIKSIREEASLIFQKLGLRDFARIDGWYLAPNSNLSSPVSETLGGTKSGDIIFTDINLISGMEQTSFLFQQASKVGFSHSNILRTIVHRACSRFPHLDWYNYGYSQLLQGSTTLEVSEDPQKVFVIFGGDTSERQVSVMSGTNVWVNLQRYVDVSXKERRHHLRCNHVSYEIINSCXILSLNDNSGCNRIALTQMILFXQLNVTPCLLPKKKKKRKYSLKEWIKHAKEAQATVFIAVHGGIGEDGTLQGLLEDEGVSYTGPGVLASRTCMDKVMTSQALSNLSEFGIHTISKDVKRTEDIMHETFPNVWDELIKKLQCLTLCVKPAKDGCSTGVARLCSSEDLAVYVQALKDCIPRIPPNTLSKTHGMIEMPNPTPEFLIFEPFVETDEIIVSSKAKQQLSWKGRRRWVEMTVGVIGKHGSMHSLSPSLTVKESGDILSLEEKFQVAYEIKS

SEQ ID NO: 6089 - protein, 207 aa, Arabidopsis thaliana
  Clone ID: ARATH-23APR03-C21999_1.p
MTTTECTTSPAIPPPQVEHSPPQEKPGNAELFSPAPPSPPPPKITMMDIVNSNGILTDQLVDEDPSFYKYLDSEEYAEKYRSYEADFRKYLMDKHFSEVDEYEETTTIDGETIFSSVLPCARWYADPDASFVDPPQCIVEEEEVGEVEEMEEVEEVEEEVDEVGEVEEEQEEVIDSASAEIPNGEISNGGTVLEDTCDVGEKPDFPI

SEQ ID NO: 6090 - protein, 632 aa, Arabidopsis thaliana
  Clone ID: ARATH-23APR03-C21_1.p
MANPDVKEILCDCVINLRENPKRRRETVYVGCGAGFGGDRPLAALKLLQRVEELNYLVLECLAERTLADRWLSMASGGLGYDPRVSEWMQLLLPLAVERGTCIITNMGAIDPSGAQKKVLEVAGELGLTISVAVAHEVHFETGSGSSFGGQYCSAGGTSTYLGAAPIVECLEKYQPNVIITSRVADAALFLAPMVYELGWNWNDLELLAQGTLAGHLLECGCQLTGGYFMHPGDQYRDMAFPLLQDLSLPYAEIGYDGKVCVSKVEGSGGILNTSTCAEQLLYEIADPSAYITPDVVIDIRGVSFLPLSDCKVQCSGAKPSSNTSVPEKLLRLIPKECGWKGWGEISYGGNGSIQRAKASEFLVRSWMEETIPGVNHCILSYVIGVDSLKATSNGTESWQSCGDIRLRMDGLFKLKEHAVQLTKEFTALYTNGPAGGGGISTGHKMEIVLEKRLVSRESVMWKTGLQHTNTSEPETSEHHSPEKMPKLPKENPKNLTMRGYQSGFHHSPAPSGQKIPLYSVAHSRAGDKGNDINFSIIPHYSPDVERLKLIITPQWVKHVMSVLLSTSSFLELDAKPMDENVSVEIYDVEGIHAMNVVVRNILDGGVNCSRRIDRHGKTISDLILCQQVVLI

SEQ ID NO: 6091 - protein, 308 aa, Arabidopsis thaliana
  Clone ID: ARATH-23APR03-C22004_1.p
MGELNGVIIPTIDLEEVSDKILNQKIREASERWGCFRVINHGVSLSLMAEMKKTVIDLFQRPYEVKVRNTDVLLGSGYRAPNEINPYYEALGLYDMASPHAVNTFCDQLEASADQREIMVKYAKAINGLATDLARKLAESYGLVETDFFKEWPSQFRINKYHFKPETVGKLGVQLHTDSGFLTILQDDENVGGLEAMDSSSGTFFPIDPLPNTLAINLGDMATIWSNGRLCNVKHRVQCKEATMRYSIASFLLGPMDTDLEPPSEFVDAEHPRLYKPISHEGVRNIRMTKKLHDGEALKLITHEGQAR

SEQ ID NO: 6092 - protein, 178 aa, Arabidopsis thaliana
  Clone ID: ARATH-23APR03-C22023_1.p
MGITSSTDPKTETFSDPKSQNNEEGPAQSEKLGDASPSTPAPSEELGDSSTVWRDPEDSESDEKQEEGGGGDADGEEEGECGFCLFMKGGGCKDSFVAWEECVEAAEKNKEDIVTNCMEVTSMLKKCMDEHSDYYQPILAAEKAAEAEVKKELEAEKKKEEEEKISEEEVAAKKQAQG

SEQ ID NO: 6093 - protein, 228 aa, Arabidopsis thaliana
  Clone ID: ARATH-23APR03-C22035_1.p
MREDAARDRMRGFGFHEHVISESIKELLEVYEDQWFLIEDDSYGPLLAICLEKQEEKEKQLAEVQANQLPENHNEEMAEEEQPNQLAVEIHEEEKEQEQDMHIEYGRDQADELSINSEAVNDPSPAAIHLGEASSDYAQSSVRGVENLHCGWLIDEEETDPEEETDPEEKETEPEDPKEKETEPEEDSDGDDDEIIQLTPEPLCEELQELLREVRGQKRRKKEMRWDK

SEQ ID NO: 6094 - protein, 206 aa, Arabidopsis thaliana
  Clone ID: ARATH-23APR03-C22036_1.p
MATTETIIQGAILVLTLVMFWAIKYLSQRGLTKFRTKHRATLQTQRQLIQASRLLARARTTPKKSQSQSLAKTALTEADNVIAISPDDAAGHIVRALALDLLGHHTSALKSFDMALTYPRLKSLSVGERADALVKRAEMKLAVNRRRRIDSAVEDLEEAVRLAAGTDTARLFRLLGECYEFKGLKEKAQWAFNEALKAQPSSVNGT

SEQ ID NO: 6095 - protein, 391 aa, Arabidopsis thaliana
  Clone ID: ARATH-23APR03-C22038_1.p
MEPPAKGTVTPLGFSEEDVRKAASYMEEKIGEKRVEMNRLQQYVDENDNLINLVKKLPDQLHHNVMVPFGKMAFFPGRLIHTNECLVLLGENYYTDRSSKQTVDFLKRRDKTLQSQIHSLKAEIEDLQTEASFFTTTASEVADGLVEIREEYVEEDSSAPVVIHSSEKEPCNLSEGETEEGELEDDDFARIMARLNELEIEEELEGEDGDSRGEDPDSSVESVEQIQHDLVKGSRGETDRGRVEYGKQETTISVPNKASGHSSSPRVSEPRVEAKIIQVLPETHPHKDLDDPLNRIRPMAQYLSKEGQSRGGTPQQNAETWKDFRTNAKTNVLGPQKIEPQKPEPEFDSTKAFTGSIVEHAHILETSAHSQTQSSTSQPSKPVSRFRAKRR

SEQ ID NO: 6096 - protein, 311 aa, Arabidopsis thaliana
  Clone ID: ARATH-23APR03-C220445_1.p
MASTPCAACKLLRRKCTQECVFAPYFPPTNPQKFIFVHRVFGASNVTKILNDLPPDQREDTVNSLFYEAEARIRDPIYGCVGLISFLQQYLKKIQQDLLTAKEELVGYMGPDAVIPPPYLPPIGNNPPPNFMMSMEGMPPGVIPQGEPLMIREPNMSQQHHHQQPQDEQLQFIASDAQRMAAMMLERGDQQGMFNGYGIDNNGSVTATGFNQMDVNDQGAGGSLSGPSLALGSFGDAYQMGQETEHGHINHDQLQTQLMLQPPLQEGQEQTEEGQFLMQPMGQENLHDEEEEEELEPPVKWRKPENKEASF

SEQ ID NO: 6097 - protein, 135 aa, Arabidopsis thaliana
  Clone ID: ARATH-23APR03-C22064_1.p
MAEGKPDEQLFQLLSGLLQQVESLTNTEEVELRSKIEALGLEVTKVPSKSAQHLNEVEIAKELDKLSAKLDDVDEMISSAIASDPQVQTLLSGTADVWMPVITAGAEERLNFTASLADDDDLSNKETTTDNTSSS

SEQ ID NO: 6098 - protein, 791 aa, Arabidopsis thaliana
  Clone ID: ARATH-23APR03-C22082_1.p
MKKLTSLFPLLFLIPLLASCAEEKQVYIVYFGEHKGDKAFHEIEEHHHSYLQSVKESEEDARASLLYSYKHSINGFAAELTPDQASKLEKLAEVVSVFKSHPRKYEAHTTRSWEFVGLEEEETDSDVPRRKNDADDRFRVGRNFLKKAKHGDGIIVGVLDSGVWPESKSFNDKGMGPVPKSWKGICQTGVAFNSSHCNRKIIGARYYVKGYERYYGAFNATANKDFLSPRDPDGHGSHTASTAVGRRVLGASALGGFAKGSASGGAPLARLAIYKACWAKPNAEKVEGNICLEEDMLAAIDDAIADGVHVISISIGTTEPFPFTQDGIAMGALHAVKRNIVVAASAGNSGPKPGTLSNLAPWIITVGASTLDRAFVGGLVLGNGYTIKTDSITAFKMDKFAPLVYASNVVVPGIALNETSQCLPNSLKPELVSGKVVLCLRGAGSRIGKGMEVKRAGGAGMILGNIAANGNEVPSDSHFVPTAGVTPTVVDKILEYIKTDKNPKAFIKPGKTVYKYQAAPSMTGFSSRGPNVVDPNILKPDITAPGLYILAAWSGADSPSKMSVDQRVAGYNIYSGTSMSCPHVAGAIALLKAIHPKWSSAAIRSALMTTAWMTNDKKKPIQDTTGLPANPFALGSGHFRPTKAADPGLVYDASYRAYLLYGCSVNITNIDPTFKCPSKIPPGYNHNYPSIAVPNLKKTVTVKRTVTNVGTGNSTSTYLFSVKPPSGISVKAIPNILSFNRIGQKQRFKIVIKPLKNQVMNATEKGQYQFGWFSWTDKVHVVRSPIAVSLA

SEQ ID NO: 6099 - protein, 257 aa, Arabidopsis thaliana
  Clone ID: ARATH-23APR03-C22112_1.p
MSSMSRSRSRSRSRSRDRFRSRSPRDRRMRSERVSYHDAPSRREREPRRAFSQGNLCNNCKRPGHFARDCSNVSVCNNCGLPGHIAAECTAESRCWNCREPGHVASNCSNEGICHSCGKSGHRARDCSNSDSRAGDLRLCNNCFKQGHLAADCTNDKACKNCRTSGHIARDCRNDPVCNICSISGHVARHCPKGDSNYSDRGSRVRDGGMQRGGLSRMSRDREGVSAMIICHNCGGRGHRAYECPSARVADRGFRRY

SEQ ID NO: 6100 - protein, 1002 aa, Arabidopsis thaliana
  Clone ID: ARATH-23APR03-C22125_1.p
MKLLLLLLLLLLLHISHSFTVAKPITELHALLSLKSSFTIDEHSPLLTSWNLSTTFCSWTGVTCDVSLRHVTSLDLSGLNLSGTLSSDVAHLPLLQNLSLAANQISGPIPPQISNLYELRHLNLSNNVFNGSFPDELSSGLVNLRVLDLYNNNLTGDLPVSLTNLTQLRHLHLGGNYFSGKIPATYGTWPVLEYLAVSGNELTGKIPPEIGNLTTLRELYIGYYNAFENGLPPEIGNLSELVRFDAANCGLTGEIPPEIGKLQKLDTLFLQVNAFTGTITQELGLISSLKSMDLSNNMFTGEIPTSFSQLKNLTLLNLFRNKLYGAIPEFIGEMPELEVLQLWENNFTGSIPQKLGENGRLVILDLSSNKLTGTLPPNMCSGNRLMTLITLGNFLFGSIPDSLGKCESLTRIRMGENFLNGSIPKELFGLPKLSQVELQDNYLTGELPISGGGVSGDLGQISLSNNQLSGSLPAAIGNLSGVQKLLLDGNKFSGSIPPEIGRLQQLSKLDFSHNLFSGRIAPEISRCKLLTFVDLSRNELSGDIPNELTGMKILNYLNLSRNHLVGSIPVTIASMQSLTSVDFSYNNLSGLVPSTGQFSYFNYTSFVGNSHLCGPYLGPCGKGTHQSHVKPLSATTKLLLVLGLLFCSMVFAIVAIIKARSLRNASEAKAWRLTAFQRLDFTCDDVLDSLKEDNIIGKGGAGIVYKGTMPKGDLVAVKRLATMSHGSSHDHGFNAEIQTLGRIRHRHIVRLLGFCSNHETNLLVYEYMPNGSLGEVLHGKKGGHLHWNTRYKIALEAAKGLCYLHHDCSPLIVHRDVKSNNILLDSNFEAHVADFGLAKFLQDSGTSECMSAIAGSYGYIAPEYAYTLKVDEKSDVYSFGVVLLELITGKKPVGEFGDGVDIVQWVRSMTDSNKDCVLKVIDLRLSSVPVHEVTHVFYVALLCVEEQAVERPTMREVVQILTEIPKIPLSKQQAAESDVTEKAPAINESSPDSGSPPDLLSN

SEQ ID NO: 6101 - protein, 559 aa, Arabidopsis thaliana
  Clone ID: ARATH-23APR03-C22164_1.p
MKFMKIGTKPDTFYTQEASRILITDTPNDLVIRINNTTYHLHRSCLVPKCGLLRRLCTDLEESDTVTIELNDIPGGADAFELCAKFCYDITINLSAHNLVNALCASKFLRMSDSVDKGNLLPKLEAFFHSCILQGWKDSIVTLQSTTKLPEWCENLGIVRKCIDSIVEKILTPTSEVSWSHTYTRPGYAKRQHHSVPRDWWTEDISDLDLDLFRCVITAARSTFTLPPQLIGEALHVYTCRWLPYFKSNSHSGFSVKENEAALERHRRLVNTVVNMIPADKGSVSEGFLLRLVSIASYVRASLTTKTELIRKSSLQLEEATLEDLLLPSHSSSHLHRYDTDLVATVLESFLMLWRRQSSAHLSSNNTQLLHSIRKVAKLIDSYLQAVAQDVHMPVSKFVSLSEAVPDIARQSHDRLYKAINIFLKVHPEISKEEKKRLCRSLDCQKLSAQVRAHAVKNERMPLRTVVQALFFDQESGSKGASSRSESQELFTRGKETPTDEHSMMHKLHLGPASTGKAKNVLEEGCKRGEEKTRSSTDPKKIVWKGTGSEHKHHISRDR

SEQ ID NO: 6102 - protein, 356 aa, Arabidopsis thaliana
  Clone ID: ARATH-23APR03-C2216_1.p
MAPSSSPLRTTSETDEKYANVKWEELGFALTPIDYMYVAKCRQGESFTQGKIVPYGDISISPCSPILNYGQGLFEGLKAYRTEDDRIRIFRPDQNALRMQTGAERLCMTPPTLEQFVEAVKQTVLANKKWVPPPGKGTLYIRPLLLGSGATLGVAPAPEYTFLIYASPVGDYHKVSSGLNLKVDHKYHRAHSGGTGGVKSCTNYSPVVKSLLEAKSAGFSDVLFLDAATGRNIEELTACNIFIVKGNIVSTPPTSGTILPGVTRKSISELAHDIGYQVEERDVSVDELLEAEEVFCTGTAVVVKAVETVTFHDKKVKYRTGEAALSTKLHSMLTNIQMGVVEDKKGWMVDIDPCQG

SEQ ID NO: 6103 - protein, 124 aa, Arabidopsis thaliana
  Clone ID: ARATH-23APR03-C22176_1.p
MAEVKDQLEIKFRLNDGSDIGPKLFPDATTVATLKETVVAQWPRDKENGPKTVKDVKLISAGRILENNKTVGDCRSPVGNFSGAVTTMHVIVQHQVTEKEKKKKKPKGDLKQNKCVCLCFGARC

SEQ ID NO: 6104 - protein, 959 aa, Arabidopsis thaliana
  Clone ID: ARATH-23APR03-C22179_1.p
MCEPDDNSARNGVTTQPSRSRELLMDVDDLDLDGSWPLDQIPYLSSSNRMISPIFVSSSSEQPCSPLWAFSDGGGNGFHHATSGGDDEKISSVSGVPSFRLAEYPLFLPYSSPSAAENTTEKHNSFQFPSPLMSLVPPENTDNYCVIKERMTQALRYFKESTEQHVLAQVWAPVRKNGRDLLTTLGQPFVLNPNGNGLNQYRMISLTYMFSVDSESDVELGLPGRVFRQKLPEWTPNVQYYSSKEFSRLDHALHYNVRGTLALPVFNPSGQSCIGVVELIMTSEKIHYAPEVDKVCKALEAVNLKSSEILDHQTTQICNESRQNALAEILEVLTVVCETHNLPLAQTWVPCQHGSVLANGGGLKKNCTSFDGSCMGQICMSTTDMACYVVDAHVWGFRDACLEHHLQKGQGVAGRAFLNGGSCFCRDITKFCKTQYPLVHYALMFKLTTCFAISLQSSYTGDDSYILEFFLPSSITDDQEQDLLLGSILVTMKEHFQSLRVASGVDFGEDDDKLSFEIIQALPDKKVHSKIESIRVPFSGFKSNATETMLIPQPVVQSSDPVNEKINVATVNGVVKEKKKTEKKRGKTEKTISLDVLQQYFTGSLKDAAKSLGVCPTTMKRICRQHGISRWPSRKIKKVNRSITKLKRVIESVQGTDGGLDLTSMAVSSIPWTHGQTSAQPLNSPNGSKPPELPNTNNSPNHWSSDHSPNEPNGSPELPPSNGHKRSRTVDESAGTPTSHGSCDGNQLDEPKVPNQDPLFTVGGSPGLLFPPYSRDHDVSAASFAMPNRLLGSIDHFRGMLIEDAGSSKDLRNLCPTAAFDDKFQDTNWMNNDNNSNNNLYAPPKEEAIANVACEPSGSEMRTVTIKASYKDDIIRFRISSGSGIMELKDEVAKRLKVDAGTFDIKYLDDDNEWVLIACDADLQECLEIPRSSRTKIVRLLVHDVTTNLGSSCESTGEL

SEQ ID NO: 6105 - protein, 336 aa, Arabidopsis thaliana
  Clone ID: ARATH-23APR03-C22181_1.p
MSWLFKSRGDDDHDPDPDPSTTHGGVKEDLSSLLRGVAAFLAPPPSPPVNERRLSSDNSPTQLGLLGIRNDLAEIRGNFSNFASNLLQFPSNLRDRESSRRSPLNDQVPGISEEVVDFAVKISTKPGCWTDFPLSLDTEFELSEAQRAHASAIEDLVPGLVAVKNQVSSYMDDEHFWLIYFILLMPRLNGHDFELLATCKVFETRDQLLLKLQKKETGSSKSTTGHETPEEGSSRETETVEGVIDKIETLKIEQREISDESSEEQRRSFRDEEVISFSDLDVDDLSEKPSPNRSTLKRPASNASGSSWVQLSKSQVGHSKDSEGDSSDWLPIGDSD

SEQ ID NO: 6106 - protein, 407 aa, Arabidopsis thaliana
  unsure (1)..(407): unsure at all Xaa locations
  Clone ID: ARATH-23APR03-C2222_1.p
MERLISHPPLMIVSDLDHTMVDHQDHENLSLLRFNSLWEYAYRRDSLLVFSTARSPVLYKELRKEKPLLTPDIIITSIGTEIAFGNSMVPDHAWVESLNSCKWNREIVLEETSKFPELTLQPKTEQRLHKVSFYIDEGKXDVKIIYSWGKNVDVIPRGAGKGEALEYLLKKLQAEGIFPVNTLACGDSEHDAELFSIPDVHGVMVSNSQEELLKWRSENALNNLKVIHSTERCADGIIQAIGHFNLGPDLSPRDVSEFLDRKMDNVNPGHEVVRFYLFYERLRRGEIKNYETYIASFKDSCLHAAVLFHPSGAEKSLRDTIDELKKCYGDKRGKKFWVWVDQVLVTDTIPGKWIVKFDKWEQCEDESQCCKTTVEFTSKGGDLVWEKVKQIWSEESKVKDDNSSWIL

SEQ ID NO: 6107 - protein, 222 aa, Arabidopsis thaliana
  Clone ID: ARATH-23APR03-C22256_1.p
MNIFKKKTTPKDALRTSKREMAVATRGIEREITSLQLEEKRLVAEIKKTAKTGNEAATKILARQLVRLRQQITNLQGSRAQIRGVTTHTQALYASTSISSGMKGATKAMVAMNKQMAPTKQAKVIKDFQKQSAQLDMTIEMMSEAIDETLDKDEAEEETEDLTNQVLDEIGVGVASQLSSAPKGRIATKTAAPPASTAATSKNSESSEVDELEKRLASLRRI

SEQ ID NO: 6108 - protein, 314 aa, Arabidopsis thaliana
  Clone ID: ARATH-23APR03-C22270_1.p
MAEEIRFFELNTGAKIPSVGLGTWQADPGLVGNAVDAAVKIGYRHIDCAQIYGNEKEIGLVLKKLFDGGVVKREEMFITSKLWCTYHDPQEVPEALNRTLQDLQLDYVDLYLIHWPVSLKKGSTGFKPENILPTDIPSTWKAMESLFDSGKARAIGVSNFSSKKLADLLVVARVPPAVNQVECHPSWQQNVLRDFCKSKGVHLSGYSPLGSPGTTWLTSDVLKNPILGGVAEKLGKTPAQVALRWGLQMGQSVLPKSTHEDRIKQNFDVFNWSIPEDMLSKFSEIGQGRLVRGMSFVHETSPYKSLEELWDGEI

SEQ ID NO: 6109 - protein, 270 aa, Arabidopsis thaliana
  Clone ID: ARATH-23APR03-C22278_1.p
MASLRCFRELSRRATTVFSINQTRSISSFHGIEFSGTSISHGTVIPNRSLTRNLPWYSHWYRSQDRCFSSNTKDTDEDEESSEGEDDDEEEGEDFEDSADMEVEREYSPAEKVEEAEEIGYKVMGPLKPSERLFKPYEPVFAIVQIGSHQFKVSNGDSIFTEKLKFCDINDKLELTKVLLLGSASQTIIGRPILPDATVHAVVEEHALDEKVLIFKKKRRKNYRRTRGHRQELTKLRITDIQGIEKPEPKIVHKPSKEAVTEQTKAELVA

SEQ ID NO: 6110 - protein, 592 aa, Arabidopsis thaliana
  Clone ID: ARATH-23APR03-C22331_1.p
MEATAAPFSSIVSSRQNFSSSSSIRASSPASLFLSQKSIGNVNRKFKSPRSLSVRASSTSDSVVTLLDYGAGNVRSIRNALRHLGFSIKDVQTPGDILNADRLIFPGVGAFAPAMDVLNRTGMAEALCKYIENDRPFLGICLGLQLLFDSSEENGPVKGLGVIPGIVGRFDASAGIRVPHIGWNALQVGKDSEILDDVGNRHVYFVHSYRAIPSDENKDWISSTCNYGESFISSIRRGNVHAVQFHPEKSGEVGLSVLRRFLHPKLPATQKPMEGKASKLAKRVIACLDVRTNDKGDLVVTKGDQYDVREQSNENEVRNLGKPVDLAGQYYKDGADEISFLNITGFRDFPLGDLPMIQVLRQTSKNVFVPLTVGGGIRDFTDASGRYYSSLEVAAEYFRSGADKISIGSDAVSAAEEFIKSGVKTGKSSLEQISRVYGNQAVVVSIDPRRVYVNHPDDVPYKVIRVTNPGPNGEEYAWYQCTVSGGREGRPIGAFELAKAVEELGAGEILLNCIDCDGQGKGFDIDLVKLISDSVGIPVIASSGAGTPDHFSEVFEKTNASAALAAGIFHRKEVPIQSVKEHLQEERIEVRI

SEQ ID NO: 6111 - protein, 161 aa, Arabidopsis thaliana
  Clone ID: ARATH-23APR03-C223355_1.p
MKRIIRISFTDAEATDSSSDEDTEERGGASQTRRRGKRLVKEIVIDPSDSADKLDVCKTRFKIRIPAEFLKTAKTEKKYRGVRQRPWGKWVAEIRCGRGSCKGRRDRLWLGTFNTAEEAALAYDNASIKLIGPHAPTNFGLPAENQEDKTVIGASEVARGA

SEQ ID NO: 6112 - protein, 581 aa, Arabidopsis thaliana
  Clone ID: ARATH-23APR03-C22337_1.p
MESLLCRRRIKRVMVLIIALTWLRSTCGELEDQLFEVGKLKMFVDDLPDMPRLYGFNSVHGIIKPASLQIGMFSTKWKFHRDLPATPVFAYGTSRSKATVPGPTIETVYGVDTYVTWRNHLPKSHILPWDPTISPATPKHGGIPTVVHLHGGIHEPTSDGNADAWFTAGFRETGPKWTKTTLHYENKQQPGNMWYHDHAMGLTRVNLLAGLVGAYILRHHAVESPFQLPTGDEFDRPLIIFDRSFRKDGSIYMNATGNNPSIHPQWQPEYFGDVIIVNGKAWPRLNVRRRKYRFRIINASNARFFKFFFSNGLDFIVVGSDSAYLSKPVMTKSILLSPSEIVDVVVDFYKSPSRTVVLANDAPYPYPSGDPVNEENGKVMKFIINNESEDDTCTIPKKLINYPNADVSNAVLTRYISMYEYVSNSDEPTHLLVNGLPYEAPVTETPKSGTTEVWEVINLTEDNHPLHIHLGLFKVVEQTALLAAGLEEFKECMTKQNDAVKCQISKYARGKKTAVTAHERGWKNVFKMMPGHVTRILVRFSYIHTNASYPFDPTQEPGYVYHCHILDHEDNMMMRPLKVII

SEQ ID NO: 6113 - protein, 126 aa, Arabidopsis thaliana
  Clone ID: ARATH-23APR03-C2234_1.p
MVAHSLVPLSPAAHAARLSSPSPRSLPQAPPVVLAVPPINRRTILVGLGGALWSWNALAAKEEAMAAARRPPPPPPKEKKDPTVTGVQAKVLASKKRKEEMKASIAKLREKGKPVVEAKPSSSSSE

SEQ ID NO: 6114 - protein, 640 aa, Arabidopsis thaliana
  Clone ID: ARATH-23APR03-C22354_1.p
MPVSLTPNAITAIHDGDVNLKPLLQVLEIKMIGRSQERSQERYRFLISDGVSAQHAMVAVQLNDRVKSGQFEKGSIVQLIDYICSDVKGRKLIVVLNMETIVQQSETIGNPTIFGETDTEAQKTFSGTGNIPPPNRVVFNEPMVQHSVNRAPPRGVNIQNQANNTPSFRPSVQPSYQPPASYRNHGPIMKNEAPARVIPIAALNPYQGRWAIKARVTAKGDIRRYNNAKGDGKVFSFDLLDYDGGEIRVTCFNALVDRFYDVTEVGKVYLISKGSLKPAQKNFNHLKNEWEIFLESTSTVELCPDEDGSIPKQQFSFRPISDIENAENNTILDVIGVVTSVNPSVPILRKNGMETHRRILNLKDESGKAVEVTLWGEFCNRDGRQLEEMVDSAFHPVLAIKAGKVSDFSGKSVGTISSTQLFINPDFPEAHKLRTWFDYGGKDTASFSISRDTMPGGVSRNEIRKNVSQIKEEGLGRSDKPDWITVKATISFIKTDSFCYTACPLMIGDKQCNKKVTRSGTNRWLCDRCNQESDECDYRYLLQVQIQDHTGLTWITAFQETGEEIMGCPAKKLYAMKYELEKEEEFAEIVRDRLFHQYMLKLKIKEESYGDEQRVKMTVVKVDKVNYTSESKYMLDLLVR

SEQ ID NO: 6115 - protein, 287 aa, Arabidopsis thaliana
  Clone ID: ARATH-23APR03-C223754_1.p
MAKLRHSRFQARKWSTLMLVLFMLFMLTIVLLMLLAFGVFSLPINNDESSPIDLSYFRRAATERSEGLGKRGDQWTEVLSWEPRAFVYHNFLSKEECEYLISLAKPHMVKSTVVDSETGKSKDSRVRTSSGTFLRRGRDKIIKTIEKRIADYTFIPADHGEGLQVLHYEAGQKYEPHYDYFVDEFNTKNGGQRMATMLMYLSDVEEGGETVFPAANMNFSSVPWYNELSECGKKGLSVKPRMGDALLFWSMRPDATLDPTSLHGGCPVIRGNKWSSTKWIHVGEYKI

SEQ ID NO: 6116 - protein, 939 aa, Arabidopsis thaliana
  Clone ID: ARATH-23APR03-C22378_1.p
MAADQRRKRMNSANVIGTSSREHYRAKRKKNASPDGALRSGDHITLEWDRNRSKVVSKKEQVGLSFRHLREFVDVVPPRRNVLAQVCPVPHETFQLENLSEVLSNEVWRSCLSDGERNYLRQFLPEGVDVEQVVQALLDGENFHFGNPSLDWGTAVCSGKAHPDQIVSREECLRADKRRYYSNLEKYHQDIIDYLQTLEEKWESCKDPEKDIVKMMWGRSRGGNAQVNGSCQGLTAASGSSSWNEDDKPDSSDNMISPVVRCGEVQRRSKRSGLEKEKTQNNGVNVGGKVRKKNVLPKDSIQQTDGAKYMSYLKISKKQHQIVTSMKQSGKSIQSRALNRIFGNIDSLDVQPYGVFVEEEQKKLNAHWLHLVKDLPAAYAIWKRLQLQKRDIISSMGRELKEKCNLWMEDKQQQYAAENPLQKHDVQYNNGESLNPNQSGDMAPDGEDSGIFSQISGKNHSPSKDSSSYGDQITDSGRCLLVGTHSSQVSSPDCGNNINHEDREEKQYSSPCSPSRCHSFNRTDVEVNNYSSSIQGQSLPQASFPNEPHASDLEDADHVGKHCAPELENASLDERIPCIATSLGEGSQFCSGGDVWQPVGGIRQSYISRQAYTPSGGLSIIHHPEGDEVAKNCFIDLESNMPEEVDRRKMLQRNANNSFGSFPNNNQNEILQSLFNGQGMVSRTTEQLHPLLKVPLNEEHKQIMGIGFQQEGNNNMMVGNQFSGQFQDQIPASHAFPQDQQRQVDAFGQGSMSDNIYRGFLMQRPDWNPNCTQIGVTAQPLLSTGPLLNQNWQFRSMWANTNGVGCTSQGSQTGTERDPSLLRVANNAEQIIHRGSSSDQSLFSVLSQCSQLRPSRSAFEPESSSHQMVASGNYGMLMGGGSTQVSSNLVQPANPLDYLSGSNPTTSLMPDDVVWMNQSRQNSGLHDPLGKLYPRSWNP

SEQ ID NO: 6117 - protein, 834 aa, Arabidopsis thaliana
  Clone ID: ARATH-23APR03-C22379_1.p
MVDNSNNKKRKEFISEADIATLLQRYDTVTILKLLQEMAYYAEAKMNWNELVKKTSTGITSAREYQLLWRHLAYRDSLVPVGNNARVLDDDSDMECELEASPGVSVDVVTEAVAHVKVMAASYVPSESDIPEDSTVEAPLTINIPYSLHRGPQEPSDSYWSSRGMNITFPVFLPKAAEGHNGNGLASSLAPRKRRKKWSAEEDEELIAAVKRHGEGSWALISKEEFEGERTASQLSQRWGAIRRRTDTSNTSTQTGLQRTEAQMAANRALSLAVGNRLPSKKLAVGMTPMLSSGTIKGAQANGASSGSTLQGQQQPQPQIQALSRATTSVPVAKSRVPVKKTTGNSTSRADLMVTANSVAAAACMSGLATAVTVPKIEPGKNAVSALVPKTEPVKTASTVSMPRPSGISSALNTEPVKTAVAASLPRSSGIISAPKVEPVKTAASAASLPRPSGMISAPKVEPVKTTASVASLPRPSGIISAPKAEPVKTAASAASSPRPSGMISAPKVESVKTTASMPRPSGIISAPKAELVKSAASAASLPCTSGIISSPKAELVKSAASAASFPRPSSMLSAPKADPVKIVPAAATNTKSVGPLNLRHAVNGSPNHTIPSSPFTKPLHMAPLSKGSTIQSNSVPPSFASSRLVPTQRAPAATVVTPQKPSVVAAATVVTPQKPSVGAAATVVTPQKPSVGAAANVVTPQKPSVGSAATVVTPQKPSVGAAVTVTSKPVGVQKEQTQGNRASPLVTATLPPNKTIPANSVIGTAKAVAAKVETPPSLMPKKNEVVGSCTDKSSLDKPPEKESTTTVSPLAVAATKSKPKDEATVTGTGLKEL

SEQ ID NO: 6118 - protein, 228 aa, Arabidopsis thaliana
  Clone ID: ARATH-23APR03-C2238_1.p
MSPSCSSCVNVLLIMCLMLLSLSADAYKNYTVGESTGWFDIQERPSANYQKWADSKSFSLGDFLIFNTDSNHSVVQTYDFKTYKDCDYDNNENNDTTEWSAANPSATSPVPVSISVPLVKEGSNYFFSGNYDGEQCKFGQHFMINVTHGQGLPDSSSPDDAAAPGPSESSQSGDDEVAPDTIVPANFDHPKDIESADDDKEVHSKKSSSSTTKTSLFCFVFMGLFASF

SEQ ID NO: 6119 - protein, 284 aa, Arabidopsis thaliana
  Clone ID: ARATH-23APR03-C22403_1.p
MDIEEMEGNNQVEEHHVDTSRPFSSVKEAVAIFGQRIMLPVQTHTMNSKSASPIAASRSINQNAKPRSPGLSQTVKLVIPTASPSISQTAKLVSPIASPSISQTASSSSSPWKQRSLLPPSPQGPKEEIMDVLKKLEAEITETKTEVKMLKERESETEVALATLNAELHKNKSKIAKAEADAAGKSAAAMTKSVSFKDTKEKENGEDQRRKELMRKMQKEYPSLAQILDSNKGNRDGYFANTKKTKKKKKPIIPLVGDFFFFKKKGSSPEISGPLYTTSSTLHF

SEQ ID NO: 6120 - protein, 217 aa, Arabidopsis thaliana
  Clone ID: ARATH-23APR03-C2243_1.p
MEGNSLPEEDVEMMENSDVMKTVTDEASPMVEPFIGMEFESEEAAKSFYDNYATCMGFVMRVDAFRRSMRDGTVVWRRLVCNKEGFRRSRPRRSESRKPRAITREGCKALIVVKREKSGTWLVTKFEKEHNHPLLPLSPNVRRNFQLPQTPDEKDAKIRELSAELSRERRRCTALQQQLDMVLKEMEEHSNHLTININSVIQSVRDIESNTFTKQQT

SEQ ID NO: 6121 - protein, 391 aa, Arabidopsis thaliana
  Clone ID: ARATH-23APR03-C224414_1.p
MGRLKFACPVLEINLISAQDLAPVSRNMKTYSVAWINTDPMRKLTTRVDQSNRANPIWNEKFVFRVNDKILDVDASAIVIEIYAAAWAKDALVGTVNVLLSDLFAPWSGFGDGNDGGGGNNNMRLVTLQIRRPSGRLQGFLRLGIALLDGGQRSMPLSIEVFDGSRKGERNSVKRDQEASRMMHRRTNSDQTDLTTSTNDYGVKTGVVTGNGGGGGGGGGIVVGADSMVNGSLCSSDIGPSASVVAAAIAQGLYNRQKTAVKAANKEDASSILEGKTEGIEYRVERWRAEKNGTVGAGGAAGSSDDSSGKGGAGRRRRRRRRKEKQQGRRNGGGEGKKGLFSCFGNVFGCEISITCGGGSGGEGDSTKKRYNNNKVVNLSAVDETFSHSAT

SEQ ID NO: 6122 - protein, 351 aa, Arabidopsis thaliana
  unsure (1)..(351): unsure at all Xaa locations
  Clone ID: ARATH-23APR03-C22447_1.p
MAKKSQSPKPINIXDAMKLINQQVSLIGIVLEQREPKQCRNNDWICTLRIIDDTYSRPGFTDNLFSXTLEQRPKINIYDARNLYNPSKLQTFDSGIRVNDACSRCVPSFDLSEEVNYAEAFCSDENRRQNQVLLTLEDSTATLEASLCNKVAVNTPFGLIASKLLTKIVSXPSLASVAPTRHNCPQSMPSLPVKYYPFMKCGTTLATVFSHTSSNCAPFVTLMDIDAFPKVTCKYRCIVRVVAAYPWQVEDFCSDENRRHHQVLLTLEDSTATLEAFLCNKDAEYFWGLGFQDTETLRKKRNWLLGIRESSNFVAPRNPPWIECCILSYYTNKADPWNTRLYRIFGTRLLH

SEQ ID NO: 6123 - protein, 603 aa, Arabidopsis thaliana
  Clone ID: ARATH-23APR03-C22484_1.p
MEASKCFGPRTLPIIHNVPLCLKTNFSLFPRCLLQSQSLSSKKSTKHDLFRVKAETSGDLENTRPLTYYSPSLWGDHFLSVPIDESKFEALEKEIESVFKPKVRDMLMSPHSSDKERIRLIHLLISLGIAYYYENEIEEILHKAYGKLACLISDEDDLETIAIMFEVFRLYGHKMPCDVFERFKSEDGKFKESLVGDVRGLLQLYEAAHLGAPSEDIMDEALSFARYHLEPLAGTETSSNLFKHVENVLYRARYHSIEILVARQYISFYDQEEDQDETLLRFSKLNFNFCQMHYVKELKIVTRWWKELGIASKLPYSIRERNVEVYLGSLGMFFEPRYSLARIFSTKLTMILTVVDDTCDSYATLPEVKSLHDAFHRWDLRAMEELPRYMRIIYQSVFETVEDIDREMIARGKHGRLQLTIDEIKSLMIWYLGIAKWARSDQVPSFEDYMEIGTPSSALDDLASYGFIAMDDCDQKKLKEWFYSKPKIFHALNALFRIRNDIVTFEQEMSRGEVANGVNCYMKQHGVTKEAAVEELRKMERENYKIMIEEFMTSKAMPRQILVRPVNIARVMDLYYKEADGFGHPDQKLLQLIASLFLHPIPL

SEQ ID NO: 6124 - protein, 280 aa, Arabidopsis thaliana
  unsure (1)..(280): unsure at all Xaa locations
  Clone ID: ARATH-23APR03-C22533_1.p
MSGKLWIPRFILITLLFISSRVNSQCEFSFTGRNKVFHFNLASSIHFNLASSIRNYPHGVLSEDGFYKVEANSSVLWFQLCDVLIFNHDPPRCVGCEDCGGPSHCGTSCSALVSENVRGYDVCTSLGHASSTKVDIIDKEDPGKGVIVQMSTGNRNQNCSLSVSVICQKTKVDGPLTLAKSGTCQYATQLRHPAGCAVAISGHSSGWGXGFSILCLIVACLFGAYLLGDFLYRYLALEVIPNMDYWATVPHSIQSCFGSLFSRFGGSIRGQQTSYSQVNF

SEQ ID NO: 6125 - protein, 373 aa, Arabidopsis thaliana
  Clone ID: ARATH-23APR03-C22554_1.p
MDGSAGPRDGGAMKPVILRVCVAIVLSATGLILARFVSRNEDNEVTSSTSNPESSSSPSRENDEEEEAESPNQQKQEILSLKSRFEELQRKEYEMELHFERFCNLKDQEVMLIEHKSILSLEKAQLDFFRKEVLAMEEEHKRGQALVIVYLKLVGEIQELRSENGLLEGKAKKLRRKSKQLYRVVNESRKIIGVEKEFLKCVDELETKNNIVKELEGKVKDMEAYVDVLQEEKEELFMKSSNSTSEMVSVEDYRRIVEEYEELKKDYANGVKEVINLRWSNACLRHEVMRNGTNFGEIVFSPNGNLHELGLEDDQVDNALALMRVANEQHEENHHQHESSRRKRLMKKLKKWVEGNEKGKSKAEEAEEAEGTI

SEQ ID NO: 6126 - protein, 158 aa, Arabidopsis thaliana
  Clone ID: ARATH-23APR03-C225571_1.p
MGKSKRYWLLKTEPSEWSLSDQESNGGISKWDGVKNKQAQKNLKSMTLGDLCFFYHSGTKARSVVGLVEVSREWYTGDDEGVEGEGAVDVKAIGEMRKCVDLKEMKGDKGISTKGFVLFRQPRLSVVPVEEDVWNKICELGNGFCGDGKEDCESSDDE

SEQ ID NO: 6127 - protein, 343 aa, Arabidopsis thaliana
  unsure (1)..(343): unsure at all Xaa locations
  Clone ID: ARATH-23APR03-C2256_6.p
MAQKVEAQGGKGANLWDDGSTHDAVTKIQLAAGIDGIQYVQFDYVKNGQPEQAPLRGTKGRVLPADPVPIFSLPINLLLSLSLSLYIYIYIYIYIYWXILKFXHFHLDLFLQFVINHPDEHLVSVEGWYSPEGIIQGVKFISNKKTSDVIGSDEGTHFTLQVKDKKIIGFHGSAGGNLNSLGAYFAPLTTTTPLTPAKQLTAFGSDDGTAWDDGAYVGVKKVYVGQAQDGISAVKFVYDKSPEEVTGEEHGKSTLLGFEEFVLDYPSEYITAVDGTYDKIFGSDGSVITMLRFKTNKQTSPPFGLEAGTVFELKEEGHKIVGFHGRADVLLHKIGVHVRPLSN

SEQ ID NO: 6128 - protein, 349 aa, Arabidopsis thaliana
  Clone ID: ARATH-23APR03-C22588_1.p
MASIDSLQFHSLCNLQSSIGRAKLQNPSSLVIFRRRPVNLNWVQFETKGSFVCKAIGDSSTPDEDIQNTQSDDNVVVVTATTQSDIPHDSEYSISRFRSMVTTLPPVVFLMKKCSVNSIWIGVCITATVLVAAIRAYVVRKSRDNQRAGSVADLVRRGQLRSGDRRGISKSLNYEDPFNNPFVKLDKGSSTVEMCGKVYRLAPVTLTEKEQTIHQKRRSRAYQWKRPTIFLKEGDSIPPDVDPDTVRWIPANHPFATTVSDIDQDLAQNNVYQKQGVPFRIRAEHEAMQKKLEALQNEEKLNNLSIDSQNARDFQRPYKFSAKLEGENIQKNSQENHTGNSSSEETHKS

SEQ ID NO: 6129 - protein, 169 aa, Arabidopsis thaliana
  Clone ID: ARATH-23APR03-C226275_1.p
MAKNSSSQSSSKKKQENRVCEKIFRAVTSPVRTVRRISTKSSPAEAVRVKFAETSARPRAAKPITKVEPVIARVDTTIKTDERFTEYIKKAKLKIRAMTNVGDMMKEDAWETSDETDQTRHDHRHHHVPISHVGSSGRRSSDQFSEYIKKAKMKLSSSSTIARANPTFK

SEQ ID NO: 6130 - protein, 332 aa, Arabidopsis thaliana
  Clone ID: ARATH-23APR03-C2264_1.p
MEVHGSGFRRILLLALCISGIWSAYIYQGVLQETLSTKRFGPDEKRFEHLAFLNLAQSVVCLIWSYIMIKLWSNAGNGGAPWWTYWSAGITNTIGPAMGIEALKYISYPAQVLAKSSKMIPVMLMGTLVYGIRYTFPEYMCTFLVAGGVSIFALLKTSSKTISKLAHPNAPLGYALCSLNLAFDGFTNATQDSIASRYPKTEAWDIMLGMNLWGTIYNMIYMFGLPQGIGFEAIQFCKLHPEAAWDILKYCICGAVGQNFIFMTISNFGSLANTTITTTRKFVSIVVSSVMSGNPLSLKQWGCVSMVFGGLAYQIYLKWKKLQRVEKKKQKS

SEQ ID NO: 6131 - protein, 360 aa, Arabidopsis thaliana
  Clone ID: ARATH-23APR03-C2265_1.p
MAQQKFLHQRPIQNPFTNPFSSSPLSTSSISNRPISLLSRNGLLLLLALLVILGVFLPWAGSPLFPSPNKLSPSQSKWRDYSLPQAVKFVAKNGTVIVCAVSYPYLPFLNNWLISVSRQKHQDQVLVIAEDYATLYKVNEKWPGHAVLIPPALDSQTAHKFGSQGFFNFTARRPQHLLEILELGYNVMYNDVDMVWLQDPFQYLEGKHDAYFMDDMTAIKPLDHSHDLPPPGKKGRTYICSCMIFLRPTNGAKLLMKKWIEELETQPWSRAKKANDQPGFNWALNKTANQVDMYLLSQAAFPTGGLYFKNKTWVKETKGKHAIIHNNYIVGFEKKIKRFRDFNLWLVDDHASESPLGKLE

SEQ ID NO: 6132 - protein, 397 aa, Arabidopsis thaliana
  Clone ID: ARATH-23APR03-C22671_1.p
MIPNDDDDANSMKNYPLNDDDANSMKNYPLNDDDANSMENYPLRSIPTELSHTCSLIPPSLPNPSEAAADMSFNSELNQIMARPCDMLPANGGAVGHNPFLEPGFNCPETTDWIPSPLPHIYFPSGSPNLIMEDGVIDEIHKQSDLPLWYDDLITTDEDPLMSSILGDLLLDTNFNSASKVQQPSMQSQIQQPQAVLQQPSSCVELRPLDRTVSSNSNNNSNSNNAAAAAKGRMRWTPELHEVFVDAVNQLGGSNEATPKGVLKHMKVEGLTIFHVKSHLQKYRTAKYIPVPSEGSPEARLTPLEQITSDDTKRGIDITETLRIQMEHQKKLHEQLESLRTMQLRIEEQGKALLMMIEKQNMGFGGPEQGEKTSAKTPENGSEESESPRPKRPRNEE

SEQ ID NO: 6133 - protein, 315 aa, Arabidopsis thaliana
  Clone ID: ARATH-23APR03-C226_1.p
MVSSVLSIPPQTCLLPRLPISDSVNCKSKIVYCLSTSVRGSSVKRQSTARTRSFTETNRRTPSVQSKHEFWEDPDDGSDSENEYEGEEEDGIGNDLDNESDWEDDSRVQKLTTTDNYEEELAKEVEQLLEPEERVILQQNEKPNLKMISTKSWKPLQTLALSMQIQLMDNLIENGLDIDDVDKDNQTALHKAIIGKKEAVISHLLRKGANPHLQDRDGAAPIHYAVQVGALQTVKLLFKYNVDVNVADNEGWTPLHIAVQSRNRDITKILLTNGADKTRRTKDGKLALDLALCFGRDFKSYDLVKLLKIMPTGDI

SEQ ID NO: 6134 - protein, 804 aa, Arabidopsis thaliana
  Clone ID: ARATH-23APR03-C22706_1.p
MLPMEHPLPLSFVLPNPATLPGLALGFIDGNFVDLQDLLLRASTLTSNLNHDCSDLNDRLLHLRTDLTKHAVSWISTSLSAKVSLEDLRLNLESLLCLPTDSVGKQTNWELQQVVEELCRIQNRRKYFVTALKLESLVGDLEDSVFHPISKRKGSTLQDLALKQERFSHAIKTMNEIEEILGDVTRHHSRWRRLVDSVDSRVDKSLSVLRPQIIADHRAFLSSLGWPPKLATSKVEHGEVDSIPNPLLLMQGDKKESYSQSFLLLCGLQQHNTQKEKRKKLNMTKETDNDGLWATDELVKPVASRMEYHFLKWAEQPEFIFELVYKVTRDFADGVDDFLQPLIDRAMLVSCSAKEAWVSAMVQMLSGFLEKKVFPGLIDMYKEKHMKSEGISSWFHLVDQMVTFDKRMQSFVNTDTCLSYEGSSTAFSQGISVMGLFCKKPEWLKTWGKIELKDAYRKSKEDIKNEKAWVIDSERTRLGNESNSQSAKYVLSTREDYKAPLVADSFLNRTWRLIDHGLSLPAILPRIQFIRATATRFLWCIFKILLLEFKKTDLSHYGLSEDTLIQACGPVNAARYLESKLREWSDDLVFVEMWAAETSVKVDRKPEVSCQGCFFGEELKSLVELETNWLMEIITVFLHQFDNLCSDHFHNNAVSWDEDVITSSSNLTVSQGVAEALDNLRRHLCVLHLNMNPKDFLDLWRNLAEGLDHYVSRKFFSGEPVLRRQKFDRFEVDAEALLTVLKPYCVRPGAFFPRVREILRLLRMHEEEKARLRGALSRSGNTCLKLFGISNLSPQLVEQFCRSY

SEQ ID NO: 6135 - protein, 565 aa, Arabidopsis thaliana
  Clone ID: ARATH-23APR03-C22753_1.p
MAVKHGVDGDGSVIESRTLAVDRKSGFCESTSIFYSKREPMALPPNQFLDVTSFIASQPHRGKTVFVDAVTGRQLSFPELWLGVERVAGCLYALGVRKGNVVIILSPNSILFPIVSLSVMSLGAIITTANPINTSDEISKQIGDSRPVLAFTTCKLVSKLAAASNFNLPVVLMDDYHVPSQTYGDRVKLVGRLETMIETEPSESRVKQRVNQDDTAALLYSSGTTGTSKGVMLSHRNLIALVQAYRARFGLEQRTICTIPMCHIFGFGGFATGLIALGWTIVVLPKFDMAKLLSAVETHRSSYLSLVPPIVVAMVNGANEINSKYDLSSLHTVVAGGAPLSREVTEKFVENYPKVKILQGYGLTESTAIAASMFNKEETKRYGASGLLAPNVEGKIVDPDTGRVLGVNQTGELWIRSPTVMKGYFKNKEATASTIDSEGWLKTGDLCYIDGDGFVFVVDRLKELIKCNGYQVAPAELEALLLAHPEIADAAVIPIPDMKAGQYPVAYIVRKVGSNLSESEIMGFVAKQVSPYKKIRKVTFLASIPKNPSGKILRRELTKLTTSKL

SEQ ID NO: 6136 - protein, 282 aa, Arabidopsis thaliana
  Clone ID: ARATH-23APR03-C22782_1.p
MAEKNASAVDGAIRVSGMQFSYDVQDPIFFDFNLDLPAGSRCLLVGANGSGKTTLLKILAGKHMVGGKNVVQVLDRSAFHDTELVCSGDLSYLGGSWSKTAGSAGDIPLQGDFSAEHMIFGVEGIDPFRREKLIDLLDINLQWRMHKVSDGQRRRVQICMGLLHPFKVLLLDEVTVDLDVVARMDLLEFFKEECEQRGATIVYATHIFDGLETWASHLAYINGGELKLSAKLDEIKDLKTSPNLLSVVEAWLRSETKVEKKTKKKPVVTSPFMSSRQMAYYR

SEQ ID NO: 6137 - protein, 227 aa, Arabidopsis thaliana
  Clone ID: ARATH-23APR03-C22796_1.p
KKTTMECSLSSILLLLVLCFTHPIPSLTFEPLISSLDLHEEESCPYTVIVTTSCFSPDWSRDQVTIALGDADDNQVVAPRLDKPLSGGGGFEKCSSDTFQVKGKCLNTICSVYIYRSGTDGWIPETVEIYKEGSKSVKFDFNKNVPENIWYGNNYCNNTDLPPPSPDFPPFSPSIPPPSPPYFPPEPPSIPPPPPPSPPSAASGRGSGQSLVVAFAAFVFAFAAVVV

SEQ ID NO: 6138 - protein, 357 aa, Arabidopsis thaliana
  Clone ID: ARATH-23APR03-C22828_1.p
MSYDEMLSAAKKAVSLAARLSNEVRKSLLVTDVWNKSDDSPVTVADYGSQAVVSLVLERELQNEPVSLVAEEDSGELRKIAAETVLARITELVKDTLASDESYAIASPLTSDDVLNAIDRGKSEGGPKGRHWILDPIGGTRGFIRGEQYAIGLALLVEGKVVLGVMACPKLPLASTAGNALKSLPEKVGCLFYGSVGNGTYVQSLSVDSLPAKVEVSSIDDPAKASFFESYHTPVPIHNTIATKLGIKESPIKINSQTKYAALSRGDGEVYLRFTRKARPESIWNHAAGSIIVSEAGGKVTDAAGNPLDFSKGKYLDYKRGIVVTTQKLLPRLLTAVRESIKEEEEEEEKAASLKLH

SEQ ID NO: 6139 - protein, 361 aa, Arabidopsis thaliana
  Clone ID: ARATH-23APR03-C22829_1.p
MANFYENYQSPYDYNQVNNLYDQNHYHYNQQQQQLGFEPMSYNYYNWNESESEYVAYSGYDDPMSYNCYNWNGSESETTSAYVAYSVSTMSEPKHLFYDPNLYTTYESPPQFSIYCSVASALDFNEPEFDEYDPTPYGGGYDVVATYGKPLPPSVETCYPCSTAPHAKAPSPPEIIAPVPLGIYDGGQKNVVKKRVSFAEPVEEVKPIETIKEQEQEQDEDYDEESEDEDDGDDDDEEEEEGDEEAKEEEKDHSSSYGNEEYEVVDKGEVKALYVPSGYGLEATDLCEVIFGGYFPCVLRNKRRQEDEQDRGAAVSCWESNDSDPWKTTSDHLFGDSYPYGYENRSERNQFEVSSYGYRMY

SEQ ID NO: 6140 - protein, 209 aa, Arabidopsis thaliana
  Clone ID: ARATH-23APR03-C22836_1.p
MAIISQFFAPLPSLTGTLTLTGRSFLPLNLDTQFPKPRLSRDRAATLVLQSKGDDSVDASDRIISAVCYFYPFFDGIQYGKFIITQYHPFQILIQPLFPAIRAFKSFPFNGFLIFITLYFVVVRNPNFSRYVRFNTMQAIVLDVLLIFPDLLERSFNPRDGFGLDVVMSLDSTVFLFLLVSLIYGFSACLFGLTPRLPLVAEAADRQVL

SEQ ID NO: 6141 - protein, 262 aa, Arabidopsis thaliana
  Clone ID: ARATH-23APR03-C22840_1.p
MCGGAVISDYIAPEKIARSSGKSSWRSNGVFDCSIYDFDGNFDELESDEPFVFSSTHKHHASGSASDGKKKQSSRYKGIRRRPWGRWAAEIRDPIKGVRVWLGTFNTAEEAARAYDLEAKRIRGAKAKLNFPNESSGKRKAKAKTVQQVEENHEADLDVAVVSSAPSSSCLDFLWEENNPDTLLIDTQWLEDIIMGDANKKHEPNDSEEANNVDASLLSEELLAFENQTEYFSQMPFTEGNCDSSTSLSSLFDGGNDMGLWS

SEQ ID NO: 6142 - protein, 360 aa, Arabidopsis thaliana
  Clone ID: ARATH-23APR03-C228468_1.p
MQFLGRSISKSIRPSLNSTARKSWVLSSQQFLSTSSTESSSRTRGGGGGNRAEKSSEEWPRPMEVPYQPKIANSIDLIGYVHQPVQFDSTLDGKFWAGTVISHEPSSDSKSESDSSSNFWIPVLFEGDLAHTANSYLKKNDRVHITGQILGDVIQSGANSDQAHVQLFKSFHGSFSHQVMVRDLHYIEGSKAMPKVLPTLDQNEGVLKHSASVQRGREFGTNLWFDLVDKPNEWCDYREMKQNGSVNPKHPDFKKKDGSQALWLNNAPTEILSELKDVKFDIPKYAKQPKAGEESWKDLVDNMNKWWDNRVDKRTPKSPDFKHKETGVGLWLSDSPSWVLEKLPPPKSKTSDIYGVQEMF

SEQ ID NO: 6143 - protein, 219 aa, Arabidopsis thaliana
  Clone ID: ARATH-23APR03-C22848_1.p
MNNQNEDTEGGRNCCTCCLSFIFTAGLTSLFLWLSLRADKPKCSIQNFFIPALGKDPNSRDNTTLNFMVRCDNPNKDKGIYYDDVHLNFSTINTTKINSSALVLVGNYTVPKFYQGHKKKAKKWGQVKPLNNQTVLRAVLPNGSAVFRLDLKTQVRFKIVFWKTKRYGVEVGADVEVNGDGVKAQKKGIKMKKSDSSFPLRSSFPISVLMNLLVFFAIR

SEQ ID NO: 6144 - protein, 499 aa, Arabidopsis thaliana
  Clone ID: ARATH-23APR03-C229157_1.p
MCYCFVQIVGAVIYSVLVAAFYVFLGFFLGNRIAVIALLSVFSSVAVSVIVLFVRCTAIDPTDKTSAKKKRKDKSKGVLMKLRVKVVLSQVVVRFFRRLERKILRNFLRRTYLDPWKSSVQLEPLLPFPLVMKDDDSVTPDPKEEDDISYCSLCDLEVKRSSKHCRTCNRCVEGFDHHCRWLNNCVGKKNYTTFILLMVFVLLMLIIEGGTALAVFVRCFVDKKGMEMELKRRLYVAFPQWALATISIILVLFTAYGSAAMGQLFLFHVVLIRKGMRTYDYILAMKEENQFTEVDPFDELDSSSDESSDFDSPERLRPTFISKFMCRNGRVGQQRLSIKIEGDEQSPSSTLINKKPGFHVSINPWKLITLSSEKALQAAEKAKERLRKTKPVSGTEENSLKPLPLETKFGLLLDPDNNNTVLQPSTTAAVKLQVSPGRFSSPRRRFSGSSSSTVPSPKQKYRTNFDLKLTEVSRELESYISRQVLCSVIKQDGSEASPR

SEQ ID NO: 6145 - protein, 197 aa, Arabidopsis thaliana
  Clone ID: ARATH-23APR03-C229352_1.p
MADYDDEIDQNNQPFIPKETALQALNSIIQLHFEKTLEKKRAIDHQKKKLHKLFQLFFIFLAVIFFSLSQPSGRLHCRHCWAPICLLSFSHLFFYVSVAQTLRCINGFKYQRRCHKLTLGLATHKLRFIKSRIAAGDFLGGGDGDEASAAAWDLEVPYQEPPDSYFGKFKRNWALYFGFLILLYTFMISFSVVILCF

SEQ ID NO: 6146 - protein, 824 aa, Arabidopsis thaliana
  Clone ID: ARATH-23APR03-C2296_1.p
MPEIDLMRVDHCVSDVKLDDSSSSPPGFFDGGGVPLDSDVKLDEEDSDSLKKRGRRGRPPRILAKASSPPISRKRREDEDVCFVCFDGGSLVLCDRRGCPKAYHPACVKRTEAFFRSRSKWNCGWHICTTCQKDSFYMCYTCPYSVCKRCVRSSEYVVVRENKGFCGICMKTIMLIENAAEANKEKVQVDFDDQGSWEYLFKIYWVSLKEKLGLSLDDLTKAKNPWKSSSSTAAKRRTTSRVHEKDDGNSPGVMKIRRAKVRKMDAVSVSNLGPSLDSNCSLGDRLPQLTSAATWATNELLDFVGYMKNGDISVLSKYDVQTLVLEYVRRNNLQNSPQNSEIMCDSKLMRLFGKERVDNLEMLKLLDSHFIDQVRSPVTDNSAGGVTETMSYQVNAGRSCDRLNTSEQHQEGESQQLNGHSIQVRPSSSDSRNHAVVKPDTSATLSNKPIDGLDTNMVWLYGDPDGKIHGPFSLYNLRQWNSSGHFPPELRIWRLGEQQHSSILLTDALNGQFHKTGLLQNHSIPKQEVTATIANDQNRSVAVPKIESRILDFSPNSVCTDQSVISSSNSVITRSSDVSNKSGNNCSHAVPLDFSLSNERDTVGFISLWDKRKVESSLLVQSPISCSLSLATLPRNSNCSLPPHERWSAGQTDGNSAATTACNQNGSLSGSAEKQVTATVQSCGQNWNAATPSSASNVWDSNSGLTSFPDNQEIDFLDLFSPTFKFNFASTTTDWQPIVAGPDECDESVSDLLAEVEAMESQKRLPSPTSTFRGPEELLIRHSINDSFSPAEGHSPALDVSKGDSMSSTNDLQMHSRSNSTVHF

SEQ ID NO: 6147 - protein, 161 aa, Arabidopsis thaliana
  Clone ID: ARATH-23APR03-C229744_1.p
NLFIGKNFSSLFLLLLQFSDLIALKIVKLQKRKRKLRRSKVKSMADAHLKQRGYISAVAAGLNAALAAISAKFFTSLVIKYGLVVICNVVMWACYVNSLRALSSLQATVTNFAANFLSSGLAGLFLFQESLSFRWFAGALSITIGVLILSKSSVDKKVSSD

SEQ ID NO: 6148 - protein, 199 aa, Arabidopsis thaliana
  Clone ID: ARATH-23APR03-C229950_1.p
MMDSLAKCFNRLQERYDNVLEAKPIYRDDLDITLPLNESKEVSVESTKKSRCLQRAKRIDKSLRFEEGEEEEDEQNKKPLAKPRKVVRFQLENNKIFEPKKTVSFDDDHELKPKENPLEEKESLKMVEGKEEVVRVKIKMTKHEAQRLLSKCKNDSVLKLEHLMDQIAHVPVHQLQVAMVMVGCNNERQGNGCWLSQLE

SEQ ID NO: 6149 - protein, 1332 aa, Arabidopsis thaliana
  Clone ID: ARATH-23APR03-C23008_1.p
MDLEFAVNGERFKIDSVDPSTTLLEFLRLNTPFKSVKLGCGEGGCGACLVVLSKYDPELDQVKECCINSCLTLLCSVNGCSITTSEGLGNTKKGFHPIHKRFAGFHASQCGFCTPGMCISLYSSLANAENNSSKDFTVSEAEKSVSGNLCRCTGYRPIVDACKSFASDVDIEDLGLNSFWKKGESKEVMLKNLPPYNPKDHLVTFPEFLKKKEKVDNGSDHLKYRWTTPFSVAELHNIMEAANSGDSLKLVVGNTGTGYYKDEERFDRYIDISNIPEMSMIKKDEKGIEIGAAVTISNAIDALEKESKSSYVFKKMATHMEKIGNRSIRNSGSIGGNLVMAQSRKFPSDVTTLLLAVDASVYMLNGRKTEKVTLQEFLELSPVLDSKRVLLKVEIPSWTAPSGDDTEFLFESYRAAPRSIGNALPYLNAAFLALVSRQEASRKGVTVEKCFLAFGSYGGDHSIRAIEVETFLTGKLLSYSVLYEAVGLLKGIIVPGKDTLHSEYRKSLAVGYLFEFFYPLIESGHRICSLDSGNKHNNSHVDTVKSLPFLSSSQQVLESNEFKPIGEAVIKVGAALQASGEAVFVDDIPTLPDCLHGAFIYSTEPLAKIKSLSFRENVTPTGVFAVLTFKDIPQQGQNIGSKTLFGPGPLFADELTRCAGQRIALVVADTQKHADMAAKLAVVEYDTKNLEQPILTVEDAVKRSSFFEVHPMFYPEPVGDVIKGMEEAERKIISSELRLGSQYFFYMEPQTALALPDEDNCVKVFSSSQAPEYVHSVIATCLGIQEHNVRVITRRVGGGFGGKAVKSMPVATACALGAYKLQRPVKMFLNRKTDMIMAGGRHPMKINYNVGFRSDGKLTALELTMLIDAGLEPDVSPIMPRNIMGPLRKYDWGALSFDVKVCKTNCLSRTAMRAPGEVQGSYIAESIIENVASSLQMDVDAVRKINLHTYDSLRKFYNHIAGDPDEYTLPLLWEKLEISSKFKERSEMVKEFNLCNVWRKRGISRVPIVHQVMQRPTPGKVSILSDGSVVVEVGGIEIGQGLWTKVQQMVAYGLGMVKCEGNEKLLDRIRVVQSDTLGMIQGGFTAGSTTSESSCEAVRLCCVILVERLKPIMDQMMMEKSGSVTWNILIQQAYGQYINLSASTLYKPEYSSMEYLNYGVGVSEVEVDLVTGKTEILRSDIIYDCGKSLNPAVDLGQTEGAFVQGIGFFMMEEYTTDEKGLVVQQGTWDYKIPTVDTIPKHFNVEIVNTGHHKNRVLSSKASGEPPLLLAASVHCATRSAIREARKHSLSSNFIDGSDSEFELPVPATMPVVKSLCGLYSVEKYLQGKIKGQ

SEQ ID NO: 6150 - protein, 355 aa, Arabidopsis thaliana
  Clone ID: ARATH-23APR03-C23028_1.p
MSECGCFSATTMLRICVVLIICLHMCCASSDCTSHDDPVSQDEAEKATKLKLGSIALLLVAGGVGVSLPLIGKRIPALQPENDIFFMVKAFAAGVILCTGFVHILPDAFERLSSPCLEDTTAGKFPFAGFVAMLSAMGTLMIDTFATGYYKRQHFSNNHGSKQVNVVVDEEEHAGHVHIHTHASHGHTHGSTELIRRRIVSQVLEIGIVVHSVIIGISLGASQSIDTIKPLMAALSFHQFFEGLGLGGCISLADMKSKSTVLMATFFSVTAPLGIGIGLGMSSGLGYRKESKEAIMVEGMLNAASAGILIYMSLVDLLATDFMNPRLQSNLWLHLAAYLSLVLGAGSMSLLAIWA

SEQ ID NO: 6151 - protein, 1058 aa, Arabidopsis thaliana
  Clone ID: ARATH-23APR03-C23063_1.p
MDPRTRLDYALFQLTPTRTRCDLVIFSGGENEKLASGIFQPFVTHLKSVSDQISKGGYSVTLRPSSVGVPWFTKVTLQRFVRFVTTPEVLERSVTLEKEIEQIEDSIQANAAAIAGEAEGNELGGTWTSQKSTALSKTKGETDGDTVEENSKVGLQRVLENRKAALCKEQAMAYARALVVGFELDYMDDLFSFADAFGASRLREACVNFVDLCKRKNEDRMWVDQITAMQAFPRPELTFMGDSGIVLAGEENDLLNATNVKHGNSMDASSQGSFETGQEGRAQMAMPWPNQFPQYMQNFQGHGYPPPYMFPGMQGQSPYFHGNMQWPVNMGDVESNEKSSKKKKKKKKNKKKSKQDESAEPSDNSSTETESEDGNEGKKQSRKVVIRNINYITSKRNGAKESDSDESGEEEGFVDGDSIKQQVEEAIGSVERRHKSTSHRQRKHKSHNGDDDSSNKETKGNDNWDAFQNLLLKDNDSEPEELLRISSTALNMASEVVRKREPPSDDSFLVAIGNEDWGRETSIEKFNAGENVRIIRKGNNYDEEMLNPGRSDESRSYSQAEMSVHDGKLRTRNEAEEDWFIRNQAGPETDPSLVKTFVGDHFHLNKSSERDVLTDDSFMIHSRVENQVEDSRLRTEIMDLDVYGTTQQENSAPENTPHEPDDLYMVLGREQDVKPTLLPWTPEIDFETNTLAQRTSRIDLITATKASAGEQTLDGKEKKSRGISKGKDAKSRASSRPDPASKAKRPAWGSRAAVSKSKSEMEEERKKRMEELLIQRQKRIAEKSSGGSVSSSLASKKTPTVTKSVKSSIKNEKTPEAAQSKAKPVLRSSTIERLAVARTAPKEPQQKPVIKRTSKPSGYKTEKAQEKKSSKIGQSDAKSVELSRDPSLEIKETVVEDSHSYLSEKQVDALPAVASVDDFKDIKELHSLPSEETARVKNRPNEIIAEKVQDQTKIDDQETVKNTSVSEDKQITTKHYSEDVGEVQASQEKPVSPKKSVTFSETNMEEKYYFSPAVSEIDISTPPATEADHSRKKWNSEETSPKATAKVFRKLLMFGRKK

SEQ ID NO: 6152 - protein, 182 aa, Arabidopsis thaliana
  Clone ID: ARATH-23APR03-C231024_1.p
MVRKRRVVVGITPDPCETKKKTKSKRRKRLSKEEEEEEEGTPLRGIFCLKTRQDMKIFEEKEDCFILDFDPNDSFDARKLSDSPASECDDDVAIVHEKGQVACRDFPHPRHLCLKFPFESSQHSSHCNQCYCYVCDVVAPCAYWTASFATPHCEALENSKWKPIRKLYRDLPAAGLRVTTKK

SEQ ID NO: 6153 - protein, 664 aa, Arabidopsis thaliana
  Clone ID: ARATH-23APR03-C2310_1.p
MAACTLHALSVTLFLLLFFAVSPAKAQQPYVNNHQLACEVRVYDNITNGFTCNGPPSCRSYLTFWSQPPYNTADSIAKLLNVSAAEIQSINNLPTATTRIPTRELVVIPANCSCSSSSGGFYQHNATYNLSGNRGDETYFSVANDTYQALSTCQAMMSQNRYGERQLTPGLNLLVPLRCACPTAKQTTAGFKYLLTYLVAMGDSISGIAEMFNSTSAAITEGNELTSDNIFFFTPVLVPLTTEPTKIVISPSPPPPPVVATPPQTPVDPPGSSSSHKWIYIGIGIGAGLLLLLSILALCFYKRRSKKKSLPSSLPEENKLFDSSTKQSIPTTTTTQWSIDLSNSSEAFGLKSAIESLTLYRFNDLQSATSNFSDENRIKGSVYRATINGDDAAVKVIKGDVSSSEINLLKKLNHSNIIRLSGFCIREGTSYLVFEYSENGSISDWLHSSGKKSLTWKQRVEIARDVAEALDYLHNYITPPHIHKNLESTNILLDSNFRAKIANFGVARILDEGDLDLQLTRHVEGTQGYLAPEYVENGVITSKLDVFAFGVAVLELLSGREAVTIHKKKEGEEEVEMLCKVINSVLGGENVREKLKEFMDPSLGNEYPLELAYTMAQLAKSCVATDLNSRPSVTQVLTTLSMIVSSSIDWEPSDDLLRSGSLGN

SEQ ID NO: 6154 - protein, 298 aa, Arabidopsis thaliana
  Clone ID: ARATH-23APR03-C231_1.p
MADDWDLHAVVRGCSAVSSSATTTVYSPGVSSHTNPIFTVGRQSNAVSFGEIRDLYTPFTQESVVSSFSCINYPEEPRKPQNQKRPLSLSASSGSVTSKPSGSNTSRSKRRKIQHKKVCHVAAEALNSDVWAWRKYGQKPIKGSPYPRGYYRCSTSKGCLARKQVERNRSDPKMFIVTYTAEHNHPAPTHRNSLAGSTRQKPSDQQTSKSPTTTIATYSSSPVTSADEFVLPVEDHLAVGDLDGEEDLLSLSDTVVSDDFFDGLEEFAAGDSFSGNSAPASFDLSWVVNSAATTTGGI

SEQ ID NO: 6155 - protein, 593 aa, Arabidopsis thaliana
  Clone ID: ARATH-23APR03-C23223_1.p
MDSSANINKALTETRFSDLEPPLSGDIIEALNQSDFEFCTPVQAATIPLLCSYKDVAVDAATGSGKTLAFVVPLVEILRRSTSFPPKPHQVMGVIISPTRELSTQIYNVAQPFVSTLANVNSVLLVGGREVKADMKIIEEEGCNVLIGTPGRLSDIMERMEILDFRNLEILILDEADRLLEMGFQRQVNYIISRLPKQRRTGLFSATQTEGVEELAKAGLRNPVRVEVRAKSKSESSQQLTNSKTPSGLHLEYMECEADKKSSQLVDLLIKNSDKKLIVFFMTCASVDYWGLVLSKIPALKSISLIPIHGDMKQNARDKALASFTKASSGALLCTDVAARGLDIPGIDYVVQYDPPQDPNMFNHRAGRTARLGRQGRAIVFLLPKEEAYVEFMRIRRVPLEERKCSEDASDVIPIIRSAAMKDRAVMEKGLKAFVSFVRAYKEHHCSFIFRWKDLEIGKLAMGYGLLYLPSMSEVKQHRLSSEGFTPVEGVKFEEIKFKDKYREKQRQQNLQVRKEKRQEEKKEKGKRKRVDASASNDPKKASRKLTGKQRQTIQTAEDEEVMDRDYKLMIKVKKGLIKEDEYERLTGDDDLF

SEQ ID NO: 6156 - protein, 173 aa, Arabidopsis thaliana
  Clone ID: ARATH-23APR03-C23235_1.p
MRCKVVYAARTTTRTKETKTISKTISMGLQGQLSDVSSDSIPLMLLALLATFFRHVRSLLLFPSSAPVVVVTSNLSVLADQLNLNRLFSYRYSDNAASDCIVCLSKLKTGEEVRKLDCRHVFHKQCLEGWLQHLNFNCPLCRSPLLPHHHQGHGSDASISAFPLRSTSTASSH

SEQ ID NO: 6157 - protein, 326 aa, Arabidopsis thaliana
  unsure (1)..(326): unsure at all Xaa locations
  Clone ID: ARATH-23APR03-C2323_1.p
MGRSPCCDKLGLKKGPWTPEEDQKLLAYIEEHGHGSWRSLPEKAGLHRCGKSCRLRWTNYLRPDIKRGKFNLQEEQTIIQLHALLGNRWSAIATHLPKRTDNEIKNYWNTHLKXRLVKMGIDPVTHKPKNETPLSSLGLSKNAAILSHTAQWESARLEAEARLARESKLLHLQHYQTKTSSQPHHHHGFTHKSLLPNWTTKPHEDQQQLESPTSTVSFSEMKESIPAKIEFVGSSTGVTLMKEPEHDWINSTMHEFETTQMGEGIEEGFTGLLLGGDSIDRSFSGDKNETAGESSGGDCNYYEDNKNYLDSIFNFVDPSPSDSPMF

SEQ ID NO: 6158 - protein, 527 aa, Arabidopsis thaliana
  Clone ID: ARATH-23APR03-C2329_1.p
MEKLLVISLLLLISTSVTTSQSVTDPIAFLRCLDRQPTDPTSPNSAVAYIPTNSSFTTVLRSRIPNLRFDKPTTPKPISVVAAATWTHIQAAVGCARELSLQVRIRSGGHDFEGLSYTSTVPFFVLDMFGFKTVDVNLTERTAWVDSGATLGELYYRISEKSNVLGFPAGLSTTLGVGGHFSGGGYGNLMRKYGLSVDNVFGSGIVDSNGNIFTDRVSMGEDRFWAIRGGGAASYGVVLGYKIQLVPVPEKVTVFKVGKTVGEGAVDLIMKWQSFAHSTDRNLFVRLTLTLVNGTKPGENTVLATFIGMYLGRSDKLLTVMNRDFPELKLKKTDCTEMRWIDSVLFWDDYPVGTPTSVLLNPLVAKKLFMKRKSDYVKRLISRTDLGLILKKLVEVEKVKMNWNPYGGRMGEIPSSRTPFPHRAGNLFNIEYIIDWSEAGDNVEKKYLALANEFYRFMTPYVSSNPREAFLNYRDLDIGSSVKSTYQEGKIYGAKYFKENFERLVDIKTTIDAENFWKNEQSIPVRR

SEQ ID NO: 6159 - protein, 255 aa, Arabidopsis thaliana
  Clone ID: ARATH-23APR03-C233347_1.p
MEFFGKMIISLSLIMMIMWKSVDGYSSGWVNARATFYGGADASGTMGGACGYGNLYSQGYGTNTAALSTALFNGGQSCGACFQIKCVNDPKWCIGGTITVTGTNFCPPNFAQANNAGGWCNPPQHHFDLAQPIFLRIAQYKAGVVPVQYRRVACRRKGGIRFTINGHSYFNLVLITNVAGAGDVISVSIKGTNTRWQSMSRNWGQNWQSNAKLDGQALSFKVTTSDGRTVISNNATPRNWSFGQTYTGKQFRAQR

SEQ ID NO: 6160 - protein, 837 aa, Arabidopsis thaliana
  Clone ID: ARATH-23APR03-C23428_1.p
MDFASSVQRQSMFHGGADFASYCLPNRMISAKLCPKGLGGTRFWDPMIDSKVRSAIRSKRNVSYRSSLTLNADFNGRFYGHLLPAKPQNVPLGFRLLCQSSDSVGDLVGNDRNLEFAKASFNKSSRFFSASFFSSNPDGTATVFGSLVGSVKQQWPKLVLGLALLGAGLTLYSNGVGGNNQLLQQPDVTSTSTEDVSSSTKPLIRQVQKLPKRIKKLLEMIPHQEVNEEEASLFDFLWLLLASVIFVPLFQKIPGGSPVLGYLAAGILIGPYGLSIIRNVHGTRAIAEFGVVLLLFNIGLELSVERLSSMKKYVFGLGSAQVLVTAAVVGLLAHYVAGQAGPAAIVIGNGLALSSTAVVLQVLQERGESTSRHGRASFSVLLFQDLAVVVLLILIPLISPNSSKGGIGFQAIAEALGLAAVKAAVAITAIIAGGRLLLRPIYKQIAENRNAEIFSANTLLVILGTSLLTARAGLSMALGAFLAGLLLAETEFSLQVESDIAPYRGLLLGLFFMTVGMSIDPKLLLSNFPVIVGTLGLLIVGKTMLVVIMGKLFGISIISAIRVGLLLAPGGEFAFVAFGEAVNQGIMSPQLSSLLFLVVGISMAITPWLAAGGQLIASRFELHDVRSLLPVESETDDLQGHIIICGFGRVGQIIAQLLSERLIPFVALDVSSDRVTIGRSLDLPVYFGDAGSKEVLHKIGAGRACAAVVALDAPGANYRCVWALSKFYPNVKTFVRAHDVVHGLNLEKAGATAVVPETLEPSLQLAAAVLAQAKLPTSEIANTINEFRTRHLSELTELCEASGSSLGYGYSRTSKPKPQPSDASGDNQIIEGGTVVI

SEQ ID NO: 6161 - protein, 811 aa, Arabidopsis thaliana
  Clone ID: ARATH-23APR03-C23437_1.p
MKLSTSGLGQQGHEGEKCLNSELWHACAGPLVSLPSSGSRVVYFPQGHSEQVAATTNKEVDGHIPNYPSLPPQLICQLHNVTMHADVETDEVYAQMTLQPLTPEEQKETFVPIELGIPSKQPSNYFCKTLTASDTSTHGGFSVPRRAAEKVFPPLDYTLQPPAQELIARDLHDVEWKFRHIFRGQPKRHLLTTGWSVFVSAKRLVAGDSVIFIRNEKNQLFLGIRHATRPQTIVPSSVLSSDSMHIGLLAAAAHASATNSCFTVFFHPRASQSEFVIQLSKYIKAVFHTRISVGMRFRMLFETEESSVRRYMGTITGISDLDSVRWPNSHWRSVKVGWDESTAGERQPRVSLWEIEPLTTFPMYPSLFPLRLKRPWHAGTSSLPDGRGDLGSGLTWLRGGGGEQQGLLPLNYPSVGLFPWMQQRLDLSQMGTDNNQQYQAMLAAGLQNIGGGDPLRQQFVQLQEPHHQYLQQSASHNSDLMLQQQQQQQASRHLMHAQTQIMSENLPQQNMRQEVSNQPAGQQQQLQQPDQNAYLNAFKMQNGHLQQWQQQSEMPSPSFMKSDFTDSSNKFATTASPASGDGNLLNFSITGQSVLPEQLTTEGWSPKASNTFSEPLSLPQAYPGKSLALEPGNPQNPSLFGVDPDSGLFLPSTVPRFASSSGDAEASPMSLTDSGFQNSLYSCMQDTTHELLHGAGQINSSNQTKNFVKVYKSGSVGRSLDISRFSSYHELREELGKMFAIEGLLEDPLRSGWQLVFVDKENDILLLGDDPWESFVNNVWYIKILSPEDVHQMGDHGEGSGGLFPQNPTHL

SEQ ID NO: 6162 - protein, 272 aa, Arabidopsis thaliana
  Clone ID: ARATH-23APR03-C234708_1.p
MVRFSNSLVGILNFFVFLLSVPILSTGIWLSLKATTQCARFLDKPMIALGVFLMIIAIAGVVGSCSRVTWLLWSYLFVMFFLILIVLCFTIFAFVVTSKGSGETIQGKAYKEYRLEAYSDWLQRRVNNAKHWNSIRSCLYESKFCYNLELVTANHTVSDFYKEDLTAFESGCCKPSNDCDFTYITSTTWNKTSRTHKNSDCQLWDNEKHKLCYNCKACKAGFLDNLKAAWKRVAIVNIIFLVLLVVVYAMRCCAFRNNKEDRYGRSNGFNNS

SEQ ID NO: 6163 - protein, 1020 aa, Arabidopsis thaliana
  Clone ID: ARATH-23APR03-C23473_1.p
MESYLNENFGDVKPKNSSDEALQRWRKLCWIVKNPKRRFRFTANLSKRSEAEAIRRSNQEKFRVAVLVSQAALQFINSLKLSSEYTLSEEVRKAGFEICPDELGSIVEGHDLKKLKIHGGTEGLTEKLSTSIASGISTSEDLLSVRKEIYGINQFTESPSRGFWLFVWEALQDTTLMILAACAFVSLIVGILMEGWPIGAHDGLGIVASILLVVFVTATSDYRQSLQFKDLDAEKKKIVVQVTRDKLRQKISIYDLLPGDVVHLGIGDQIPADGLFISGFSVLINESSLTGESEPVSVSVEHPFLLSGTKVQDGSCKMLVTTVGMRTQWGKLMATLSEGGDDETPLQVKLNGVATIIGKIGLFFAVITFAVLVQGLANQKRLDNSHWIWTADELMAMLEYFAVAVTIVVVAVPEGLPLAVTLSLAFAMKKMMNDKALVRNLAACETMGSATTICSDKTGTLTTNHMTVVKACICEQAKEVNGPDAAMKFASGIPESAVKLLLQSIFTNTGGEIVVGKGNKTEILGTPTETALLEFGLSLGGDFQEVRQASNVVKVEPFNSTKKRMGVVIELPERHFRAHCKGASEIVLDSCDKYINKDGEVVPLDEKSTSHLKNIIEEFASEALRTLCLAYFEIGDEFSLEAPIPSGGYTCIGIVGIKDPVRPGVKESVAICKSAGITVRMVTGDNLTTAKAIARECGILTDDGIAIEGPEFREKSDEELLKLIPKLQVMARSSPMDKHTLVRLLRTMFQEVVAVTGDGTNDAPALHEADIGLAMGISGTEVAKESADVIILDDNFSTIVTVAKWGRSVYINIQKFVQFQLTVNVVALIVNFLSACLTGNAPLTAVQLLWVNMIMDTLGALALATEPPQDDLMKRSPVGRKGNFISNVMWRNILGQSLYQLVIIWCLQTKGKTMFGLDGPDSDLTLNTLIFNIFVFCQVFNEISSREMEKIDVFKGILKNYVFVAVLTCTVVFQVIIIELLGTFADTTPLNLGQWLVSIILGFLGMPVAAALKMIPVGSH

SEQ ID NO: 6164 - protein, 563 aa, Arabidopsis thaliana
  Clone ID: ARATH-23APR03-C2349_1.p
MASSVLNLFKSCRPFTPIRFSSLPKSQFRIQFPLRPGKETQLRRCFTTLSSLTDGGAPISGGKELWLHNTMSRKKELFKPKVEGKVGMYVCGVTAYDLSHIGHARVYVTFDVLLRYLKHLGYEVSYVRNFTDVDDKIIARAKELEEDPISLSRRFCEEFNRDMEQLQCLDPSVQPRVSDHIPQIIDLIKQILDNGYAYKVDGDIYFSVDKFPTYGKLSGRKLEDNRAGERVAVDTRKKHPADFALWKAAKEGEPFWESPWGRGRPGWHIECSAMSAAYLGYSFDIHGGGMDLVFPHHENEIAQSCAACDSSNISYWIHNGFVTVDSEKMSKSLGNFFTIRQVIDLYHPLALRLFLMGTHYRSPINYSDFLLESASERIFYIYQTLHDCESALGEKDSTFENGSVPSDTLTSINTFRTEFVASMSDDLLTPVTLAAMSEPLKTINDLIHTRKGKKQARREESLKALETTIRDVLTILGLMPTSYSEVLEQLKEKALKRAGLKEEDVLQRVQERTDARKNKEYERSDAIRKDLAKVGIALMDSPEGTTWRPAIPLALQEPVTTTP

SEQ ID NO: 6165 - protein, 340 aa, Arabidopsis thaliana
  unsure (1)..(340): unsure at all Xaa locations
  Clone ID: ARATH-23APR03-C23511_1.p
MEASLLMRSSCCSSAIGGFFDHRRELSTSTPISTLLPLPSTKSSFSVRCSLPQPSKPRSGTSSVHAVMTLAGSLTGKKRVDESESLTLEGIRNSLIRQEDSIIFGLLERAKYCYNADTYDPTAFDMDGFNGSLVEYMVKGTEKLHAKVGRFKSPDEHPFFPDDLPEPMLPPLQYPKVLHFAADSININKKIWNMYFRDLVPRLVKKGDDGNYGSTAVCDAICLQCLSKRIHYGKFVAEAKFQASPEAYESAIKAQDKDALMDMLTFPTVEDAIKKRVEMKTRTYGQEVKVGMEEKEEEEEEGNESHVYKISPILVXDLYGDWIMPLTKEVQVEYLLRRLD

SEQ ID NO: 6166 - protein, 368 aa, Arabidopsis thaliana
  Clone ID: ARATH-23APR03-C23582_1.p
MAMLVEPPNGIKQQGKHYYSMWQTLFEIDTKYVPIKPIGRGAYGVVCSSINRETNERVAIKKIHNVFENRVDALRTLRELKLLRHVRHENVIALKDVMLPANRSSFKDVYLVYELMDTDLHQIIKSSQSLSDDHCKYFLFQLLRGLKYLHSANILHRDLKPGNLLVNANCDLKICDFGLARTSQGNEQFMTEYVVTRWYRAPELLLCCDNYGTSIDVWSVGCIFAEILGRKPIFPGTECLNQLKLIINVVGSQQESDIRFIDNPKARRFIKSLPYSRGTHLSNLYPQANPLAIDLLQRMLVFDPTKRISVTDALLHPYMAGLFDPGSNPPAHVPISLDIDENMEEPMIREMMWNEMLYYHPEAEISNA

SEQ ID NO: 6167 - protein, 836 aa, Arabidopsis thaliana
  Clone ID: ARATH-23APR03-C235_1.p
MAMSCKDGKLGCLDNGKYVRYTPEQVEALERLYHDCPKPSSIRRQQLIRECPILSNIEPKQIKVWFQNRRCREKQRKEASRLQAVNRKLTAMNKLLMEENDRLQKQVSQLVHENSYFRQHTPNPSLPAKDTSCESVVTSGQHQLASQNPQRDASPAGLLSIAEETLAEFLSKATGTAVEWVQMPGMKPGPDSIGIIAISHGCTGVAARACGLVGLEPTRVAEIVKDRPSWFRECRAVEVMNVLPTANGGTVELLYMQLYAPTTLAPPRDFWLLRYTSVLEDGSLVVCERSLKSTQNGPSMPLVQNFVRAEMLSSGYLIRPCDGGGSIIHIVDHMDLEACSVPEVLRPLYESPKVLAQKTTMAALRQLKQIAQEVTQTNSSVNGWGRRPAALRALSQRLSRGFNEAVNGFTDEGWSVIGDSMDDVTITVNSSPDKLMGLNLTFANGFAPVSNVVLCAKASMLLQNVPPAILLRFLREHRSEWADNNIDAYLAAAVKVGPCSARVGGFGGQVILPLAHTIEHEEFMEVIKLEGLGHSPEDAIVPRDIFLLQLCSGMDENAVGTCAELIFAPIDASFADDAPLLPSGFRIIPLDSAKEVSSPNRTLDLASALEIGSAGTKASTDQSGNSTCARSVMTIAFEFGIESHMQEHVASMARQYVRGIISSVQRVALALSPSHISSQVGLRTPLGTPEAQTLARWICQSYRGYMGVELLKSNSDGNESILKNLWHHTDAIICCSMKALPVFTFANQAGLDMLETTLVALQDISLEKIFDDNGRKTLCSEFPQIMQQGFACLQGGICLSSMGRPVSYERAVAWKVLNEEENAHCICFVFINWSFV

SEQ ID NO: 6168 - protein, 181 aa, Arabidopsis thaliana
  Clone ID: ARATH-23APR03-C23674_1.p
MNLEEKPTMTASRASPQAEHLYYVRCSICNTILAVGIPLKRMLDTVTVKCGHCGNLSFLTTTPPLQGHVSLTLQMQSFGGSDYKKGSSSSSSSSTSSDQPPSPSPPFVVKPPEKKQRLPSAYNRFMRDEIQRIKSANPEIPHREAFSAAAKNWAKYIPNSPTSITSGGHNMIHGLGFGEKK

SEQ ID NO: 6169 - protein, 617 aa, Arabidopsis thaliana
  Clone ID: ARATH-23APR03-C236811_1.p
MDSDSERASLESIKDNSECVHVSNEPNLTATCVDSSVGEEGVTDVNSSAAVSELVPPEQGEGALLNSVPEISERGIPVDVVSSVDGGGEENAAFNIQEIDSVGGDAAAVEEVPLKSSSVVGEGREEEAGASIVKEEDFVAEANLSGDRLEENKEVSMEEEPSSHELSVCEVNGVDSLNDEENREVGEQIVCGSMGGEEIESDLESKKEKVDVIEEETTAQAASLVNAIEIPDDKEVACVAGFTEISSQDKGLDESGNGFLDEEPVKELQIGEGAKDLTDGDAKEGVDVTEDEMDIQVLKKSKEEEKVDSTTELEIETMRLEVHDVATEMSDKTVISSAVVTQFTGETSNDKETVMDDVKEDVDKDSEAGKSLDIHVPEATEEVDTDVNYGVGIEKEGDGVGGAEEAGQTVDLEEIREENQELSKELAQVDETKISEMSEVTETMIKDEDQEKDDNMTDLAEDVENHRDSSVADIEEGREDHEDMGVTETQKETVLGKVDRTKIAEVSEETDTRIEDEDQEKDDEMTDVAEDVKTHGDSSVADIEEGRESQEEMTETQEDSVMADEEPEEVEEENKSAGGKRKRGRNTKTVKGTGKKKEEDVCFMCFDGGDLVLCDRR

SEQ ID NO: 6170 - protein, 319 aa, Arabidopsis thaliana
  unsure (1)..(319): unsure at all Xaa locations
  Clone ID: ARATH-23APR03-C23713_1.p
MAGFFSLGHGGGGNTPDNHRTNTNNPSSSGTESWLWCRNPNSNADGGEAGPSYKGTLELWQHPNNQEIVFQQQQQQQQRLDLYTSAAGLGVGPSNRSLIETSGGALSQDCGNQSKKDCSHMRCRTCCKSRGLDCPTHVKSTWVPAAKRRERQQQLFTGQQPQQLGGSVPKRQRERIPARPTSXMAYTRIPSNNTSGLEVGNFPPEVSSSAVFRCVRVSSVDDEEEEYAYKTAVSIGGHVFKGVLYDQGPAERSSSGGGSQPLNLITAGPSASSSSPNVSCNNGVVGSTSDHYIDPASLNYPTPINTFMTGTHFFSNSRS

SEQ ID NO: 6171 - protein, 221 aa, Arabidopsis thaliana
  Clone ID: ARATH-23APR03-C23728_1.p
MSPTTTSLRSLSFSLYASSNSTPISTPIEARQLLSSCSRFYGLSSSSSSSSLTTSSLIGNLVFSSRNQSLSVKVQALAAETEQPKWWERKAGPNMIDITSAEQFLNALKDAGDRLVIVDFYGTWCGSCRAMFPKLCKTAKEHPDILFLKVNFDENKSLCKSLNVKVLPYFHFYRGADGQVESFSCSLAKFQKLREAIERHNVGSISNISSSASEKVEDSSE

SEQ ID NO: 6172 - protein, 1101 aa, Arabidopsis thaliana
  Clone ID: ARATH-23APR03-C23734_1.p
RMQQRRKRRVKISIAKVSLVENTEEHNKPESEWNNNVEYFIKKKLRVWCRVSNGQWQLGKIQSTSADTSLVMLSTANVVKVSTEELFPANPDILEGVEDLIQLSYLNEPSVLYNLRVRYLQDVIYSKAGPVLIAVNPFKNVEIYGNDVISAYQKKVMDAPHVYAVADAAYDEMMREKNQSLIISGESGAGKTETAKFAMQYLAALGGGSCGVEYEILKTTCILEAFGNAKTSRNANSSRFGKLIEIHFSAMGKICGAKLETFLLEKSRVVQLFNGERSYHIFYELCAGASPILKERLKLKTASEYTYLSQSDCLTIAGVDDAQKFHKLLEAFDIVQIPKEHQERAFALLAAVLWLGNVSFRVTDNENHVEVVADEAVANAAMLMGCNTEELMVVLSTRKLQAGTDCIAKKLTLRQATDMRDGIAKFIYANLFDWLVEQINIALEVGKSRTGRSISILDIYGFESFKNNSFEQFCINYANERLQQHFNRHLFKLEQEEYEEDGIDWTKVEFVDNQECLDLIEKKPIGLLSLLDEESNFPKATDLTFANKLKQHLKTNSCFKGERGRAFRVNHYAGEVLYDTNGFLEKNRDPLPADLINLLSSCDCQLLKLFSTKMRGKSQKPLMLSDSTNQTVGTKFKGQLFKLMNKLENTSPHFIRCIKPNSKQLPRVYEEDLVLQQLRCCGVLEVVRISRSGYPTRLTHQEFAGRYGFLLSDKKVAQDPLSVSIAVLKQYDVHPEMYQVGYTKLYLRTGQIGIFEDRRKKVLQGIVGLQKHFRGHLSRAYFQNMRKVTLVLHSYIRGENARNLFVTQAKFNARPLSEASTGEFRADIHLQSAVRGWLARKHFNSMQRQKELRNVATKSKRKAGRRISEDKDIPLEQPQVQPTSMSDLQKRILKSEAALSQKEEENTALREQLRQFEERWSEYDIKMKSMEETWQKQMSSLQMSLAAARKSLAAESITGQAGGRQDTSISPFGYDSEDTMSTGTPGVRTPTNKFTNGNTPELRIRELNGSLNAVNHLAREFDQRRLNFDEDARAIVEVKLGPQATPNGQQQQHPEDEFRRLKLRFETWKKDYKARLRDTKARLHRVDGDKGRHRKWWGKRG

SEQ ID NO: 6173 - protein, 101 aa, Arabidopsis thaliana
  Clone ID: ARATH-23APR03-C237490_1.p
MSQQPPAVGVPPSHAYPAEGPPKDAYPPPGQPYPQQGYPPPQGYPQQGYPPQGYPPQGYPEQGYPQQGYPPQQQQQQKHSPGMLEGCIAALCCCCVLDACF

SEQ ID NO: 6174 - protein, 399 aa, Arabidopsis thaliana
  Clone ID: ARATH-23APR03-C237585_1.p
MANCFAPQLTFPSFSPRHFSPRMSHQSPKPSTSTTTSIFTSATKLLWGPSLPPGLLISTARTAWTTVWQLMMTQLAPSDSSGSYTRPTSKFRLDPTQFTSAASSELHLYVGLPCPWAHRTLIVRALKGLNDAVPVSIASPGQDGSWEFKDNNIPIKDKDKLIPSLDKANRCRNLKEVYKSRSGGYDGRCTVPMLWDLRKKDVICNESYDIIEFFNSGLNKLARNDNLDLSPPELKEMIQGWNQIVYPKVNNGVYRCGFAQSQEAYDGAVNELFSTLDEIEDHLGSNRYLCGERLTLADVCLFTTLIRFDSVYNILFKCTKKKLVEYPNLYGYLREIYQIPGVAATCDISAIMDGYYKTLFPLNASGIQPAISSSGDQDSLWRPHNRDLVGKAIEAQLSV

SEQ ID NO: 6175 - protein, 595 aa, Arabidopsis thaliana
  unsure (1)..(595): unsure at all Xaa locations
  Clone ID: ARATH-23APR03-C2375_1.p
MCSIHFTGVIKIFLTAFHQWSADLAFEYRLRTSMSSCLLPQFKCPPDSFSIHFRTSFCAPKHNKGSVFFQPQCAVSTSPALLTSMLDVAKLRLPSFDTDSDSLISDRQWTYTRPDGPSTEAKYLEALASETLLTSDEAVVVAAAAEAVALARAAVKVAKDATLFKNSNNTNLLTSSTADKRSKWDQFTEKERAGILGHLAVSDNGIVSDKITASASNKESIGDLESEKQEEXVELLEXSPFREEDELSARIQDLLKLERLQTELTERSGRQPTFAQWASAAGVDQKSLRQRIHHGTLCKDKMIKSNIRLVISIAKNYQGAGMNLQDLVQEGCRGLVRGAEKFDATKGFKFSTYAHWWIKQAVRKSLSDQSRMIRLPFHMVEATYRVKEARKQLYSETGKYPKNEEIAEATGLSMKRLMAVLLSPKPPRSLDQKIGMNQNLKPSEVIADPKAVTSEDLLIKEXIGQAPGLSIRLLMAVVLAPNPPRSLDWRIGMNQNLKPSEVIADPEAVTSEDILIKEFMRQDLDKVLDSLGTREKQVIRWRFGMEDGRMKTLQEIGEMMGVSRERVRQIESSAFRKLKNKKRNNHLQQYLVAQS

SEQ ID NO: 6176 - protein, 324 aa, Arabidopsis thaliana
  Clone ID: ARATH-23APR03-C2376_1.p
MAAVPRGLLSRINQFLSIRSITPSSSESLPHCSSFFLLRRFSSDTGLMDGGGSDIIGAQTRIIEAKQGEMSSRSKRTGIIAVKCGMTALWDKWGKRIPISILWVDDNIVSQVKTVEKEGIFALQIGCGQKKPKHLSKAVVGHFRAQGVPLKRKLREFPVTEDALLPVGTSLGVRHFVPGQYVDVTGITRGKGFQGCMKRHGFSGMPASHGASLSHRSGGSTGQRDAPGKVFKGRKMAGRMGADQRTVKNVWVYKIDPARNLMWVRGQVPGAEGNFVFIKDAWCKKPDISKLPFPTYLAPEDEDPSELEPLVADLGEVDPFMLAE

SEQ ID NO: 6177 - protein, 361 aa, Arabidopsis thaliana
  Clone ID: ARATH-23APR03-C23797_1.p
MDYHLRVLFSVSLIFVFVSVSVCGDEDVLIRQVVDETEPKVLSSEDHFTLFKKKFGKVYGSIEEHYYRFSVFKANLLRAMRHQKMDPSARHGVTQFSDLTRSEFRRKHLGVKGGFKLPKDANQAPILPTQNLPEEFDWRDRGAVTPVKNQGSCGSCWSFSTTGALEGAHFLATGKLVSLSEQQLVDCDHECDPEEEGSCDSGCNGGLMNSAFEYTLKTGGLMREKDYPYTGTDGGSCKLDRSKIVASVSNFSVVSINEDQIAANLIKNGPLAVAINAAYMQTYIGGVSCPYICSRRLNHGVLLVGYGSAGFSQARLKEKPYWIIKNSWGESWGENGFYKICKGRNICGVDSLVSTVAATTS

SEQ ID NO: 6178 - protein, 243 aa, Arabidopsis thaliana
  Clone ID: ARATH-23APR03-C23831_1.p
MASINLFLFAFLLLLSHASASTVIFYNKCKHPVWPGIQPSAGQNLLAGGGFKLPANKAHSLQLPPLWSGRFWGRHGCTFDRSGRGHCATGDCGGSLSCNGAGGEPPATLAEITLGPELDFYDVSLVDGYNLAMSIMPVKGSGQCSYAGCVSDLNQMCPVGLQVRSRNGKRVVACKSACSAFNSPQYCCTGLFGNPQSCKPTAYSKIFKVACPKAYSYAYDDPTSIATCSKANYIVTFCPHHRH

SEQ ID NO: 6179 - protein, 221 aa, Arabidopsis thaliana
  Clone ID: ARATH-23APR03-C239050_1.p
MEDHEKIDGKKKKKKSVALIPANYVSILQLQERWLKEKEKKQKEKDFVERGVKQQVDQRQRRREEEENVVKAMETKVKLEEHSLSGGVRMHCSVNRWKRDQVCVKKEEIKVSGIVSNKDEDSVDSRKKKKKNPVKENTRRVFKSKGENAAKEVTQCWIKKKVEEERETSEVKGTARLISKQGYYQNKRHDWSSTRVIRATTSTMVWVKKGKKDGAVGENKV

SEQ ID NO: 6180 - protein, 333 aa, Arabidopsis thaliana
  Clone ID: ARATH-23APR03-C23998_1.p
MLDYEWDNPSSIVLSGDERNPDSDPTRSSFSFFDPISHYNNDHRHITISPPLLSSFSNQQQQHHLTLYGQTNSNNQFLHHHHHHHSLYGSTTTTTPYGASDPIYHPHSSAPPASLFSYDQTGPGSGSGSSYNFLIPKTEVDFTSNRIGLNLGGRTYFSAADDDFVSRLYRRSRPGESGMANSLSTPRCQAEGCNADLSHAKHYHRRHKVCEFHSKASTVVAAGLSQRFCQQCSRFHLLSEFDNGKRSCRKRLADHNRRRRKCHQSASATQDTGTGKTTPKSPNDSGVKASSSPSSNAPPTISLECFRQRQFQTTASSSTSASSSSNSMFFSSG

SEQ ID NO: 6181 - protein, 334 aa, Arabidopsis thaliana
  Clone ID: ARATH-23APR03-C2403_1.p
MPLLLRRFPSPSVVSSFFLRRSMASSTISSDIITPSNTKIGWIGTGVMGRSMCGHLIKAGYTVTVFNRTISKAQTLIDMGANVADSPNSVAEQSDVVFTIVGYPSDVRHVLLDPKSGALSGLRQGGVLVDMTTSEPSLAEEIAKAASFKNCFSIDAPVSGGDLGAKNGKLSIFAGGDETTVKRLDPLFSLMGKVNFMGTSGKGQFAKLANQITIASTMLGLVEGLIYAHKAGLDVKKFLEAISTGAAGSKSIDLYGDRILKRDFDPGFYVNHFVKDLGICLNECQRMGLALPGLALAQQLYLSLKAHGEGDLGTQALLLALERLNNVSVQSSDS

SEQ ID NO: 6182 - protein, 467 aa, Arabidopsis thaliana
  Clone ID: ARATH-23APR03-C24041_1.p
MQSSVYRDKASSIAMILETQRNVEFPHRIVDKRPRKRPRLTWDAAPPLLPPPPPPTVFQPPLYYGPEFASGLVPNFVYPNMFYNGLPRQGSPPWRPDDKDGHYVFVVGDTLTPRYQILSKMGEGTFGQVLECFDNKNKEVVAIKVIRSINKYREAAMIEIDVLQRLTRHDVGGSRCVQIRNWFDYRNHICIVFEKLGPSLYDFLRKNSYRSFPIDLVRELGRQLLESVAYMHDLRLIHTDLKPENILLVSSEYIKIPDYKFLSRPTKDGSYFKNLPKSSAIKLIDFGSTTFEHQDHNYIVSTRHYRAPEVILGVGWNYPCDLWSIGCILVELCSGEALFQTHENLEHLAMMERVLGPLPPHMVLRADRRSEKYFRRGAKLDWPEGATSRDSLKAVWKLPRLPNLIMQHVDHSAGDLIDLLQGLLRYDPTERFKAREALNHPFFTRSREQSIPPFNPNPHPFLYNQKN

SEQ ID NO: 6183 - protein, 361 aa, Arabidopsis thaliana
  Clone ID: ARATH-23APR03-C24078_1.p
MASRSLNGDSDIVKPRKIALVTGITGQDGSYLTEFLLEKGYEVHGLIRRSSNFNTQRLNHIYVDPHNVNKALMKLHYGDLSDASSLRRWLDVIKPDEVYNLAAQSHVAVSFEIPDYTADVVATGALRLLEAVRSHNIDNGRAIKYYQAGSSEMFGSTPPPQSETTPFHPRSPYAASKCAAHWYTVNYREAYGLYACNGILFNHESPRRGENFVTRKITRALGRIKVGLQTKLFLGNIQASRDWGFAGDYVEAMWLMLQQEKPDDYVVATEESHTVKEFLDVSFGYVGLNWKDHVEIDKRYFRPTEVDNLKGDASKAKEMLGWKPKVGFEKLVKMMVDEDLELAKREKVLADAGYMDAQQQP

SEQ ID NO: 6184 - protein, 775 aa, Arabidopsis thaliana
  Clone ID: ARATH-23APR03-C24093_1.p
MATFINLEDSPMFQKQVCSLEGTADELKDRCQKLYKGVKKFMGTLGEASKGESAFAACLEEFGGGPDDPISLSIGGPVISKFINALRELASYKEFLCSQVEHVLLERLMNFISVDLQEAKESRHRFDKAAHSYDQSREKFVSLKKNTRGEIVAELEEDLENSKSTFEKSRFNLVNSLMTIEAKKKYEFLESISAIMDAHLRYFKLGYDLLNQLEPFIHQILTYAQQSKEQSKIEQDRLARRIQEFRTQSELDSQQLVANAESSGANGNRVGGNIPYKNTETSLTADKEVIKQGYLLKRSSSLRTDWKRKFFVLDSHGSMYYYRTNGNKSMGSHHHYSGSSDHNTGVFGRFRARHNRSGSLTEGSLGYNTIDLRTSLIKLDAEDMDLRLCFRIISPQKTYTLQAENGADRMDWVNKITKAIGTLLNSHFLQQSPVRYLDKDNSSSAPANAVVSGDQIRHNDSRQNIGDDVSTILRGLPGNNACAECNAPEPDWASLNLGVLLCIQCSGVHRNLGVHISKVRSLSLDVKVWEPTILDLFRNLGNVYCNSLWEGLLHLDDDCEDGSALSHASVSKPCPEDSFSVKEKYILGKYLEKALVIKDESEANLSAASRIWEAVQSRNIREIYRLIVTTGDVNIINTKFDDITDIDAYHHIDAAEKAVKKRHDPTVCQRIKESNEPRSCLQGCSLLHVACHIGDSVLLELLLQFGADLNIRDYHGRTPLHHCISSGNHKFAKILLRRGARPSIEDDGGLSVLERAMEMGAITDEELFLLLAECA

SEQ ID NO: 6185 - protein, 338 aa, Arabidopsis thaliana
  unsure (1)..(338): unsure at all Xaa locations
  Clone ID: ARATH-23APR03-C24126_1.p
MIHLAGFTCCLGGVALYLLTRSTGRDIKSITRVYQLKDLEQLVEVESKVVPLIIAVSGDVGSETPIKCEHSDVLGVFLKRTAEQQVLRRNWRFSWVRNSTLMQPMTKEVPWYLDDGTGRVNVDVSQGELGLALTVGSDVFEKAEPVSLVQGALGYLKGFKILGVRHVERVVPIGTPLTVVGEAVRDGMGNVRIQKPEQGPFYVTYIPLDQLISKLGDLSRRFKYASMGLTVLGVILISKPVIEYILKRIEDTLERRRRQFALKRVVDAAXRRAKPVTGGGTSRDGDTPDLCVVCLDQKYNTAFVECGHMCCCTPCSLQLRTCPLCRERIQQVLKIYRH

SEQ ID NO: 6186 - protein, 408 aa, Arabidopsis thaliana
  Clone ID: ARATH-23APR03-C24133_1.p
MEPLISPQPRFRLQPIPENPSSSSSSASITIPRSISNTSFFHEISQERLLLHHQDLEQSVQDDKEDQDSDSDETNRFLSQTRPLHRSRTAPAMVIIKDLRTKPPETKKPSPVSKSIIRQAIFLLIVYLTLGVSIYSFNRDHYSGIETHPVVDALYFCIVTMCTIGYGDIAPLTPWTKIFAVVFVLFGFGFLDILLSGVVNYVLDLQESMILTGIQTRQHHQHHHHHRFSAKDYIIDFEKGRMRIRMKVCLALCVVVLCIGVGALVLHFVEELGFVDSVYLSVMSVTTVGYGDRAFKTLQGRLFAAVWLLVSTLAVARAFLYLAEARIDRRHRKAVKLALNREITVDDLLKADTYQHGFISKSEYIVLKLKEMGKITQKDIDQVVIQFEKLDPNQIGKITLPDLLGDPL

SEQ ID NO: 6187 - protein, 361 aa, Arabidopsis thaliana
  unsure (1)..(361): unsure at all Xaa locations
  Clone ID: ARATH-23APR03-C24157_1.p
MWTSKTISFTFFITTILLASCNASAKAKTQPLFPAILIFGDSTVDTGNNNYPSQTIFRAKHVPYGIDLPNHSPNGRFSNGKIFSDIIATKLNIKQFVPPFLQPNLTDQEIVTGVCFASAGAGYDDQTSLTTQAIRVSEQPNMFKSYIARLKSIVGDKKAMKIINNALVVVSAGPNDFILNYYEVXPAWRRMYPSISDYQDFVLTMLNNFVTELYSLGCRKILVGGLPPMGCLPIQMTAQFRNVLRFCLEQENRDSVLYNQKLQKLLPQTQASLTGSKILYSDVYDPMMEMLQNPSKYGFKETTRGCCGTGFLETNFMCNAYSSMCQNRSEFLFFDSIHPSEATYNYIGNVLDTKIRGWLKA

SEQ ID NO: 6188 - protein, 226 aa, Arabidopsis thaliana
  Clone ID: ARATH-23APR03-C24159_1.p
MEVGSATKKLQCQRIGCNAMFTDDDNPQGSCQFHASGPFFHDGMKEWSCCKQRSHDFSLFLEIPGCKTGKHTTEKPVLAKSVPKHPVAAPTSSPDANAATKDSCSRCRQGFFCSDHGSQPKEQIKQTLNTPGQAEEEKIEPLAPPVQKAVIDINQPQVCKNKGCGQTFKERDNHETACSHHPGPAVFHDRLRGWKCCDVHVKEFDEFMEIPPCTKGWHSSSPDPAV

SEQ ID NO: 6189 - protein, 716 aa, Arabidopsis thaliana
  Clone ID: ARATH-23APR03-C24279_1.p
MKDHDFDGDKGLAKGFLENFADANGRSKYMEILQEVSNRKIRAIQVDLDDLFNYKDESEEFLGRLTENTRRYVSIFSAAVDELLPEPTEAFPDDDHDILMTQRADDGTDNPDVSDPHQQIPSEIKRYYEVYFKAPSKGRPSTIREVKASHIGQLVRISGIVTRCSDVKPLMAVAVYTCEDCGHEIYQEVTSRVFMPLFKCPSSRCRLNSKAGNPILQLRASKFLKFQEAKMQELAEHVPKGHIPRSMTVHLRGELTRKVSPGDVVEFSGIFLPIPYTGFKALRAGLVADTYLEATSVTHFKKKYEEYEFQKDEEEQIARLAEDGDIYNKLSRSLAPEIYGHEDIKKALLLLLVGAPHRQLKDGMKIRGDVHICLMGDPGVAKSQLLKHIINVAPRGVYTTGKGSSGVGLTAAVMRDQVTNEMVLEGGALVLADMGICAIDEFDKMDESDRTAIHEVMEQQTVSIAKAGITTSLNARTAVLAAANPAWGRYDLRRTPAENINLPPALLSRFDLLWLILDRADMDSDLELAKHVLHVHQTEESPALGFEPLEPNILRAYISAARRLSPYVPAELEEYIATAYSSIRQEEAKSNTPHSYTTVRTLLSILRISAALARLRFSESVAQSDVDEALRLMQMSKISLYADDRQKAGLDAISDTYSIIRDEAARSKKTHVSYANALNWISRKGYSEAQLKECLEEYAALNVWQIDPHTFDIRFI

SEQ ID NO: 6190 - protein, 365 aa, Arabidopsis thaliana
  Clone ID: ARATH-23APR03-C243032_1.p
MDFLKVSDKTTIPYRSDSLFSLNQQQYKESSFGFRDMEIHPHPTPYAGNGLLGCYYYYPFTNAQLKELERQAMIYKYMIASIPVPFDLLVSSPSSASPCNNKNIAGDLEPGRCRRTDGKKCRCAKEVVSNHKYCEKHLHRGRPRSRKHVEPPYSRPNNNGGSVKNRDLKKLPQKLSSSSIKDKTLEPMEVSSSISNYRDSRGSEKFTVLATTEQENKYLNFIDVWSDGVRSSEKQSTTSTPVSSSNGNLSLYSLDLSMGGNNLMGQDEMGLIQMGLGVIGSGSEDHHGYGPYGVTSSLEEMSSWLAPMSTTPGGPLAEILRPSTNLAISGDIESYSLMETPTPSSSPSRVMKKMTSSVSDESSQV

SEQ ID NO: 6191 - protein, 403 aa, Arabidopsis thaliana
  Clone ID: ARATH-23APR03-C24313_1.p
MNSILSSVLPAPEDPVLSVIFACRDDPSPVKLNLSAGTYRTEEGKPLVLDVVRRAEQQLANDLDKEYLPLNGLPEFNKLSTKLILGDDSPALKENRVVTTQCLSGTGSLRVGAEFLATHNKVSVIFVPNPTWGNHPRIFTLAGLSVQYFRYYDPKSRGLDFKGMLEDLGAAPPGAIVVLQACAHNPTGVDPTFEQWEKFRRLVRSKSLLPFFDSAYQGFASGSLDADAQAVRMFVADGGECLIAQSYAKNMGLYGERIGSLTIVCTSEDVAKKVENQVLLVVRPMYLTPPIHGASIVATILKNSDMYNDWTIELKGMADRIISMRQQLYAALEARGTPGDWSHIIKHIGMFTFTGLSEEQVRLMAKEYHIYMTYDGRISMASLSSKTVPQLADAIHAVVTRIA

SEQ ID NO: 6192 - protein, 883 aa, Arabidopsis thaliana
  Clone ID: ARATH-23APR03-C24348_1.p
MTSASSMSVSVECVNICNLTKGDGNARSDCSALSCAWKAPRALTGFLASTAHPPVCSVYSCGRNGRKSRMKACAWQRYEYEVGFSEAPYFVNVRNILKSRLSCGGHKRWELYCVSAESSSGASSDVTVETLWEDLFPSISYLPRKELEFVQKGLKLAFEAHHGQKRRSGEPFIIHPVAVARILGELELDWESIVAGLLHDTVEDTNFITFEKIEEEFGATVRHIVEGETKVSKLGKLKCKTESETIQDVKADDLRQMFLAMTDEVRVIIVKLADRLHNMRTLCHMPPHKQSSIAGETLQVFAPLAKLLGMYSIKSELENLSFMYVSAEDYDRVTSRIANLYKEHEKELTEANRILVKKIEDDQFLDLVTVNTDVRSVCKETYSIYKAALKSKGSINDYNQIAQLRIVVKPKPSVGVGPLCSPQQICYHVLGLVHEIWKPIPRTVKDYIATPKPNGYQSLHTTVIPFLYESMFRLEVQIRTEEMDLIAERGIAVYYNGKSLSTGLVGNAVPLGRNSRGKTGCLNNADFALRVGWLNAIREWQEEFVGNMSSREFVDTITRDLLGSRVFVFTPKGEIKNLPKGATVVDYAYLIHTEIGNKMVAAKVNGNLVSPTHVLENAEVVEIVTYNALSSKSAFQRHKQWLQHAKTRSARHKIMRFLREQAAQCAAEITQDQVNDFVADSDSDVEDLTEDSRKSLQWWEKILVNVKQFQSQDKSRDTTPAPQNGSVWAPKVNGKHNKAIKNSSSDEPEFLLPGDGIARILPANIPAYKEVLPGLDSWRDSKIATWHHLEGQSIEWLCVVSMDRKGIIAEVTTVLAAEGIALCSCVAEIDRGRGLAVMLFQIEANIESLVSVCAKVDLVLGVLGWSSGCSWPRSTENAQVLEC

SEQ ID NO: 6193 - protein, 661 aa, Arabidopsis thaliana
  unsure (1)..(661): unsure at all Xaa locations
  Clone ID: ARATH-23APR03-C24349_1.p
MQDRSMLFSSASVKSSSSSSCSYSTAVDEFSSLRYDRSDDLKDLSFSSSFGYSPAKFVNSFRRDHQSPISVLHGPVSCSCSPPMRMSRDRNLDGSFRLGASRLFNGFVRKALGSCVDYELGSDSGLVDELTFPMEVDTIKPYARDLLRRAQLRHKIFNDESVIKAFYEAEKAHRGQMRASRDPYLQHCVETAMLLANIGANSTVVVAGLLHDTVDDSFMSYDYILRNFGAGVADLVEGVSKLSQLSKLARENNTACKTVEADRLHTMFLAMADARAVLIKLADRLHNMKTLYALSPVKQQRFAKETLEIFAPLANRLGISTWKVQLENLCFKHLYPNQHNEMSTMLEDSFDEAMITSAIEKLDQALKKAGISYHVLCGRHKSLYSIYSKMLKKKLTVDEIHDIHGLRLIVDNEGDCYKALGVVHSLWSEVPGKLKDYITHPKFNGYQSLHTVVMDNGTVPLEVQIRTQEMHLQAEFGFAAHWRYKEGGCKYSSFVLQMVEWARWVVTWHCEAMSKDRSSISSSDSIKPPLQXFRLTLEDCPASYKPNSSQDGPVYVIVIENDKMSVQEFPASSTVSDLLSRAGPGSSRWSMYGIPAKEELRPRLNQIPVSDLKWKLKMGDVVELTPTIPDESLTEYREEIQRMYDRGLAFSRPGTMVGWGS

SEQ ID NO: 6194 - protein, 263 aa, Arabidopsis thaliana
  Clone ID: ARATH-23APR03-C24412_1.p
MGSGNLIKAIIRLKKSKQGTEKKKTSAVKPKKGSKKKGTSLVTRSEDWAATRIQTAFKAYKARKSLRRLKGIARAKLSTEKQSVKNQAVVTLRYLHSWSKIQSEIKARRVCMVTEWRLKNKRLEHQQKLEAKLHDVEVEWNGGSETKDEILERILQREEATIKRERALAYAFSHQWKADGKTQWLGSYELGNTNWGWSWKERWISARPWEVRYSVTPKKPKSSKTDSNSPAKRTVSLSSVPAKTPFPGARNTVKPRRLSFPGA

SEQ ID NO: 6195 - protein, 140 aa, Arabidopsis thaliana
  Clone ID: ARATH-23APR03-C2442_1.p
MGKLQKIGRVWDCLFLPTNQCSCFCLNTLGDEEEEFEKEPLIDSSTEKSGKVMRLKDVVAADHRQTLAFHLKPKIVELKVSMHCYGCAKKVEKHISKLDGVTWYKVELESKKVVVKGNILPVDVLESICKVKNAQLWSSP

SEQ ID NO: 6196 - protein, 345 aa, Arabidopsis thaliana
  Clone ID: ARATH-23APR03-C24464_1.p
MGRSPCCDKAGLKKGPWTPEEDQKLLAYIEEHGHGSWRSLPEKAGLQRCGKSCRLRWTNYLRPDIKRGKFTVQEEQTIIQLHALLGNRWSAIATHLPKRTDNEIKNYWNTHLKKRLIKMGIDPVTHKHKNETLSSSTGQSKNAATLSHMAQWESARLEAEARLARESKLLHLQHYQNNNNLNKSAAPQQHCFTQKTSTNWTKPNQGNGDQQLESPTSTVTFSENLLMPLGIPTDSSRNRNNNNNESSAMIELAVSSSTSSDVSLVKEHEHDWIRQINCGSGGIGEGFTSLLIGDSVGRGLPTGKNEATAGVGNESEYNYYEDNKNYWNSILNLVDSSPSDSATMF

SEQ ID NO: 6197 - protein, 280 aa, Arabidopsis thaliana
  Clone ID: ARATH-23APR03-C24482_1.p
MSGSSSPSLWLAPNPSKRWGELFFLFYTPFWLTLCLGIVVPYKLYETFTELEYLLLALVSAVPAFVIPMLLVGKADRSLCWKDRYWVKANLWIIVFSYVGNYFWTHYFFKVLGASYTFPSWKMNNVPHTTFFLTHVCFLFYHVASNITLRRLRHSTADLPDSLKWCFEAAWILALSYFIAYLETIAIANFPYYEFVDRSAMYRVGCLFYAIYFIVSFPMFFRMDEKSTDEWDLSRVAVDALGAAMLVTIILDLWRLFLGPIVPLPEGQNCLQSGLPWFSN

SEQ ID NO: 6198 - protein, 462 aa, Arabidopsis thaliana
  Clone ID: ARATH-23APR03-C2456_1.p
MAVATHCFTSPCHDRIRFFSSDDGIGRLGITRKRINGTFLLKILPPIQSADLRTTGGRSSRPLSAFRSGFSKGIFDIVPLPSKNELKELTAPLLLKLVGVLACAFLIVPSADAVDALKTCACLLKGCRIELAKCIANPACAANVACLQTCNNRPDETECQIKCGDLFENSVVDEFNECAVSRKKCVPRKSDLGEFPAPDPSVLVQNFNISDFNGKWYITSGLNPTFDAFDCQLHEFHTEGDNKLVGNISWRIKTLDSGFFTRSAVQKFVQDPNQPGVLYNHDNEYLHYQDDWYILSSKIENKPEDYIFVYYRGRNDAWDGYGGAVVYTRSSVLPNSIIPELEKAAKSIGRDFSTFIRTDNTCGPEPALVERIEKTVEEGERIIVKEVEEIEEEVEKEVEKVGRTEMTLFQRLAEGFNELKQDEENFVRELSKEEMEFLDEIKMEASEVEKLFGKALPIRKVR

SEQ ID NO: 6199 - protein, 531 aa, Arabidopsis thaliana
  unsure (1)..(531): unsure at all Xaa locations
  Clone ID: ARATH-23APR03-C24576_1.p
KVLHLGKLVVTSGLLHSSWSKILEIHNPPYXSNHDPGLQVSXKKKDSGLEFQIHREEKFTLVVFSAPPICRSSSSDSTLLHVKDKENPFPFLCSENNPSFSLHTPAFNLFTSAPTSLTYLKSELLQTLKSEKPVIITGAALGGSVASLYTLWLLETIEPTLKRPLCITFGSPLIGDASLQQILENSVRNSCFLHVVSAQTRIKMDFFKPFGTFLICFDSGCVCIEDHVAVTELLNGVHDSGLVDYSQVLNRLDQSMLSLADSRLIPEDVIKGIEKRAEMKNLRFDMMFKKLNDMKISMAYIEWYKKKCKEVKIGYYDRFKTQLAFPSKEFDINIKNHHKSELNRFWKSVVEEVERRPQSDASILKRRFLFSGNNYRRMIEPLDIAEYYLEGRKEYRTTGRSHHYVMLEKWFGMESILIEKERCKKRDLSDLLTFDSCFWAEVEDSLIVINQLNTTVGMRDDVREVLTRKLVEFEGYVWEIITKREVSPEIFLEESSFMKWWKEYKKIKGFNSSYLTEFMNTRKYESYGKSQ

SEQ ID NO: 6200 - protein, 600 aa, Arabidopsis thaliana
  unsure (1)..(600): unsure at all Xaa locations
  Clone ID: ARATH-23APR03-C245962_1.p
MVWCNHCVKNVPGIRPYDGALACNLCGRILENFHFSTEVTFVKNAAGQSQASGNIVRSVQSGITSSRERRFRIARDELMNLKDALGIGDERDDVIVIAAKFFEMAVEQNFTKGRRTELVQASCLYLTCRELNIALLLIDFSSYLRVSVYELGSVYLQLCEMLYLVENRNYEKLVDPSIFMDRFSNSLLKGKNNKDVVATARDIIASMKRDWIQTGRKPSGICGAALYTAALSHGIKCSKTDIVNIVHICEATLTKRLIEFGDTDSGNLNVNELRERESHKRSFTMKPTSNKEAVLCMHQDSKPFGYGLCEDCYKDFINVSGGLVGGSNPPAFQRAEKERMEKAAREENEGGISSLNHDEQLYHLRIYLGCVAEKGEKDKDGAEEHADTSDESDNFSDISDDEVNGYINNEEETHYKTITWTEMNKDYLEEQAAKEAALKAASEALKASNSNCPEDARKAFEAAKADAAKSRKEKQQKKAEEAKNAAPPATAVEAVRTXLDKKRLSSVINYDVLESLFDTSAPXKSPKRSKTETDIEKKKEENKEMKSNEHENGENEDEDEEDEEEGNVESYDMKTDFQNGEKFYEEDEEEEEDGNDFGLY

SEQ ID NO: 6201 - protein, 314 aa, Arabidopsis thaliana
  Clone ID: ARATH-23APR03-C24626_1.p
MATCIDTCRTGNTQDDDSRFCCIKNFFRPGFSVNRKIHHTQIEDDDDVWIKMLEEAKSDVKQEPILSNYYYASITSHRSLESALAHILSVKLSNLNLPSNTLFELFISVLEESPEIIESTKQDLIAVKERDPACISYVHCFLGFKGFLACQAHRIAHTLWKQNRKIVALLIQNRVSESFAVDIHPGAKIGKGILLDHATGVVIGETAVVGDNVSILHGVTLGGTGKQSGDRHPKIGDGVLIGAGSCILGNITIGEGAKIGSGSVVVKDVPARTTAVGNPARLIGGKENPRKHDKIPCLTMDQTSYLTEWSDYVI

SEQ ID NO: 6202 - protein, 341 aa, Arabidopsis thaliana
  Clone ID: ARATH-23APR03-C2464_1.p
MAYSSVPSCFHGYLLHRCSFSTTQFFSGSLSCGFSASTNSRLRTCVKFEKFQGDSPLEQNTSVSSSSSVSQELPLEEAQDQLEEEEDDDDCLPNDLEGAVRQSGEAGAAFVNSGGNRAIVELLIPQLQFLDDEGAQAELWDLSRVFLETLIKETGCERVKAVFPDAGAAALLKYRWKDATFGFASLSDRKPVEKEDEIIVMVVPDYQMLEYVEKIANGLADDPPRPLIMWNPRLISEEVGVGFNVRKLRRYFLSSFTTVYSMRPLAAGAVFRCYPGKWKVFYDNKDRPGRYLLAKELIGRPDAEDLEIIYGGVEEKSEEGPSLMSQAAGIFSSINRFMKSM

SEQ ID NO: 6203 - protein, 2028 aa, Arabidopsis thaliana
  Clone ID: ARATH-23APR03-C24656_1.p
MEALTELCDIIAKNPKQFSEKLAWICGRCPQTEWLLAESPRVSRSHLNAVLAVARIISKNPESIDNRAKSVVNEFLSAIPASFRRSFWPHSFPSQLISSFYCDFLSYLSCAADLSPEFGTEVARFTGEVVIAAIAPSSGDSDGDPAISKAFLVALSQHFPSILQSDGDKLITMLLDQFVLNRAPASPKEQRQQNSANSETDTSSSQGSPISTNRYPSGKTEMASPGDEVASHGSNLSSKSSSSVVMNGGSIVWKSGVDQLSFGFSEGSGGANPVFRQQVASFEDESIESLEKQEIAFRLITHILDKVKIDSKLQDQVRFIAKRQLQSMSAFLKSRKRDWNEQGQVLKTRVNAKLSVYQAAAKMKIKSLVSLETDGKTSKRLVLETLALLLDAADACLTSVWRKMKACEELFDSLLSGIAKIAVARGGQPLRVLLIRLKPLVLAVCALPDQGAMLESIFKTSCEIIESAWAKDRAPVDNFIMGLASSIRERNDYEEQVDREKQVPAVQLNVIRLLADLNVAVKKPEVADMILPLFIESLEEGDASTPSFLRLQLLDAVSRIATLGFDKSYRETVVLMTRSYLSKLSSVGSVESKTSAPEATTERVETLPAGFLTIASGLMDTKLRSDYRHRLLSLCSDVGLAAESKSGGSGVDFLGPLLPAVAEICSDFDPTMDVEPSLLKLFRNLWFYIALFGLAPPIVKTPTPPLKSTSNSVNSVGSMSATALQAVGGPYMWDNQWALAVQRIAQGTPPLVVSSVKWLEDELELNALHNPGSRRGNGNEKVASTQRLALSTALGGRVDVAAMNTISGVKATYLLAVAFLEIIRFISNGGILNGESSVSASRSAFSCVFEYLKTPNLTPAVSQCLTAIVHRAFETAVSWLEDRISLTGKDARNRELTTYAHACFLIKSMSQRDEHVRDISVNLLTQLRDKFPQVLWHSSCLDSLLFSVHDNTPSTVVNDPAWTAAVRSLYQKVVREWIIISLSYAPCTSQGLLQDKLCKANTWQRAQTTTDVVSLLSEIKIGTGKNELWSGIRTANIPAVMAAAAAASGANLKVSEAFNLEVLGTGVVSATVKCNHAGEIAGMRRLYNSIGGFQSGSTPSGFGGGLQRLISGAFSQAPQPEDDSFNEMLIARFVRLLQQFVNTAEKGGEVEKSQFRETCSQATALLLSNLGGESKTNVEGFSQLLRLLCWCPAYISTPDAMETGIFIWTWLVSAAPQLVSLVLAELVDAWIWTIDTKRGLFASDVRYSGPAAKLRPHLSPGEPEDPPESDPVDQIVAHRLWLGFLIDRFGVVRHNSAEQLLLLGRMLQRSTDLEWCFTRHPAAAGTFFSLMLLGLKFCSCQTQGNMQKFRSGLQLLEDRIYRTSLGWFAHQPEWYDVNIPNFCHSEALSVSVFVHFLSNELSESSQSDSKGKPRESGNLIDVTDQYHPVWGEMDNYTLGKEKRKQLLLMLCQHEADRLDVWAQPISSKDSPYSRLKISSEKWTEYAKTAFSVDPRIALSVASRFPANASVKSEVTQLVQTNIVDLRTIPEALPYFVTPKNVEENSVLLQQLPHWAACSITQALEFLTPAYKGHPRVMAYVLRVLESYPPERVTFFMPQLVQSLRYDDGRLVEGYLLRATQRSDIFAHILIWHLQGEDVQETPKDGSIDKNAAFQEILPQVRQHIIDGFSPNALDMFTREFDFFDKVTSISGVLFPLPKEERRAGIRRELEKIEMQGDDLYLPTAPNKLVRGIRVDSGIPLQSAAKVPIMITFNVIDRDGDHSDVKPQACIFKVGDDCRQDVLALQVISLLRDIFQAAGLNLYLFPYGVLPTGAERGIIEVVPNTRSRSQMGETTDGGLYEIFQQDYGPVGSTTFETARENFLISSAGYAVASLLLQPKDRHNGNLLFDDVGRLVHIDFGFILETSPGGNMRFESAHFKLSHEMTQLLDPSGVMKSKTWHQFVSLCVKGYLAARRQMDGIISTVQMMLESGLPCFSRGDPIGNLRKRFHPEMSEREAAHFMIHVCTDAYNKWTTAGYDLIQYLQQGIEK

SEQ ID NO: 6204 - protein, 646 aa, Arabidopsis thaliana
  Clone ID: ARATH-23APR03-C24761_1.p
MHSRFQNIAFAGNSSSNSYKILGRSLQVEVPEAADTTLRLDSLASPLSNAKGIKRKWNLIDGADPLLSLRLGHSSSSSDSKGSSATACTSLSSARETEEASSMDIELDFSLHLGNEKPTASNKKPANLKMKGLQVPSPKFDLELSLSGGGSCQSEITAVQQHANRFQSLADMLRANNEESATCGWRQGFGLPTLQASSSKETSSFLGHIPKNVIIPAAHVLELSSNTAATTPISSGTCTSGLSQQLKPQLKNSSSSKLCQVEGCHKGARGASGRCISHGGGRRCQKHGCHKGAEGRTVYCKAHGGGRRCEFLGCTKSAEGRTDFCIAHGGGRRCSHEDCTRAARGRSGLCIRHGGGKRCQRENCTKSAEGLSGLCISHGGGRRCQSNGCTKGAQGSTMFCKAHGGGKRCTHSGCTKGAEGSTPFCKGHGGGKRCAFQGDDPCSKSVHGGTNFCVAHGGGKRCAVPECTKSARGRTDFCVRHGGGKRCQSEGCGKSAQGSTDFCKAHGGGKRCAWGQPETEYAGQSSSGPCTSFARGKTGLCALHNSLVQDNRVHGGMTITSESQEPRVSSSETENEEEFSGSQDMNMDTMKARSATGSPETDVDLNEYEAGLGLAPEGRVHGGSLMMAMLGRDGGSGSTGGPKRWM

SEQ ID NO: 6205 - protein, 301 aa, Arabidopsis thaliana
  Clone ID: ARATH-23APR03-C2478_1.p
MILGRWVSFSCGNTPVTNCSERRRHTEFRRLSSASTCRPSLICSCLKSKSSQETTQIEQLGNGEGFSVLASEIPWEDDNIWSTFALYMFSLHIPLSFGGLSIVANILHRQVLDPQTQVLSLVVLQMVELAGTVLLLRTTAKPQCKSINFLKGNNETREGRNWVVGSALGLGCLVGFIFVTSLVADQLFGPKAVHESELEKIMVSGEVARSGCFALYCVVAPILEEIVYRRFLLTSLASRMEWWKALVISSGVFAAGHFSGEDFVQLFGIGCGLGLCYSWSGNLASSVLVHSLYNALTLLFS

SEQ ID NO: 6206 - protein, 325 aa, Arabidopsis thaliana
  Clone ID: ARATH-23APR03-C2489_1.p
MEKNTSQTIFSNFFLLLLLSSCVSAQLRTGFYQNSCPNVETIVRNAVRQKFQQTFVTAPATLRLFFHDCFVRGCDASIMIASPSERDHPDDMSLAGDGFDTVVKAKQAVDSNPNCRNKVSCADILALATREVVVLTGGPSYPVELGRRDGRISTKASVQSQLPQPEFNLNQLNGMFSRHGLSQTDMIALSGAHTIGFAHCGKMSKRIYNFSPTTRIDPSINRGYVVQLKQMCPIGVDVRIAINMDPTSPRTFDNAYFKNLQQGKGLFTSDQILFTDQRSRSTVNSFANSEGAFRQAFITAITKLGRVGVLTGNAGEIRRDCSRVN

SEQ ID NO: 6207 - protein, 186 aa, Arabidopsis thaliana
  unsure (1)..(186): unsure at all Xaa locations
  Clone ID: ARATH-23APR03-C249330_1.p
MAQRTLVATFFLIFFLLTNLVCSKEIIVGGKTSSWKIPSSPSESLNKWAESLRFRVGDTLVWKYDEEKDSVLQVTKDAYINCNTTNPAANYSNGDTKVKLERSGPYFFISGSKSNCVEGEKLHIVVMSSRGGHTGGFFTGSSPSPAPSPALLGAPTVAPASGGSASXLTRQVGVLGFVGLLAIVLL

SEQ ID NO: 6208 - protein, 298 aa, Arabidopsis thaliana
  Clone ID: ARATH-23APR03-C2503_1.p
MAIPVTRMMVPHAIPSLRLSHPNPSRVDFLCRCAPSEIQPLRPELSLSVGIHAIPHPDKVEKGGEDAFFVSSYRGGVMAVADGVSGWAEQDVDPSLFSKELMANASRLVDDQEVRYDPGFLIDKAHTATTSRGSATIILAMLEEVGILKIGNVGDCGLKLLREGQIIFATAPQEHYFDCPYQLSSEGSAQTYLDASFSIVEVQKGDVIVMGSDGLFDNVFDHEIVSIVTKHTDVAESSRLLAEVASSHSRDTEFESPYALEARAKGFDVPLWKKVLGKKLTGGKLDDVTVIVAKVVSS

SEQ ID NO: 6209 - protein, 221 aa, Arabidopsis thaliana
  Clone ID: ARATH-23APR03-C2508_1.p
MFLSQFRSCKPLLESRLPLLRLSLSKCLDQSFKTTASSEYGSKINKVTKHVNEEDGATFYVTRRGAIDSSAPAESKAYPKAANISSIHSMRESLLEETEEDYYRRLALFALRNHGGEDAINVIIESLGVESSMIRIEAAFVLGQLESKTAIASLSKILRDVKEHPMVRVEAAKALGFIADEKSREVLQELSGDLDPIIAKGCDSSLSILEFKNSKKYDPLI

SEQ ID NO: 6210 - protein, 185 aa, Arabidopsis thaliana
  Clone ID: ARATH-23APR03-C252206_1.p
MAEEIKNVPEQEVPKVATEESSAEVTDRGLFDFLGKKKDETKPEETPIASEFEQKVHISEPEPEVKHESLLEKLHRSDSSSSSSSEEEGSDGEKRKKKKDDRRATTEVEVKEEEKKGFMEKLKEKLPGHKKPEDGSAVAAAPVVVPPPVEEAHPVEKKGILEKIKEKLPGYHPKTTVEEEKKDKE

SEQ ID NO: 6211 - protein, 328 aa, Arabidopsis thaliana
  Clone ID: ARATH-23APR03-C252987_1.p
MAHGGYAKRRDSEPKQTAGSSRRSKVLRVEKKPKTVSIKNQMRSVERFLRKDLPPEVRESLVEKLEDLKKQQDAHARLAVERKIFFRNRKIKFFERRKIERSIRHLEKLQRTSSAHVGDVDIAEQLSKLKEDLEYVRFFPKNEKYVSLFTGAEDSEVIEKRGKMRQQIKANIIVAAASGKELEETGSEDDGLLDLSDDDFFDKGSSSDEADADDELTDKSAKEAASSASGRATSGMSSDERNQKQNSDRALMPPPQARFESNSRKNLYVQRNEMPSSSRNNTSNRRSESSYTRASAANSYSSQSSNLSSNSDAHKPKRKRRPKKKKQQ

SEQ ID NO: 6212 - protein, 231 aa, Arabidopsis thaliana
  Clone ID: ARATH-23APR03-C253601_1.p
MALLDLEGLRELQDCANYLLDHCPEARESLCQQGKENWIEQVSEASLIMLDVCNVSKDVMALVRHGLQDLQLTLRCNGSNLSEKVAAYNRYRNKLKKETLKCLNSLKSIEGGGRGMMEMQSIEQNLLFVAEVLKEVRRAVVTMVESLFSLVCVPWLERKPSIGSFSSIFTMQFCCFDDAWDEVAMRSASTRLEAAEITVEELEIELECIFRRLIQTRVSLLNIITAKISPA

SEQ ID NO: 6213 - protein, 894 aa, Arabidopsis thaliana
  Clone ID: ARATH-23APR03-C25369_1.p
MAATAVVWQPRDDGLAEICSLLEQQISPSSVVDKSQIWKQLQHFSQFPDFNNYLVFILVRAEGKSVEVRQAAGLLLKNNLRGAYPSMTQENQKYIKSELLPCLGAADRNIRTTVGTIISVIVNIEGVSGWHELLPALVTCLDSNDLNHMDGAMDALSKICEDIPHVLDTEVPGLAERPINIFLPRLLQFFQSPHASLRKLALGSVNQYIIIMPAVRQALYNSLDKYLQGLFVLANDPVPEVRKLVCAAFVHLTEVLPSSIEPHLRNVMEYMLQVNRDPDEEVSLEACEFWSAYCDAQLPPENLKEFLPRLIPVLLENMAYADDDESLLDAEEDESQPDRDQDLKPRFHTSRLHGSEDFDDDDDDSFNVWNLRKCSAAAIDVLSNVFGDEILPALMPLIQKNLSASGDEAWKQREAAVLALGAIAEGCMNGLYPHLSEIVAFLLPLLDDKFPLIRSISCWTLSRFGKYLIQESGNPKGYEQFEKVLMGLLRRLLDTNKRVQEAACSAFATVEEDAAEELVPHLGVILQHLMCAFGKYQRRNLRIVYDAIGTLADSVREELNKPAYLEILMPPLVAKWQQLSNSDKDLFPLLECFTSISQALGVGFAPFAQPVFQRCMDIIQLQQLAKVNPASAGAQYDREFIVCSLDLLSGLAEGLGSGIESLVQQSNLRDLLLNCCIDEAADVRQSAFALMGDLARVFPVYLQPRLLDFLEIASQQLSANLNRENLSVANNACWAIGELAVKVRQEVSPIVAKVVSSLGLILQHGEGVNKALVENSAITLGRLAWIRPDLVAPHMDHFMKPWCMALSMVRDDIEKEDAFRGLCAVVKVNPSGGVSSLVFICQAIASWHEIRSEDVQTEVSQVLNGYKHMLGNSWAECLSALDPPVKERLARYQV

SEQ ID NO: 6214 - protein, 463 aa, Arabidopsis thaliana
  unsure (1)..(463): unsure at all Xaa locations
  Clone ID: ARATH-23APR03-C2537_1.p
MEEERRDDYKFLRIQDAFKALHLHVNLIGVIVELGFSNGSDCSCTLKIVDPWYSGSGLPVKFVARTIRDLPRVESIGDIILLSRVKIVLINRKITALCNETTSSSFALFNGKHSVDSIPYQSSPKFLMREQDKNFLSNLREWMITYKFEDGSCCFTSLKDIKEGECSNLSCQIVHISKVYKDRWYLFVWDGTEMPPCNILVKSERLPLCVEPEMLPTYMLRKFPTFGSVLRIIVDRVSEKQAIHCLQPGQHVKLLNLFFQVNMGLWNATFTPSTKMQYTMSREMEAFSPQRFLLTPFLILMCGEKFSPRWNPIARCISRSHSEITGVAHDDAPFVSLMDILTYHNVTAKFRXVVRFIQVYPRDVRKLRDINGNIKLVAILEDATARIHASLYADEGEKFFGCDESDEEALVKKLNRLLGGEEMEKVPRNPPWVQCCLFSFYKHKMDQWESRRFRIFDTWINAS

SEQ ID NO: 6215 - protein, 294 aa, Arabidopsis thaliana
  Clone ID: ARATH-23APR03-C253_1.p
MKSRVRKSKYTVHRKITSTPFDGFPKIVKIIVTDPCATDSSSDEENDNKSVAPRVKRYVDEIRFCDEDDEPKPARKAKKKSPAAAAENGGDLVKSVVKYRGVRQRPWGKFAAEIRDPSSRTRLWLGTFATAEEAAIGYDRAAIRIKGHNAQTNFLTPPPSPTTEVLPETPVIDLETVSGCDSARESQISLCSPTSVLRFSHNDETEYRTEPTEEQNPFFLPDLFRSGDYFWDSEITPDPLFLDEFHQSLLPNINNNNTVCDKDTNLSDSFPLGVIGDFSSWDVDEFFQDHLLDK

SEQ ID NO: 6216 - protein, 238 aa, Arabidopsis thaliana
  Clone ID: ARATH-23APR03-C2549_1.p
MATLKASFLIKTLDSDVTGDFLSDLERRGSGAVHVIMGPMFSGKSTSLLRRIKSEISDGRSVAMLKSSKDTRYAKDSVVTHDGIGFPCWALPDLMSFPEKFGLDAYNKLDVIGIDEAQFFGDLYEFCCKVADDDGKIVIVAGLDGDYLRRSFGAVLDIIPIADSVTKLTARCEVCGHKAFFTLRKNCDTRTELIGGADVYMPVCRKHYITNHIVIKASKKVLEDSDKARAESCVAATI

SEQ ID NO: 6217 - protein, 185 aa, Arabidopsis thaliana
  Clone ID: ARATH-23APR03-C2561_1.p
MPLSLRLAPSPTSFRYSPITSTGAGGFSPVKQHCRIPNSGVATKIGFCSGGGGVLDSGRRIGSCVVRCSLETVNVTVGQVTEVDKDTFWPIVKAAGDKIVVLDMYTQWCGPCKVIAPKYKELSEKYQDMVFLKLDCNQDNKPLAKELGIRVVPTFKILKDNKVVKEVTGAKYEDLLAAIEAARSG

SEQ ID NO: 6218 - protein, 253 aa, Arabidopsis thaliana
  Clone ID: ARATH-23APR03-C2581_1.p
MLNVHSHNNNLSNGDKTPLVLSPMSSLHATVSLPLFSNSNHKKLTCAATLSPPPWKQSRRVISVSFFLSRLLLLPNDAMAGGLMDKLDKYVKRKKLDPLEAYVPPVILAQLQIQDLEGFLNVEKPEFEACRRQLRSGPASSLRVNIRAVAQYASDDGFSKTATDDVDRCLRALEELDSLFLRASRKDSNATVVLMKSQLGTALTALDSLLQTVPSQVLDKGKAMVEVYRSASEEDAGSDDLESSEIKQLQSIL

SEQ ID NO: 6219 - protein, 266 aa, Arabidopsis thaliana
  unsure (1)..(266): unsure at all Xaa locations
  Clone ID: ARATH-23APR03-C2600_5.p
MATSAIQHSSFAGQTALKPSNDLLRKVGASNGGGRVIMRRTVKSTPQSIWYGPDRPKYLGPFSENTPSYLTGEYPGDYGWDTAGLSADPETFAKNRELEVIHSRWAMLGALGCTFPEILSKNGVKFGEAVWFKAGSQIFSEGGLDYLGNPNLIHAQSILAIWACQVVLMGFIEGYRIGGGPLGEGLDPLYPGGAFDPLNLAXDPEAFSELKVKELKNGRLAMFSMFGFFVQAIVTGKGPIENLFDHIADPVANNAWAYATNFVPGK

SEQ ID NO: 6220 - protein, 651 aa, Arabidopsis thaliana
  Clone ID: ARATH-23APR03-C26044_1.p
MTADSTVALVHSVVSNGDVSNGNTSASSKKSREIDRRRRRRKQKKNNKASQAENLSFHITDSERTPNMTADSTVALVHSVVSNGDVSNGNTSASSKKSREIDRRRRRRKQKKNNKASQADVDASDVSAASESKENTDPQPQVCEQIVIEYVPEQAEFEDGFNDEFKEIFEKFNFREPLASEEDGTKDESEEKEDVKKKVNSDSDSDDDEQDNQNKEKGISNKKKKLQRRMKIAELKQVSARPDVVEVWDATSADPKLLVFLKSYRNTVPVPRHWSQKRKYLQGKRGIEKQPFHLPDFIAATGIEKIRQAYIEKEDGKKLKQKQRERMQPKMGKMDIDYQVLHDAFFKYQTKPKLSALGDLYFEGKEFEVKLRETKPGFLSNDLKEALGMPEGAPPPWLINMQRYGPPPSYPHLKIPGLNAPIPIGASFGFHAGGWGKPPVDEYGRPLYGDVFGVQQQDQPNYEEEPIDKSKHWGDLEEEEEEEEEEEEEQEEEMDEEELEDGTESVDTLSSTPTGIETPDAIELRKDQRKEPDRALYQVLEEKGESVAPGTLLGTSHTYVIKTGTQEKTGAKRVDLLRGQKTDRVDVSLQPEELDAMENVLPAKYEEAREEEKLRNKPVDLSDMVVEHVQQNSRKRKMHDKEGKKKKDFKF

SEQ ID NO: 6221 - protein, 81 aa, Arabidopsis thaliana
  unsure (1)..(81): unsure at all Xaa locations
  Clone ID: ARATH-23APR03-C260609_1.p
MASSSKICRLSSKIHSLTQKLSKTNVHISSLPSPIKSSSPSSATSRINQSFRXTGGAKLLFIDVATTQCYSICQIDIKFVC

SEQ ID NO: 6222 - protein, 405 aa, Arabidopsis thaliana
  Clone ID: ARATH-23APR03-C26067_1.p
MPLSLQSPPCATLSASIRKGRWKTLAAGFSVTPLPAVNFSLRRSIPRILASASSSSSPASSSLEAGENNELNAVSAFSEIVPDTVVFDDFERFPPTAATVSSALLLGICGLPDTIFRNAVDMALADSSCAGLETTESRLSCFFNKAIVNVGGDLVKLVPGRVSTEVDARLAYDTNGIIRKVHDLLRLYNEIDVPHDRLLFKIPATWQGIEAARLLESEGIQTHMTFVYSFAQAAAASQAGASVIQIFVGRLRDWARNHSGDTEIESAIKSGEDPGLALVKRSYNYIHKYGYKSKLMAAAVRNKQDLFSLLGVDYVIAPLKVLQSLKDSPAIPDDEKYSFVRKLTPETATHYHFTNKELVKWDQLSLASSMGPASVELLSAGVEGYANQAKRVEELFGKIWPPPNV

SEQ ID NO: 6223 - protein, 322 aa, Arabidopsis thaliana
  Clone ID: ARATH-23APR03-C26080_1.p
MAIGDRKKIIIDTDPGIDDAMAIFVALNSPEVDVIGLTTIFGNVYTTLATRNALHLLEVAGRTDIPVAEGTHKTFLNDTKLRIADFVHGKDGLGNQNFPPPKGKPIEKSGPEFLVEQAKLCPGEITVVALGPLTNLALAVQLDPEFSKNVGQIVLLGGAFAVNGNVNPASEANIFGDPEAADIVFTCGADIIAVGINVTHQVIMTADDKDKLASSKGKLAQYLCKILDVYYDYHLTAYEIKGVYLHDPATILAAFLPSLFTYTEGVARVQTSGITRGLTLLYNNLKRFEEANEWSDKPTVKVAVTVDAPAVVKLIMDRLMES

SEQ ID NO: 6224 - protein, 345 aa, Arabidopsis thaliana
  unsure (1)..(345): unsure at all Xaa locations
  Clone ID: ARATH-23APR03-C26086_1.p
MSIEFQLRKKGENNLRFELRRRDLSSGSQICCYTLAQVWRHEFSXGTSMFTNFTKLCKGLALVLVVGHLVVQFIPATVPYLALIPARTIPFAWNLITSGYFELSVYGVVFSTVSLLFMGKFLEPVWGSTEFLKFIFVVNFLTYLCVFVTAIALYYITRLEVYLYMPFAGFHGVLAGLLVGIKQIIPDQEILLLKIKAKWLPSIMLILSIASSFFTLDSAAYLPTLIFGTYMGWLYLRYLQRRPETKLRGDPSDDFAFSTFFPELLRPVIDPIALIFHRMLCGRSNATSEDHDYSTSGAPLPGSDSAEASRRRERGARALEERLGTERLVPARNKDELQSDGLDNV

SEQ ID NO: 6225 - protein, 954 aa, Arabidopsis thaliana
  Clone ID: ARATH-23APR03-C26105_1.p
SSDLSVPVRSSCLRSSANRLTQHRPFLTSEAICLRKNRFLPHSVDTHKQNSRRLICSVATESVPDKAEDSKMDAPKEIFLKNYTKPDYYFETVDLSFSLGEEKTIVSSKIKVSPRVKGSSAALVLDGHDLKLLSVKVEGKLLKEGDYQLDSRHLTLPSLPAEESFVLEIDTEIYPHKNTSLEGLYKSSGNFCTQCEAEGFRKITFYQDRPDIMAKYTCRVEGDKTLYPVLLSNGNLISQGDIEGGRHYALWEDPFKKPCYLFALVAGQLVSRDDTFTTRSGRQVSLKIWTPAEDLPKTAHAMYSLKAAMKWDEDVFGLEYDLDLFNIVAVPDFNMGAMENKSLNIFNSKLVLASPETATDADYAAILGVIGHEYFHNWTGNRVTCRDWFQLSLKEGLTVFRDQEFSSDMGSRTVKRIADVSKLRIYQFPQDAGPMAHPVRPHSYIKMDNFYTVTVYEKGAEVVRMYKTLLGTQGFRKGIDLYFERHDEQAVTCEDFFAAMRDANNADFANFLQWYSQAGTPVVKVVSSYNADARTFSLKFSQEIPPTPGQPTKEPTFIPVVVGLLDSSGKDITLSSVHHDGTVQTISGSSTILRVTKKEEEFVFSDIPERPVPSLFRGFSAPVRVETDLSNDDLFFLLAHDSDEFNRWEAGQVLARKLMLNLVSDFQQNKPLALNPKFVQGLGSVLSDSSLDKEFIAKAITLPGEGEIMDMMAVADPDAVHAVRKFVRKQLASELKEELLKIVENNRSTEAYVFDHSNMARRALKNTALAYLASLEDPAYMELALNEYKMATNLTDQFAALAALSQNPGKTRDDILADFYNKWQDDYLVVNKWFLLQSTSDIPGNVENVKKLLDHPAFDLRNPNKVYSLIGGFCGSPVNFHAKDGSGYKFLGDIVVQLDKLNPQVASRMVSAFSRWKRYDETRQGLAKAQLEMIMSANGLSENVFEIASKSLAA

SEQ ID NO: 6226 - protein, 344 aa, Arabidopsis thaliana
  Clone ID: ARATH-23APR03-C2624_1.p
MGPKMPNTETENMKILVTGSTGYLGARLCHVLLRRGHSVRALVRRTSDLSDLPPEVELAYGDVTDYRSLTDACSGCDIVFHAAALVEPWLPDPSRFISVNVGGLKNVLEAVKETKTVQKIIYTSSFFALGSTDGSVANENQVHNERFFCTEYERSKAVADKMALNAASEGVPIILLYPGVIFGPGKLTSANMVARMLIERFNGRLPGYIGSGTDRYSFSHVDDVVEGHVAAMEKGRLGERYLLTGENASFKLVFDMAALITGTKKPNFSIPLWAINAYGWLSVLISRVTGKLPLISPPTVTVLRHQWSYSCDKAKLELGYNPRSLKEGLEEMLPWLKSLGVIHY

SEQ ID NO: 6227 - protein, 275 aa, Arabidopsis thaliana
  Clone ID: ARATH-23APR03-C26355_1.p
METTVKNSSSDGEWKVVLPSKGRQGRRRKPKPKGQAEEEEQPWKSDDLEIDPQRQARLKQKMEISLKKIESSSFYTAFLEQLKSPEVSNQIRLVLGSETQLQMVMYGIGSIESYESPRFQLSIAILMKREFDWVGDNIEVFDPVLSATESSYLESLGCSVLSVNEQARREALKPTLFFMPHCEANLYSNLLQANWRMDRLSKIALFGNSFQMYEEQVSFDAEVICATKRIIAAQRVTSEFAIETESDDYFAAFHDSSWHFFSSGIDSELPLFVSD

SEQ ID NO: 6228 - protein, 953 aa, Arabidopsis thaliana
  Clone ID: ARATH-23APR03-C26389_1.p
MSSRTGASLLLILFFFQICSVSALTNGLDASALNALKSEWTTPPDGWEGSDPCGTNWVGITCQNDRVVSISLGNLDLEGKLPADISFLSELRILDLSYNPKLSGPLPPNIGNLGKLRNLILVGCSFSGQIPESIGTLKELIYLSLNLNKFSGTIPPSIGLLSKLYWFDIADNQIEGELPVSNGTSAPGLDMLLQTKHFHFGKNKLSGNIPKELFSSNMSLIHVLFDGNQFTGEIPETLSLVKTLTVLRLDRNKLIGDIPSYLNNLTNLNELYLANNRFTGTLPNLTSLTSLYTLDVSNNTLDFSPIPSWISSLPSLSTLRMEGIQLNGPIPISFFSPPQLQTVILKRNSIVESLDFGTDVSSQLEFVDLQYNEITDYKPSANKVLQVILANNPVCLEAGNGPSYCSAIQHNTSFSTLPTNCSPCEPGMEASPTCRCAYPFMGTLYFRSPSFSGLFNSTNFSILQKAIADFFKKFNYPVDSVGVRNIRENPTDHQLLIDLLVFPLGRESFNQTGMSLVGFAFSNQTYKPPPIFGPYIFKADLYKQFSDVEVSSKSSNKSILIGAVVGVVVLLLLLTIAGIYALRQKKRAERATGQNNPFAKWDTSKSSIDAPQLMGAKAFTFEELKKCTDNFSEANDVGGGGYGKVYRGILPNGQLIAIKRAQQGSLQGGLEFKTEIELLSRVHHKNVVRLLGFCFDRNEQMLVYEYISNGSLKDSLSGKSGIRLDWTRRLKIALGSGKGLAYLHELADPPIIHRDIKSNNILLDENLTAKVADFGLSKLVGDPEKTHVTTQVKGTMGYLDPEYYMTNQLTEKSDVYGFGVVLLELLTGRSPIERGKYVVREVKTKMNKSRSLYDLQELLDTTIIASSGNLKGFEKYVDLALRCVEEEGVNRPSMGEVVKEIENIMQLAGLNPNSDSATSSRTYEDAIKGSGDPYGSESFQYSGNFPASKLEPQ

SEQ ID NO: 6229 - protein, 384 aa, Arabidopsis thaliana
  Clone ID: ARATH-23APR03-C26399_1.p
MLTCIARSKRAGDESSGQPDDPDSKNAKSLTSQLKDMALKASGAYRHCTPCTAAQGQGQGQGPIKNNPSSSSVKSDFESDQRFKMLYGRSNSSITATAAVAATQQQQPRVWGKEMEARLKGISSGEATPKSASGRNRVDPIVFVEEKEPKEWVAQVEPGVLITFVSLPGGGNDLKRIRFSRDMFNKLQAQRWWADNYDKVMELYNVQKLSRQAFPLPTPPRSEDENAKVEYHPEDTPATPPLNKERLPRTIHRPPGLAAYSSSDSLDHNSMQSQQFYDSGLLNSTPKVSSISVAKTETSSIDASIRSSSSRDADRSEEMSVSNASDVDNEWVEQDEPGVYITIKVLPGGKRELRRVRFSRERFGEMHARLWWEENRARIHEQYL

SEQ ID NO: 6230 - protein, 389 aa, Arabidopsis thaliana
  Clone ID: ARATH-23APR03-C26430_1.p
MPALRLNVDICGHVAIIAVSMKILVQSQTKADNSSLAGNQFLRLHRLFLSLNFLWHFEFIEVRMAAKALKDLKNLPVSERNIDYKTKLLVGKMNGKAEDKPPQNSVPFDHNHPKGDEIEKPEAERVIVEIEYIESKDLNNVTQVDAVLKSLVTELDSKDWVLVCDALNTIRRLSIFHKEEMLHMLEKVILFIVKSLKNPRSAVSKTACMTSADIFSSYNDHTIDQLDLLLTQLLLKSSQDKRFVCEAAEKALVAMTAHVSPALLLPKLQPFLKNRNPRIRAKASTCFSRCVPRLGIEGIREYGIEKLVQAASSQLSDQLPESREAARAVLLELQTVYKKTTNVEPKEEHPEPVTWQIFCQSNLSPLSAQAVIRVTNVAGVAREGLVAGS

SEQ ID NO: 6231 - protein, 308 aa, Arabidopsis thaliana
  Clone ID: ARATH-23APR03-C26435_1.p
MEKIAPELFLVAGNPDSFVVDDLLDFSNDDGEVDDGLNTLPDSSTLSTGTLTDSSNSSSLFTDGTGFSDLYIPNDDIAELEWLSNFVEESFAGEDQDKLHLFSGLKNPQTTGSTLTHLIKPEPELDHQFIDIDESNVAVPAKARSKRSRSAASTWASRLLSLADSDETNPKKKQRRVKEQDFAGDMDVDCGESGGGRRCLHCATEKTPQWRTGPMGPKTLCNACGVRYKSGRLVPEYRPASSPTFVMARHSNSHRKVMELRRQKEMRDEHLLSQLRCENLLMDIRSNGEDFLMHNNTNHVAPDFRHLI

SEQ ID NO: 6232 - protein, 287 aa, Arabidopsis thaliana
  Clone ID: ARATH-23APR03-C26438_1.p
MLSCSSSAFQRVAFMLMAPKLKPQRLHQIAESGVEHLVKKARTMSTESSMKDAFSTYADYLNNFNEKRERVVKVSRDITMNSKKVIFQVHRLSKDNKEEVLEKAGKDLEAVRDQHFARLMKELQGTDFWKLRRAYSPGVQEYVEAATFYKFCLSGTLCTLDEINTTLVPLSDPSLEPLQINILDYILGLADLTGELMRMAIGRISDGEIEFAQRICQFVRQIHRELMLVVPKMDDSYDMKSKMEVMLQSVIKIENACFSVHVRGLEYIPLLGDNAPTSYLLGAADVE

SEQ ID NO: 6233 - protein, 147 aa, Arabidopsis thaliana
  Clone ID: ARATH-23APR03-C26466_1.p
GRVKTTEGGTKDVLVEEDWSELRKPSVVASEDFWTNTTLDMESNAHGSVSSISTTNLTIDSQGCGSSSNEPAEFVNHGLVLWNQTRQQWVGDKRSESRKSVGREPILNENVTYESLLGSNKRFPRPIPLDEMVQFLVEVWEEEGLYG

SEQ ID NO: 6234 - protein, 364 aa, Arabidopsis thaliana
  Clone ID: ARATH-23APR03-C26565_1.p
MDETTREMFSPHNLPLEMMEEILLRLPVKSLTRFKCVCSSWRSLISETLFALKHALILETSKATTSTKSPYGVITTSRYHLKSCCIHSLYNASTVYVSEHDGELLGRDYYQVVGTCHGLVCFHVDYDKSLYLWNPTIKLQQRLSSSDLETSDDECVVTYGFGYDESEDDYKVVALLQQRHQVKIETKIYSTRQKLWRSNTSFPSGVVVADKSRSGIYINGTLNWAATSSSSSWTIISYDMSRDEFKELPGPVCCGRGCFTMTLGDLRGCLSMVCYCKGANADVWVMKEFGEVYSWSKLLSIPGLTDFVRPLWISDGLVVLLEFRSGLALYNCSNGRFHYPVSNSISGCRDAKVYLKTMVSPNDL

SEQ ID NO: 6235 - protein, 212 aa, Arabidopsis thaliana
  Clone ID: ARATH-23APR03-C26576_1.p
PWSGLNLSHPKPKATQTHTPKKKKKAFTFNSSMAMLKNKHMTVSLILVCLVVVSPMAEAQLGLGGSGGLGGLIGGLVGGLGGLVGGLVGGILNLVNINGVVFCSLNGAPSGTSTPAFANAGVELQCGRQNRVVSTATTNAAGLFSLPTDSIQMLLSTLLSDCRVVVTTPLSTCNANLPSVGNLVSRLAMIGNSLTGLLNIISIIPAGFGLLN

SEQ ID NO: 6236 - protein, 402 aa, Arabidopsis thaliana
  Clone ID: ARATH-23APR03-C26593_1.p
MDRPRQNDHLGVNRIGKNIRKSPLHQSTFAASTSNGAAPRLQTQPQVYNISKNDFRSIVHQLTGSPSRESLPRPPQNNSLRPQNTRLQRIRPSPLTQLNRPAVPLPSMAPPQSHPQFARQPPHQPPFPQTTQQPMMGHRDQFWSNTAESPVSEYMRYLQSSLGDSGPNANQMQPGHEQRPYIPGHEQRPYVPGNEQQPYMPGNEQRPYIPGHEQRSYMPAQSQSQSQPQPQPQPQQHMMPGPQPRMNMQGPLQPNQYLPPPGLVPSPVPHNLPSPRFNAPVPVTPTQPSPMFSQMYGGFPSPRYNGFGPLQSPTSQFLQPSPTGYPNMFSPRSPYPLLSPGVQYPQPLTPNFSFSQIAQQGSLGPGAGPSQGPPQPPPSPGLMFPLSPSGFFPMPSPRWNDY

SEQ ID NO: 6237 - protein, 307 aa, Arabidopsis thaliana
  Clone ID: ARATH-23APR03-C2660_1.p
MNAYSVSLDFTKPSLFTRITLSSQIPLTMATTVNKTVRVAAAQMTSVNDLMTNFATCSRLVQEAALAGAKLICFPENFSFVGDKEGESVKIAEPLDGPVMERYCSLARDSNIWLSLGGFQERFDDTHLCNTHVVIDDAGMIRDTYQKMHLFDVDVPGGSSYKESSFTVPGTKIVSVDSPVGRLGLTVCYDLRFPKIYQQLRFEQKAQVLLVPSAFTKVTGEAHWEILLRARAIETQCYVIAAAQAGKHNEKRESYGDTLIIDPWGTVVGRLPDRVSTGIVVADIDFSLIDSVRTKMPIDKQRVSIDL

SEQ ID NO: 6238 - protein, 406 aa, Arabidopsis thaliana
  Clone ID: ARATH-23APR03-C26631_1.p
MGPIKTIKKKKRAEKKVDRNVLLAATAAATSASAAAALNNNDDDDDSSSQSLDWWDGFSRRIYGGSTDPKTFESVFKISRKTFDYICSLVKADFTAKPANFSDSNGNPLSLNDRVAVALRRLGSGESLSVIGETFGMNQSTVSQITWRFVESMEERAIHHLSWPSKLDEIKSKFEKISGLPNCCGAIDITHIVMNLPAVEPSNKVWLDGEKNFSMTLQAVVDPDMRFLDVIAGWPGSLNDDVVLKNSGFYKLVEKGKRLNGEKLPLSERTELREYIVGDSGFPLLPWLLTPYQGKPTSLPQTEFNKRHSEATKAAQMALSKLKDRWRIINGVMWMPDRNRLPRIIFVCCLLHNIIIDMEDQTLDDQPLSQQHDMNYRQRSCKLADEASSVLRDELSDQLCGKNSSA

SEQ ID NO: 6239 - protein, 287 aa, Arabidopsis thaliana
  Clone ID: ARATH-23APR03-C26668_1.p
MAYHQPYDPFYVYQLHSHPHHLPPQLPLLADEPGAINTLFVSGLPNDVKAREIHNLFRRRHGFESCQLKYTGRGDQVVAFATFTSHRFALAAMNELNGVKFDPQTGSNLHIELARSNSRRKERPGSGPYVVIDNRNKEISKSQDDQSDEGDSDPDEVQEPGNSDSPKENDTTKSEADSEPDSKAPSANGHLEKASEGGSGARACSTLFIANLGPNCTEDELKQLLSRYPGFHILKIRARGGMPVAFADFEEIEQATDAMNHLQGNLLSSSDRGGMHIEYARSKMRKQ

SEQ ID NO: 6240 - protein, 502 aa, Arabidopsis thaliana
  Clone ID: ARATH-23APR03-C26795_1.p
MKNQSRVLNSELGDFDLSVLWDQILNFEGYGSYCFRPMDMDGYHKRSAGLNPCKHSGFSHSSRPMAPGIYRYPEVKSSLRRQVHAPVRILNSGRDRSTRQGSGNVLGTFLTRNNDMWKRNALDSSLRYRTDREVIDVDDELGDVEMISDDTSREGVENVAMEVDEVEEKAEMGNGLFSEVASLKNGSLRVGECSKANSSSLVVNRPVTDVTSFEAYRKVLESAVNRTSKLKDRGFVDFFKERGRALLRSLSSFWRQDEEPVEVVQREAFVPLSREEETAVRRAFSANDSNILVTHKNSNIDITGKILRCLKPGKWLNDEVINLYMVLLKEREAREPKKFLKCHFFNTFFFTKLVNSATGYNYGAVRRWTSMKRLGYHLKDCDKIFIPIHMNIHWTLAVINIKDQKFQYLDSFKGREPKILDALARYFVDEVRDKSEVDLDVSRWRQEFVQDLPMQRNGFDCGMFMVKYIDFYSRGLDLCFTQEQMPYFRARTAKEILQLKAE

SEQ ID NO: 6241 - protein, 287 aa, Arabidopsis thaliana
  Clone ID: ARATH-23APR03-C2681_1.p
MGNQKLKWTAEEEEALLAGIRKHGPGKWKNILRDPEFADQLIHRSNIDLKDKWRNLSVPPGTQSLTNKARPAKVKEEGDTPAADANDAVTIPRPIPTIPPPPGRRTLPSELIPDENTKNAPRYDGVIFEALSALADGNGSDVSSIYHFIEPRHEVPPNFRRILSTRLRRLAAQSKLEKVSTFKSIQNFYKIPDPSGTKIGVPKPKETHTKLRQANNQTSADSQQMIEEAAITAACKVVEAENKIDVAKLAAEEFEKMTKIAEENRKLLVIATEMHELCSCGETMLLA

SEQ ID NO: 6242 - protein, 145 aa, Arabidopsis thaliana
  Clone ID: ARATH-23APR03-C26858_1.p
SHVRFYFHDIVSGVKPTSVVVATSPTTNSSATAFGMVAVVDDILTVGPEITSEEVGRAQGIFASADQNNFGLLMAFNFVFTKGEFSGSTVSMYGRNPIFSKVREMPIIGGTGAFRFGRGYAQAKTFTFNTTSGNAVVKYNVYIWH

SEQ ID NO: 6243 - protein, 486 aa, Arabidopsis thaliana
  unsure (1)..(486): unsure at all Xaa locations
  Clone ID: ARATH-23APR03-C268597_1.p
MDSAEKGLLVVSDREEVNKKDGFLWETKKLSYIAGPMIAVNSSMYVLQVISIMMAGHLGELFLSSTAIAVSFCSVTGFSVVFGLASALETLCGQANGAKQYEKLGVQTYTGIVSLFLVCIPLSVLWSYIGDILSLIGQDAMVAQEAGKFATWLIPALFGYATLQPLVRFFQAQSLILPLVMSSVSSLCVHIVLCWSLVFKFGLGSLGAAIAIGVSYWLNVTVLGLYMTFSSSCRKSRAPISMSLFEGMGEFFRFGIPSASMICLEWWSFEFLVLLSGIXLPKKTTEGSVLSVCLSTQSSLYQIPESLGAAASTRVANELGAGNPKQARMAVYTAMVITGVESIMVGAIVFGARNVFGYLFSSETEVVDYVKSMAPLLSLSVIFDALHAALSGVARGSGRQDIGAYVNLAAYYLFGIPTAILLAFGFKMRGRGLWIGITVGSCVQAVLLGLIVILTNWKKQARKARERVMGDEYEEKESEEEHEYIS

SEQ ID NO: 6244 - protein, 307 aa, Arabidopsis thaliana
  unsure (1)..(307): unsure at all Xaa locations
  Clone ID: ARATH-23APR03-C26882_1.p
TTCHLFLSTCPIRHRLASTTSFGRKPPYIAXLSHSFRLLISPSKTNLGRENWSEGAIDMASASSSDGVAGRIQNASLVLVSDNSSTLADIRKAVAMMKNIAVQLEKENQTDKVKDLENSVAELLDLHSDCNHRSTAIQSVANRYQPVEQLTDFKKLLDDEFTKLKATPSSVPQNDHLMRQFREAVWNVHHAGEPMPGDDDEDIVMTSTQCPLLNMTCPLSGKPVTELADPVRSMDCRHVYEKSVILHYIVNNPNANCPVAGCRGKLQNSKVICDAMLKFEIEEMRSLNKQSNRAEVIEDFTEDVDED

SEQ ID NO: 6245 - protein, 293 aa, Arabidopsis thaliana
  unsure (1)..(293): unsure at all Xaa locations
  Clone ID: ARATH-23APR03-C26906_1.p
MATNIGMMDSAYFVGRNEILSWINDRLHLNLSRIEEAASGAVQCQMLDMTFPGVVPMHKVNFEAKNEYEMIQNYKVMQEVFTKLKITKPLEVNRLVKGRPLDNLEFLQWLKRFCDSINGGIMNENYNPVERRSRGGREKSVKGSSKISKSLQTNNMHHPPVATSNKPAGPKQAKSHGIGGGXNSSAEVQALSKEVEDLKVSVDLLEKERDFYFSKLRDIEILCQTPELDDLPIVVAVKKILYATDANESVLEEAQECLNQSLGLEGYEEEGKEEEEEEEEEEEEAAAAAETQT

SEQ ID NO: 6246 - protein, 320 aa, Arabidopsis thaliana
  unsure (1)..(320): unsure at all Xaa locations
  Clone ID: ARATH-23APR03-C26939_1.p
MDIVLVVIKSGENGAERVTREAPTGTRILLASLSAMVAESVTFPIDLTKTRMQLHGSGSASGAHRIGAFGVVSEIARKEGVIGLYKGLSPAIIRHLFYTPIRIIGYENLKGLIVRSETNNSESLPLATKALVGGFSGVIAQKCXVVASPADLVKVRMQADGRLVSQGLKPRYSGPIEAFTKILQSEGVKGLWKGVLPNIQRAFLVNMGELACYDHAKHFVIDKKIAEDNIFAHTLASIMSGLASTSLSCPADVVKTRMMNQGENAVYRNSYDCLVKTVKFEGIRALWKGFFPTWARLGPWQFVFWVSYEKFRLLAGISSF

SEQ ID NO: 6247 - protein, 328 aa, Arabidopsis thaliana
  Clone ID: ARATH-23APR03-C26945_1.p
NGRRATTVNVKLSRSNRIYRSSEPVEGKIVIKSAASISHQAIRLSVNGSVNLQVRGGSAGVIESFYGVIKPIQIVKKTIEVKSSGKIPPGTTEIPFSLNLREPGEGIVEKFYETFHGTNINIQYLLTADIPRGYLHKPLSATMEFIIESGRVDLPERPIPPGIVIFYITQHTQRHPLLPDIKTGGFRVTGKLATQCSLQDPLSGELTVEASSVPITSIDIHLLRVESIIVGERIVTETSLIQSTQIADGDVCRNMTLPIYVLLPRLLMCPSVFAGPFSVEFKVCITISFKSKLAKAQPKSDPTAPRLWMALERLPLELVRTKRDQFSC

SEQ ID NO: 6248 - protein, 410 aa, Arabidopsis thaliana
  Clone ID: ARATH-23APR03-C26948_1.p
MASVAASSSISFAASFLKIKAFPLSPRFFPIRTLRCSVSSSSSEPIEFDISFAPPKPKPSSTHGGVTPQQLFIPWIVRSDDGTLKLQSQPPARLIHNLAIDATTQNPKKKDKSKKKQPQATSSSSATTTASSPASHSEVKPKLSKAARRFYNENFKEQPQRLSKVLAAAGVASRRTSEELIFDGKVTVNGILCNTPQTRVDPSRDIIYVNGNRIPKKLPPKVYFALNKPKGYICSSGEKEIKSAISLFDEYLSSWDKRNPGTPKPRLFTVGRLDVATTGLIVVTNDGDFAQKLSHPSSSLPKEYITTVVGDIHKRHLMAISEGTMVEGVHCVPDSVELMPKQHDIPRARLRIVVHEGRNHEVRELVKNAGLEVHSLKRVRIGGFRLPSDLGLGKHVELKQSELKALGWKN

SEQ ID NO: 6249 - protein, 375 aa, Arabidopsis thaliana
  Clone ID: ARATH-23APR03-C269647_1.p
MKLSFSLPPKSKSRVSLNSDRKDCIGAGNLKQFVTEFDPSETLTDSKPKYVIPPIEDRRRSYRNIDLPLPSASGLQFEAEIPSGDGSDNNITYGLNLRQKVENVEKPEPVEKMLLKSMRTDLESLPDAPEQEDFESFPVDGFGEALLAGYGWKPGQGIGLKAKEDVKIVEYEKWSGNEGFGFGKSDKAMKMIDNKLVGSGSHEEVKVGINKIENMEKDRVVRKRNRETEGESRTEVKACKQNYRGQTRETREKTSWLRSHIKVRIISKDVKGGRLYLKKAVVTDVVGPTSCDIAMDETQELVQGIDQELLETALPRRGGSVLVLSGRHKGVYGRLLEKDLDKETGVVCDADSQEMLHVKLDQVAEYIGDPADIGY

SEQ ID NO: 6250 - protein, 294 aa, Arabidopsis thaliana
  Clone ID: ARATH-23APR03-C26965_1.p
MFRRRNAHQLDNDDSQQDNKVRELKSAIGPLSGHSLVFCSDASLRRFLDARNWDVEKAKKMIQETLKWRSTYKPQEIRWNQVAHEGETGKASRASFHDRQGRVVLIMRPAMQNSTSQEGNIRHLVYLLENAIINLPKGQKQMSWLIDFTGWSMAVNPPMKTTREIIHILQNYYPERLGIAFLYNPPRLFQAVYRAAKYFLDPRTAEKVKFVYPKDKASDELMTTHFDVENLPKEFGGEATLEYDHEDFSRQMYEDDLKTAKYWGLEGKHYPKTNGFSPSDVVPEPAIEIASAAS

SEQ ID NO: 6251 - protein, 391 aa, Arabidopsis thaliana
  unsure (1)..(391): unsure at all Xaa locations
  Clone ID: ARATH-23APR03-C269757_1.p
MAPRVIFLLLSLVFLXLANTSHSLRKFQSFLHPIYKDTAKNIYTIPLSIGSTSSEKFVLDLNGAAPLLQNCPTAAKSTTYHPIRCGSTRCKYANPNFPCPNNVIAKKRTVCLSSDNSRLFRDTVPLLYTFNGVYTRDSEMSSSLTLTCTDGAPALKQRTIGLANTHLSIPSQLISMYQLPHKIALCLPSTERSQSHNGDLWIGKGEYYYLPYDKDVSKIFASTPLIGNGKSGEYLIDVKSIQIGAKTVPIPYGATKISTLAPYTVFQTSLYKALLTAFTENIKIAKAPAVKPFGACFYSNGGRGVPVIDLVLSGGAKWRIYGSNSLVKVNKNVVCLGFVDGGVKPKYPIVIGGFQMEDNLVEFDLEASKFSFSSSLLLHNTSCSVQRLSPF

SEQ ID NO: 6252 - protein, 362 aa, Arabidopsis thaliana
  unsure (1)..(362): unsure at all Xaa locations
  Clone ID: ARATH-23APR03-C269852_1.p
MATVTDLPDDLVREIFSRVPLTSLRAVRSTCKKWNAISKYDILGKKAAAKNQFLEFMVTDSRVCSLRLDLQGIRSEEDLIDLSIKQISIPNKVDQVEISQVYHCDGLLLXIAKDNSSVMVWNPYLGQTKLIQPRKKLHRYDKFALGYDNNRNHKILRFLYEGSPRNVIIDVYDFSSDSWRVLDIDIDWHELFSHNSVSLKGNTYFFGRKGPRLPMLFKPPSRRFEYLTLSCVRNEKLAVLYSHLNRFGTIEICISTKIDPSAVSWTTFLRIDMTLINGLPDNFFVHSYATSFFFDEEKKVAVLFGTNRYRGRETCQYYQRACIVGDSGYFKAVNIELVFNSQLQSCQLVSSSYVPSLVQLQD

SEQ ID NO: 6253 - protein, 556 aa, Arabidopsis thaliana
  Clone ID: ARATH-23APR03-C2698_1.p
MKMEGTIKSPANYVPLTPISFLDRSAVVYADRVSIVYGSVKYTWRQTRDRCVRIASALSQLGISTGDVVSVLAPNVPAMVELHFGVPMAGALLCTLNIRHDSSLVAVLLRHSGTKVIFADHQFLQIAEGACEILSNKGDKVPILVLIPEPLTQSVSRKKRSEEMMEYEDVVAMGKSDFEVIRPTDECDAISVNYTSGTTSSPKGVVYSHRGAYLNSLAAVLLNEMHSSPTYLWTNPMFHCNGWCLLWGVTAIGGTNICLRNVTAKAIFDNISQHKVTHMGGAPTILNMIINAPESEQKPLPGKVSFITGAAPPPAHVIFKMEELGFSMFHSYGLTETYGPGTICTWKPEWDSLPREEQAKMKARQGVNHLGLEEIQVKDPVTMRTLPADGVTMGEVVFRGNTVMNGYLKNPEATKEAFKGGWFWSGDLGVKHPDGYIELKDRSKDIIISGGENISSIEVESTLFTHPCVLEAAVVARPDEYWGETACAFVKLKDGSKASAEELISYCRDRLPHYMAPRSIVFEDLPKTSTGKVQKFVLRTKAKALVSLSKKGRSKL

SEQ ID NO: 6254 - protein, 167 aa, Arabidopsis thaliana
  Clone ID: ARATH-23APR03-C26993_1.p
MELSQSDPTRDPDTRYDQRCCCFPSFRRSRSSTAVGYSSWGRIRTVDDSNHSGDHGDEPRWWIRASLKIREWSEIVAGPRWKTFIRRFNRDPRRGRDWDASEKFQYDPLSYSLNFDDDDEEDEYVGLGGLRSFSTRFASVPVYSGKAPAISPTSLSALTPRNEIIES

SEQ ID NO: 6255 - protein, 270 aa, Arabidopsis thaliana
  Clone ID: ARATH-23APR03-C27003_1.p
MQLVPSDDDDDRKEQILFDESTSSNEIVAAERGDRVVEEGQVSEIAETDDDETTLLVSGDQPQCRTCLDVGGEDLIAPCNCKGSRICLDVGGEDLIAPCNCKGTQKHVHRSCLDNWRSTKEGFAFSHCTECRAFFKLRANVPADRWWLRLRFQLLVARDHAFIFISVQMIVAFLGLLVYKFYGEELREMFGYEEHPYGFYTLAVLAIVLVGLLYGFFIAIICGQKINERHYHVLAKQELTKEYIVEDRDCKNVPELDQSHVMELKMLGLY

SEQ ID NO: 6256 - protein, 368 aa, Arabidopsis thaliana
  Clone ID: ARATH-23APR03-C27049_1.p
MASVKLPWDLEEEILSRLPPRSLVRFRTVCKHWNGLFSDKRFVKKHLVRARPQFIFLTESKKMYSIEIDLGGTIEVREVPYDFHCQPMKKNFTTIMACDGLLFRDFWKQGVAVWNPWLRQVGWIEYEDKGFRFCGVGYDSCKPDKCYKILGYFNCTRRLSDSLQEGYYQAAIYECASQAFKFIDTPNPFNLWPNKDPLSVNGNLYWLAHNHPETLEYFIETFDFSMEIFKPFCLLPCRKDFGSNELVLAVFKEDRFSLLKQCFETTKIEIWVTKMKIDREEEVVWIKFMTLPTTNLPNLDDTYCRSSYFIFDKTIIMCCGDYKTGATCIYMVRGDMFKKIQINSGIFQFSYCVYLPNLISVPFESHQV

SEQ ID NO: 6257 - protein, 622 aa, Arabidopsis thaliana
  Clone ID: ARATH-23APR03-C2706_1.p
MITAADFYHVMTAMVPLYVAMILAYGSVKWWKIFTPDQCSGINRFVALFAVPLLSFHFIAANNPYAMNLRFLAADSLQKVIVLSLLFLWCKLSRNGSLDWTITLFSLSTLPNTLVMGIPLLKGMYGNFSGDLMVQIVVLQCIIWYTLMLFLFEYRGAKLLISEQFPDTAGSIVSIHVDSDIMSLDGRQPLETEAEIKEDGKLHVTVRRSNASRSDIYSRRSQGLSATPRPSNLTNAEIYSLQSSRNPTPRGSSFNHTDFYSMMASGGGRNSNFGPGEAVFGSKGPTPRPSNYEEDGGPAKPTAAGTAAGAGRFHYQSGGSGGGGGAHYPAPNPGMFSPNTGGGGGTAAKGNAPVVGGKRQDGNGRDLHMFVWSSSASPVSDVFGGGGGNHHADYSTATNDHQKDVKISVPQGNSNDNQYVEREEFSFGNKDDDSKVLATDGGNNISNKTTQAKVMPPTSVMTRLILIMVWRKLIRNPNSYSSLFGITWSLISFKWNIEMPALIAKSISILSDAGLGMAMFSLGLFMALNPRIIACGNRRAAFAAAMRFVVGPAVMLVASYAVGLRGVLLHVAIIQAALPQGIVPFVFAKEYNVHPDILSTAVIFGMLIALPITLLYYILLGL

SEQ ID NO: 6258 - protein, 527 aa, Arabidopsis thaliana
  Clone ID: ARATH-23APR03-C27079_1.p
MASISTTTWLYRGQVCTDSGKSSNCIVQRRVKCGFPLKTLHAGITSRDRSLRHCIKCKKEDGDGDVSEGSKKSEEGFEYVTVERHPYHSYMDSTSGKLEPASGARASIPGEDYWPEGTSSRVRAARAPQPAGESSSFPSYGKNPGSRRKKNRKATEENVTVETNDEVSDSEDSSEEEENDSSDGFVTYKNEFEREEEETGFELDKKLGRPHPFIDPTKKKQIEKTLTSDESWWNWRKPEKEQWSRWQRRRPDVETVFLKAMAETGQVKLYGEEPTLTETSLYRARRHLFKEERLQAERERLAKEGPMAFYSEWVKAWKRDTSREAVQKHFEETGEDENTQLIEMFSHQTDREYRIMMGTDIRIKRDPLAMRMREDQIKQIWGGDPVYPTINYIQDPNAVMDFRGPDFHEPTPNMLSYLKENGKVISREMHEALLTKEKTEQLEVPDMDDAMAQAVDIGENDDDEDDADVEKDDEKVPRNWSVLKETPELRTAKPKPKKEGRMSLDEAVDDAENLTDFLMDFEEETDP

SEQ ID NO: 6259 - protein, 673 aa, Arabidopsis thaliana
  Clone ID: ARATH-23APR03-C27096_1.p
MSMEATELQDLSDDADYAASQQQGSASMMRSDSGKRSLQSEHEDAVLIYLKDNVAIHPTQFASERISGRLKLTKQDSVLFLSWIPYKGQTSNAKLSEKDRSLYTITAVPFTEVRSIRRHTPALGWQYVIVVLSSGLAFPPLYFYNGGVREFLAMVKQHVFLARSSEDQNVFIVNDFQSPLQRTLSSLELPSSLPVASGQSVYPLDGGSSSENQRRTSSDVGNRVSSVSQSGFRKQKSHDPTRDLSIHLLEKFSLVTKFARDTTTQLFSENNGFGSIDKRWNNQPVHSYPEKLSNIAEEKHHEIRHSYSENDLLKDDEISYIDVPADPLEFDKLSLMWGKPRQPPMGHKEFTALLDSEGRVVESKALRERVFYGGIEHQLRREVWPFLLGYYAYDSTYAEREYLRSVKRMEYATLKQQWQSISPEQAKRFTKYRERKGLIDKDVVRTDRAFEYYEGDDNLHVNSMRDILLTYSFYNFDLGYCQGMSDYLSPILFVMEDESESFWCFVALMERLGPNFNRDQNGMHTQLFALSKLVELLDSPLHNYFKENDCLNYFFCFRWILIQFKREFEYEKTMQLWEVMWTHYLSEHFHLYVCVAVLKRCRSKIMGEQMDFDTLLKFINELSGHIDLDSTVRDAEALCIEAGENGAASIPPGTPPSLPLDDGTLYPQEDDVL

SEQ ID NO: 6260 - protein, 453 aa, Arabidopsis thaliana
  unsure (1)..(453): unsure at all Xaa locations
  Clone ID: ARATH-23APR03-C27106_1.p
MFPLIFFLCSFLSLFLLPPSNIAAVSNHNKYLKLPLLRKSPFPSPTQALALDTRRLHFLSLRRKPIPFVKSPVVSGAASGSGQYFVDLRIGQPPQSLLLIADTGSDLVWVKCSACRNCSHHSPATVFFPRHSSTFSPGHCYDPVCRLVPKPDRAPIWNHTPGSIPRRXNADGGAAGAGTTGTPGGEAGTEETGGGGGARKARGGKGSGRGLTGQRVWGTSFNGANGVMGLGRGPISFASQLGRRFGNKFSYCLMDYTLSPPPTSYLIIGNGGDGISKLFFTPLLTNPLSPTFYYVKLKSVFVNGAKLRIDPSIWEIDDSGNGGTVVDSGTTLAFLAEPAYRSVIAAVRRRVKLPIADALTPGFDLCVNVSGVTKPEKILPRLKFEFSGGAVFVPPPRNYFIETEEQIQCLAIQSVDPKVGFSVIGNLMQQGFLFEFDRDRSRLGFSRRGCALP

SEQ ID NO: 6261 - protein, 846 aa, Arabidopsis thaliana
  unsure (1)..(846): unsure at all Xaa locations
  Clone ID: ARATH-23APR03-C271256_1.p
MECDNVDDFIDKKSDEQVKKDLVLACKRFPSIILGDSRPVELYSNSKSYGESSSILKTPTDNSFLPTPMHGGWFDPDNLSRTLSSFCPELLQNDDSSDPREDILDDGSSFTSKTATSEVEATSDDVFAAQRFLATSIDSMPGLSKRHXNQLDSCGFHTMKKLLHHFPRTYAXDLQNAQVDFEDGQYLIFGGKVLSSKGVXPSSSFSFLEVMVSGELSGSHRTPVDLSHNAVDNSGKSIFLRLNKLVRGTRFTWQPFLNSIQEKHKVGDLVCISGKVKSLRAEDHFEMREYNIDVLKDEEESSHRAQGRPYPIYPSKGGLNPKFLSDVISRALRVLPANMDPIPKEITKVFGLPSLNDAYVGIHEPKTLDEADLARKRLIFDEFFYLQLARLYQMLQSLGTKIEKDVLLEKFRKPVLNSVYIEEWSTLTKSFLKALPYSLTPSQLSAVSEIIWDLKRPVPMNRLLQGDVGCGKTVVAFLACMEVIGSGYQAAFMAPTELLAIQHYEQCRDLLENMEGDLQSGAISFIIGTHSLIAEKIEYSALRIAVVDEQQRFGVIQRGKFNSKLYGTSMISKSGSSDSDDTSKADLSMAPHVLAMSATPIPRSLALALYGDISLTQITGMPLGRIPVETHIFEGNETGIKEVYSMMLEDLKSGGRVYVVYPVIDQSEQLPQLRAASAELEIVTKKFPKYNCGLLHGRMKSDDKEEALNKFRSGETQILLSTQVIEIGVDVPDASMMVVMNAERFGIAQLHQLRGRVGRGTRKSKCLLVGSSTNSLKRLNMLGKSSDGFYLANIDLLLRGPGDLLGKKQSGHLPEFPVARLEIDGNMLQEAHIAALVYIHSPMTLQ

SEQ ID NO: 6262 - protein, 470 aa, Arabidopsis thaliana
  Clone ID: ARATH-23APR03-C271270_1.p
MYMIFFMGFEFQDKYKEKKHKKDKEKREGKEKKSKDRSKDKQKERKEKKDKHKDQKDKEKGKEKGKPLEEKKAELLTNAGHRENRVTDTVQNNSNGESKYVQDLARRIRYDEEATGSQSAQRIDHPNQKNVGITEKAFENSPIEETSHRVDDNKRINNQKNFTAAKSSENAVSRVSFGADHKRAEVMGKPMENRDQVRQTESAEKSHRKENVTKSEKPRDQEGVKKTEAKDKDRNKEKKEEKTESINKTRQEKPKLIRGPKLEEREKDSPDLRNCKLPDVSRTSIKNLHTEGNLGKRKDHMTNGFLYENGTTPHKLQKLSASVPSVENGRTLGAPRTPPMPASEVQGTTCKPQVKEVRINGFAVSGEKRKVCPPSPLAATMKVKVKENGEASAKPPHPDLKYLNQILHVPTRELLPEIDDDQEWLLGQSGIKLKRARTDPPDSGESLQVWNQAFRIESADITALPYVVPF

SEQ ID NO: 6263 - protein, 272 aa, Arabidopsis thaliana
  Clone ID: ARATH-23APR03-C2712_1.p
MAVPPLFFLLTLLSLPSLLISAGASNAYPSIPGTAPIDGGFTDELKPIRREVYGNGKIYDISHRYTPEMPSWDSSEGIGRFLWLAASMKNGSLANNSEMKIPTHTGTHVDSPGHVYDKYYDAGFDVDSLDLQVLNGLALLVDVPKDKNITAEVMKSLHIPKGVSRVLFRTLNTDRRLMFKKEFDTSYVGFMKDGAQWLVDNTDIKLVGIDYLSVAAYDDLIPSHLVFLKDRETILVEGLKLDGVKAGLYSVHCLPLRLVGAEGSPIRCILID

SEQ ID NO: 6264 - protein, 627 aa, Arabidopsis thaliana
  unsure (1)..(627): unsure at all Xaa locations
  Clone ID: ARATH-23APR03-C271334_1.p
MGQERPNDEERPESRDLGVYGCSPPHSPRLGPTRFYVFAGDPNPKQTIKRCKRKRIQACNDQRTAKTAIGVMAILGFFCLVNWFMLSRLHEGRVWLRRGLSENPKHVSAQNEERKKFEKRTRXEYNGTYGRMLSLATDALAEGMRDNRYCNGFDFEQNKLETKDLWQEPKEQASAWKPCADQRSLTPDDGKNGYIMVTANGGINQQRVAVCNIVVVARLLNAALVIPKFMLSDVWTDAXFGDIYQEEHFMEYLSPDIRIVKELPKELQSLNLEEIGSVVTDIEVMKEAKPDFYMTHILPILLKNRVIHFVGFGNRLAFDPLPFELQRLRCRCNFHALNFAPRIHPTSRSPVRPIRGSGSYVAPLDLHLLGPXYASLILDNKSDSPVQEEAASSSSSKYLALHLRFEIDMVAHSLCYFGGGETEQKELDSYRQKRFPSLSTLTRGKKFRSADVLRTEGLCPLTPEEAVLMLAALGFNRETRVFVAGANIYGGSKRLAVLTSLYPNLVPKKKLLTESELQPFKNFSSQLAALDFIACAAADAFAMTDSGSQLSSLVSGYRIYYGGGKLPTIRPNKRRLSDILLKNSTIEWNVFEKRVRKAIRQTKHVFARPNGRSVYRYPRCKECMCHA

SEQ ID NO: 6265 - protein, 95 aa, Arabidopsis thaliana
  Clone ID: ARATH-23APR03-C27142_1.p
MAIMASFKSFAAVLSVLFLAMTAIETVVQAQECGNDLSNVQVCAAMVLPGSGRPNSECCAALQSTNRDCLCNALRAATSLPSLCNLPPVDCGINA

SEQ ID NO: 6266 - protein, 344 aa, Arabidopsis thaliana
  Clone ID: ARATH-23APR03-C27159_1.p
MLKRTDKWKSSHGSRIHQFGLVFVVGILLVVVLLFCFSGKNQSTKMQLPKQISNNVKPELQSQPTLEIQNETQLIWTIPNSPKAVLFIAHGCHRKASDFWDKSSDCPQCTGLPEERILMRFALARKFAVLTVSSTGTCWTFGKEKTIVGSIIKSWVEKHKLERLPLVALGASSGGYFVSALATEMQFSSIVLMIAEGVFDQISISKQYPPTLFVHMPKDVYRQQKIREFLEGLRMEGIDAAEIECLDLPISPDFLADRIPGLDSDVSAKLFKLFRDKGFVDEKGYMKRDGRRTPWKQALSGYKISLEQSLITPVEEELNLAYAYHEMTSLQSDQIFSWFESHMS

SEQ ID NO: 6267 - protein, 237 aa, Arabidopsis thaliana
  Clone ID: ARATH-23APR03-C27161_1.p
MSSQICRSASRAARSLLSSAKNARFFSEGRAIGAATVVHATGKVPQYASNFGKSGSGFVSNSWITGLLALPAAAFMLQDQEALAAEMERTFIAIKPDGVQRGLISEIITRFERKGYKLVGIKVMVPSKGFAQKHYHDLKERPFFNGLCNFLSSGPVVAMVWEGEGVIRYGRKLIGATDPQKSEPGTIRGDLAVVVGRNIIHGSDGPETAKDEISLWFKPEELVSYTSNAEKWIYGQN

SEQ ID NO: 6268 - protein, 499 aa, Arabidopsis thaliana
  Clone ID: ARATH-23APR03-C271633_1.p
MSPIENSSSWTLESDLEDLDLDLQDYKPSVPLKKVPNGDIFEASRAGDVDRLRYLVETGVNVNARDRWDSVALYYACLAGHIDSARLLLENGAICSEHTFDGDRCHYASLNLRIRKLLKAFEARPPPLAPLQASLRDTFLGCCHNRDYLQQEEANLDVSDTLSEFGSSNYFPPDVMFYVQGRPIEAHRVILSARSPFFKQKFENEWKDRREVRFSKEKLSLEISVDDMEDLVRICKVCKCESLQKIIEKELIHQRYAEYKTHRDLDNSMKRFILQGISLPEEDRLPASLHRILRVSLAKSFVGDVIDSSVGDTRVGDSVESLADVCVRVDKRNFYCHQAEEIFDVASRYLLFPLKRAVADALLPHLETATPAELCQWLVLSDMYGVLKIREYCLDLVACNFEAFVETHEFRAMLLTLPPPSGDSSLRTTVPSAPGAMMTTDQGNLLDDLREKWLEAEALELDMRDESALIFDKRLAMLVEIAEREKSESEAEDYKDTSA

SEQ ID NO: 6269 - protein, 336 aa, Arabidopsis thaliana
  unsure (1)..(336): unsure at all Xaa locations
  Clone ID: ARATH-23APR03-C27180_1.p
METNLQQVKNSSQTFSEKQNPKQEASPSPISSTCSSPSHDFSFTISLQPLSSSSKHISPTLRSPSKTTSSYQQTDPFAVDLSPADEIFFHGHLLPLHLLSHLPVSPRTSTGSYNDGFTLPVKDILPDQPTNNNNNTENAITNISTEAKDDNTEDKAEGEIRVKTKPIKSFSLFGLSKWRKGFESNEREQEQQQQKIKKPMSLDLSHAVKKYIRMLFQKRGNGTQFWNRRQTSSYSFSSSLMGPNGNXTMINGSYNKRDLIRGRRGELFSAPASMRTSPTNSGHLRVSTAGLSSSSGSTSSSSSDSTMEELQAAIQAAIAHCKNSSAVDRDDKVKDS

SEQ ID NO: 6270 - protein, 633 aa, Arabidopsis thaliana
  Clone ID: ARATH-23APR03-C271836_1.p
MASSPESAPPTNSTSSPSPPSNTNSTTSSPPAPSPPSPTPPQGDSSSSPPPDSTSPPAPQAPNPPNSSNNSPSPPSQGGGGERGNGGNNGGNDTPPSRGSPPSPPSRSNGDNGGSRSSPPGDTGGSRSDNPPSSGGSSGGGGGGRSNTNTAIIVGVLVGAGLLMIVLIIVCLRRKKKRKDSFYPEPMKGNQYQYYGNNNNNNASQNYPNWHLNSQGQNQQSTGGWGGGGPSPPPPPRMPTSGEDSSMYSGPSRPVLPPPSPALALGFNKSTFTYQELAAATGGFTDANLLGQGGFGYVHKGVLPSGKEVAVKSLKAGSGQGEREFQAEVDIISRVHHRYLVSLVGYCIADGQRMLVYEFVPNKTLEYHLHGKNLPVMEFSTRLRIALGAAKGLAYLHEDCHPRIIHRDIKSANILLDFNFDAMVADFGLAKLTSDNNTHVSTRVMGTFGYLAPEYASSGKLTEKSDVFSYGVMLLELITGKRPVDNSITMDDTLVDWARPLMARALEDGNFNELADARLEGNYNPQEMARMVTCAAASIRHSGRKRPKMSQIVRALEGEVSLDALNEGVKPGHSNVYGSLGASSDYSQTSYNADMKKFRQIALSSQEFPVSDCEGTSSNDSRDMGTKSPTPPK

SEQ ID NO: 6271 - protein, 186 aa, Arabidopsis thaliana
  Clone ID: ARATH-23APR03-C27296_1.p
MAKLILIIVTQILLIAAVVSARKGENFAKTIDKKHFGLRKEKLTHFRVYWHDILSGSNPSSVVINPPISNSSFFGSVTVIDNRLTTEVAVNSTLVGQAQGIYAATGQRDASALMVMNFAFKTGKYNGSSIAILGRNAVLTKVREMPVIGGSGLFRFARGYVEARTMWFDQKSGDATVEYSCYVLHY

SEQ ID NO: 6272 - protein, 386 aa, Arabidopsis thaliana
  unsure (1)..(386): unsure at all Xaa locations
  Clone ID: ARATH-23APR03-C27329_1.p
MDAEKKSAHFRQISSYKPQLLVLSSIQENPSSKISEKANIKADNDAEIGVFGAEKYFSMKLDHVDSTADITKQHEKENTHDHPNANPNPNPNPHPHPHPQLTKTTSSRSKTSRHGTPSVRSESSCNSQTFLMRINNHNEXQRKMNDTSISFGGFRCYCPCSGIKTVHTDPKNSCKSRNSDRDFVAYDARKHNDKPRLHFEAKKADFHAQEKISLPIQRSDIAMNLERKLSLLTWDAIPNQLSTKNNNHNNNGNNSSMSSNTQEEETASVASSDLFEIENITSSVYEPSEASIGWSVVTGSMADQSVISDFDMMKRVTRNGPVVKTKPVIGEKVRSAGFLSGCKSHKAVSVVDSSRKVKETAKVDHHEMSHQKKFKTEIRIQDLSFL

SEQ ID NO: 6273 - protein, 264 aa, Arabidopsis thaliana
  Clone ID: ARATH-23APR03-C27495_1.p
MTNEKCEVALPLKLKSEKPSMASSSSLFLLPLLLLVSQASASTVIFYNKCTYTVWPGIQPSSGQSLLAGGGFKLSPNRAYTLQLPPLWSGRFWGRHGCSFDRSGRGRCATGDCGGSFLCNGAGGVPPATLAEITLGHDMDFYDVSLVDGYNLAMSIMPVKGTGKCTYAGCVSDLNRMCPVGLQVRSRDGTQVVACKSACSAFNSPRYCCTGLFGNPQSCKPTAYSKIFKVACPKAYSYAYDDPTSIATCSKANYVVTFCPHRGR

SEQ ID NO: 6274 - protein, 308 aa, Arabidopsis thaliana
  unsure (1)..(308): unsure at all Xaa locations
  Clone ID: ARATH-23APR03-C27498_1.p
MAPSFLSVARFVEALLRRRFSSAGLSLQTLSIDSETTIQFWGPPPSSSSENTQKPSLLLLHGFGPSAVWQWSHQVKPLSHFFRLYVPDLVFFGGSSSSGENRSEMFQALCMGKLMEKLEVERFSVVGTSYGGFVAYNMAKMFPEKVEKVVLASSGVNLRRSDNEAFIARAKCHRIKEVMLPASATDLRRFSGMVSSKRLDYVPDFVLNDFCQVSFFYSLFXRKEPLEGMIKRFYAKFKKSFLKHEVKKIRNXQNQVLPLKMAHDLKEMLGTKATLKVIQKTSHIPQTEKSKEFNGFVMSFLLPPSPSP

SEQ ID NO: 6275 - protein, 777 aa, Arabidopsis thaliana
  unsure (1)..(777): unsure at all Xaa locations
  Clone ID: ARATH-23APR03-C27529_1.p
MKRQAKPPEKKTKRTTNASSPTPSSSSPSLSSLPDEIVENCLARISRSYYPTLSIVSKSFRSIISSTELYVARSHLRNTEECVYVCLSDKSFEFPKWFTLWVNPSQANSMVEKKRKKKKTIGKLLVPIPSSNLSPVSKSAIAVGSEIYVIGGKVDGALSSAVRILDCRSNTWRDAPSMTVARKRPFICLYDGKIYVIGGYNKLSESEPWAEVFDIKTQTWECLSDPGTEIRNCTIYRIAEIEGKIHFGYTQKTYAYDPKQGEWECCEGEVAFPRSQCVMESVLYTFANNYTWEDDYGCKWWSTDGYGEKVKGLHPRFGGPRGNAAKLVASGGKLLLLWEGYMKHNPNNRKKIWVRGYRVYKRRDGGKVWGIVKWVHALIVITVAMNFQVEPPEKKKLTNSSPAHSPPSSSSPSLSLLPXXIVVHCLARISRLYYPTLSLVSKSFRSILSSTELYATRSHLGITDQCVYLCLWDPSYQFPQWLRLLVNPNRTLANSIIKKRRKKKKTTGQMLVPLTSSKFTSVSKATVVVGSEIYVLGGPVDSAVRVLDCCSHTWRDAPSMNVSRMNAWACFHDGKIYVMGGCQGLKDEPWAEVFNTKTQTWEGLPEPGSEVRKCSIDRSGVIEGKIEFGNVNEMCAYDTKLCKWEYCVNKSAALRSECMIENVSYGFWNMRLLWYDNDIQKDYWKRLEGLESLDDKYMRNGGSSGNTTKLVACGGXXLLVWEGDMKHNPNNRKKIWCAVIAIEKCDGGGVWGIVESVDVLYTVPISCQLLHCLVVSV

SEQ ID NO: 6276 - protein, 129 aa, Arabidopsis thaliana
  Clone ID: ARATH-23APR03-C27549_1.p
MSSISQSILMALTVTVNKYASSNVQAVRRNDTKRHSLTAPPADLGRRNILFSSTSFIAAALTSSDQLLQKYLKKTEENKAKNDKERLDSFYKRNYKDYFEFVEGSIKGKTEAELSESEKRILEWLKANK

SEQ ID NO: 6277 - protein, 678 aa, Arabidopsis thaliana
  Clone ID: ARATH-23APR03-C27703_1.p
MTTPEGAMYVAWKDLTVVIPNFGEGATKRLLNGVNGCGEPNRILAIMGPSGSGKSTLLDALAGRLAGNVVMSGKVLVNGKKRRLDFGAAAYVTQEDVLLGTLTVRESISYSAHLRLPSKLTREEISDIVEATITDMGLEECSDRTIGNWHLRGISGGEKKRLSIALEVLTKPSLLFLDEPTSGLDSASAFFVVQILRNIASSGKTVVSSIHQPSGEVFALFDDLLLLSGGETVYFGEAESATKFFGEAGFPCPSRRNPSDHFLRCVNSDFDNVTAALVESRRINDSSFSLHQLHETTNTLDPLDDIPTAEIRTTLVRKFKCSLYAAASRARIQEIASIVGIVTERKKGSQTNWWKQLRILTQRSFINMSRDLGYYWMRIAVYIVLSICVGSIFFNVGRNHTNVMSTAACGGFMAGFMTFMSIGGFQSFIEEMKVFSRERLNGHYGVAVYTVSNLLSSLPFIILMCLSTSSITIYMVRFQSGGSHFFYNCLDLICAITTVESCMMMIASVVPNFLMGVMLGAGYIGIMVLSAGFFRFFPDLPMVFWRYPVSYINYGAWALQGAYKNEMIGVEYDSPLPLVPKMKGELILQTVLGINPESSKWLDLAVVMMILIGYRIAFFAILKFREKVFPVIHMLYTKRTLSHIQKRPSFRRMTPFPSRRYPVHHALSSQEGLNSPLH

SEQ ID NO: 6278 - protein, 611 aa, Arabidopsis thaliana
  Clone ID: ARATH-23APR03-C27705_1.p
MGSSKLKRAIGAVKDQTSVGLAKVGGRSSSLTELEIAVVKATRHDDYPAEDKYIREILCLTSYSRNYVSACVATLSRRLNKTKNWSVALKTLILIQRLLTDGDRAYEQEIFFATRRGTRLLNMSDFRDASQSDSWDYSAFVRTYALYLDERLDYRMQGRRGKKKSGGGGGGDGDSGEEDDHRGTSNDIRSKAIVVKSKPVAEMKTEKIFNRVQHLQQLLDRFLACRPTGNAKNNRVVIVAMYPIVKESFQLYYNITEIMGVLIERFMELDIHDSIKVYEIFCRVSKQFDELDPFYGWCKNMAVARSSEYPELEKITQKKLDLMDEFIRDKSALAAQTTKSSSKRSNKSEEEESKTEYIQENQEDLNSIKALPAPEQKEEEEEEEKMETKKDVEEVVSRQDQEGDLLDLTDEAGVTAGTVGDSLALALFDGVVGTESASGPGWGAFNDNSADWETDLVRSATRLSGQKSELGGGFDTLLLDGMYQYGAVNAAVKTSTAYGSSGSASSVAFGSAGSPAASMLALPAPPPTANGNRNSPVMVDPFAASLEVAPPAYVQMNDMEKKQRLLMEEQIMWDQYNRSGRQGHMNFGQNQQQQYYQLPYSMGPYSYTPRY

SEQ ID NO: 6279 - protein, 782 aa, Arabidopsis thaliana
  Clone ID: ARATH-23APR03-C27723_1.p
MQNFWFAIFFFLLTCAPPSPLSYASTVTLSRRLLYDYESPLPLPLSPISPPFFPLESSPPSPPPPLPPTPPTTFAVFPTFPANISALVLPRSSKPHHTSPTLLLPALSAVLVIATVIGLALFLYGRHRGQTRHLKNSHCSSSNTSSYGDEQSHITTNFNMAATTSPSEVFYLNTEESDHIRTGGTFFLKQDSPEIRPLPPLPPRSFHHNNYETEVNEEDEEEEEDVFFSPMVSLPGSANSSPSHSCSSSCSGWVSPARSFSITMSPPNPRYSDATNLQSPSPERLRVRKNYNGNGSSSLRMFSFWNQNMGFGFPRISSASTSPDRGFIRTPLSSLYSSVSTSPDGLFRKFLDSSPPIWNDFSRNVKSVLLSHTASSRRDFVINIGESSSQQSKVPALPPPTRPPPLVPPSQPFVVQNDVKKQSFSDQPPKQLHWERLRSSSSKLSKEMVETMFIANSSNPRDLPIQNQVLDPRKAQNIATLLQLLNLSTKDVCQALLDGDCDVLGAELLECLSRLAPSKEEERKLKSFSDGSEIGPAERFLKELLHVPFVFKRVDALLFVANFHSEIKRLRKSFSVVQVACEELRNSRMFSILLEAILKTGNMMSVRTNRCGDADAFKLDTLLKLVDVKGLDGRSSLLHFVVQEMMKSEGSVRALEGIRNLNTELSNVKKSADIEYGVLRSNVSRICQGLKNIEALLLLSEESGSYGDQWLKFKERMTRFLKTAAEEIVKIKIRESSTLSALEEVTEQFHGDASKEGHTMRIFMIVRDFLSVLDQVCKEMGD

SEQ ID NO: 6280 - protein, 1132 aa, Arabidopsis thaliana
  Clone ID: ARATH-23APR03-C27781_1.p
MRGRICFFACVLRSPCALTLASSLNGEGRVLPVGAAVLLGSFAFLAGWSLFDSRPCFCSGFARSLLTPVASAHRLGSVRSGSLPPLRCRLHGSRNWNVSSLFVAGPLPPVLSLCRSLEVLDLCTNRFHVIPIQLTMIITLKKLYLCENYLFGSIPRQIGNLSSLQELVIYSNNLTGVIPPSMAKLRQLRIIRAGRNGFSGVIPSEISGCESLKVLGLAENLLEGSLPKQLEKLQNLTDLILWQNRLSGEIPPSVGNISRLEVLALHENYFTGSIPREIGKLTKMKRLYLYTNQLTGEIPREIGNLIDAAEIDFSENQLTGFIPKEFGHILNLKLLHLFENILLGPIPRELGELTLLEKLDLSINRLNGTIPQELQFLPYLVDLQLFDNQLEGKIPPLIGFYSNFSVLDMSANSLSGPIPAHFCRFQTLILLSLGSNKLSGNIPRDLKTCKSLTKLMLGDNQLTGSLPIELFNLQNLTALELHQNWLSGNISADLGKLKNLERLRLANNNFTGEIPPEIGNLTKIVGFNISSNQLTGHIPKELGSCVTIQRLDLSGNKFSGYIAQELGQLVYLEILRLSDNRLTGEIPHSFGDLTRLMELQLGGNLLSENIPVELGKLTSLQISLNISHNNLSGTIPDSLGNLQMLEILYLNDNKLSGEIPASIGNLMSLLICNISNNNLVGTVPDTAVFQRMDSSNFAGNHGLCNSQRSHCQPLVPHSDSKLNWLINGSQRQKILTITCIVIGSVFLITFLGLCWTIKRREPAFVALEDQTKPDVMDSYYFPKKGFTYQGLVDATRNFSEDVVLGRGACGTVYKAEMSGGEVIAVKKLNSRGEGASSDNSFRAEISTLGKIRHRNIVKLYGFCYHQNSNLLLYEYMSKGSLGEQLQRGEKNCLLDWNARYRIALGAAEGLCYLHHDCRPQIVHRDIKSNNILLDERFQAHVGDFGLAKLIDLSYSKSMSAVAGSYGYIAPEYAYTMKVTEKCDIYSFGVVLLELITGKPPVQPLEQGGDLVNWVRRSIRNMIPTIEMFDARLDTNDKRTVHEMSLVLKIALFCTSNSPASRPTMREVVAMITEARGSSSLSSSSITSETPLEEANSSKGMYLHIHTHTHTLLCNFRTFCDSHMNISCYSAEI

SEQ ID NO: 6281 - protein, 518 aa, Arabidopsis thaliana
  unsure (1)..(518): unsure at all Xaa locations
  Clone ID: ARATH-23APR03-C2778_1.p
FLSLADPQYSATLQLPDPRCWPSHHTTQNLQTNNQNTVRYFSLKPKMETASSNFSLSQILNIEEPYSSVMLGVAALLAVVCYFWIQGKSKSKNGPPLPPGPWPLPIVGNLPFLNSDVLHTQFQALTLKHGPLMKIHLGSKLAIVVSSPDMAREVLKTHDITFANHDLPEVGKINTYGGEDILWSPYGTHWRRLRKLCVMKMFTTPTLEASYSTRREETRQTIDHMXDMASDGYFFPLGVEXDFQGLVKQLNLLFERVKLLHDRVMESHGKEVEKMIERXEDFMQFIIRLIYDGEKAXLSLSHGXSLLRHMVLGGVDTSVNASEFAMAEIEGRPRVPQVVYKIRLELDEVVGKDNIVEESHLPKLPYLQAVMKETLRLHLTLPLLVPHRNSETSVVAGYTVPKDSKIFINVWAIHRDPKNWDEPNEFKPERFLENSLDFNGGDFKYLPFGSGRRICAAINMAERLVLFNIASLLHSFDWKAPQGQKFEVEEKFGLVLKLKSPLVAIPVPRLSDPKLYTA

SEQ ID NO: 6282 - protein, 576 aa, Arabidopsis thaliana
  Clone ID: ARATH-23APR03-C27818_1.p
MMLMRRRLACCSREREISIDFDEHEQDKMITYYGLETCIINNQSYEEESGTSRGDGCLTDSLDDDAFSSCSSSKDASSSFSSKWLPMKNDEHSCDGLNLSGRSQHFDAKEKKKQGYGSSQHFDAKEKPGYVYCHLDVEAMKEKFSKLLLGEDVTGGCKGVQVALALSNAVTHLATSIFGELWKLEPLCEEKKQKWRREMDWLLSPTNYMIELVPSKQNDANGRSLEIMTPKARADIHMNLPALQKLDSMLIETLDSMVNREFWYSEIGSRAEGKNKSTSESKRWWLPSPQVPKPGLSNSGRKKLLDKGKVVYQVFKATKAINENILLEMPVPIVIKEAIPKSGKNSLGDELYKMLAVESATVDEIFISLNLGTEHAALETVNKLESAMFAWKERITEQGSNGKSPVRASWSFAKDPLSEIGRNESLLNRAEALRTQIKSKHPNLPHSFLDATKIQYDKDIGHAVLEAYSRTLANLAFRILSRMGEILKEDSLSNPNSPAPPSCFPSSRDPYRTPERPLLSSRVRHSLTDDMNKADGTETGLDFLFADAKASNSVNTTPSRSSRLWCLSKVPSDTSP

SEQ ID NO: 6283 - protein, 268 aa, Arabidopsis thaliana
  Clone ID: ARATH-23APR03-C27819_1.p
MVNQRRRLAQKRYKEANPELFPKAEPTPPKDPNKKKKKKSLFKKKKPGSSTDRPQRTGSSTRHPLRVPGMKPGEGCFICHSKTHIAKLCPEKSEWERNKICLQCRRRGHSLKNCPEKNNESSERKLCYNCGDTGHSLSHCPYPMEDGGTKFASCFICKGQGHISKNCPENKHGIYPMGGCCKVCGSVAHLVKDCPDKFNQESAQPKKTSRFDATPRGKLTKFSGDDLEDDFTEEPKSSKKINTSDDSAQNSVEVKKKKQGPKIVNFVG

SEQ ID NO: 6284 - protein, 762 aa, Arabidopsis thaliana
  unsure (1)..(762): unsure at all Xaa locations
  Clone ID: ARATH-23APR03-C27859_1.p
MWMLKIGEGNGDDPYLFTTNNFAGRQTWEFDPDGGSPEERHSVVEARRIFYDNRFHVKASSDLLWRMQFLREKKFEQRIAPVKVEDSEKVTFETATSALRRGIHFFSALQASDGHWPAENAGPLFFLPPLVFCLYITGHLDEVFTSEHRKEILRYIYCHQKEDGGWGLHIEGHSTMFCTTLNYICMRILGESPDGGHDNACGRAREWILSHGGVTYIPSWGKTWLSILGVFDWSGSNPMPPEFWILPSXFFPGHPAKMGSYCRMVXYLPMAYLYGKRFVGPIXTSLILHLRQELDFQPFVDINRGGGPQPCAXEATYFPRPPVPAWVWDCLYVSPVPFLAPGPLISLLRGTALQLAMKHIHYEDENSRYITIGCVEKVLCMLACWVEDPNGDYFKKHLSRISDYLWMAEDGMKMQSFGSQLWDTGFAMQALLASNLSSEISDVLRRGHEFIKNSQVGENPSGDYKSMYRHISKGAWTFSDRDHGWQVSDCTAHGLKCCLLFSMLAPDIVGPKQDPERLHDSVNILLSLQSKNGGMTAWEPAGAPKWLELLNPTEMFSDIVIEHEYSECTSSAIQALSLFKQLYPDHRTTEITAFIKKAAEYLENMQTRDGSWYGNWGICFTYGTWFALAGLAAAGKTFNDCEAIRKGVQFLLAAQKDNGGWGESYLSCSKKIYIAQVGEISNVVQTAWALMGLIHSGQAERDPIPLHRAAKLIINSQLESGDFPQQQATGVFLKNCTLHYAAYRNIHPLWALAEYRARVSLP

SEQ ID NO: 6285 - protein, 343 aa, Arabidopsis thaliana
  unsure (1)..(343): unsure at all Xaa locations
  Clone ID: ARATH-23APR03-C27889_1.p
RYTHPFLLKKEPLRAILSADHGNSSVRVADTXVSGTSPADRLRFGRLMEDGFSYKEKFIVRSYEVGINKTATIETIANLLRGMACNHVQNVGFSTDGFATTLTMRKLHLIWVTARMHIEIYKYPAWSDVVEIETLXLSEGGIGTRRDWILKDCATGIVLLVKLLDVVMMNQDTRRLQRVTDEVRDEYLVFCPPEPRLAFPEENNSSLKKIPKLEDPAQYSMLGLKPRRADLDMNQHVNNVTYIGWVLESIPQEIIDTHELKVITLDYRRECQQDNASKXDIVDSLTTSETPNEVVSKLTGTNGSTTSSKREHNESHFLHILRLSENGQEINRGRTQWRKKSSR

SEQ ID NO: 6286 - protein, 902 aa, Arabidopsis thaliana
  Clone ID: ARATH-23APR03-C278_1.p
MMASLSCVEDKMKTSCLVNGGGTITTTTSQSTLLEEMKLLKDQSGTRKPVINSELWHACAGPLVCLPQVGSLVYYFSQGHSEQVAVSTRRSATTQVPNYPNLPSQLMCQVHNVTLHADKDSDEIYAQMSLQPVHSERDVFPVPDFGMLRGSKHPTEFFCKTLTASDTSTHGGFSVPRRAAEKLFPPLDYSAQPPTQELVVRDLHENTWTFRHIYRGQPKRHLLTTGWSLFVGSKRLRAGDSVLFIRDEKSQLMVGVRRANRQQTALPSSVLSADSMHIGVLAAAAHATANRTPFLIFYNPRACPAEFVIPLAKYRKAICGSQLSVGMRFGMMFETEDSGKRRYMGTIVGISDLDPLRWPGSKWRNLQVEWDEPGCNDKPTRVSPWDIETPESLFIFPSLTSGLKRQLHPSYFAGETEWGSLIKRPLIRVPDSANGIMPYASFPSMASEQLMKMMMRPHNNQNVPSFMSEMQQNIVMGNGGLLGDMKMQQPLMMNQKSEMVQPQNKLTVNPSASNTSGQEQNLSQSMSAPAKPENSTLSGCSSGRVQHGLEQSMEQASQVTTSTVCNEEKVNQLLQKPGASSPVQADQCLDITHQIYQPQSDPINGFSFLETDELTSQVSSFQSLAGSYKQPFILSSQDSSAVVLPDSTNSPLFHDVWDTQLNGLKFDQFSPLMQQDLYASQNICMSNSTTSNILDPPLSNTVLDDFCAIKDTDFQNHPSGCLVGNNNTSFAQDVQSQITSASFADSQAFSRQDFPDNSGGTGTSSSNVDFDDCSLRQNSKGSSWQKIATPRVRTYTKVQKTGSVGRSIDVTSFKDYEELKSAIECMFGLEGLLTHPQSSGWKLVYVDYESDVLLVGDDPWEEFVGCVRCIRILSPTEVQQMSEEGMKLLNSAGINDLKTSVS

SEQ ID NO: 6287 - protein, 380 aa, Arabidopsis thaliana
  Clone ID: ARATH-23APR03-C27922_1.p
MILKQLKQFTLSATRRNAVFKTDVKRLARFYGSPAVCESLTTSKIPKRLSKDDRRALVESFVNEYRATNAGRFPSLDATHKQVGGSYYIVRDIFQELKLKPKAHVPIVAKALSEVSSSVPGDASSHSSPAPVPTVEAKALSEVSPSVPADASSHLSPSPVPIVEAKALSEVSPSVPADTSSHFSPAPVPIVEAEALSVVSPSVPADTSSHFSPAPVPIVEAKTLSEVSPSVPDDASSHFSPVVVEPEFQAGSVDIEIGSEQRPDIIDTSHSNSDDESNFQGNNLVITATDDKRETEATQGIENSETDEERNLTHLGNQESKADHLEGADVSADVVPTETRQISETGAGEVKETETGEVKERSSSWSNIMSFAKEFANFWR

SEQ ID NO: 6288 - protein, 490 aa, Arabidopsis thaliana
  Clone ID: ARATH-23APR03-C27955_1.p
MARSSVLLCLILLVTLGVVISVTFADNVELKSKDLESSKKDKKVDHDSTHKEKGGEKVDGAGSDDEDNDKKEKKKEHDVQKKDKQHENKDKDDEKKHVDKKKSGGHDKDDDDEKKHKDKKKDGHNDDDDSDDDTDDDDDDDDDDDDDDEVDGDDNEKEKIGLYELKKGNLTVKFTNWGASIISLHFPDKNGKMDDIVLGYDSVKTYKTDKVYFGATVGRVANRIGKGKFKLNGKEYKTSVNDGKNTLHGGKKGFGDVVWAVAKHQYDGKKPHIVFTHTSPDGDQGFPGELSVTVTYKLVKDNELSVVMEAKPKDKATPVNLAHHSYWNLGGHNSGDILSEEIQILGSGYTPVDGELIPTGKINPVKGTAYDFLQLRPIKDNMKDLKTGYDINYCLDGKAKKMRKIVELVDKKSGRKMELSGNQAGLQFYTGGMLKDVKGKNGAVYQAFGGLCLETQSYPDALNHPKFPSQIVEPGKKYKHTMLFKFSIVS

SEQ ID NO: 6289 - protein, 776 aa, Arabidopsis thaliana
  Clone ID: ARATH-23APR03-C28016_1.p
MAGFINLEDSPMFQKQVFSLEGTSDELKDRCQKLYKGVKKFMGALGEASTGVSAFADSLEEFGAGHDDPVSVSIGGPVISKFINTLRELSSYKEFLRSQVEHVLLERLTNFMTVDLQEAKESRRRFDKAVHSYDQAREKFVSLKKNTRGDIVAELEEDLENSKSAFEKSRFNLVNSLMTIEAKKKYEFLESISAIMDSHFKYFKLGYDLLSQLEPYIHQVLTYAQQSKEQSKIEQDRFAQRIQEFRTQSELDSQQASAKADPSDVGGNHVYRAIPRKNVEANSVSTADKEVTKQGYLLKRSASLRADWKRRFFVLDNHGSLYYYRNTGNKSAKSQHYYSGLGEHSSGVFGRFRTRHNRSASQGSLDCNMIDLRTSLIKLDAEDTDLRLCFRIISPQKTYTLQAENGADRMDWVNKITAAITTRLNSHFLQQSPARYLDKKNTSSGPATENLTLNQKEDYNQRLNVGDDVLTILREIPGNNTCAECNAPDPDWASLNLGVLMCIECSGVHRNLGVHISKVRSLTLDVKVWEPTILDLFRNLGNGYCNSVWEELLHHLDDDSEKGSTDTLASVSKPSSEDWFTLKEKYINGKYLEKALVVKDEREANSTASSRIWEAVQSRNIRDIYRLIVKADANIINTKFDDITDLDVYHHHHVDAPDEVKKRHDPNACQRIKNSNEARNCLQGCSLLHVACQSGDPILLELLLQFGADINMRDYHGRTPLHHCIASGNNAFAKVLLRRGARPSIEDGGGLSVLERAMEMGAITDEELFLLLAECQ

SEQ ID NO: 6290 - protein, 221 aa, Arabidopsis thaliana
  Clone ID: ARATH-23APR03-C28055_1.p
MEDDMWCVSSSGSSRSYRSETAAKYQSGPYQDLEEFEEVDDDIAVEYPCPFCASDYDLVELCHHIDEEHRHEANNGICPVCSKRVKMHMVDHITSHHRDVLKSEQKEMSYREDPYLSDKYLQPHLDELPPSMNHHQHPSKHVSDQFLSFINNSALPNQTKLVLPDSSVEDKNPIKDSSAAKEGTSSCPLSDSDKLEKAKKCEFVQGLLSSAMFDDECDSSE

SEQ ID NO: 6291 - protein, 216 aa, Arabidopsis thaliana
  Clone ID: ARATH-23APR03-C28057_1.p
MFTLEWSTSSRLKDVMHQFQKHLDYLQEFWSVLDNIDKSLCVVDVKQPARASAIRRIDAGNDCIIIVHIDFKDPKSLPESRFIGPVPSATHMNNLHMLWRRNCKRWSNERSFPENLECILGTELPKPLGLQVEDDQQQVECGICYAQFLPTDEELGARSGTRTDYTCENISCNKSFHSLCLTDWLRSITTTRQSFDVLFGNCPYCSDPVAVKTSNK

SEQ ID NO: 6292 - protein, 215 aa, Arabidopsis thaliana
  Clone ID: ARATH-23APR03-C28097_1.p
MASSKHEDYGIPYTPLPSSQPSQSVILLTPYRRHRRPSLLRKLRCSLLFTAVILLLSAAVYLLYPSDPDITVSRINLNHISVVDSHKIALDLSFSLTIKVRNRDFFSLDYDSLVVSIGYRGRELGLVKSKGGHLRARDSSYIDATLELDGLEVVHDVIYLIGDLAKGVIPFDTIAQVQGDLGVLLFHIPIQGKVSCEVYVNVNNQKISHQDCHRK

SEQ ID NO: 6293 - protein, 282 aa, Arabidopsis thaliana
  Clone ID: ARATH-23APR03-C28109_1.p
MRITQILLCLVIVALSSSSHVWSDQIFPAHLVGTFSRNNREPKYKIEFLPEDSPFHPGDNLESMVMLDKHGNRFLCYLPKEEKATSGWTSSQQNISTVMMETQQLVKLKTPDELLQPLSEKCLFRQEGWWSYEFCHQKYVRQLHVEDENKIVQEFFLGTFDPEATAAFNQTVSDASTDASQRYHSHVYTNGTTCDLTGSPREVEVRFVCAETRAMVTSITELSTCKYALTVQCPTLCKHPLFQLEKPVSHTIHCNAIPVEEDATRNKEEQAVDESPKMIADS

SEQ ID NO: 6294 - protein, 272 aa, Arabidopsis thaliana
  Clone ID: ARATH-23APR03-C28139_1.p
MGRSNSQCPSHWILLCFFISSQFWGFSLPTSIIQQNLEGFKDPEDGFHKIHCSRERSRVAWKIIQEYLMPYVEKERYQLPSTCRVHRDNDIYREQEEHKLRSDINEWRCGFCKKAFYEEKYLDKHFDSRHYNLLNASHGKCLSDLCGALHCDLVVDTARLKSKCNPAAAAKNRHLCESLANSCFPVNKGSSANRLHDFFLRQFCDAHTCSGGSKPLSQKPKKRSIVYIIFSIIVLVVLLLYYSFVYLFRRGLKRRSQDLKRIRHNGLKKKPF

SEQ ID NO: 6295 - protein, 529 aa, Arabidopsis thaliana
  Clone ID: ARATH-23APR03-C2826_1.p
MQACCGGNSMASLQQPGRVQGSVFPPIMPPVTKFSQQLKFNISKPFRSSFLKRNLVSEMRASSVSLPNVEISSKEIPFEDYGLGEVDPEVRTIITKEKDRQFRSLELIASENFTSRAVMEAVGSCLTNKYSEGLPGKRYYGGNEYIDQLETLCQNRALAAFRLDSTKWGVNVQPLSGSPANFAVYTAILSPHDRIMGLDLPHGGHLSHGFMTAKRRVSGTSIYFESMPYRLDESTGIVDYDMLEKTATLFRPKLIIAGASAYSRDFDYPRMRKIADSVGAFLMMDMAHISGLVAASVVADPFEYCDIVTTTTHKSLRGPRGGMIFFRKDPINGVDLESAVNNAVFPGLQGGPHNHTIGGLAVCLKHAQSPEFKAYQKRVVSNCRALANRLVELGFKLVSGGSDNHLVLVDLRPMGMDGARVEKILDMASITLNKNSVPGDKSALVPGGIRIGSPAMTTRGLSEKDFVVVADFIKEGVEITMEAKKAAPGSKLQDFNKFVTSPEFPLKERVKSLKERVETFTSRFPIPGV

SEQ ID NO: 6296 - protein, 369 aa, Arabidopsis thaliana
  Clone ID: ARATH-23APR03-C28366_1.p
MSERRIHYSQLKNDNLNQISPSSAPSPITLNHQLTDSSSSSSSGGNNRISPIILFIIVLLSVIFFICSILHLLVRYYLKKKRSNLSSSPNESNQNPEFSDSDTYQRQLQQLFHLHDSGLDQALIDALPVFLYKEIKGTKEPFDCAVCLCEFSEDDKLRLLPNCSHAFHIDCIDTWLLSNSTCPLCRGTLFSLGHQFEYPDFNFGFFAGDDGGGGVRVSPVQKPAENEIGKRVFSVRLGKFRSSNIVNNGEVVVGGGGETSSSSLDNRRCFSMGSYQYIVAESDLVVALCPNNEGLKNNKDVEGKKINMRSKGESFSVSKIWQWSNKRSKFPNNHPSETNLVVGGSSSSSSYVCSGSDGLSDAWGRFQGP

SEQ ID NO: 6297 - protein, 536 aa, Arabidopsis thaliana
  Clone ID: ARATH-23APR03-C2836_1.p
MGVKVASSSTFLQWTTQPIIHQSSSPSQTLASGTITSPSKRRSTVHDGRFLSCRFVTQRLNRSALFGTPSTKLHRPKSCELWKSSSSSSRPIKTQSFRRVYSANLDPFSDEEFSKKIQELTLRFNIPHHDDDENSIEPPWNEMVHLSSIEMKANSVDLPLSLRIIKKKRQWEEGVKQAGESACCSMNKAFSSMVFMIRELQSFTLHMREILFYEDLQEILLRVREEMQQSFVWLFQQVFSATPTLMVYVMILLANFTVYSIGNNSSALAAVAPLPPTITELTTVSETEETNVKFDSSVVKTFFVSSPSGSIASVGGNNNGGGGNVKPVLSGTDGDGSDGSEQFRTIIPEGVSQLSSSNFGSEPSVSGQDEHRLWNSMVEEAERMQYSNIDDSLDQETRKRFVSHVEARVEAEEDTGYFKTELMYQTELSQEPNNPLLLANYAQFLYLVSNDHDRAEEYFKRAVGVEPKDAEAFSKYATFLWRARDDLWAAEETFLEAIDADPTNSYYAANYANFLWNTGGDDTCFPLDDESHEDTI

SEQ ID NO: 6298 - protein, 139 aa, Arabidopsis thaliana
  Clone ID: ARATH-23APR03-C2842_1.p
MASTFVCSLPNPFFAFPVKATTPSTANYTLLGSRRGCLRIKAISTKWEPTKVVPQADRVLVRLEDLPIKSSGGVLLPKAAVKFERYLTGEIISVGSEVGQQVGPGKRVLFSDVSAYEVDLGTDARHCFCKESDLLALVE

SEQ ID NO: 6299 - protein, 361 aa, Arabidopsis thaliana
  Clone ID: ARATH-23APR03-C2844_1.p
MSLKAIHVSEVPSLDHFPENPSLICSSRKANNKFVVVGHRGHGMNMSQSPDLRFSALKENSILSFNAASKFPLDFIEFDVQVTRDGCPIIFHDDFIYSEEQGVVYEKRVTEVCLSEFMSYGPQRDTGKTGKPLLRKSKEGKIHKWSVATDDSFCTLQEAFEKVENPNLGFNIELKLDDNVFYSSDHLSRLLLPILQVVSDIGNDRTIIFSSFHPDAALLVRKLQTTYPVFFLTNGGTEMYHDTRRNSLEEAIKVCLEGGLQGIVSEVKGVFRNPALVNKIKESKLSLMTYGKLNNVAEAVYMQHLMGIEGVIVDHVEEITEAVREMMKPSNRDADGTKPKPNFSDRELSFLLKLIPELIQH

SEQ ID NO: 6300 - protein, 802 aa, Arabidopsis thaliana
  Clone ID: ARATH-23APR03-C28505_1.p
MEKLYCGMPLLLLVLLLASIDGSTQLQSSQSQTLLRLQQLLYYPKVLNSWNNYTDFCNSEPSPSLTVVCYEDSVTQLHIIGDNGTHMLPKSFSINSFVTTLVKLPDVKVLTFVSLGLWGWLPQKINRLSSLEILNVSSNFLFGPIPHELSSLATLQTLILDENMFSGELPDWIDSLPSLAVLSLRKNVLNGSLPSSLSSLSGLRVLALANNRFNGALPDLSHLTNLQVLDLEGNSFGPLFPRLSNKLVTLILSKNKFRSAVSAEEVSSLYQLQHLDLSYNTFVGPFPTSLMSLPAITYLNISHNKLTGRLSANLSCNSQLMFVDMSSNLLTGSLPTCLKPSSGTSRDVVYASNCLATTNEDQRPVSFCSNEALAVGILPQRRNKVSKVGIALGVTASILGVLLLAGALFVVLRRLNAKKTVTKSSPRLIRENASMGYTSKLLSDARYISQTMKLGGLGLPAYRTFSLEELEYATNNFESSAFMGEGSQGQIYRGRLKDGSFVAIRCLKMKKSCSTQNLMHHIELIAKLRHRHLVSVLGHCFECYLDDSTVSRMFFVFEYVPNGELRTWISDGHMGRLLTWEQRISVAIGVAKGIQFLHTGIVPGVYDNNLKMTDILLDNNLAAKLSSYNLPLLVEGLGKVGQVGSRSGPKGTPSIKDEDKIDIYDFGVILLELIVGRPLRAKSQVDVLKEQLQASISADDGARRSMVDPTVHRACSDQSLKTMMEICVRCLLKDPLERPSIEDVLWNLQFASQVQEGWLQNSNPSSNLGSPSPAASSLPPPSRLHVTTLESPRDSGCEEHER

SEQ ID NO: 6301 - protein, 676 aa, Arabidopsis thaliana
  Clone ID: ARATH-23APR03-C28512_1.p
MAMGLIRLLSIAFTLVLLSILPLHLSLADEITSIESVPDLQKLMYVAVDGFPCVRLLNLSGEIGCSNPGINKVVAPIIKLKDVKDLVQPHTILVTADEMEDFFTRVSTDLSFASKIGGVLVESGSNFQQKLKGFSPDKRFPQAQFSPYENVEYKWNSAASSIMWRNYNFPVYLLSESGISAVHEILSKKKMKHGTYTSDVAEFNMVMETTKAGTHNSEACLQEGTCLPLGGYSVWSSLPPISVSSSNNRKPVVLTVASMDTASFFRDKSFGADSPISGLVALLGAVDALSRVDGISNLKKQLVFLVLTGETWGYLGSRRFLHELDLHSDAVAGLSNTSIETVLEIGSVGKGLSGGINTFFAHKTRVSSVTNMTLDALKIAQDSLASKNIKILSADTANPGIPPSSLMAFMRKNPQTSAVVLEDFDTNFVNKFYHSHLDDLSNINSSSVVAAASVVARTLYILASDNKDTSNSALGSIHVNASFVEELLTCLLACEPGLSCNLVKDYISPTNTCPGNYAGVILGEPSSKPYLGYVGDVSRFLWNFLADKTSVQKGNTTSVCSKGVCSKTDEVCIKAESNKEGTCVVSTTRYVPAYSTRLKYNDGAWTILPQNSSDSMGMVDPVWTESNWDTLRVHVYTVQHSAYDNAVLVAGITVTTLAYIGILAAKSIITKALKQD

SEQ ID NO: 6302 - protein, 381 aa, Arabidopsis thaliana
  Clone ID: ARATH-23APR03-C28532_1.p
MASGCVKNVGTSPSHSWTSSKMSLTRESQPLAPALENEDPVDDFEFLLEDPVTMLSADELFSDGKLVPLKFSGVTYPEEKPITSVVHTAVKPCRRLEMEISGVVDPYLFSPRAPRCTVRWRELLGLKRLAKTQQEASASSSSRLSSSSPNPKTASFRHFLNRSSKSTAQQPSHPPPGKDSDILESSSTSISSSRLSLSSSSSSGHELDDLPRLSLDLDNKPGTPNPFARSRAHHHHHLRNQNQPRKPRRHTQVDESTESSIESRVMTVTADSPRLNASGKIVFHGLERSSSSPGNFTGGPRMKLHHGMPRSHSANVRITPVLNVPVSSLRSGPKSGLFFGQLFASSSSASSSSSSGNRAQLQSNNIKNRTNRSRLEPTSEL

SEQ ID NO: 6303 - protein, 469 aa, Arabidopsis thaliana
  Clone ID: ARATH-23APR03-C28548_1.p
MSSVFSDQILIDKLAKLNSSQQSIETLSHWCIFNRSKAELIVTTWEKQFHSTEMDQKVPLLYLANDILQNSKRQGNEFVQEFWNVLPKALKDIVSQGDDNGKSAVARVIKIWEERRVFGSRSKSLKDVMLGEDVPLPLDISKKRPRGSKSSKRESKSSRTKLTSSGGVAEKVASAYHLVVAENSNEEAEMNKCKSAVKRIRKMEKDVEEACSTAKDNPKRKSLAKELEEEEYLLRQCIEKLKSVQGSRSSLVNQLKDALREQESELDNLKAQIQVAKEQTEEAQNMQKRLNDEDYTSKQTTAATTITETNDNTKSGQASKMTPASIAAMLTASTSSHMIMQSVLSSFAAEATKTSGLSKSESTVPVSDTNASFPSYNNSQNQTPTTQGQYHVIPNPPPPQFLKPPVMNNPYAFGNIPLMPPGLPPPPPPPHLIGNQQPQIPQSNSAQQSQQGPTFQPPGIMYYGAPHHS

SEQ ID NO: 6304 - protein, 309 aa, Arabidopsis thaliana
  unsure (1)..(309): unsure at all Xaa locations
  Clone ID: ARATH-23APR03-C28597_1.p
ATRKRNNLTDSFIRRRRQQSIFFSPFLVSILQISSPSRFIINIEMASSKGSQNHRNLGCNGKQALLPPKSPFTGGPTFSADFVPSSVIGSKAVQKLGEGNANHHRTSSESFLIEEQPSWLDDLLNEPETPVRKGGHRRSSSDSFAYVDVPVGFDVDYTLWDGGRYNNNNGFSNHVRGPKESDYLRSQPVPFYPSAHLSKQKIRPWDSLPDSGARPNSSSGCXESSSITRSGSSGSLRDTEKAYSAADSKKDFINNFAKSSFEKRDNPLAKSATSEADTKRARQQFAQRSRVRKIQYIAELERNVQMLQV

SEQ ID NO: 6305 - protein, 352 aa, Arabidopsis thaliana
  Clone ID: ARATH-23APR03-C28602_1.p
MNPLTQVKNLQKINARESDLGISDEASWHAKYKNSAYVYVGGIPFDLTEGDLLAVFSQYGEIVDVNLIRDKGTGKSKGFAFLAYEDQRSTILAVDNLNGALVLGRTIKVDHCGAYKKHEEEDEETRRQNREARGVCRAFQRGECTRGDSCKFSHDEKRAANTGWGHEEDRSSKWDHDNNREGRGVCRAFQRGECTRGDSCKFSHDEKRAATTGWGHEEDRSSKWDQDKLNGAKKGGTSFGNRGDFKPDVEEKSYRGRGDGDASYGRPKERERVDREDMGPRSRDAYDMKEQKRSGRYDNAHSRRHNDEIDYIREDKGSRAQDWEKRKAESRRDRNDREEKDRDSLRREDRRR

SEQ ID NO: 6306 - protein, 478 aa, Arabidopsis thaliana
  Clone ID: ARATH-23APR03-C2870_1.p
MATYVSPCFTPSDSRLLTVLRKNVLPENHLGRLNSIRTIDSKKNRVVVAAQKSESSPIRNSPRHYQSQAQDPFLNLHPEISMLRGEGTSTIVNPRKETSSGPVVEDFEEPSAPSNYNEARIKVIGVGGGGSNAVNRMIESEMSGVEFWIVNTDIQAMRMSPVLPDNRLQIGKELTRGLGAGGNPEIGMNAARESKEVIEEALYGSDMVFVTAGMGGGTGTGAAPVIAGIAKAMGILTVGIATTPFSFEGRRRTVQAQEGLASLRDNVDTLIVIPNDKLLTAVSQSTPVTEAFNLADDILRQGVRGISDIITIPGLVNVDFADVRAIMANAGSSLMGIGTATGKSRARDAALNAIQSPLLDIGIERATGIVWNITGGSDLTLFEVNAAAEVIYDLVDPTANLIFGAVVDPALSGQVSITLIATGFKRQEEGEGRTVQMVQADAASVGATRRPSSSFRESGSVEIPEFLKKKGSSRYPRV

SEQ ID NO: 6307 - protein, 283 aa, Arabidopsis thaliana
  Clone ID: ARATH-23APR03-C29025_1.p
ERCESLCSDELISSSDAFYLKTRKPYTITKQREKWTEAEHEKFVEALKLYGRAWRRIEEHVGTKTAVQIRSHAQKFFTKVARDFGVSSESIEIPPPRPKRKPMHPYPRKLVIPDAKEMVYAELTGSKLIQDEDNRSPTSVLSAHGSDGLGSIGSNSPNSSSAELSSHTEESLSLEAETKQSLKLFGKTFVVGDYNSSMSCDDSEDGKKKLYSETQSLQCSSSTSENAETEVVVSEFKRSERSAFSQLKSSVTEMNNMRGFMPYKKRVKVEENIDNVKLSYPLW

SEQ ID NO: 6308 - protein, 399 aa, Arabidopsis thaliana
  Clone ID: ARATH-23APR03-C290_1.p
MHSTGKRNFLAVIRLLFTSSSLVRKAGCRNLISATFTTRCSTLCLNESEECIEDSDLSSRRKKFDYVGEVGEKEKVRDITSSPLQVLRRWGCDDEEISKLFTRRPALQRANVAQLEFKLSLLKPLGITSSDLVKILNCRPRFFSCRLVLDERINYFMEILGSKEVLRRVIIRNPSLMLYDLDDKIKPAIEYYKGLGFSQQDLVAMLISRPTLIPRTNFNNEKFEYIEKTGVTRESKMFKYVAVIIGVSRMETIEEKVRNLEKFGFSEEEIWHLYGKCPILLSLSVEKVQRNMTFVIASMKLPAHSVVKHPCLLLLNLESRLKPRADLVKRVLEMRLKPLIKEVSIFRAVRMSEKRFLKVYVMCHPQDIATELMEFYEKSKNMKRLAEKSKKYIRKGFPF

SEQ ID NO: 6309 - protein, 754 aa, Arabidopsis thaliana
  Clone ID: ARATH-23APR03-C2912_1.p
MKGETYRVFCVGTADTKLDELRFLAGSVRSNIGAFSKNSSSKVEVVIVDVSAGADQKQIDNVADFAFVTREEVLSCYIGSNQEEKPVKLPDDRGEAVGVMSKCLENFLRQAFEDNSLAGAIGLGGSGGTSLISSAFRSLPIGIPKVIVSTVASGQTEPYVGTSDLVLIPSLVDVCGINSVSRVVFSNAGASFAGMVVGRLELFRSSPSDNGKCTVGITMFGVTTPCVNAVQEILTREGYETLVFHATGVGGRAMESLVKEGFIQGVMDITTTEVADHLVGGVMACDSSRFDITIEKGIPLVLSVGALDMVNFGGKDTIPSHFQTRKIHVHNEQVSLIRTTAEENKKFARFIADKLNKSTSKVRVCIPEKGLSALDAPGKPFCDPEATGALINELQGLIQTNDDRQVNIYSHHINDPEFAEALVASFLEICPKTYAQIKPSETTSTKPSTGEHDDGHVRSRLERIPYSPKEFPNAKPETLERTQAILGRLRDQIEKGIPIIGGGAGTGISAKFEEAGGIDLIVIYNSGRFRMAGRGSLAGLLPFADANAVVLEMANEVLPVVKAVPVLAGVCATDPFRRMDYFLKQLESIGFVGVQNFPTVGLFDGNFRQNLEETGMGYGLEVKMISEAHKMGLLTTPYAFNPKEGEEMAKAGADIIVAHMGLTTSGNIGAKTAVSVEESVVRVQAIADAARRFNPDIIVLCHGGPISGPEEAEFVLKRTQGCVHGFYGASSMERLPVEQAITNTVQKYKSISIK

SEQ ID NO: 6310 - protein, 841 aa, Arabidopsis thaliana
  Clone ID: ARATH-23APR03-C29259_1.p
MVGSGARVSISATTRKMIQNIKETTAGNYSEDEIIAMLHECNMDPDETAQRLLLQDPFHVGIAKRVERVQNINNRDSAESQWRSGGGGRGSRGGRMNFSSRHASNDVAGAKNSFKKENGPKQVIDPSTSTSQEIKTKDIALVSSHSAVMDKSTVGPKSGSSDVRQSSNLPAGSGQLKAGRSSVPSNNIDGAPSSVELSKNRVAVGSRVVHTEQKAVDSLPLPRPSSSEVRFTSSNPKSEQTAPEQHIGESKSHTRSRGVGKTAVNDTYGSRPASSHSNSTGSRPSSNYSNRSHQTVGPQRGAGSIKEWKPKPVVNHNTTQGSGASSTGETLAVPTEASDKSVEDATPSAEATSRLQRQLEDLQIQRQHVIIPNHILVPEAERTKLSFGSFDADFSITSSTVAFPQSEKRSAPLSHNSQEVEESFAEEEFRHPTVHSIEKEEDGNVYSESPSQVPDNMAGEGNTATNTAPEYDVTKQENMLESESNQNSFDQVPSNIIGIVPPAPGNQHPQFETSDPQARDALRLPSFMGQQPFDTASYYAQFYRSGPDSDGRVSPFVSPGVASKFNGITVLPPHSSQTMQEGGNNLVLSTASPPPLVTQAAGLMQSSIPVTQQPVPVFRPPGLHMSHYPPNYVPYGYFSPFYLPPPTMHQYLSNGAYAQQPQASGVYPPPPGTATGGKYTLPHYKPGTNTGNMTHVGITGGYGPTYGSFPAGYNPTSAASAGNSTSNEDLNSLQLKENNGYSTTGQQSEALPVWITGPGRDVPSSFYGLQHHGQHVTYAPAQAGHVAFPGMYHPGQAVTATGVHHPLLQQSQGVAGAEMVAPAPNVFQQPQQTQMNWPSNY

SEQ ID NO: 6311 - protein, 271 aa, Arabidopsis thaliana
  Clone ID: ARATH-23APR03-C29761_1.p
MDVIATTTTIVSDLDSRQPEIEAPIRIQPAKPISFSNGKRCHHHHLASEAVAVATYKECLKNHAAGIGGHALDGCGEFMPSPSFNSNDPASLTCAACGCHRNFHRREEDPSSLSAIVPAIEFRPHNRHQLPPPPPPHLAGIRSPDDDDSASPPPISSSYMLLALSGGRGGANTAVPMSRKRFRTKFSQYQKEKMFEFSERVGWRMPKADDVVVKEFCREIGVDKSVFKVWMHNNKISGRSGARRANGGVVVGGVGDSRQSVVPTNGSFSST

SEQ ID NO: 6312 - protein, 547 aa, Arabidopsis thaliana
  Clone ID: ARATH-23APR03-C29795_1.p
MFKPQHMYDREFGTGNGYSNGNGYTNGNGHTNGNGNYNGNGHVNGNGKANGAKVVKMKPMDSELLREQGHIMVDFIADYYKNLQDSPQDFPVLSQVQPGYLRDMLPDSAPERPESLKELLDDVSKKIMPGITHWQSPSYFAYYASSTSVAGFLGEMLNAGLSVVGFTWLTSPAATELEIIVLDWLAKLLQLPDHFLSTGNGGGVIQGTGCEAVLVVVLAARGRILTDPRVRLLPQLVVYGSDQTHSSFRKACLIGGIHEENIRLLKTDSSTNYGMPPESLEEAISHDLAKGFIPFFICATVGTTSSAAVDPLVPLGNIAKKYGIWLHVDAAYAGNACICPEYRKFIDGIENADSFNMNAHKWLFANQTCSPLWVKDRYSLIDALKTNPEYLEFKGQVSKKDTVVNYKDWQISLSRRFRSLKLWMVLRLYGSENLRNFIRDHVNLAKHFEDYVAQDPSFEVVTTRYFSLVCFRLAPVDGDEDQCNERNRELLAAVNSTGKIFISHTALSGKFVLRFAVGAPLTEEKHVTEAWQIIQKHASKFTRNDHY

SEQ ID NO: 6313 - protein, 481 aa, Arabidopsis thaliana
  unsure (1)..(481): unsure at all Xaa locations
  Clone ID: ARATH-23APR03-C2980_1.p
CREKELVCETSKSTDNGAAKSHAKNASPAGKSAASDSGFKDGNLKSSGNNNNNNNNAXVVRMVSVNIFRTLXSSTKQNLFIKKLNLCRVVFDFTDPTKNIKEKDIKRQTLLELVDYVNSPNGKFSEVGIQEVVRMVSANIFRTLNPQPRERSTSHLXKFMVHSPFIRKSINNIFYRFVFETEXTQSPETDTKLAKRYIDQSFVLRLLDLFDSEDPRERDCLKTILHRIYGKFMVHRPFIRKSINNIFYRFVFETEKHNGIAEFLEILGSIINGFALPLKDEHKVFLVRVLIPLHKPKCLQMYHQQLSYCITQFVEKDCKLADTVIRGLLKYWPVTNSSKEVMFLNELLEASXATQPPEFQGCMVPLFRQIARCLNSLHFQVAERALFLWNNNHIENLIMQNRKVFLPIIFPAWERNAQKHWNQAVHSLTLNVRKIFHDLDPELFKECLAKFKEDESKAAETEAKREATWKRLEELGVRKAS

SEQ ID NO: 6314 - protein, 575 aa, Arabidopsis thaliana
  Clone ID: ARATH-23APR03-C29842_1.p
MSGNSEGLLESSGGGVGGSVEEEKDMKMEETGEGAGSGGNRWPRPETLALLRIRSEMDKAFRDSTLKAPLWEEISRKMMELGYKRSSKKCKEKFENVYKYHKRTKEGRTGKSEGKTYRFFEELEAFETLSSYQPEPESQPAKSSAVITNAPATSSLIPWISSSNPSTEKSSSPLKHHHQVSVQPITTNPTFLAKQPSSTTPFPFYSSNNTTTVSQPPISNDLMNNVSSLNLFSSSTSSSTASDEEEDHHQVKSSRKKRKYWKGLFTKLTKELMEKQEKMQKRFLETLEYREKERISREEAWRVQEIGRINREHETLIHERSNAAAKDAAIISFLHKISGGQPQQPQQHNHKPSQRKQYQSDHSITFESKEPRAVLLDTTIKMGNYDNNHSVSPSSSRWPKTEVEALIRIRKNLEANYQENGTKGPLWEEISAGMRRLGYNRSAKRCKEKWENINKYFKKVKESNKKRPLDSKTCPYFHQLEALYNERNKSGAMPLPLPLMVTPQRQLLLSQETQTEFETDQREKVGDKEDEEEGESEEDEYDEEEEGEGDNETSEFEIVLNKTSSPMDINNNLFT

SEQ ID NO: 6315 - protein, 561 aa, Arabidopsis thaliana
  unsure (1)..(561): unsure at all Xaa locations
  Clone ID: ARATH-23APR03-C2995_1.p
KTPVGGKESIRQDLEVLTVSRRLVKSVGHEXKKKNHKDEVVEDGGGARGGGNCLSISVGCRVADTGEDFEDLSNKRWSSASEEGKGLMTICGTEENRLDCFSYGVRERFWKKNNRRXLADSGQDYRKHVYLPDDILEMCLMRLPLTSLLNAHLVCKKWQSMANTQRFLQMRREGSFQTPWLFLFAALKDGCSSGDIHGYDVSQDKWHRIETDLLKGRFMYSVTSIHEEIYIVGGRSMDRNSFKSHRGILVFSPSIKAWRKIASMRHARSLPIVGATEVTSEFSTMQTKQNRQDRRFHLSRVGGESDVYEDPHRLSVRRQNRNSADQNGTKSHRLIRQKLDRLNRNSSKRFVLIAIGGTGIFDEPLDSGEIYDSATTNTWSEMQRLPMGFGVVSCGIICNGIFYAYSENDKLSGYDIERGFWITIQTSPIPPRVHEFYPKLVSCNHRLFMLSVSWCDEGDGQIGRRNKKVGKKRGLEHVVLIXSEVSVLHHAPMNWSATNVLEHHILLRVEKIKMIWAEVLSFFTVCDVLTEEASWRHVSRNQRSQKLNLSCTNKTIALLHL

SEQ ID NO: 6316 - protein, 708 aa, Arabidopsis thaliana
  Clone ID: ARATH-23APR03-C2998_1.p
MMSDISIDALGQTMGDFSNHEKLGFDLGAFVGDLAFEEDSGSEDISLEGLQQELEECVNYEVVANILSSGDKLREYAKGVENNLRKVELDSIEDYIKESDNLVSLHDQIRDCDSILSQMETLLSGFQEEIGSISSDIKILQEKSMDMGLRLKNRRVAESKLAKFVEDIIVPPKMIDVIVDGEVNEEYMKTLEILSKKLKFVEADQAVKSSKALKDVEPELEKLRQKAISKVYDFIVQKLIALRKPKTNIQILQQSVLLKYKYIISFLKEHGKEVFMDVRAAYIDTMNKVLSAHFRAYIQALEKLQLDIATAYDLIGVETRTTGLFSRAREPLKNRSAVFALGDRIKIIKDIDQPALIPHIAEASSLKYPYEVLFRSLHKLLMDTATSEYMFCDDFFGEESIFYEIFAGPFSVIDEHFNPVLSNCFDAIGLMLMIRIIHHHQLIMSRRRIPCLDSYLDKVNISLWPRFKMVFDSHLSSLRDANIKTLWEDDVHPHYVMRRYAEFTASFIHLNVEYGDGQLDINLERLRMAVDGLILKLAKLFPRPKQQIVFLINNYDMTIAVLKEAGPEGGKIQMHFEEMLKSNTSLFVEELLVEHFSDLIKFVKNRASEDSSLNPERSITIAEVEPLVKDFGSRWKTAIELMDKDIITSFSNFLCGMDILRAALTQLLLYYTRLTDCIKKIDGGSALNRDLVSIQSIMYEIRKYSKTF

SEQ ID NO: 6317 - protein, 560 aa, Arabidopsis thaliana
  Clone ID: ARATH-23APR03-C3001_1.p
SPPPPRESQIFLHGSFEKRSSMESSLFSPSSSSYSSLFTAKPTRLLSPKPKFTFSIRSSIEKPKPKLETNSSKSQSWVSPDWLTTLTRTLSSGKNDESGIPIANAKLDDVADLLGGALFLPLYKWMNEYGPIYRLAAGPRNFVIVSDPAIAKHVLRNYPKYAKGLVAEVSEFLFGSGFAIAEGPLWTARRRAVVPSLHRRYLSVIVERVFCKCAERLVEKLQPYAEDGSAVNMEAKFSQMTLDVIGLSLFNYNFDSLTTDSPVIEAVYTALKEAELRSTDLLPYWKIDALCKIVPRQVKAEKAVTLIRETVEDLIAKCKEIVEREGERINDEEYVNDADPSILRFLLASREEVSSVQLRDDLLSMLVAGHETTGSVLTWTLYLLSKNSSALRKAQEEVDRVLEGRNPAFEDIKELKYITRCINESMRLYPHPPVLIRRAQVPDILPGNYKVNTGQDIMISVYNIHRSSEVWEKAEEFLPERFDIDGAIPNETNTDFKFIPFSGGPRKCVGDQFALMEAIVALAVFLQRLNVELVPDQTISMTTGATIHTTNGLYMKVSQR

SEQ ID NO: 6318 - protein, 564 aa, Arabidopsis thaliana
  Clone ID: ARATH-23APR03-C3008_1.p
MEALLLPPSPEPQNQITNPANSKPNHQSGDVHKDETMMMKKKKDTNPSNLEKRKLKGKKKEIMDNDEASSSYCSTSSTSNSNSTKRVTRVVHRLRNPMRLGMARRSVGERQAEKLAKPLGFSLAAFANMVIARKNAAGQNVYVDDLVEIFATLVEESLANVYGNKLGSFATNFEQTFSSTLKILKLTNECANPHQSNNNDGGSCNLDRSTIDGCSDTELFERETSSATSAYEVMQGSATATSLMNELALFEETLQLSCVPPRSSAMALTTDERFLKEQTRANDLKTVEIGLQIRELRCKETALGLKFESNNLGKAALELDVSKAAFRAEKFKTELEDTRKEEMVTRIMDWLLVSVFSMLASMVLGVYNFSIKRIEDATSVCDQSEEKSSSWWVPKQVSSINSGFNTFICRVRVWVQIFFGVLMIIVFTYFLNKRSSGTKQTMPISFIVLFLGIFCGVSGKLCVDTLGGDGKLWLIVWEVFCLLQFVANVFTLALYGLMFGPINVTQETRSNRCNSMFPYWARRSVVYVVILFVLPVINGLLPFATFGEWRDFAMYHLHGGSDYA

SEQ ID NO: 6319 - protein, 100 aa, Arabidopsis thaliana
  Clone ID: ARATH-23APR03-C30130_1.p
MSSTARNISGSGNRKSSRLQRRAPPPLKINPCEANWKVAIPLLSPTESPPQKPPAVMKREEQRWGKEAEKPPVFKKWQHPAAPFYYQPAPSSNQPFAWPN

SEQ ID NO: 6320 - protein, 626 aa, Arabidopsis thaliana
  Clone ID: ARATH-23APR03-C3015_1.p
MPGIPLVSRETSSCSRSTEQMCHEDSRLRISEEEEIAAEESLAAYCKPVELYNIIQRRAIRNPLFLQRCLHYKIEAKHKRRIQMTVFLSGAIDAGVQTQKLFPLYILLARLVSPKPVAEYSAVYRFSRACILTGGLGVDGVSQAQANFLLPDMNRLALEAKSGSLAILFISFAGAQNSQFGIDSGKIHSGNIGGHCLWSKIPLQSLYASWQKSPNMDLGQRVDTVSLVEMQPCFIKLKSMSEEKCVSIQVPSNPLTSSSPQQVQVTISAEEVGSTEKSPYSSFSYNDISSSSLLQIIRLRTGNVVFNYRYYNNKLQKTEVTEDFSCPFCLVKCASFKGLRYHLPSTHDLLNFEFWVTEEFQAVNVSLKTETMISKVNEDDVDPKQQTFFFSRRRQKSQVRSSRQGPHLGLGCEVLDKTDDAHSVRSEKSRIPPGKHYERIGGAESGQRVPPGTSPADVQSCGDPDYVQSIAGSTMLQFAKTRKISIERSDLRNRSLLQKRQFFHSHRAQPMALEQVLSDRDSEDEVDDDVADFEDRRMLDDFVDVTKDEKQMMHMWNSFVRKQRVLADGHIPWACEAFSRLHGPIMVRTPHLIWCWRVFMVKLWNHGLLDARTMNNCNTFLEQLQI

SEQ ID NO: 6321 - protein, 376 aa, Arabidopsis thaliana
  Clone ID: ARATH-23APR03-C303_1.p
MEPQILFLYLSLFILSLNFFFTNLKPRLVRLFQPSLESRVKTALLSRKEVAAFLDSPIVEDEEGEEREEEEEGGIVSNANFTFEFDPYMMSKAESVNKALEEAIPVGEPLKIHEAMRYAILAAGKRVRPILCLASCELVGGQENAAMPAACAVEMIHTMSLIKDDLPCMDNDDLRRGKPTTHKVYGEGVAILSGGALLSLAFEHMTTAEISSERMVWAVRELARSIGTRGLVAGQAMDISSEGLDLNEVGLEHLEFIHVHKTAVLLETAAVLGAIIGGGSDEEIESVRKFARCIGLLFQVVDDILDETKSSEELGKTAGKDQLAGKLTYPKLIGLEKSKEFVKRLTKDARQHLQGFSSEKVAPLVALTTFIANRNK

SEQ ID NO: 6322 - protein, 264 aa, Arabidopsis thaliana
  Clone ID: ARATH-23APR03-C30887_1.p
MEKEEGETTTTIGVVPAAPAKLPTPIYSLSFWEVTAASGVVLGFILGLVCVYLTMPQSDYSFLKLPRNLEDLQILRDNLEIYTSDYTVQVLVGYCLVYVFMQTFMIPGTVFMSLLAGALFGVVKGMALVVSTATAGASSCYFLSKLIGRPLLLSLWPDKLVFFQDQVARRKDRLLNYMLFLRLTPTLPNTFINVASPIVDVPYHIFFLATFIGLIPAAFVTVRAGLALGELKSLGDLYDFSSMATLCLIGVLSVTPTLIGKKQA

SEQ ID NO: 6323 - protein, 395 aa, Arabidopsis thaliana
  Clone ID: ARATH-23APR03-C30893_1.p
MRAKAASGKAIIVLCLASFLAGSLFMSRTLSRSYIPEEEDHHLTKHLSKHLEIQKDCDEHKRKLIESKSRDIIGEVSRSHQAVKSLERTMSTLEMELAAARTSDRSSEFWSERSAKNQSRLQKVFAVIGINTAFSSKKRRDSVRQTWMPTGEKLKKIEKEKGIVVRFVIGHSATPGGVLDKAIDEEDSEHKDFLRLKHIEGYHQLSTKTRLYFSTATAMYDAEFYVKVDDDVHVNLGMLVTTLARYQSRPRIYIGCMKSGPVLSQKGVKYHEPEFWKFGEEGNKYFRHATGQIYAISKDLATYISTNQGILHRYANEDVSLGAWMLGLEVEHVDERSMCCGTPPDCQWKAQAGNVCAASFDWSCSGICKSVDRMARVHRACAEGDTPLANFRFFV

SEQ ID NO: 6324 - protein, 473 aa, Arabidopsis thaliana
  Clone ID: ARATH-23APR03-C308_1.p
MCLSLASTAHRNTQFRSRVLVLAELVKSMGHQNAAVSENQNHDDGAASSPGFKLVGFSKFVRKNPKSDKFKVKRFHHIEFWCGDATNVARRFSWGLGMRFSAKSDLSTGNMVHASYLLTSGDLRFLFTAPYSPSLSAGEIKPTTTASIPSFDHGSCRSFFSSHGLGVRAVAIEVEDAESAFSISVANGAIPSSPPIVLNEAVTIAEVKLYGDVVLRYVSYKAEDTEKSEFLPGFERVEDASSFPLDYGIRRLDHAVGNVPELGPALTYVAGFTGFHQFAEFTADDVGTAESGLNSAVLASNDEMVLLPINEPVHGTKRKSQIQTYLEHNEGAGLQHLALMSEDIFRTLREMRKRSSIGGFDFMPSPPPTYYQNLKKRVGDVLSDDQIKECEELGILVDRDDQGTLLQIFTKPLGDRPTIFIEIIQRVGCMMKDEEGKAYQSGGCGGFGKGNFSELFKSIEEYEKTLEAKQLVG

SEQ ID NO: 6325 - protein, 623 aa, Arabidopsis thaliana
  unsure (1)..(623): unsure at all Xaa locations
  Clone ID: ARATH-23APR03-C30962_1.p
MAVDKVIVKQRNIILVGIPIDESGVEVLKWALEEVAKHGDCVVVVHVCFTYYRALKSKSSLDRYLKPYIEFCSTKKIELKGEVLKGNSVLGVLVKEAKRYNAMSVVVGVKQQSKLRYFFISLKIAKGCAKELPSTTDILAIHRGNIVFRRSNHYQLPLAQKISSRPSSELSEGFSDKDLAKTTGQEKRKISGRSLSLPSVEVVDQTPGWPLLRTSTLATPMVQHQTRKISVVNWVMSLPERFPHHPNQTCQQSFCDKQLKDILKDINRWFSYDVLKTATSDFSLENLIGKGGCNEVYKGFLEDGKGVAVKILKPSVKEAVKEFVHEVSIVSSLSHSNISPLIGVCVHYNDLISVYNLSSKGSLEETLQGKHVLRWEERLKIAIGEGEALDYLHNQCSNPVIHRDVKSSNVLLSDEFEPQLSDFGLSMWGSKSCRYTIQRDVVGTFGYLAPEYFMYGKVSDKVDVYAFGVVLLELISGRTSISSDSPRGQESLVMWAKPMIEKXGNAKELLDPNIAGTFDEDQFHKMVLAATHCLTRAATYRPNIKEILKLLRGEDDVSKWVKIEEDDEDGFDDEVYPNSNTELHLSLAMVDVEDNDSVSNSSLERSNNSLFSSSSSSSQELQS

SEQ ID NO: 6326 - protein, 112 aa, Arabidopsis thaliana
  Clone ID: ARATH-23APR03-C3098_1.p
MVELDIQIPSAYDPFAEAKDSDAPGAKENIHIRIQQRNGKKSLTTVQGLKKEYSYERILKDLKKDFCCNGNVVQDKELGKIIQLQGDQRKKVSQFLVQTGIAKKDQIKIHGF

SEQ ID NO: 6327 - protein, 405 aa, Arabidopsis thaliana
  Clone ID: ARATH-23APR03-C3104_1.p
MAFLFRIRTSEFILQKATQFRLKSSSSSIFTLKSLTSKQKKSRDTLSLLKSENNPDRILEICRSTSLSPDYHVDRIIFSVAVVTLAREKHFVAVSQLLDGFIQNQPDPKSESFAVRAIILYGRANMLDRSIQTFRNLEQYEIPRTVKSLNALLFACLMAKDYKEANRVYLEMPKMYGIEPDLETYNRMIRVLCESGSTSSSYSIVAEMERKWIKPTAASFGLMIDGFYKEEKFDEVRKVMRMMDEFGVHVGVATYNIMIQCLCKRKKSAEAKALIDGVMSCRMRPNSVTYSLLIHGFCSEENLDEAMNLFEVMVCNGYKPDSECYFTLIHCLCKGGDFETALILCRESMEKNWVPSFSVMKWLVNGLASRSKVDEAKELIAVVKEKFTRNVDLWNEVEAALPLPQ

SEQ ID NO: 6328 - protein, 197 aa, Arabidopsis thaliana
  Clone ID: ARATH-23APR03-C31097_1.p
MASIFRPSSASLDLRPKVICTNLSTKERFEFQKKSVRKERINVRFYSLKAKAQGSSIEGISVVQEKELNNKTDYGVVGVHHVGLLCENLERSLEFYQNILGLEINEARPHDKLPYRGAWLWVGSEMIHLMELPNPDPLTGRPEHGGRDRHACIAIRDVSNLKEILDKAGIAYTMSKSGRPAIFTRDPDANALEFTQV

SEQ ID NO: 6329 - protein, 215 aa, Arabidopsis thaliana
  Clone ID: ARATH-23APR03-C31172_1.p
MKNPSVISFLIILLFAATICTHGNEPVKDTAGNPLNTREQYFIQPVKTESKNGGGLVPAAITVLPFCPLGITQTLLPYQPGLPVSFVLALGVGSTVMTSSAVNIEFKSNIWPFCKEFSKFWEVDDSSSAPKEPSILIGGKMGDRNSSFKIEKAGEGARANVYKLTTFYGTVGAIPGVWLSAPQLIITKDTAKTLLVKFKKVDDATTATSNLYFPG

SEQ ID NO: 6330 - protein, 440 aa, Arabidopsis thaliana
  Clone ID: ARATH-23APR03-C3117_1.p
MCRQNCRAKSSPEEVISTDENLLIYCKPVRLYNIFHLRSLGNPSFLPRCLNYKIGAKRKRKSRSTGMVVFNYKDCNNTLQKTEVREDCSCPFCSMLCGSFKGLQFHLNSSHDLFEFEFKLSEEYQTVNVSVKLNSFIFEEEGSDDDKFEPFSLCSKPRKRRQRGGRNNTRRLKVCFLPLDSPSLTNGTENGITLLNDGNRGLGYPEATELAGQFEMTSNIPPAIAHSSLDAGAKVILTSEAVVPATKTRKLSAERSEARSHLLLQKRQFYHSHRVQPMALEQVMSDRDSEDEVDDDVADFEDRQMLDDFVDVNKDEKQFMHLWNSFVRKQRVIADGHISWACEAFSRFYEKELHRYSSLFWCWRLFLIKLWNHGLVDSATINNCNTILENCRNSSVTNNNNNSVDRPSDSNTNNNNIVDHPNDIKNKNNVDNKDNNSRDK

SEQ ID NO: 6331 - protein, 805 aa, Arabidopsis thaliana
  unsure (1)..(805): unsure at all Xaa locations
  Clone ID: ARATH-23APR03-C3120_1.p
ASGEIPPSTPPSSSTPSPSSSPTNAARMGSSVIPIVNKLQDIFAQLGSQSTIALPQVVVVGSQSSGKSSVLEALVGRDFLPRGNDICTRRPLVLQLLXQTKSRRXMAGSDEEWGEFRHLPETRFYDFSEIRREIEAETNRLVGENKGVADTQIRLKISSPNVLNITLVDLPGITKVPVGDQPSDIEARIRTMILSYIKQDTCLILAVTPANTDLANSDALQIASIVDPDGHRTIGVITKLDIMDKGTDARKLLLGNVVPLRLGYVGVVNRCQEDILLNRTVKEALLAEEKFFRSHPVYHGLADRLGVPQLAKKLNQILVQHIKVLLPDLKSRISNALVATAKEHQSYGELTESRAGQGALLLNFLSKYCEAYSSLLEGKSEEMSTSELSGGARIHYIFQSIFVKSLEEVDPCEDLTDDDIRTAIQNATGPRSALFVPDVPFEVLVRRQISRLLDPSLQCARFIFEELIKISHRCMMNELQRFPVLRKRMDEVIGDFLREGLEPSEAMIGDIIDMEMDYINTSHPNFIGGTKAVEAAMHQVKSSRIPHPVARPKDTVEPDRTSSSTSQVKSRSFLGRQANGIVTDQGVVSADAEKAQPAANASDTRWGIPSIFRGGDTRAVTKDSLLNKPFSEAVEDMSHNLSMIYLKEPPAVLRPTETHSEQEAVEIQITKLLLRSYYDIVRKNIEDSVPKAIMHFLVNHTKRELHNVFIKKLYRENLFEEMLQEPDEIAVKRKRTQETLHVLQQAYRTLDELPLEADSVSAGMSKHQELLTSSKYSTSSSYSASPSTTRRSRRAGDQHQNGYGF

SEQ ID NO: 6332 - protein, 1069 aa, Arabidopsis thaliana
  unsure (1)..(1069): unsure at all Xaa locations
  Clone ID: ARATH-23APR03-C31233_1.p
MKGRSYRFSSTDPHEDWVDGLWTVDCVCGVNDDDGTEMVKCDDCGVWVHTRCSRFVEGQELFTCHKCKSKNNVNDSEETEVAQLLVELPTKTLGMENSCTRSVPFKRPFRLWTHASADAWVHVQGIPGGDPSLFDGLSSVFSRELWKCSGYVPKKFNLKYREFPCWDEQEKDEDGAGVLFSMSKENVIAAPVSTLVGMRRSLDGKGGTNDVKLGCDSGETDRKHSQGAIKKDKRLLRPMMTNKRRKELFGASKERMKKKVEVVDKEEDDKKGFVGKTGNRPASDAKPSESRKDIEAEGFTSDVGITKSVKAKKAALETGGDESGNTEIGVECSREQNLSDVHANGTGKQEEKAGHHFRIVLKSSATTDPSVLGGRDVPHNEANKEEERQGTIADAPEDNAADSSESSQKPSLGSMVGKTREGEEKNCDDVSRKISTRKNKFQKETADTGASGALGLQTLDHMDSKVSGSSASQISGGSELNKMTPSSSLPDDHKPQSVEMVSEGISSGNRDRAIELKRELVVSETEKDIQETKPGSVLFQEPSKPCRPIPHTVSGNGRPKMVVCIGKTSSSSATEKSPKPSTSRNSIPGLKQQPGDDDNDANTNDEDCVSSDVIRERDGDDEPSEKAPKHPKFSITSKKSMQHNRTSHSSVSKTRESSSSSKTSSATRINGGSSEAPSKHSLSGTFPKNEKPGQSIFQSSTKNPVQSIISLAPNLSDEELALRLHHQLNSSPRVPRVPRMRQPGSLPLSPTAPSFKRTSSSGSKDHTTFSRRKNKDTSKEGYCNLRDDDRCSTRSAKNRRSPDRRTQQDSGSRGGSLCSKGEENETTKTSSYSSRKVLLPPNSTTSTSSGXPCSSSELNEHNKPSPHSSPRNNGTPVHRTLPGLINEIMNKGKRMAYEELCNAVLPHWPHLRKHNGERYAYSSHSQAVLDCLRNRHEWARLVDRGPKTNSGKKKRKLDAAEEDSDENESSKGGRKRLHQHHSQGEEFPKGKRKARKRRRLSIQRKGIKVLRKKRNEEEVSEEDEEDAFSDTSEESIFCDEEEEEEEEGHTATGTGQVSASSSEEAQATS

SEQ ID NO: 6333 - protein, 431 aa, Arabidopsis thaliana
  Clone ID: ARATH-23APR03-C3128_1.p
MGLSLRVRRRGGSVSKKEIIPVTSCSEEVEITIPSQFQCPISYELMKDPVIIASGITYDRENIEKWFESGYQTCPVTNTVLTSLEQIPNHTIRRMIQGWCGSSLGGGIERIPTPRVPVTSHQVSEICERLSAATRRGDYAACMEMVTKMTRLGKESERNRKCVKENGAGLVLCVCFDAFSENANASLLLEETVSVLTWMLPIGLEGQSKLTTTSSFNRLVELLRNGDQNAAFLIKELLELNVTHVHALTKINGVQEAFMKSINRDSTCVNSLISIHHMILTNQETVSRFLELDLVNITVEMLVDSENSVCEKALTVLNVICETKEGREKVRRNKLVIPILVKKILKISEKKDLVSVMWKVCKSGDGSEVEEALRLGAFKKLVVMLQVGCGEGTKEKVTELLKMMNKVMKMNGFVDRSYSSSIEFKHVKKPF

SEQ ID NO: 6334 - protein, 535 aa, Arabidopsis thaliana
  Clone ID: ARATH-23APR03-C3133_1.p
MDHSAKTTQNRVLSVKMWPPSKSTRLMLVERMTKNITTPSIFSRKYGLLSVEEAEQDAKRIEDLAFATANKHFQNEPDGDGTSAVHVYAKESSKLMLDVIKRGPQEESEVEVSKDGDVFFDISGGSRAFIEEEEARDLLRPLADPRNSYTKIRFSNRSFGSEAAKFAASVLSSIKDQLTEVDLSDFVAGRPEAEALEVMNMFSSALEGSKLRYLNLSDNALGEKGIRAFASLINSQHDLEELYLMNDGISEDAARAVRELLPSTDKIRVLQFHNNMTGDEGATAIAEIVRECPSLEDFRCSSTRIGSEGGVALAEALEHCSHLKKLDLRDNMFGVEGGIALAKTLSVLTHLTEIYMSYLNLEDEGTEALSEALLKSAPSLEVLELAGNDITVKSTGNLAACIASKQSLAKLNLSENELKDEGTILIAKAVEGHDQLVEVDLSTNMIRRAGARALAQTVVKKNTFKLLNINGNFISEEGIDEVNDMFKDCLDKLVPLDDNDPEGEDFEDEDEEEEGEDGNELESKLGSLKIKQGEE

SEQ ID NO: 6335 - protein, 428 aa, Arabidopsis thaliana
  Clone ID: ARATH-23APR03-C3164_1.p
MADLDLQRKMVSPKLHVTIPEPCKLSSVSSPISSSSSAACSAYELYLRLPELRNLWSSLYFPHWISEPVLKPALQALEITFRLILTVASDTRPYINRREWIRRLDSLTTSQIKIVAAICGDEDNYEENVSAAPVSNGWSSLSLLSEIATCRTSESVGQKILSTIENEMRWCKYTLGLGEPNLAGKPYLQYDAVCLPEELHSLKNNPYADHIENQENQMLYTSHQILESWIYVSVNLLYRIESRIEEGKFEKASSDVYLLERIWKLLSEIEDLHILMDPEDFLKVKKQLQIKSTFPNDAFCFRSKGLVEMAKMSKELRQKVPAVLEVEVDPTGGPRLQEAAMKLYSRKTEYEKIHLLQGMQAVESAAKRFFFGYQKLVAAMIGNAEANANRTVANHESYDSLTQVFMEPPYYPSLDAAKTFLGEFWSQL

SEQ ID NO: 6336 - protein, 1368 aa, Arabidopsis thaliana
  Clone ID: ARATH-23APR03-C31661_1.p
MARQMTSSQFHKSKTLDNKYMLGDEIGKGAYGRVYKGLDLENGDFVAIKQVSLENIVQEDLNTIMQEIDLLKNLNHKNIVKYLGSSKTKTHLHIILEYVENGSLANIIKPNKFGPFPESLVAVYIAQVLEGLVYLHEQGVIHRDIKGANILTTKEGLVKLADFGVATKLNEADVNTHSVVGTPYWMAPEVIEMSGVCAASDIWSVGCTVIELLTCVPPYYDLQPMPALFRIVQDDNPPIPDSLSPDITDFLRQCFKKDSRQRPDAKTLLSHPWIRNSRRALQSSLRHSGTIKYMKEATASSEKDDEGSQDAAESLSGENVGISKTDSKSKLPLVGVSSFRSEKDQSTPSDLGEEGTDNSEDDIMSDQVPTLSIHEKSSDAKGTPQDVSDFHGKSERGETPENLVTETSEARKNTSAIKHVGKELSIPVDQTSHSFGRKGEERGIRKAVKTPSSVSGNELARFSDPPGDASLHDLFHPLDKVSEGKPNEASTSMPTSNVNQGDSPVADGGKNDLATKLRATIAQKQMEGETGHSNDGGDLFRLMMGVLKDDVIDIDGLVFDEKVPAENLFPLQAVEFSRLVSSLRPDESEDAIVSSCQKLVAMFRQRPEQKVVFVTPRVRLPLMDLLDIPKSRVICAVLQLINEIVKDNTDFLENACLVGLIPLVMSFAGFERDRSREIRKEAAYFLQQLCQSSPLTLQMFISCRGIPVLVGFLEADYAKHREMVHLAIDGMWQVFKLKKSTSRNDFCRIAAKNGILLRLVNTLYSLSEATRLASISGGLDGQAPRVRSGQLDPNNPIFGQNETSSLSMIDQPDVLKTRHGGGEEPSHASTSNSQRSDVHQPDALHPDGDKPRVSSVAPDASTSGTEDVRQQHRISLSANRTSTDKLQKLAEGASNGFPVTQTEQVRPLLSLLDKEPPSRHYSGQLDYVKLDPRVRRHESRLPLLHGSNEKKNNGDLDFLMAEFAEVSGRGKENGSLDTTTRYPSKTMTKKVLAIEGVASTSGIASQTASGVLSGSGVLNARPGSATSSGLLAHMVSTLSADVAREYLEKVADLLLEFARADTTVKSYMCSQSLLSRLFQMFNRVEPPILLKILECTNHLSTDPNCLENLQRADAIKHLIPNLELKDGHLVYQIHHEVLSALFNLCKINKRRQEQAAENGIIPHLMLFIMSDSPLKQYALPLLCDMAHASRNSREQLRAHGGLDVYLSLLDDEYWSVIALDSIAVCLAQDNDNRKVEQALLKQDAIQKLVDFFQSCPERHFVHILEPFLKIITKSYRINKTLAVNGLTPLLISRLDHQDAIARLNLLKLIKAVYEHHPRPKQLIVENDLPQKLQNLIEERRDGQRSGGQVLVKQMATSLLKALHINTIL

SEQ ID NO: 6337 - protein, 270 aa, Arabidopsis thaliana
  unsure (1)..(270): unsure at all Xaa locations
  Clone ID: ARATH-23APR03-C3175_1.p
MGGIFGPIVAMTLIVPVIPWCFWERARDARSLQEVAAPPPVFTNTAVGXSEDEDEDXAGGTLARASMKNENKLQEREAQRQAMEATLESMNTKXQDWYAEMRRKKDEEREAEELKLEEEEKARQAKEEEAAALEFDKWKGEFSVDAEGTTEEVQGGNQDLLSEFVEYIKKQKCVPLEDLAAEFHLRTQECINRIASLESIGRLSGVMDDRGKYIYISMEEMNAVADYIKRQGRVSISHLASKSNQFIDLEPKVQHQLTEEISGMEEISVS

SEQ ID NO: 6338 - protein, 855 aa, Arabidopsis thaliana
  Clone ID: ARATH-23APR03-C31766_1.p
MVFTKSLLVLLWFLSCYTTTTSSALFNPPDNYLISCGSSQNITFQNRIFVPDSLHSSLVLKIGNSSVATSTTSNNSTNSIYQTARVFSSLASYRFKITSLGRHWIRLHFSPINNSTWNLTSASITVVTEDFVLLNNFSFNNFNGSYIFKEYTVNVTSEFLTLSFIPSNNSVVFVNAIEVVSVPDNLIPDQALALNPSTPFSGLSLLAFETVYRLNMGGPLLTSQNDTLGRQWDNDAEYLHVNSSVLVVTANPSSIKYSPSVTQETAPNMVYATADTMGDANVASPSFNVTWVLPVDPDFRYFVRVHFCDIVSQALNTLVFNLYVNDDLALGSLDLSTLTNGLKVPYFKDFISNGSVESSGVLTVSVGPDSQADITNATMNGLEVLKISNEAKSLSGVSSVKSLLPGGSGSKSKKKAVIIGSLVGAVTLILLIAVCCYCCLVASRKQRSTSPQEGGNGHPWLPLPLYGLSQTLTKSTASHKSATASCISLASTHLGRCFMFQEIMDATNKFDESSLLGVGGFGRVYKGTLEDGTKVAVKRGNPRSEQGMAEFRTEIEMLSKLRHRHLVSLIGYCDERSEMILVYEYMANGPLRSHLYGADLPPLSWKQRLEICIGAARGLHYLHTGASQSIIHRDVKTTNILLDENLVAKVADFGLSKTGPSLDQTHVSTAVKGSFGYLDPEYFRRQQLTEKSDVYSFGVVLMEVLCCRPALNPVLPREQVNIAEWAMAWQKKGLLDQIMDSNLTGKVNPASLKKFGETAEKCLAEYGVDRPSMGDVLWNLEYALQLEETSSALMEPDDNSTNHIPGIPMAPMEPFDNSMSIIDRGGVNSGTGTDDDAEDATTSAVFSQLVHPRGR

SEQ ID NO: 6339 - protein, 205 aa, Arabidopsis thaliana
  Clone ID: ARATH-23APR03-C31845_1.p
MATQAAAAASFKGNLKKAVAGIKRINLDGLRWRVFDARGQVLGRLASQISTVLQAKDKPTYCPNRDDGDICIVLNAKEIGFTGRKLTDKFYRWHTGYIGHLKERSLKDQMAKDPTEVIRKAVWRMLPSNNLRDDRDRKLRIFEGGEHPFGDKPLEPFVMPPRRVREMRPRARRAMIRAQKKAEQAENEGTEVKKGKKRTLSEVPA

SEQ ID NO: 6340 - protein, 1544 aa, Arabidopsis thaliana
  unsure (1)..(1544): unsure at all Xaa locations
  Clone ID: ARATH-23APR03-C31906_1.p
MQVAFMENRLGNSNGVGISKKSRSLDLKTLYKSSISKDSVNKSFKRKHRSGIDGDQLKQDKKSRKVVSLSSFKKVGSQNESILDKACNGTTILHNLEDSKEVGLDEKLCDSNGLQVISVGLASSTIYVPRRRRDFVGRSRFENGLAQKSAGESDSQEELVVNIPKVTAEESSVQDQPSKVEEKDSDKDIKESNSAAPLQLENGHSNQSPVKDDQLVVVKQRNSNSRKRKSSASNRRVGKEAKSSGDASGRISKVSREDDEENLEANAAIMLSSRFDPNCTQFPSNSVTPGSPSASRLHPLPSGKNSVDPRSELLSSKCVSDDTDDRMLRPRRHNDDGKGKVRKRRHFYEILFSDVDSHWLLNKKIKVFWPLDERWYHGFVDGFDGDKNLHHVKYDDRDEEWINLQGERFKILLFPSEVPGKNQRKRRCSESKSTQKVKGNDTSSKDEEKQKEKLEDDSCMESEPIITWLARSRHRDKSSTLKAVQKRKKTDVMTSNESVKMNGDVTDRSASSLASCGLPGPSKNELESSGFRNGSIFPIVYCRRRLHTAKKDIYKESGYNSVEFLKQFLVSKSPDPGVEFLPIEDSGDLELCCPWNESEQFELSLSLQGVSLMSYFLMADVDWLSRAALLLRHGTLVTLWPRVRLEMIFLNNQDGLRYLIFEGCLMEVVQLIFRILMVVDHSNXLGAHGADADLLLPVFSIGLLVSCLPGFQRPLGFLFYRFHEGLPSXWSFLDQNVWSHSLLVMQVSFAVCSLFFMLVLLLVMLLCSRLGFCSGLVSRGSSSAVAWPSSVCFKLLNSSPFALLFSARPPTLFLCFHLFLIWELGLDSAVFLRFVRVLVTLSGWVMAVFSFVHSVLSLESLCLSDVPFFSSSCALESLDLHSPSQSQQLGSDSENWMSYSSSVVRHKHETRSNVSVNGISIQVPISDDCEDGTPQSSNLALNIQGSSNSSPKATAPRSMWNRSXSSLNGHLSHGWSDSKGDFLNTNLANGPKKRRTQVSYSLPSGGSDSRNKGSLLKGMPNKRIRRSTADVTKGIQKDLESSLCDANVLVTLGDRGWREYGAQIFLEPFDNNEWRLAVKISGTTKYSHRAHQFLQPGSVNRFTHAMMWKGGKDWTLEFPDRGQWFLFKEMHEECYNRNTRAALVRNIPIPGIRMIERDNFDGTETEFIRSSSKYFRQTETDVEMALDPSRVMYDMDSDDEQCLLRIRECSSAENSGSCEITEDMFEKAMDMFEKASFVKQRDNFTLIEIQELTAGVGSLEAMETIYELWRTKRQRKGMPLIRHLQPPLWEKYQRELKDWELVMSKANTPNSCGSQKKQSPTEKPAMFAFCFKPRGLEVKHRGTKHRSQKKLSVYAQHSSALGDYDGCNSSGRRPVGFVSGDERFLYSNQSYEHSNEFSVHPGTYSPRDLGMGYFSSGGNGYHRNHQNKSQRINGKRNTSERWDAGYSECPSSNLVCYSNGSQRPDVEGIRNSTDIDEYKLRDAAGAARRACALAKLKRERAESLRYKADLAIQKAAAALMCAEAVKASSEDLGNNNGVESSSEG

SEQ ID NO: 6341 - protein, 693 aa, Arabidopsis thaliana
  Clone ID: ARATH-23APR03-C3203_1.p
MEHQDLTDSRKDPLCISQLKISSSSLDPLPQANMAEDLTKSRRHSPIKVEGSEETWGVEDDDDLTDPIFDTIEGNGHSDPTSCFDADLSEYKKKATVIVEEYFGTNDVVSVVNELKELGMAEYRYYFVKKLVSMAMDRHDKEKEMAAFLLSTLYADVIDPPEVYRGFNKLVASADDLSVDIPDAVDVLAVFVARAIVDDILPPAFLKKQMKLLPDNSKGVEVLRKAEKSYLATPLHAEVVEKRWGGTDNWTAEDVKARINDLLKEYVMSGDKKEAFRCIKGLKVPFFHHEIVKRALIMAMERRKAQVRLLDLLKETIEVGLINSTQVTKGFSRIIDSIEDLSLDIPDARRILQSFISKAASEGWLCASSLKSLSADAGEKLLENSSANVFKDKAKSIIREYFLSGDTSEVVHCLDTELNASSSQLRAIFVKYLITLAMDRKKREKEMACVLVSTLGFPPKDVRSAFSMLIESADDTALDNPVVVEDLAMFLARAVVDEVLAPRDLEEVLNQTPEAGSSVGEKVIQMAKTLLKARLSGERILRCWGGGGIETNSPGSTVKEVKEKIQILLEEYVSGGDLREASRCVKELGMPFFHHEVVKKSVVRIIEEKENEERLWKLLKVCFDSGLVTIYQMTKGFKRVDESLEDLSLDVPDAAKKFSSCVERGKLEGFLDESFASEDSQSKKQNGSSSSSG

SEQ ID NO: 6342 - protein, 105 aa, Arabidopsis thaliana
  Clone ID: ARATH-23APR03-C32181_1.p
PKSSVLSLAQKGRFQKPRLSLLSLHIFQRESRLLSCPFLRRPEFFGKAVQMVSIGFSPTSMDGWSVSLPTSSGSVSGDGWLSPGKFCSHMSFWPVCCFSSTKTEF

SEQ ID NO: 6343 - protein, 329 aa, Arabidopsis thaliana
  Clone ID: ARATH-23APR03-C3230_1.p
MSIVSKLRSPVKPIDESRAILCSTGNRFKVTKTEMTKKPQLNPRVTKSPATKKPDSNFSVSTDDSSSSSSSSERSSVNTTNSGKVTTPSKRNGVEKLNNVVASVAVVEDISPKIPGPVKRCHWITPNSDPIYVLFHDEEWGVPVRDDKKLFELLVFSQALAEFSWPSILRRRDDFRKLFEEFDPSAIAQFTEKRLMSLRVNGCLILSEQKLRAIVENAKSVLKVKQEFGSFSNYCWRFVNHKPLRNGYRYGRQVPVKSPKAEYISKDMMQRGFRCVGPTVMYSFLQASGIVNDHLTACFRYQECNVETERETKSHETETKLDLHSPLLV

SEQ ID NO: 6344 - protein, 449 aa, Arabidopsis thaliana
  Clone ID: ARATH-23APR03-C3254_1.p
MVSPETSSSHYQSSPMAKYAGTRTRPVVCISDVVLFLGGAFMSLILVWSFFSFSSISPNLTVKNEESSNKCSSGIDMSQDPTDPVYYDDPDLTYTIEKPVKNWDEKRRRWLNLHPSFIPGAENRTVMVTGSQSAPCKNPIGDHLLLRFFKNKVDYCRIHGHDIFYSNALLHPKMNSYWAKLPAVKAAMIAHPEAEWIWWVDSDALFTDMDFTPPWRRYKEHNLVVHGWPGVIYNDRSWTALNAGVFLIRNCQWSMELIDTWTGMGPVSPEYAKWGQIQRSIFKDKLFPESDDQTALLYLLYKHREVYYPKIYLEGDFYFEGYWLEIVPGLSNVTERYLEMEREDATLRRRHAEKVSERYAAFREERFLKGERGGKGSKRRPFVTHFTGCQPCSGDHNKMYDGDTCWNGMIKAINFADNQVMRKYGFVHSDLGKTSPLQPVPFDYPDEPW

SEQ ID NO: 6345 - protein, 376 aa, Arabidopsis thaliana
  Clone ID: ARATH-23APR03-C32602_1.p
MNHLLILARNSLRRRNFNLRPPSRSFSSTISPESNRSSFGIAFDIDGVILLGSSPVGGSPSALRRLYDDSGALKIPFLFLTNGGGLPESKRASEMSHLLGVQVSPLQVIQAHSPFRKLVNRFENELVVAAGKGEPAAVMSNYGFKNVISMDEYASYFDNIDPLAPYKKLMFRQDGHKELRSREDVLSQRVQAALIVSDPVDWSRDIQVLCDILRTGGLPGKEIGPQPHLYIANDDLDYQTEFPTERLGMGAFRIALESIFNRIHEKPLEYTSFGKPNPFVFKNAEDVLKEIATSPYSSNQGSHHFKTLYMIGDNPKIDIRGARQAGTPWFSILTRTGVFKGKDNHSEFPPDLVVDTVEEAVDFILTRESAKQSLLS

SEQ ID NO: 6346 - protein, 368 aa, Arabidopsis thaliana
  Clone ID: ARATH-23APR03-C32646_1.p
MSLNLGLSMEMKCTFQSTRAPARCAPWSPYSTLWAPIVPIVPNSPDSLASFRSIRHLELRSWYNVFEIHRKEVNSSLLEVKAMNKDTEADSDSDRKIKEEERRRKIGLAHRGKVPWNKGRKHSEDTRRRIKQRTIEALTNPKVRKKMSDHQQPHSNETKEKIRASVKQVWAERSRSKRLKEKFMSSWSENIAEAARKGGSGEAELDWDSYERIKQDFSSEQLQLAEEKARAKEQTKMIAKEAAKARTEKMRRAAEKKKEREEKDRREGKIRKPKQERENPTIASRSKLKKRLTKIHKKKTSLGKIAIGTDRVVSVAAKLEKLDLDLIRKERTRGDISLADQIQAAKNQRGSDVLSRFGLFAMKSMDFD

SEQ ID NO: 6347 - protein, 99 aa, Arabidopsis thaliana
  Clone ID: ARATH-23APR03-C32655_1.p
MASPSSSPTTRIWFRTVILIALMVVLFYVGRPLYWKISATIHDIRHNKQSVREGISQIVHEAQRSVGWYHDESDSGFREGHNKKSGIAVSRRLLFAGDQ

SEQ ID NO: 6348 - protein, 341 aa, Arabidopsis thaliana
  Clone ID: ARATH-23APR03-C32804_1.p
MDNSAPDSLSRSETAVTYDSPYPLYAMAFSSLRSSSGHRIAVGSFLEDYNNRIDILSFDSDSMTVKPLPNLSFEHPYPPTKLMFSPPSLRRPSSGDLLASSGDFLRLWEINEDSSTVEPISVLNNSKTSEFCAPLTSFDWNDVEPKRLGTCSIDTTCTIWDIEKSVVETQLIAHDKEVHDIAWGEARVFASVSADGSVRIFDLRDKEHSTIIYESPQPDTPLLRLAWNKQDLRYMATILMDSNKVVILDIRSPTMPVAELERHQASVNAIAWAPQSCKHICSGGDDTQALIWELPTVAGPNGIDPMSVYSAGSEINQLQWSSSQPDWIGIAFANKMQLLRV

SEQ ID NO: 6349 - protein, 703 aa, Arabidopsis thaliana
  Clone ID: ARATH-23APR03-C3308_1.p
MKLTNALFFFFLICLLSLSSASSNKPQLSNGSTILFTTIGRPTFEFDIFTLPTSHRPPSPADEHRLTDGKSINFNGYFASPSTALISLLPKRTQIQPQDVHLIYVTERAGTPSLNYDVVHSDNVGSRIQVPLFSGEEQQSGMNVNSMKDTPVLTNGYLVHVSTHENPGKPMASWAAVYSTELRTKSTRRLTPLGIADFSPAVSPSGKWTAVASFGEKGWTWSMVEKEISSDVYVFLTQDGTQRVKVVEQGGWPRWVDDSTLYFHRKSDDGWISVYRAILPKTGPVTTKSVTIQRVTPPGLHAFTPATSPNNNNFIAVATRRPGSEIRHVELFDLKKNEFVELTRLVSPKSHHFNPFLSPDSSRVGYHSCRGDATGRKTPRNLLQSLKTTSNDLSLFRFDGAFPSISPEGDRFAFVSFTGVFVVNPDGSGLRQLLPQMGFGTVWDPIRHGIVYTSSGPALAPGKSQIDILAINVDAPSPATAVKKLTTTGENNAFPWPSPDGKRIVFRSARSGTKNLYIMDAEKGESGGLFRLTNGNWNDTIATWSPDGNWIVFASNREFPGTLLMNIYVVHPDGTGLRKLAQNLTGLVSMHPMFSPDSKRIVFTTIYAGISAEQIGNPHFNVPSSEIFTVNLDGSGLTRLTHNSVEDGPPMWFPKIKATGDVAWPKRFGPSCSIQDFKTQNTTVKMKMNKPATMSSMCVVPSQ

SEQ ID NO: 6350 - protein, 908 aa, Arabidopsis thaliana
  Clone ID: ARATH-23APR03-C3313_1.p
MGSNRPKNFRRRGDDGGDEIDGKVATPSSKPTSTLSSSKPKTLSASAPKKKLLSFADDEEEEEDGAPRVTIKPKNGRDRVKSSSRLGVSGSSHRHSSTKERRPASSNVLPQAGSYSKEALLELQKNTRTLPYSRSSANAEPKVVLKGLIKPPQDHEQQSLKDVVKQVSDLDFDEEGEEEQHEDAFADQAAIIRAKKERMRQSRSAPAPDYISLDGGIVNHSAVEGVSDEDADFQGIFVGPRPQKDDKKGVFDFGDENPTAKETTTSSIYEDEDEEDKLWEEEQFKKGIGKRMDEGSHRTVTSNGIGVPLHSKQQTLPQQQPQMYAYHAGTPMPNVSVAPTIGPATSVDTLPMSQQAELAKKALKDNVKKLKESHAKTLSSLTKTDENLTASLMSITALESSLSAAGDKYVFMQKLRDFISVICDFMQNKGSLIEEIEDQMKELNEKHALSILERRIADNNDEMIELGAAVKAAMTVLNKHGSSSSVIAAATGAALAASTSIRQQMNRTRGLDEFGRDENLQKRREVEQRAAARQKRRARFENKRASAMEVDGPSLKIEGESSTDESDTETSAYKETRDSLLQCADKVFSDASEEYSQLSKVKARFERWKRDYSSTYRDAYMSLTVPSIFSPYVRLELLKWDPLHQDVDFFDMKWHGLLFDYGKPEDGDDFAPDDTDANLVPELVEKVAIPILHHQIVRCWDILSTRETRNAVAATSLVTNYVSASSEALAELFAAIRARLVEAIAAISVPTWDPLVLKAVPNTPQVAAYRFGTSVRLMRNICMWKDILALPVLENLALSDLLFGKVLPHVRSIASNIHDAVTRTERIVASLSGVWTGPSVTRTHSRPLQPLVDCTLTLRRILEKRLGSGLDDAETTGLARRLKRILVELHEHDHAREIVRTFNLKEAV

SEQ ID NO: 6351 - protein, 87 aa, Arabidopsis thaliana
  Clone ID: ARATH-23APR03-C333782_1.p
GRSFREEEEDRSERASERLEEEMMEEGPPAPKMLRMVYFVGAGFLCTFAINKWREMERNSLLKQEQEKNQQGDVGLLPRDSVQKAMK

SEQ ID NO: 6352 - protein, 316 aa, Arabidopsis thaliana
  unsure (1)..(316): unsure at all Xaa locations
  Clone ID: ARATH-23APR03-C33525_1.p
MVGLNNAVSLDIEEICNGGKEHHVKTCHGSVSVVVYGDQEKPAXLVTYPDVALNFMSCFQGLFXLCPEAVSLLLHNFCIYHISPPGHEFGAAPVCSNDPSPSVEDLADQILDLLIFFSLEVXMCMGFTEGVYYKVVSNLLYYYGMSGLLKDIFLQRYFSKEARGSSEVPERDVVHECRRLLGERHGSSLMRFLEAVNRRHDLTDGLKSLKCRTLIFVGDQSPFHSETLHMVTALDRKYSALVEVQACGSMVTEEQPHAMLIPMEFFFMGFGLYRPGRVSDSPRSPLSPSCISPELLSPESLGLKLKPIKTRVPTKC

SEQ ID NO: 6353 - protein, 346 aa, Arabidopsis thaliana
  unsure (1)..(346): unsure at all Xaa locations
  Clone ID: ARATH-23APR03-C33599_1.p
MAVTLRLTNSLAFSSHPLTSSVLFRGSKSIGTITKIASTIRTVKMAAFAGSDSETTSSTSRVIDSHLHIWASPQEAETYPYFPGQEPTLTGDVNFLLKNMEEARVDGALIVQPINHKFDHSLVTSVLKRYPSKFVGCCLANPAEDGSGITHLENLVLESNYRAVRLSPSLWPSGLSLPSALGSALVAXASGRSVPARLVAIGALVPHAAGIAVLSAEFPXTTVLLDRAGFCKVPENGEAKLAYSQLMKLSRFPQVYVKFSALFRISRTGFPYQDLSPLLSQLVSHFGANRVMWGSDFPFVVLECGYKEAKEAVTIIAKEASLSSSEMDWILGKTLMQLFPGQWVLP

SEQ ID NO: 6354 - protein, 611 aa, Arabidopsis thaliana
  Clone ID: ARATH-23APR03-C3366_1.p
MRGRSEGGKKKPVIVLLCVASVVLVFVYLFFGSSNHKAIKYGRKSRYLGDDDDSTKKDDTSSSFYVEDVVGNGFTPRSFPVCDDRHSELIPCLDRNLIYQMRLKLDLSLMEHYERHCPPPERRFNCLIPPRPGYKIPIKWPKSRDEVWKVNIPHTHLAHEKSDQNWRVVKGEKINFPGGGTHFHYGADKYIASMANMLNFPNNVLNNGGRLRTFLDVGCGVASFGGYLLASEIMTMSLAPNDVHQNQIQFALERGIPAYLGVLGTKRLPYPSRSFELAHCSRCRIDWLQRDGILLLELDRVLRPGGYFAYSSPEAYAQDEEDLRIWREMSALVGRMCWTIAAKRNQTVIWQKPLTNDCYLGREPGTQPPLCNSDSDPDAVYGVNMEACITQYSDHDHKTKGSGLAPWPARLTSPPPRLADFGYSTDIFEKDTETWRQRVDTYWDLLSPKIQSDTVRNIMDMKASMGSFAAALKEKDVWVMNVVPEDGPNTLKLIYDRGLMGAVHSWCEAFSTYPRTYDLLHAWDIISDIKKRGCSAEDLLLEMDRILRPSGFILIRDKQSVVDLVKKYLKALHWEAVETKTASESDQDSDNVILIVQKKLWLTSESLRDLE

SEQ ID NO: 6355 - protein, 650 aa, Arabidopsis thaliana
  Clone ID: ARATH-23APR03-C3379_1.p
MGVLLREALRSMCVNNQWSYAVFWKIGCQNSSLLIWEECYNETESSSNPRRLCGLGVDTQGNEKVQLLTNRMMLNNRIILVGEGLVGRAAFTGHHQWILANSFNRDVHPPEVINEMLLQFSAGIQTVAVFPVVPHGVVQLGSSLPIMENLGFVNDVKGLILQLGCVPGALLSENYRTYEPAADFIGVPVSRIIPSQGHKILQSSAFVAETSKQHFNSTGSSDHQMVEESPCNLVDEHEGGWQSTTGFLTAGEVAVPSNPDAWLNQNFSCMSNVDAAEQQQIPCEDISSKRSLGSDDLFDMLGLDDKNKGCDNSWGVSQMRTEVLTRELSDFRIIQEMDPEFGSSGYELSGTDHLLDAVVSGACSSTKQISDETSESCKTTLTKVSNSSVTTPSHSSPQGSQLFEKKHGQPLGPSSVYGSQISSWVEQAHSLKREGSPRMVNKNETAKPANNRKRLKPGENPRPRPKDRQMIQDRVKELREIIPNGAKCSIDALLERTIKHMLFLQNVSKHSDKLKQTGESKIMKEDGGGATWAFEVGSKSMVCPIVVEDINPPRIFQVEMLCEQRGFFLEIADWIRSLGLTILKGVIETRVDKIWARFTVEASRDVTRMEIFMQLVNILEQTMKCGGNSKTILDGIKATMPLPVTGGCSM

SEQ ID NO: 6356 - protein, 356 aa, Arabidopsis thaliana
  Clone ID: ARATH-23APR03-C3383_1.p
DREVERGTMAAVEEVDDVGRTIEEETVCEKRERGEEAETLTPWEQHSSIISIPRFDYKAPSSLLHHSHSGFLVTCNIKREKSATKEVMSILGKYIGSMHEEKPEVLNSTASKKQKVCAQETEEGGEKTVPLENDALQETGENPNVEDLKLANEEHNSLMSLVKLTKSGLLLFTFPVENSPNTTNIVSRVFQSMESGALKAPIWCHRIFPVQATCGLTEKELRETVSKLVQRFVNDKDNTLSKPVKFAAGYQRRGAEETKGKIRKDASDVLVQCPLLDRIKCFETVAAGVKDIVPDSVVDLKSPELCVLVELLPLSRISSGSFVAAVSVLPHRLVSTKPKLCIKPLVPESKHKKGPN

SEQ ID NO: 6357 - protein, 220 aa, Arabidopsis thaliana
  Clone ID: ARATH-23APR03-C3388_1.p
MTGVGENQLISIQPDELKFLFELEKQSYCDLKVANKTENYVAFKVKTTSPKKYFVRPNTGVIQPWDSCIIRVTLQAQREYPPDMQCKDKFLLQSTIVPPHTDVDELPQDTFTKDSGKTLTECKLKVSYITPSTTQRSSESGATNGDGQSSETISTIQRLKEERDAAVKQTQQLQHELETVRRRRNQRNSGNGLSLKLAAMVGLIGLIIGFILKLTLASPT

SEQ ID NO: 6358 - protein, 646 aa, Arabidopsis thaliana
  unsure (1)..(646): unsure at all Xaa locations
  Clone ID: ARATH-23APR03-C33899_1.p
MGSSDERNCKAIDASVGGLVWVRRRNGAWWPGRIMAHHEVPDGTIVSPKSGTPIKLLGRDDASVDWYNLEKSKRVKAFRCGEYDACIATAKATASTTGKKAVQYAXRREDAIAHAPEIENAHLAKDHPPCIEKASTSGEVSRKGIEDSGDVAETEVALQSTMSLKKTKNGKASKVQPLSEKRRRTPNDSEDDGTQTNKRMRGLEDIGMGTGSKGKVQVGALLEDTQENGFKSDTNNINDSVSNGSLSNGSSRDCSPSMKRKRSPVVIANDYSKRKNRRRTLTKVLESTATVSIPGTCDKLVNSDCLSLPGVSESDNNSDSNEVFSENVSENIVEVINDKGKESEVSNISVLAKDDSSNGLFDVPLNGDEKYPSGISTVPFTSSSPRKALVSGPTRRFGQSSHDAAAKSEGSNGSPSTSPAATLFNGIKKSTSKWQLKGKRNSRQMSKKQVERRNAYAEEANNNALPHWSVSDQKPRSLFSVGTQAMGRNSELYDVKIEVKANYKPRNVPLISLRSKLNGEAIVGHPSVVEVLEDGSCGHIVSSHRIDDAKPKPSSKKKSKKKKPHFPPQASKSKKSSSLAIKTRCLSALSGQKLTLSSKKKVMIESTKERIVACIPLKVVFSRINEPVKGSARQVHRSLPSAGNTG

SEQ ID NO: 6359 - protein, 446 aa, Arabidopsis thaliana
  Clone ID: ARATH-23APR03-C3391_1.p
MSLDTSLGLKLKKRLKLSSFSSNSSYKGKSRSITQRSDDDTNSRKTTVSSMKKKRVYPNKAKHNNHVNEIPRTMWVASKRNQGSTSSFKTANDAATSVFKTKSRSGVDVTRKSYRKRDELDSNVDVSPRESSDVPSFKARKQVFSEKRVVGDGSDVQEDKPRKRKRIRLDPYDTSNKRIVDDVLLDDGLRVKNIKDAVKSVEMSKNAQFRAIQPSHSILSYVEENLLGRRRLIELKRAGYNTELPAPLDNIPQSTSTERERIEESVFRNKLEFFAAANVSSSFPPPDVPEIAFAGRSNVGKSSLLNALTRQWGVVRTSDKPGLTQTINFFGLGPKVRLVDLPGYGFAFAKDEVKEAWEDLVKEYVSTRTSLKRVCLLVDTKWGMKPRDQELINLMERSNTKYQIVLTKTDVVFPIDVARRAMQIEEKLKANRSIVQPLWLTLNDCR

SEQ ID NO: 6360 - protein, 606 aa, Arabidopsis thaliana
  unsure (1)..(606): unsure at all Xaa locations
  Clone ID: ARATH-23APR03-C33984_1.p
MDFPENLPSDIGRLEQIVSHFFPKALHIVLNSRIPSLQSRGRTRERLSGLNVRKSDKWFNLVMGDRPAALEKLHSWHRNILDSMIIDIILVHPISNDNLDDDDDHSDSVVRSAETVIERWVVQYENPLIMSXPQSSDSXATRYQKVYKKSIIXLLRSLYAQTRLLPAYRVSRQLSSSLASSGYDLIYKVSSFSDIFSGPVTETMKEFRFAPVEVPPGRLCASVTYRSDLSDFNLGAHITLPPRIITDYVGSPATDPMRFFPSPGRSVEGHSFTGRAGRPPLTGSSAAPAHSWTSGFHRPPAQFATPNQSFSPAQSHQLSPGLHDFHWSRTDAFGDNHQLSPPFSPSGSPSTPRYISGGNSPRINVRPGTAPVTIPSSATLNRYVSSNFSEPGRNPLPPFSPKSTRRSPSSQDPLPGIALYRSSRSGESPSGLMNQYPTQKLSKDSKYDSGRFSGVLSSSDSPRFAFSRSPSRLSSQDDLDDPDCSCPFDFDDVDESGLQYSHSLDRRKTSSSISQSLPLGRRSSQDAAVGVLVHMLKTAPPLRQDSSTYMASMSGVQREGSVSGTESEFSMARSTSDALEELRNYKQLKDLLLSKSKSGSGPTRVH

SEQ ID NO: 6361 - protein, 480 aa, Arabidopsis thaliana
  Clone ID: ARATH-23APR03-C34073_1.p
MEQEDFYFPDTDLDLSFTSTTTDRTFASSSARTSLTLSFNDRLSTSSAVTTSSTSSSSVNHRRHDPHWSAIKSAKLLSSDGNIHLRHLKLIRHLGTGNLGRVFLCNLRDSSARFALKVIDRNCLTTEKKLSQVETEAEILSLLDHPFLPTLYARIDESHYTCLLIDYAPNGDLHSLLRKQPGNRLPIQPVRFFAAEVLVALEYLHAMGIVYRDLKPENVLLREDGHVMLSDFDLCFKSDVVPTFKSRRYRRSSSSPSLRRRRSGCFSVAAEKKYEREEIVSEFAAEPVTAFSRSCVGTHEYLAPELVSGNGHGSGVDWWAFGIFLYELLYGTTPFKGESKEQTLRNIVSTTKTASFHMDGDLDEARDLIEKLLVKDPRKRLGCARGAQDIKRHPFFDGIKWPLIRHYKPPEEVRGLVIKKSTRPHASHVIAVSPRRRKSFLWRALSYLLRGKSSSGGSKNQSNSNYYHYVGKSYASRKRV

SEQ ID NO: 6362 - protein, 596 aa, Arabidopsis thaliana
  unsure (1)..(596): unsure at all Xaa locations
  Clone ID: ARATH-23APR03-C34098_1.p
MDFAAKKFINNPNDVVTEFIEGLVETYPGLQYLDGFPEVKVVLRADVSAAKYDKVAVISGGGSGHEPAHAGYVGEGMLTAAICGDVFASPPVDSILAGIRAVTGTEGCLLIVKNYTGDXRLNFGLAAEQAKSEGYKVETVIVGEDCALPPPRGIAGRRGLAGTVLVHKVRRAAAGGGDTQAKFVXKQKVSDRWLGGSXVELFEWTVRGPGAADRLGAQKMELGLGIHGEPGAAVVDVEPVDVVVSHVLQQILSPETNYVPITRGNRVVLMVNGLGGTPLMELMIAAGKAVPKLQLEFGLAVDRVYTGFFMTSLDMAGFSISIMKADHSILDRLDAPTKAPNWPVGTDGNRPPAKIPVPVPPSRSIKSMESQSRPLELSKEGQVLEAAIQAAATVIISLKDSLNEWDGKVGDGDCGSTMYRGATAILEDMKNYYPLNDAAETVNEIGLSIKRAMGGTSGIIYHLLCKAAYAELKANAQSEVTPKNWSEALKSSIASVSKYGGATAGYRTMLDALIPASQVLEEKLSAGEDPISAFILSGEAATAGAESTIQMQAQAGRSSYVSAENLATVPDPGAMAAAGWYNAAARAVKEQYEGSS

SEQ ID NO: 6363 - protein, 634 aa, Arabidopsis thaliana
  Clone ID: ARATH-23APR03-C34470_1.p
MVVMKLITMKIFSVLLLLCFFVTCSLSSEPRNPEVEALINIKNELHDPHGVFKNWDEFSVDPCSWTMISCSSDNLVIGLGAPSQSLSGTLSGSIGNLTNLRQVSLQNNNISGKIPPEICSLPKLQTLDLSNNRFSGEIPGSVNQLSNLQYLRLNNNSLSGPFPASLSQIPHLSFLDLSYNNLRGPVPKFPARTFNVAGNPLICKNSLPEICSGSISASPLSVSLRSSSGRRTNILAVALGVSLGFAVSVILSLGFIWYRKKQRRLTMLRISDKQEEGLLGLGNLRSFTFRELHVATDGFSSKSILGAGGFGNVYRGKFGDGTVVAVKRLKDVNGTSGNSQFRTELEMISLAVHRNLLRLIGYCASSSERLLVYPYMSNGSVASRLKAKPALDWNTRKKIAIGAARGLFYLHEQCDPKIIHRDVKAANILLDEYFEAVVGDFGLAKLLNHEDSHVTTAVRGTVGHIAPEYLSTGQSSEKTDVFGFGILLLELITGMRALEFGKSVSQKGAMLEWVRKLHKEMKVEELVDRELGTTYDRIEVGEMLQVALLCTQFLPAHRPKMSEVVQMLEGDGLAERWAASHDHSHFYHANMSYRTITSTDGNNQTKHLFGSSGFEDEDDNQALDSFAMELSGPR

SEQ ID NO: 6364 - protein, 990 aa, Arabidopsis thaliana
  Clone ID: ARATH-23APR03-C34542_1.p
MRAGLSTIQQTLTPEAATVLNQSIAEAARRNHGQTTPLHVAATLLASPAGFLRRACIRSHPNSSHPLQCRALELCFSVALERLPTATTTPGNDPPISNALMAALKRAQAHQRRGCPEQQQQPLLAVKVELEQLIISILDDPSVSRVMREASFSSPAVKATIEQSLNNSVTPTPIPSVSSVGLNFRPGGGGPMTRNSYLNPRLQQNASSVQSGVSKNDDVERVMDILGRAKKKNPVLVGDSEPGRVIREILKKIEVGEVGNLAVKNSKVVSLEEISSDKALRIKELDGLLQTRLKNSDPIGGGGVILDLGDLKWLVEQPSSTQPPATVAVEIGRTAVVELRRLLEKFEGRLWFIGTATCETYLRCQVYHPSVETDWDLQAVSVAAKAPASGVFPRLANNLESFTPLKSFVPANRTLKCCPQCLQSYERELAEIDSVSSPEVKSEVAQPKQLPQWLLKAKPVDRLPQAKIEEVQKKWNDACVRLHPSFHNKNERIVPIPVPISPGRPTRPPNMLLRQPLQPKLQPNRELRERVHLKPMSPLVAEQAKKKSPPGSPVQTDLVLGRAEDSEKAGDVQVRDFLGCISSESVQNNNNISVLQKENLGNSLDIDLFKKLLKGMTEKVWWQNDAAAAVAATVSQCKLGNGKRRGVLSKGDVWLLFSGPDRVGKRKMVSALSSLVYGTNPIMIQLGSRQDAGDGNSSFRGKTALDKIAETVKRSPFSVILLEDIDEADMLVRGSIKQAMDRGRIRDSHGREISLGNVIFVMTASWHFAGTKTSFLDNEAKLRDLASESWRLRLCMREKFGKRRASWLCSDEERLTKPKKEHGSGLSFDLNQAADTDDGSHNTSDLTTDNDQDEQGFSGKLSLQCVPFAFHDMVSRVDDAVAFRAVDFAAVRRRITETLSERFETIIGESLSVEVEEEALQRILSGVWLGQTELEEWIEKAIVPVLSQLKARVSSSGTYGDCTVARLELDEDSGERNAGDLLPTTITLAV

SEQ ID NO: 6365 - protein, 339 aa, Arabidopsis thaliana
  Clone ID: ARATH-23APR03-C34778_1.p
MLSTVTATAVSRPILKVECTIKRTFKVTAEKFPTFLPTDVEKIKDTFALKLAARIERLPVSVSFREDSIMSSCVTPLMRNETTPVVLLHGFDSSCLEWRYTYPLLEEAGLETWAFDILGWGFSDLDKLPPCDVASKREHFYKFWKSHIKRPVVLVGPSLGAAVAIDIAVNHPEAVESLVLMDASVYAEGTGNLATLPKAAAYAGVYLLKSIPLRLYVNFICFNGISLETSWDWTKIGRLHCLYPWWEDATVSFMTSGGYNVTSLIKKVSQKTLILWGEDDQIISNKLAWRLHGELSNARVKQISNCGHLPHVEKPAAVTKLIAEFVRETCRCKEVESIS

SEQ ID NO: 6366 - protein, 898 aa, Arabidopsis thaliana
  Clone ID: ARATH-23APR03-C34879_1.p
MDHKAWPWKKKSMEKTVVESNGEVVADKIELEHRVKSLNDKLNSVEAESNKHETEAQEAIVGWEKTKAEVASLKKKLDEALNEKHRSEERSSHTDAGLKECVQQLRFVREEQERRMHDALTKASQEYERRLIVIKTELAGSGKRLAEAEGENAQLSKALLAKNKTVEDLNRERDRIEVDFNSLVSSLESKESENVSLRYEVRVLEKELELRNEEREFSRRTAEASHKLHLENVKKVAKLESECQRLRVLVRKRLPGPAALSKMSNEVEMLGRRRVNGSPHSPMIDSEKINNLTEQLCLLEEENKTLREALNKKVSELQFSRNMYSRTASRLLEFESHLEESSRGTNIEPSRSSNVSHEVSLASVTEFDNDDKVSCADSWASALLSELDNFKNKKEMGTSLVGTPKAAEMKLMDDFAEMEKLAMVASTIDNRPGSSPICSSDSISATGPVENESNENSSEATKTSGTVYSLNPDASPKDDIKSDSLPQSLHIVLKAVMEHKHITQRNTDEVLEDIRKALSSVNHSSFSTNHQETKTLTVEDRLDMECNISKSIHRIIDVIEGVSLKDERHVSNRESERLSGYTARVLQWKTTELSSVLQRFLQACYDLLDRKADMKKFAQELSSVLEWMVNHCFSLQDVSTMRDEIKKQFEWDESRSGSEVDIGIFRQVSEAEKLRTEDVSFLACKDQLIEDKPGNQNLSRKTVEEEANDKTASASENELKLEEKQNMRTELEIAAASEKLAECQETILNLGKQLKALTNSKETALLSETLMYDVTDKSNNLPDAQPSHETTKPEKRLTSQRSSLLDQMKAEDHNTGESKDQKPQAADKNGKGGNSSVYNETIEALEQILLSDKSKGSDSNCFAIVPQKKTGGVKSLWRKLLGRNKKGKSKKVPNPFAN

SEQ ID NO: 6367 - protein, 752 aa, Arabidopsis thaliana
  unsure (1)..(752): unsure at all Xaa locations
  Clone ID: ARATH-23APR03-C34900_1.p
MSLERSEFVDGVAARSLSEISEVDAVRIGGDIISSARRLIALLRSVGDCQWLHHPPVIAEAIRRYDELWMPLISDLTVGLKPPMILPPLDVEWVWFCHCLNPVSYSDYWERRFSKLIGKPAXFXEENEGYPGFQCEKIWGFRYPLGGFGNGAPPPSLGPVSLVNAGIKSLVKKQMFLWEKFSAPYMSETVYLIAARLRYKGFLLILHKFKDEVSSLIPASDILLMWLTHQSYPTVYKDDVDEMLEEMTRKVVQVGEKVEKTEVETTKELWDRYFNQPYEKAGGELSIIANESGLSNNTMFYWPVSDMDVNTAYKSIRPRFVLELCIFLRLNPKAEQNESIDRSFLRLRVARCHRKLQLDKKMTDLSSEASWQKAWHLYCEFGTLGFIRESHCDRSRGICFKSGKPEGMIEFPWNDLLRAHSLASGRFLGKQVSVFASVTPPVQAPYLLRFVPDRVTDDSGAMISDSVQRTNNFRPQEGRWLTRTVLDHAGRECFVIRIRVGKGVFKRGGEVPSPVKSEERITEVRVGSWSYVEGSIGKAPAKVVGTVTPKEPMEDWEAAWEFSTGDELCIRWDSLGTISELRLYSRNPGSLVRLLTGRRMQYKGEDEEDDEGFLTVVRSTEEDPTEKATALIDWKHQAVEFLPEEDAVFVLLLSVSILRSVTHKRREDVGKLLVRKRITEATGERDWGSVIVDASSTNVSSSSSPYVEPWYRNSGKVMAMEEKAQVARYPYPVMSYSNVDGGDNLYKHVIFG

SEQ ID NO: 6368 - protein, 521 aa, Arabidopsis thaliana
  Clone ID: ARATH-23APR03-C34904_1.p
MAIPRFSSLLRCRKWAKSDWLVASIGCVLIVFFLSFFFDPTSDSVPSVDRSRPIISPSDLVKLKLSSVAKERGALCLDGSLPGYHFHEGSGSGSQSWLVHLEGGGWCNTVASCSARALTKLGSSNYFEQEVAFQGVLSSDPSQNPEFFNWNKVAIRYCDGASFSGRPEAEFKNGTRLFFRGQLIWEAIIDELLSMGMSDAKQAILTGCSAGGLASLIHCDYFRDHLPKDAAVKCVSDGGYFLNVPDVLGNPTMRSFYHDVVNLQGVEKSLDQKCVAKTEPSKCMFPQEFLKNIRTPVFLVNPAYDFWQIQHVLVPTSADPDKSWAKCRLNIKECDAEQIKVLHGFRSSMMTAIGEFHQNKDGGMFIDSCYAHCQTVMSVTWHSLTSPRIENKKTGEANRLSIPVQSFLLQHEFHMNLPYILILPLPLLVDFFDSPEASSAREQSLPQNSQSGTWSKSDWLLASIGIVLIVYSFSLSFNSTSDSIPSVDRSDLVKLKLSSKAKERGGRCPDGRLPGPQAEKG

SEQ ID NO: 6369 - protein, 1750 aa, Arabidopsis thaliana
  Clone ID: ARATH-23APR03-C34929_1.p
MASTEVDSRLGRVVIPALDKVIKNASWRKHSKLAHECKSVIERLRSPENSSPVADSESGSSIPGPLHDGGAAEYSLAESEIILSPLINASSTGVLKIVDPAVDCIQKLIAHGYVRGEADPTGGPEALLLSKLIETICKCHELDDEGLELLVLKTLLTAVTSISLRIHGDSLLQIVRTCYGIYLGSRNVVNQATAKASLVQMSVIVFRRMEADSSTVPIQPIVVAELMEPMDKSESDPSTTQSVQGFITKIMQDIDGVFNSANAKGTFGGHDGAFETSLPGTANPTDLLDSTDKDMLDAKYWEISMYKSALEGRKGELADGEVEKDDDSEVQIGNKLRRDAFLVFRALCKLSMKTPPKEDPELMRGKIVALELLKILLENAGAVFRTSDRFLGAIKQYLCLSLLKNSASNLMIIFQLSCSILLSLVSRFRAGLKAEIGVFFPMIVLRVLENVAQPDFQQKMIVLRFLDKLCVDSQILVDIFINYDCDVNSSNIFERMVNGLLKTAQGVPPGTVTTLLPPQEAAMKLEAMKCLVAVLRSMGDWVNKQLRLPDPYSAKMLEIVDRNLEEGSHPVENGKGDGGHGGFERSDSQSELSSGNSDALAIEQRRAYKLELQEGISIFNQKPKKGIEFLIKANKVGDSPEEIAAFLKDASGLNKTLIGDYLGEREDLSLKVMHAYVDSFEFQGMEFDEAIRAFLRGFRLPGEAQKIDRIMEKFAERFCKCNPKDFSSADTAYVLAYSVILLNTDAHNPMVKSKMTADGFIRNNRGIDDGKDLPEEYLRALYERISRNEIKMKDDGLGPQQKQPTNSSRLLGLDTILNIVVPRRGDDMNMETSDDLIRHMQERFKEKARKSESVYYAASDVIILRFMVEVCWAPMLAAFSVPLDQSDDAVITTLCLEGFHHAIHVTSVMSLKTHRDAFVTSLAKFTSLHSPADIKQKNIEAIKAIVNRAEDEGNYLQDAWEHILTCVSRFEHLHLLGEGAPPDATFFAFPQTESGNSPLAKPNSVPAIKERAPGKLQYAASAMIRGSYDGSGVAGKASNTVTSEQMNNLISNLNLLEQVGDMSRIFTRSQRLNSEAIIDFVKALCKVSMDELRSPSDPRVFSLTKIVEIAHYNMNRIRLVWSSIWHVLSDFFVTIGCSDNLSSAIFAMDSLRQLSMKFLEREELANYNFQNEFMKPFVVVMRKSGAVEIRELIIRCVSQMVLSRVDNVKSGWKSMFMIFTTAAHDAHKNIVFLSFEMVEKIIRDYFPHITETETTTFTDCVNCLVAFTNCKFEKDISLQAIAFLQYCARKLAEGYVGSSLRRNPPLSPQGGKIGKQDSGKFLESDEHLYSWFPLLAGLSELSFDPRAEIRKVALKVLFDTLRNHGDHFSLALWERVFESVLFRIFDYVRQDVDPSEDDSTDQRGYNGEVDQESWLYETCSLALQLVVDLFVNFYKTVNPLLKKVLMLFVSLIKRPHQSLAGAGIAALVRLMRDVGHQFSNEQWLEVVSCIKEAADATSPDFSYVTSEDLMEDVSNEDETNDNSNDALRRRNRQLHAVVTDAKSKASIQIFVIQAVTDIYDMYRMSLTANHMLMLFDAMHGIGSNAHKINADLLLRSKLQELGSSLESQEAPLLRLENESFQTCMTFLDNLISDQPVGYNEAEIESHLISLCREVLEFYINISCSKEQSSRWAVPSGSGKKKELTARAPLVVAAIQTLGNMGESLFKKNLPELFPLIATLISCEHGSGEVQVALSDMLQTSMGPVLLRSCC

SEQ ID NO: 6370 - protein, 580 aa, Arabidopsis thaliana
  Clone ID: ARATH-23APR03-C35015_1.p
MQKILCKSTTSSTPVLSTPVNSLAAGFISLGFKTPVKNLPPCSTTKPLSTCFFSTSAMPTTTASVSSGGVGFSAYLQRTVHKPAPASVRFSTAGYRTCRCSNDGTNRAWVGRTGSWRALFCSDSTGGLTPVNATAGAVVESEEESDGEDEDEEKDEKPVRMNRRNRSSSGSGEFVGNPDLLKIPGVGLRNQRKLVDNGIGDVAELKKLYKDKFWKASQKMVDYLRSSVGIIHRNHAESITTFIKESVDDELKDSGPEPNLNVKKRLTFCVEGNISVGKSTFLQRIANETVELQDLVEIVPEPVDKWQDVGPDHFNILDAFYSEPQRYAYTFQNYVFVTRLMQEKESASGVKPLRLMERSVFSDRMVFVRAVHEAKWMNEMEISIYDSWFDPVVSSLPGLVPDGFIYLRASPDTCHKRMMLRKRAEEDGVSLKYLQDLHEKHESWLLPFESGNHGVLSVSRPSLHMDNSLHPDIKDRVFYLEGNHMHSSIQKVPALVLDCEPNIDFSRDIEAKTQYARQVAEFFEFVKKKQETSTEKSNSQSPVLLPHQNGGLWMGPAGNHVPGLDLPPLDLKSLLTRPSA

SEQ ID NO: 6371 - protein, 468 aa, Arabidopsis thaliana
  Clone ID: ARATH-23APR03-C3504_4.p
KKKKTVSSYKGGSIKEQSFLLLSTPRRRSYEFGLCLYLFNLSLSIALQFDNSKVMAGMASDGTQYDPRQFDTKMNAILGEEGEETFYTNYDEVCDSFDAMELQPDLLRGIYAYGFEKPSAIQQRGIIPFCKGLDVIQQAQSGTGKTATFCSGVLQQLDISLVQCQALVLAPTRELAQQIEKVMRALGDYLGVKAQACVGGTSVREDQRVLQSGVHVVVGTPGRVFDLLRRQSLRADAIKMFVLDEADEMLSRGFKDQIYDIFQLLPSKVQVGVFSATMPPEALEITRKFMNKPVRILVKRDELTLEGIKQFYVNVDKEEWKLETLCDLYETLAITQSVIFVNTRRKVDWLTDKMRSRDHTVSATHGDMDQNTRDIIMREFRSGSSRVLITTDLLARGIDVQQVSLVINFDLPTQPENYLHRIGRSGRFGRKGVAINFMTSEDERMMADIQRFYNVVVEELPSNVADLL

SEQ ID NO: 6372 - protein, 179 aa, Arabidopsis thaliana
  Clone ID: ARATH-23APR03-C3517_1.p
MSRLLSKTLIPNGRFLLRRFNEPAITTPPNVVCFSRRFSSIPQVIELEIDSKNEAEAAILKKLNEFVRRIIVHNSTPDWLPFAPGSSFWVPPHQITATKIANLVDKVTNPLTEEESLSLSSPYGWPCSSFFIPPPDGSSSTQEEEASVELKIPGNEMLEVKLAHYPDPIYSFKPEDGEE

SEQ ID NO: 6373 - protein, 860 aa, Arabidopsis thaliana
  unsure (1)..(860): unsure at all Xaa locations
  Clone ID: ARATH-23APR03-C35181_1.p
RLIRTVSDASGLDDCPLPYAAIDVHHPNLSCFRRERSESLPADIVEVDVVVVGAIWRIEGSGRDRMLDVHRLVQVVGTSKAIASYQLGAKTTDVMLEILNLDKREVISIDQLSDQNITEDECKRLRQSIKCGLNKRLTVVDILKTAATLQAMRINEALEAEILKLNHLRDRAKKLELLKSPEERQRLLQEVPEVHTDPSMDPSHALSEDAGLGTRKQDNHVKAQSKGPQNKGVNLINVGNNVQKKYDAPILRSRNNVHADKDDCSKVHNNSSNIQETGKDDEESEIWHYRDPTGKTQGPFSMVQLRRWKSSGHFPPYLRIWRAHENQDESVLLTDALAGRFDKATTLPSSSSLPQELKPSPHDSGRTGADVNCLQKNQMPVNTSATFFSSXTVTAHSNYPKEKQVVALVGCSGKVEDGNSVRPQPQVSCPASISVVPGHVVTPDVRETPGTDQYNTVRADGNHNTTKTLEDETNGGSVSINGSVHAPNLNQESHFLDFPSPTPKSSPEDLEAQAAETIQSLSSCVLVKGPSGVTWSTTTTSTTDAATTTSSVVVTGGQLPQVIQQNTVVLAAPSVKPIELAADHATATQTSDNTQVAQASGWPAIVADPDECDESVSDLLAEVEAMEQNGLPSSPTSTFHCDDDDDLKGPEKDFFNPVARMSLTPETCRLDVSQTSILDNVSAGKSSMLTEAKDNTPFSHCGTAGPELLLFAPPPPPPTAISHDLTLTTTALRLGSETTVEAGTVERLPKSVLGVSSEPSPRSLSSHDSSSARGSTERSPRVSQPKRSSGHSRDRQWLNNGHNSSFNNSHNNRQWPYSNSHGYDHGSGSYAAHPPKGLKICKFYESGYCKRGASCSFWHP

SEQ ID NO: 6374 - protein, 211 aa, Arabidopsis thaliana
  Clone ID: ARATH-23APR03-C35211_1.p
MSSEQGNGSNPSTSPEVEGTKTIPFRRRLQRGQRVFAPKLMEALRRSRVSSEEAPVRHLSRRWRATTAQKVYSLKLYDALQRSRRSATVRDTADKVLATTARGATRWSRAILVSRFGTSLRRRRNTKPASALAAAIRGSGGSGRRRKLSAVGNRVRVLGGLVPGCRRTALPELLDETADYIAALEMQVRAMTALSKILSELQPSTNLGSAL

SEQ ID NO: 6375 - protein, 645 aa, Arabidopsis thaliana
  Clone ID: ARATH-23APR03-C352_1.p
MARDIQLPCDGDGVCMRCKSNPPPEESLTCGTCVTPWHVSCLSSPPKTLASTLQWHCPDCSGEIDPLPVSGGATGFESAGSDLVAAIRAIEADESLSTEEKAKMRQRLLSGKGVEEDDEEEKRKKKGKGKNPNLDVLSALGDNLMCSFCMQLPERPVTKPCGHNACLKCFEKWMGQGKRTCGKCRSIIPEKMAKNPRINSSLVAAIRLAKVSKSAAATTSKVFHFISNQDRPDKAFTTERAKKTGKANAASGKIYVTIPPDHFGPIPAENDPVRNQGLLVGESWEDRLECRQWGAHFPHVAGIAGQSTYGAQSVALSGGYKDDEDHGEWFLYTGSGGRDLSGNKRTNKEQSFDQKFEKSNAALKLSCKLGYPVRVVRSHKEKRSAYAPEEGVRYDGVYRIEKCWRKVGVQGSFKVCRYLFVRCDNEPAPWTSDENGDRPRPIPNIPELNMATDLFERKETPSWDFDEGEGCWKWMKPPPASKKSVNVLAPEERKNLRKAIKAAHSNTMRARLLKEFKCQICQQVLTLPVTTPCAHNFCKACLEAKFAGKTLVRERSTGGRTLRSRKNVLNCPCCPTDISDFLQNPQVNREVAEVIEKLKTQEEDTAELEDEDEGECSGTTPEEDSEQPKKRIKLDTDATVSATIR

SEQ ID NO: 6376 - protein, 760 aa, Arabidopsis thaliana
  Clone ID: ARATH-23APR03-C35329_1.p
MSTAAAARPVAGTGLREKTAASLVNSFRLASVTQRLRYHIQDGAKVDPKEFQICCISFAKGIDFAIANNDIPKKVEEFPWLLKQLCRHGTDVYTKTALMVLMISVKHACHLGWFSDSESQELIALADEIRTCFGSSGSTSPGIKSPGSTFSQIMERFYPFVKLGHVLVSFEVKAGYTMLAHDFYISKNMPHSLQEKIRLFVAQTDNIDTSACISNPPEVSFLLNGKGVEKRVNIAMDTGPQLPTNVTAQLKYGTNLLQVMGNFKGNYIIIIAFTGLVVPPEKPVLKDYLQSGVIEASPDSDIIEGPSRVSLSCPISRKRIKLPVKGQLCKHLQCFDFSNYVHINMRNPTWRCPHCNQPVCYPDIRLDQNMAKILKDVEHNAADVIIDAGGTWKVTKNTGETPEPVREIIHDLEDPMSLLNSGPVVFDLTGDDDAELEVFGDNKVEDRKPCMSDAQGQSNNNNTNKHPSNDDYSSIFDISDVIALDPEILSALGNTAPQPHQASNTGTGQQYSNLSQIPMSIDPMPVPVPFSQTPSPRDRPATTSTVFTIPNPSPQYSQVHASPVTPTGTYLGRTTSPRWNQTYQSQAPPMTTPYTSRKVSVPVTSQSPANVSSFVQSQHVPRVLSQPNNYGVRGLTSSHASTSRQHPSGPTVQSVSRLSDLVDVDLTVPDTSNWRPRMRGSLVPGSHSTALDHMIIRPSQQSQTSTRLNSSQPVQTPSVQTSQAQSPFTTAAYRTETVLGNRNHPVPAPPGIVRPTGPTS

SEQ ID NO: 6377 - protein, 247 aa, Arabidopsis thaliana
  Clone ID: ARATH-23APR03-C3560_1.p
MVILSASSTVRAALDTQPRLPYNPNAPRKVKKIPNGNSFLPPPSPAPSPGISISVADLLKRPSSKEITVDLDDTYMGYETWSPSPPKLEKPRSVFNAASLAFIGDSIYELYARRHFLFPPLSIEDYNDRVRAVVRCEAQYALLKKLVDDDFLTKEERDILRWGKNLGSARTRTRRRAGNAVYNKASSLETLIGYLYLTNGKRLEKIMEKLGFSSDSSTEIVIEETNPKPSESSNLPNFILNEQVVSF

SEQ ID NO: 6378 - protein, 179 aa, Arabidopsis thaliana
  Clone ID: ARATH-23APR03-C35634_1.p
MGKRGQKQNRFLRIVTMPLKVLCKARDLYMRSITGCAARTHYSSAVDAASVPFPRSRSTSSAFSSSASSRRRSSDFTFDDDYSELLRAASVRSLGHKNEIDMIIQQQQQQQQQRQENRVAMGAVTVKGGLPKSSSVGMTMARIDEEDEEEGSVKNQKKGSDFLYPRSRSHAVTIRGSKF

SEQ ID NO: 6379 - protein, 447 aa, Arabidopsis thaliana
  Clone ID: ARATH-23APR03-C3564_1.p
MLLNISSSPISHRNPHFLSNFNNPISYFPRRSKTHLSKSHFFPKFTPLSNQSLKNRVLFGNKRYPDGERFDFRSRAISGIDLGSFESVLEAIAVLTTIIVVHESGHFLAASLQGIHVSKFAIGFGPILAKFDYNNVEYSLRAFPLGGFVGFPDNDPDSEIPIDDENLLKNRPTLDRSIVVSAGIIANVIFAYAIIFVQVLSVGLPVQEAFPGVLVPEVKTFSAASRDGLLSGDVILAVDGTELSKTGPDAVSKIVDIVKRNPKSNVVFRIERGGEDFDIRVTPDKNFDGTGKIGVQLSPNVRITKVRPRNIPETFRFVGREFMGLSSNVLDGLKQTFFNFSQTASKVAGPVAIIAVGAEVARSNIDGLYQFAALLNINLAVINLLPLPALDGGTLALILLEAVRGGKKLPVEVEQGIMSSGIMLVIFLGLFLIVKDTLSLDFIKEML

SEQ ID NO: 6380 - protein, 252 aa, Arabidopsis thaliana
  Clone ID: ARATH-23APR03-C35672_1.p
MSQHQKIYPVQDPEAATARPTAPLVPRGSSRSEHGDPSKVPLNQRPQRFVPLAPPKKRRSCCCRCFCYTFCFLLLLVVAVGASIGILYLVFKPKLPDYSIDRLQLTRFALNQDSSLTTAFNVTITAKNPNEKIGIYYEDGSKITVWYMEHQLSNGSLPKFYQGHENTTVIYVEMTGQTQNASGLRTTLEEQQQRTGNIPLRIRVNQPVRVKFGKLKLFEVRFLVRCGVFVDSLATNNVIKIQSSSCKFRLRL

SEQ ID NO: 6381 - protein, 78 aa, Arabidopsis thaliana
  Clone ID: ARATH-23APR03-C35760_1.p
MKMVKCKKVRHRGRKGQKEKPKFRETRMQRNLGILRRIVPGCEEIEDEEALFLKSIQHLLLLKSQVNLLKKLADVCGV

SEQ ID NO: 6382 - protein, 273 aa, Arabidopsis thaliana
  Clone ID: ARATH-23APR03-C3576_1.p
MSFVFRGSRGDLESGFSGGFLPERRAMRVHGARPVNSNSLAFLVTVLLLFMILNSHQMPPNFLLWLVLGVFLMATTLRMYATCQQLQAHAQAQAAAASGLFSHTELRLHVPPSIALATRGRLQGLRLQLALLDREFDDLDYETLRALDSDNVSTTSMSEEEINALPVHKYKVLDPENGCSLAKQASTSSSAEKMLDSANESKKGTEDELTCSVCLEQVTVGEIVRTLPCLHQFHAGCIDPWLRQQGTCPVCKFRAHSGWQEQDEIDDDASDMV

SEQ ID NO: 6383 - protein, 176 aa, Arabidopsis thaliana
  Clone ID: ARATH-23APR03-C35788_1.p
MEEDRENAKRVVFVTVGTTSFDALVKAVVSQNVKDELQKRGFTHLLIQMGRGIFFPTKCDGADGSLVVDYFTFSSSIADYIQYASLVISHAGSGSIFETLKLGKPLIVVVNEDLMDNHQCELAEALEERKHLYYTRPDTLHQTLTKMELESLVQYTPGDGTPVARIIDRFLGFPDD

SEQ ID NO: 6384 - protein, 371 aa, Arabidopsis thaliana
  Clone ID: ARATH-23APR03-C3583_1.p
MGRSLIFSGNMSLRISHLPRSSLPLQNPFSGRTVNRTFRYRCTRILSNSFKSTTRLQTKAVLSEVSDQTRYPRIGAKTTGTISPAHLLEVVELAAKTGAEVVMEAVNKPRNITYKGLSDLVTDTDKASEAAILEVVKKNFSDHLILGEEGGIIGDSSSDYLWCIDPLDGTTNFAHGYPSFAVSVGVLYRGNPAAASVVEFVGGPMCWNTRTFSATAGGGALCNGQKIHVSKTDAVERALLITGFGYEHDDAWSTNMELFKEFTDVSRGVRRLGAAAVDMCHVALGIAESYWEYRLKPWDMAAGVLIVEEAGGAVTRMDGGKFSVFDRSVLVSNGVLHPKLLERIAPATENLKSKGIDFSLWFKPEDYHTEL

SEQ ID NO: 6385 - protein, 1172 aa, Arabidopsis thaliana
  unsure (1)..(1172): unsure at all Xaa locations
  Clone ID: ARATH-23APR03-C3588_1.p
MNTLPVVSLTASSSFKFFHFPSLHRSLSHSPNFSFTKSLILNPNHLSFKSTLNSLSPSQSQLYEEEDDEEEEEEDEDDDDEAADEYDNISDEIRNSDDDDDDEETEFSVDLPTESARERVEFRWQRVEKLRSLVRDFGVEMIDIDELISIYDFRIDKFQRLAIEAFLRGSSVVVSAPTSSGKTLIAEAAAVSTVAKGRRLFYTTPLKALSNQKFREFRETFGDDNVGLLTGDSDINKDAQIVIMTTEILRNMLYQSVGMASSGTGLFHVDAIVLDEVHYLSDISRGTVWEEIVIYCPKEVQLICLSATVANPDELAGWIGEIHGKTELVTSTRRPVPLTWYFSTKHSLLPLLDEKGINVNRKLSLNYLQLSASEARFRDDDDGYRKRRSKKRGGDTSYNNLVNVTDYPLSKNEINKIRRSQVPQISDTLWHLQGKNMLPAIWFIFNRRGCDAAVQYVENFQLLDDCEKSEVELALKKFRVLYPDAVRESAEKGLLRGIAAHHAGCLPLWKSFIEELFQRGLVKVVFATETLAAGINMPARTAVISSLSKKAGNERIELGPNELYQMAGRAGRRGIDEKGYTVLVQTAFEGAEECCKLVFAGVKPLVSQFTASYGMVLNLVAGSKVTRKSSGTEAGKVLQAGRSLEEAKKLVEKSFGNYVSSNVTVAAKQELAEIDNKIEILSSEISDEAIDKKSRKLLSARDYKEITVLKEELREEKRKRAEQRRRMELERFLALKPLLKGMEEGNLPFICLEFKDSEGREQSVPAVYLGHIDSFQGSKLQKMMSLDESFALNLIEDELAADEPGKPNVKPSYYVALGSDNSWYLFTEKWVRTVYRTGFPNIALALGDALPREIMKNLLDKADMQWDKLAESELGSLWRLEGSLETWSWSLNVPVLSSLSDEDEVLHMSEEYDNAAQKYKEQRSKISRLKKKMSRSEGFREYKKILENANLTVEKMKRLKARSRRLINRLEQIEPSGWKDFMRISNVIHESRALPINTHLIFPLGETAAAIRGENELWXLAMVLRNKALVDLKPPQLAGVCASLVSEGIKVRPWRDNNYIYEPSDTVVDMVNFLEDQRSSLIKLQEKHEVMIPCCLDVQFSGMVEAWASGLSWKEMMMECAMDEGDLARLLRRTIDLLAQIPKLPDIDPVLQRSAAAAADIMDRPPISELAG

SEQ ID NO: 6386 - protein, 355 aa, Arabidopsis thaliana
  Clone ID: ARATH-23APR03-C36007_1.p
NQNQKIHNSSAALYLKHQRVSLGPSDVHFPVRTSTAHDELKSWAGGLPLRLTADHHSNLSELQPLRVWPGGAPSAAPAPFAPFGPFPGPLGLGWMGLIFCLRPTKSSMGRPQLSRSLQFCFSIVDGRGLHPTVGTNSLEETCLFIYRNLMDSVDCFSPDATLIVKLSGLVFFSNLICCDAIFAPVPICVCILRIYIPTSKPNHVTPSLMGEASQPSQTFWIKPPQRKLHPSSAAFFVYWTCEFPWRIQQTYSSMEIPSLEPYFGSEEKPPPATSSMEHLFESSLALIVRAYYDHKLIRDFVKLVFKFESLKAPTDLPTFAIFLKLCILENSWNLYPYLSCSVLNFSCMNSPLTRF

SEQ ID NO: 6387 - protein, 720 aa, Arabidopsis thaliana
  Clone ID: ARATH-23APR03-C3605_1.p
MADVNLPPSDSVDNRLPEKSTSSSPPPPPPSSSLPQQEQEQDQQQLPLRRERDSRERRDERDIERPPPNRRERDRSPLPPPRRDYKRRPSLSPPPPYRDRRHSPPQRRSPPQKRYRRDDNGYDGRRGSPRGGYGPPDRRFGYDHGGGYDREMGGRPGYGDERPHGRFMGRYQDWEGGRGGYGDASNSGNPQRDGLMSYKQFIQELEDDILPSEAERRYQEYKSEYITTQKRAFFNTHKEEDWLKNKYHPTNLLSVIERRNDLAQKVAKDFLLDLQSGTLDLGPAVTALNKSGRTSEPNSEDEAAGVGKRKRHGMGGAKENELLSAAPKAPSFTSDPKRILTDVEQTQALVRKLDSEKKIEENVLQGSETEKSGREKLHSGSTGPVVIIRGLTSVKGLEGVELLDTLVTYLWRVHGLDYYGKVETNEAKGLRHVRAEGKVSDAKGDENESKFDSHWQERLKGQDPLEVMAAKEKIDAAATEALDPHVRKIRDEKYGWKYGCGAKGCTKLFHAAEFVYKHLKLKHTELVTELTTKVREELYFQNYMNDPNAPGGQPATQQSGPRDRPIRRKPSMENRLRDDRGGRRERDGRANGNDRNDRSEDQQRGDNDGGNPGEVGYDAFGGQGGVHVPPFLSDINPPPMLMPVPGAGPLGPFVPAPPEVAMQMFRDPSGPNPPFEGSGRGGPAPFLLSPAFRQDPRRLRSYQDLDAPEEEVTVIDYRSL

SEQ ID NO: 6388 - protein, 473 aa, Arabidopsis thaliana
  Clone ID: ARATH-23APR03-C3611_1.p
MGAYCDENLSSLPVFSSGAPANELRFSKHVYDNVHGNIYLDPLCLKFIDTEQFQRLRELKQLGVTNMVYPGAVHSRFEHSLGVYWLAGETAQRLKNFQGMELGIDNYDLQTVRLAGLLHDIGHGPFSHMFEREFLPKVISDCQWSHELMSVNMIDHMVDTHHIDIDAQMLKRVKDMILASTEFSQLKGNAEKRFLYDIVANGRNGIDVDKFDYLVRDSRACGLGSNFQFQRLTETMRVLDNEICFRAKEYLSVHKLFATRADLYRTVYTHSKVKAIELMIVDAMVKANNHLEISSMINDPSEYWKLDDTILKTIEIAPDPELAEAKELILRVRRRQLYQFCNEYAVPKDKIDHFKAVTPQDIICSQKHTSLTLKEEDIAVTNVKIDLARGRENPLECINFYKDYDSAEKFVIPEDRVSHLLPTTYQDMIVRVYAKKPELVEAVSEAFENFQMRTYGIKAQVHATPEKKKRRVM

SEQ ID NO: 6389 - protein, 223 aa, Arabidopsis thaliana
  Clone ID: ARATH-23APR03-C3614_1.p
MFLVPPMVFYSLFTTVRDLQRIARNSSVQVGDLSMKQIKELDVSEIVKGTLGSSRIPTLEEALALISNSVRKVILDAKVGPPMYEKGLAQDILSIIERAQCNNCIVWAKSDTLARDIIRRAPDTMVGYIVMVDPLTGARNSLLRMKGARVVGVYHPLIDEELVRVVRRRNKEVYAWTVDDADPMKRMLHLGVDAVVTSDPSMFQGLMEDLRTECLEEGFSIRT

SEQ ID NO: 6390 - protein, 312 aa, Arabidopsis thaliana
  Clone ID: ARATH-23APR03-C36517_1.p
METQNKLMNETKRHVKSRLCRVSGSMTEMMEIQAENPTFHVLFIPGNPGVVSFYKDFLESLYEFLGGNASVIAIGQISHTSKDWESGRLFSFQEQIDHKIDFIRQELESVKVPIILVGHSIGSYISLELLKKFSDKVVYCIGLYPFLTLNQQSTKQSLIGKLAASSVLSATASFLIASLRLLPMSAARLLVSKSIGASWSDTAVQATCTHLRQYHTMRNVLFMAKSEFRELAAEPDWDFMRENQSKLAFLFGIDDHWGPLQLFEEISKQAPHTSLSIEREGHTHGFCCTVAGSAWVAQHVATLIKNRFSQLQ

SEQ ID NO: 6391 - protein, 887 aa, Arabidopsis thaliana
  Clone ID: ARATH-23APR03-C3657_1.p
MAESIRTFSLQWRILSLIIALLVYFPIVSGNYFKPFNVSYDHRALIIAGKRRMLVSAGIHYPRATPEMWSDLIAKSKEGGADVIQTYVFWNGHEPVKGQYNFEGRYDLVKFVKLIGSSGLYLHLRIGPYVCAEWNFGGFPVWLRDIPGIEFRTDNEPFKKEMQKFVTKIVDLMREAKLFCWQGGPIIMLQIENEYGDVEKSYGQKGKDYVKWAASMALGLGAGVPWVMCKQTDAPENIIDACNGYYCDGFKPNSRTKPILWTEDWDGWYTKWGGSLPHRPAEDLAFAVARFYQRGGSFQNYYMYFGGTNFGRTSGGPFYITSYDYDAPLDEYGLRSEPKWGHLKDLHAAIKLCEPALVAADAPQYRKLGSNQEAHIYHGDGETGGKVCAAFLANIDEHKSAHVKFNGQSYTLPPWSVSVLPDCRHVAFNTAKVGAQTSVKTVKSARPSLGSMSILQKVVRQDNVSYISKSWMALKEPIGIWGENNFTFQGLLEHLNVTKDRSDYLWHKTRISVSEDDISFWKKNGPNPTVSIDSMRDVLRVFVNKQLSGSIVGHWVKAVQPVRFIQGNNDLLLLTQTVGLQNYGAFLEKDGAGFRGKAKLTGFKNGDLDLSKSSWTYQVGLKGEADKIYTVEHNEKAEWSTLETDASPSIFMWYKTYFDPPAGTDPVVLDLESMGKGQAWVNGHHIGRYWNIISQKDGCDRTCDYRGAYNSDKCTTNCGKPTQTRYHIPRSWLKPSSNLLVLFEETGGNPFKISVKTVTAGILCGQVLESHYPPLRKWSTPDYINGTTLINSVAPEVHLHCEDGHVISSIEFASYGTPRGSCDGFSIGKCHASNSLSIVSEACKGRNSCFIEVSNTAFISDPCSGTLKTLTVMARCSPSQNMSDLSF

SEQ ID NO: 6392 - protein, 96 aa, Arabidopsis thaliana
  Clone ID: ARATH-23APR03-C36608_1.p
MGKYTEMLDVGVRIAARFHSHCPQTARLYYHPPSDNHHHHGGVKDLIGGGGVLGSGQNSTGLVGGLGTGTGTTGGCGIKSSQVYDDARDLLLFSVV

SEQ ID NO: 6393 - protein, 258 aa, Arabidopsis thaliana
  Clone ID: ARATH-23APR03-C36668_1.p
MKNVNRVFFCKSLSLVFLVPSFTRSHLRFTYSAAGASSPNRAIHCMASDSPQSGDGSVSSPPNVAAVPSSSSSSSSASSAIDFLSLCTRLKTTPRAGWIKRDVKDPESIADHMYRMGLMALISSDIPGVNRDKCMKMAIVHDIAEAIVGDITPSCGISKEEKNRRESEALEHMCKLLGGGERAKEIAELWREYEENSSPEAKVVKDFDKVELILQALEYEQEQGKDLEEFFQSTAGKFQTDIGKAWASEIVSRRRKQH

SEQ ID NO: 6394 - protein, 251 aa, Arabidopsis thaliana
  Clone ID: ARATH-23APR03-C36676_1.p
MFVDDPSLHTLKRRRLEITDSMEASSSAQAKIADMREKLGREVRVFETSSISQRPSQVSSADDESDDFYEFTPADFYRLLATKKEDKSLKTRKIREAEEAARRSKLTKAVIRVRFPDNHTLEATFHPSEKIQGLIDLVKRVVAHPDVPFYLYTTPPKKQIKDFSQDFYSAGFVPGAIVYFSNDQPKDDGGSSTPYLNEEILSLKDLEAMTKAVEPVESSSEPATVDSSAVPVEHERKSTEKKTTKPKWFKM

SEQ ID NO: 6395 - protein, 217 aa, Arabidopsis thaliana
  Clone ID: ARATH-23APR03-C368_1.p
MSSNNKTDDSDDRSFWQNSTSYDASSKIFLVTTVSFSIIIIIVFVYYLYAKFVLHRRSAFQDLSFSVVSQPPKRGLDSLVIASLPTFVVGIKNDVAGTECAVCLSLLEEKDNARMLPNCKHVFHVSCVDTWLTTQSTCPVCRTEAEPSHPRLEPEPREGPVGDFAPPLDFAGVATRPGGSSVSRLDSFRRILTRERSSNRRDHSRVDQDRELDIERQ

SEQ ID NO: 6396 - protein, 189 aa, Arabidopsis thaliana
  Clone ID: ARATH-23APR03-C36908_1.p
MLQKQVSTTTTMTTQELAMEGEKQLEETIEAAFQIISAMNDELCNPSLWSTSATPSSAATTTGSNGSALVSADAAAIDGTSHHSESAGGGGGGGSGNSVLDEASLRYKNSVTSLRAVLAAIPNSQKAKASEMQNGLGSPESEDEIEKLEEQALSLRMEIAKKNVHVKELIDKLRELIADISTWQSPCSV

SEQ ID NO: 6397 - protein, 505 aa, Arabidopsis thaliana
  Clone ID: ARATH-23APR03-C37007_1.p
MAVVASAPGKVLMTGGYLVLEKPNAGLVLSTNARFYAIVKPINEEVKPESWAWKWTDVKLTSPQLSRESMYKLSLNHLTLQSVSASDSRNPFVEHAIQYAIAAAHLATEKDKESLHKLLLQGLDITILGSNDFYSYRNQIESAGLPLTPESLGTLAPFASITFNAAESNGANSKPEVAKTGLGSSAAMTTAVVAALLHYLGVVDLSDPCKEGKFGCSDLDVIHMIAQTSHCLAQGKVGSGFDVSCADAWGQRYVRFSPEVLSFAQVAVTGLPLNEVIGTILKGKWDNKRTEFSLPPLMNLFLGEPGSGGSSTPSMVGAVKKWQMSDPEKARENWQNLSDANLELETKLNDLSKLAKDHWDVYLRVIKSCSVLTSEKWVLHATEPINEAIIKELLEAREAMLRIRILMRQMGEAASVPIEPESQTQLLDSTMSAEGVLLAGVPGAGGFDAIFAITLGDSGTKLTQAWSSHNVLALLVREDPHGVCLESGDPRTTCITSGVSSIHLE

SEQ ID NO: 6398 - protein, 537 aa, Arabidopsis thaliana
  unsure (1)..(537): unsure at all Xaa locations
  Clone ID: ARATH-23APR03-C37133_1.p
MDELLPDRHDDYHMMLRFLKARKFDVEKAKQMWAHMIQWRKEFGTDTIIQDFDFEEINEVLKHYPQCYHGVDKEGRPIYIERLGKVDPNRLMQVTSMDRYVRYHVKEFERSFMIKFPSCTISAKRHIDSSTTILDVQGVGLKNFNKSARDLITRLQKIDGDNYPETLHQMFIINAGPGFRLLWNTVKSFLDPKTSAKIHVLGYKYLSKLLEVIDVNELPEFLGGACTCADQGGCMLSDKGPWKNPEIVKMVLHGGAHRARQVVKVLNSEGKVIAYAKPSYTXIKGSDTSTAESGSDAEDIGSPKAIKSFSHLRLTPVREEAKIAGETSLAGSFPGYDEYVPMVDKAVDATWKVKPAIQRVASRGALMSPTVPKDHEGIKARVLVMFMAFLMAVFTFFRTVTKKLPATTTSSPAETQGNAIELGSNGEGVKEECRPPSPVPDLTETDLLNCVTKKLTELEGKIGTLQSKPNEMPYEKEELLNAAVCRVDALEAELIATKKALYEALMRQEELLAYIDRQEEAQFQKMKKKKKKHLFCF

SEQ ID NO: 6399 - protein, 117 aa, Arabidopsis thaliana
  Clone ID: ARATH-23APR03-C37282_1.p
MEIKPSRIFSTITIFFLCLLLAHVTSKASSSSLCNGSVAECSSMVETEEMSVIMESWSSQRLTEEQAHKLSYGALRRNQPACDGGKRGESYSTQCLPPPSNPYSRGCSKHYRCGRDS

SEQ ID NO: 6400 - protein, 192 aa, Arabidopsis thaliana
  unsure (1)..(192): unsure at all Xaa locations
  Clone ID: ARATH-23APR03-C37337_1.p
MAAATTTLSSSSTTPXIXLINASHRFVSVTPFSSNSIFLRRRFRRLNRSLASSSSHSRRRYESDDRFFGGGDNYDVVPDDDGFSDDDDEEDERESSVDLLIRFLRSMFKKVSKRAKKASRRILPAAMSPRLVSFAVDGILLLGSLSITRAFLEVICNLGGTVFTVILLIRLFWAAASFFQTYGNSFGPNPVN

SEQ ID NO: 6401 - protein, 145 aa, Arabidopsis thaliana
  unsure (1)..(145): unsure at all Xaa locations
  Clone ID: ARATH-23APR03-C37339_1.p
METHVLSRIFLLVLCIYSLKTMVYGAGECGRNPPDREAIKLAPCAMAAQDTSAKVSAICCARVKQMGQNPKCLCAVMLSSTARSSGAKPEISMTIPKRCNIANRPVGYKCGXLYSALKQQTESNRRVLQNQSKLSHVHSCITWFQ

SEQ ID NO: 6402 - protein, 329 aa, Arabidopsis thaliana
  Clone ID: ARATH-23APR03-C37354_1.p
MAAKQMEEIQKKLGLLSYPRANAPAQSLLFAGMERYALLEWLFFKLLGDKSPFSQQNLQGDAGVRDEETVRIQYLAEIAKFLGITPTVDIEAIQGHGTYEDRMEMLRNIVDLVEASLFSDNQEWSIDEQVAKDIQLIDAIAERQSLIFSEECKLFPADVQIQSIYPLPDVSELETKLSEQAKILSNLQQKVDDLAAKHAYNPDEEYTEVESQLRARLESFLETARAFNTIYTKEIRPWTHMMEVPQLHGFGPAANRLLEAYNMLLKFLGNLKNLRDSHAALSIGSSGTVAGEPSSVTRIVSDCEAALTVLNRDLGILSASIAREQGERL

SEQ ID NO: 6403 - protein, 368 aa, Arabidopsis thaliana
  unsure (1)..(368): unsure at all Xaa locations
  Clone ID: ARATH-23APR03-C37438_2.p
MASLSGSWRDAYKGMSSDNIKGLVLALSSSLFIGASFIVKKKGLKRAGASGLRAGSGGYSYLLEPLWWVGMITMIVGEIANFAAYAFAPAILVTPLGALSIIISAALAHVILHEKLHTFGLXGCVXCXXGSKLCFYHAXQEPRDCFCVQVWNXATEPAFLXYAAAVVGAAXILIVQLYHSTVXSHVMVXSGVCSLVGSXSVMSVKALGIALKXTXSGMNQLIYPQTWVFTLIVLXCVITQMNYLNKALDTFNTAVVSPIYYVMFTSLTILASVIMFKDWDRQDGTQIVXELCGFVTILSGTFLLHKTKDMVDGSSSLGNLALRLPKQLEDSNGFEQEGIPLTLRRHECTKSPRPMRQFILPQDGPEAV

SEQ ID NO: 6404 - protein, 515 aa, Arabidopsis thaliana
  Clone ID: ARATH-23APR03-C37440_1.p
MASMSSGDESLRLCMFDLRRGQTEGQELEKILFFYPADLDFSTQLSVIGLSEGLITFTRLFSPEAACEVIEAERHSHVFYEAEPDIWMVMVVEKNKETGAIWRIDALRRVLKEVHSLFVMFHGSIRALIEKEPTGGLTRSLLYPFITDYLSTFQIWSLSEDCCCEFFVGKKLQLPTFRETLRERGTVQMLTLARDTAVEVQSLVQVLDSCAGSLRCHSMILFQDLLVSTTLSADDTVDLFTFAVMRLTSKAFSSDTSSWSYLRKGPGSSEISSRSNLAPVGSIDSLHSRNGNNMHHVIRPLQNDKWTKGKDGFLITDIWGLETGGSPDSAIPTIWLQQTQERMYLLAYQHKSLTLLLLMPTNAIVNGDLSISAVKQQVIEDASLRILKIEENISRGWGGENAYHIKGYRYLVVDNDTKVSRSSPSGKVTTLAKESLLALNKLREEVDSEKSRAKGQEKDMEICIRAKNNVWVIARVTRGKELYMALEKGSDTLLDTTDAVGRFSNRYCSGAFLMD

SEQ ID NO: 6405 - protein, 187 aa, Arabidopsis thaliana
  Clone ID: ARATH-23APR03-C37481_1.p
MMDGVEDGTAMYGGLETVQYVRTHHQHLCRENQCTSALVKHIKAPLHLVWSLVRRFDQPQKYKPFVSRCTVIGDPEIGSLREVNVKSGLPATTSTERLELLDDEEHILGIKIIGGDHRLKNYSSILTVHPEIIEGRAGTMVIESFVVDVPQGNTKDETCYFVEALIRCNLKSLADVSERLASQDITQ

SEQ ID NO: 6406 - protein, 163 aa, Arabidopsis thaliana
  Clone ID: ARATH-23APR03-C37495_1.p
MQSSMTMELRPSGDSGSSDVDAEISDGFSPLDTSHRDVADEGSLLRRAEMYQDYMKQVPIPTNRGSLIPFTSWVGLSISMKQLYGQPLHYLTNVLLQRWDQSRFGTDSEEQRLDSIIHPTKAEATIWLVEEIHRLTPSHLHMALLWRSDPMYHSFIDPIFPEK

SEQ ID NO: 6407 - protein, 445 aa, Arabidopsis thaliana
  Clone ID: ARATH-23APR03-C37501_1.p
MDKEETQQKENMLFSSQEYAAKLQKENMTLMKALAHRNKLVELSGIEIQKLRINLRSVQEKNLQLAQANSQMLAELNTNRDRLKDLQHELGCKNALLKVKKHLEEQVLPRTHHESKDKVSASASDGDCKSFQVHDIKHKDTKRKRTTRIKSSVSADVKPIPVNDSNSKANRKRVSGVIDTTGIPEEICQTEDDIDKGVVSRGVNQDIDNVVNKKFVPDAANPVKESVHRKRQCTRRQSTRFDVQETKQTEKLLEMDGAKESKETASFSLRRRSARLRHEEAEPCKSLHEGDEVRETIKRRRVSLRLSARFDIQEPHVTETSNADDARSIVIEESAGSRSESVEPSESRHETKEITRKRSFSTRRQSTKGKSQTDEAIKEIATDPSLVNTIVQECDQETESKDKPKADENEGMTRRSSVGRPSRHAAEKVQSYREVSLRVKMRRKC

SEQ ID NO: 6408 - protein, 528 aa, Arabidopsis thaliana
  Clone ID: ARATH-23APR03-C37513_1.p
MLKMEEGLRVSEHLFVNKDLFGGDVKISGEEDTSESSNVKRKVESLFSVMRKRTSRHKSVDDDMFPDLDNNADIGDGDEDIRNCLRPESDFWFKNLMDNPYDPLDEGSIVDASGSDTDISESSEFDVISEHVPEDNDLITGSKSLSIWSSEDDGTLVSKWSSETHNEKNDVRSKEDSGVPSNSDIFKNDGDKSSAIEVRCGDEINMQGSMEIMCINDDHRLWNKDDEPIPISIVPPNGCESLLLETCSRHQIDRCINEYNVHEDNIGLEISPIPLTKTLERPRRPWSVCCSIAALRNLPLMEDSSGACTSLDEQLYANATTSEDRDAELSQPPSTLYQEEVDGEEEIDIDAMIRKLNLVPDDSDSCFNREEWNMSKHPRHALIGLEQCTRTSMQRAIMFHGAIAVLHCPDSKHFVRKREVIIGRSSGGLNVDIDLGKYNYGSKISRRQALVKLENYGSFSLKNLGKQHILVNGGKLDRGQIVTLTSCSSINIRGITFVFKINKEAVGQFLKNNTRRKSEDDNKFRWCE

SEQ ID NO: 6409 - protein, 297 aa, Arabidopsis thaliana
  Clone ID: ARATH-23APR03-C3758_1.p
MRVLDEIAESPFLISPLNPNSTANGYRWVDKCHGFLHNTVLVAASLFFVAYLAYEAKKSLSKLSNRRSYIMIAYYGCLWLVSLLNLAWCCLQGWECTPGKEVVWNLLTLFTTSGMLFLEVSLVAFLFQGNYASGAEALTRTFLISGFIVALDLLLKAIFLFGFGVPLFIDNNENGKTFKWGLWIIHKLLLTGVYGMVFLMYNSRWREKLPARPAFYNYIIIMFALYSLYLVASAFTANNAHFGFWLYGIMSVCYHALYLPLLYITFLADFFQEEDLNLENVYYSEMKDAGFFDSDWE

SEQ ID NO: 6410 - protein, 129 aa, Arabidopsis thaliana
  Clone ID: ARATH-23APR03-C37603_1.p
MKALGYWLMVVGSLRLASVWFGFFNIWALRLAVFSHTTMSEVHGRTFGVLTLLTCTLCFLCAFNLENKPLYLATFLSFIYALGHFLTEYLFHQTMTIANLSTVGFFAGTSIVWMLLEWNSLEQPHSKLS

SEQ ID NO: 6411 - protein, 530 aa, Arabidopsis thaliana
  unsure (1)..(530): unsure at all Xaa locations
  Clone ID: ARATH-23APR03-C3764_1.p
FLRHAAIPLKAPSLPGTRECSPFLNRFVTHQPVNFIRKFHPSLDEASFSRRGRTTVVRVLETEKSTKIEKPEPPVKLISSICKGEXNPLKSTSLVVVIILSFSLLASSSEMKVGLEDYNFPVDPTPTTKASXNQVLLSMELLSILIFLSLLLLLRLLLHSNPKTVDNTKSFLXFICPVNVIYALFVVIIPTFFFFFLYLSFVLTLSCRRYVNXISFICQLVCXISPVCVMPIPVLQNLRSKGFSTLSCMVKNCGPQILNCLLDPNCRKALQCLNQCSPVDQVCSYRCIASYEGPYFEAFSLCVLQKHNCLELDAKIPEKPYVPPMTSFRGKELCHDTAEDLFVGWLGELEWSWRVVAGQNPAYDQFPCQYQLFYRGKGKSSFWYEPVFQVRTLEEKLVWRRRRYSVKRGKIPATFRFSVLDNGVVSNEFWTIVDVSDDLSWGLFHYHGAARVAGQSYTGAVLVTPDGSYPAEKDKERLQSALEKCGIKEWELFAVDNCSCENPPLGIPQGSRLHSRISIIEEPDSEEKFN

SEQ ID NO: 6412 - protein, 225 aa, Arabidopsis thaliana
  Clone ID: ARATH-23APR03-C37656_1.p
MGNSITVKRKRAKVMKIDGETFRIKTPVTAREVTADYPGYVLLDSQAVKHFGVRSKPLEPNQTLKPKKTYFLVELPKLPPETTAVDTENKLPYRRVMSGIHVGAKERLDMLMLSRRTVSDVTIGRSDGGDGFGPELGPGHTSVRLRLPRSQITKLMEENNNDASAIAEKILGIYMERSGELGGGRGGGDGRRKLGSGEIKAREKQVSFAGEGGRELPVLWSRSGK

SEQ ID NO: 6413 - protein, 93 aa, Arabidopsis thaliana
  Clone ID: ARATH-23APR03-C37694_1.p
MLFFSYFKDLVGQEVTVELKNDLAIRGTLHSVDQYLNIKLENTRVVDQDKYPHMLSVRNCFIRGSVVRYVQLPKDGVDVDLLHDAARREARGG

SEQ ID NO: 6414 - protein, 434 aa, Arabidopsis thaliana
  Clone ID: ARATH-23APR03-C3773_1.p
MGSLSGIIQRPLVAAAAVITASVSADVSERFSSLRSLVRGSESEQIAPSVSDLVQEERSLWVSQVSASKLADLSFVSRICVPVPNVDLLASNPSCSLATSVTSLSALRSVYQSAELAKASKPVAFTIGASLVVPDISYRWHLPEPRAVDMSGSSSCVSEKNRTVVVLLGWLGSKQKHLKKYADWYTSKGYHVITFTLPMNEIMSYQVGGKAEKNIESLVNHLADWLDEEQKKNLVFHTFSNTGWLTYGAILEKFQKQDSSLMGRVKGCIVDSAPVAAADPTVWASGFSAAFLKKSSVATKGSASSSYESNGINISQPKPAATETALLLVLEKFFAVILNLPKVNRRLADVLDTLSTAQPSCPQLYIYSSADRVIPVEQVESFIVEQRKAGHEVRACNFISSPHVDHFRSNPELYTAELNHFMNNFVLSCCHHSS

SEQ ID NO: 6415 - protein, 262 aa, Arabidopsis thaliana
  Clone ID: ARATH-23APR03-C37740_1.p
MDRSLNLLDLALGFDEQLAIPSPLNGKVILIEDCVETSGSFVLHQLMKRVLSSNSSDALIFLAFARPFSHYDRILRKLGCNLATHKSNNRLVFFDMLMVKCSDGDQMEDNVSAVAKLFREIQETVRKLQSVTSGNITVMVDDMSLLEIATTGSNSDHVLDFLHYCHTLSSESNCSLVILNHEDIYASMERPAFLLQMVCLADVVIKAEPLASGLANDVHGQLTVLNKGISNSGRGSSRNKLQNFQFRIKENGIDYFYPGCRS

SEQ ID NO: 6416 - protein, 347 aa, Arabidopsis thaliana
  Clone ID: ARATH-23APR03-C37749_1.p
MAKPHDRRRSSGRTNLASCAVATVFLLILLVVLLVVYFTVFKPKDPKISVNAVQLPSFAVSNNTANFSFSQYVAVRNPNRAVFSHYDSSIQLLYSGNQVGFMFIPAGKIDSGRIQYMAATFTVHSFPISPPSSSAISTVSAAVIPDSPIIPGPPDFTVTPRNPDSPYFPGYPESPDLPGNPGSPDFSGNPGPPSFPRNPGSPEFPGNPGAPIIPRNPGSPEFPINPPRNPGTPVIPRNPNPPVFPGNPGSGNPRSMGPPGFPGIGGPPGFPGTPFGGGGTGPTLGDGYANPGFGYGNRVGPTMEIESKMELAGRVKVLHVFTHHVVAKSDCRVTVSIADGSVLGFHC

SEQ ID NO: 6417 - protein, 365 aa, Arabidopsis thaliana
  Clone ID: ARATH-23APR03-C3775_1.p
MDCSCSTRPSSLLISSEPSFRFPHSNFSSNLSFQIPKDTKLVKQRLVVRSSSGSDYQNGDVNGFPLKPNKLFMQEAIGAEYGEGFETFRQDGPLKVDVDFWNEKLQDGFLQRIRYAMKPDEAYGLIFSWDNVVADTRSLKLEAWKQLAAEEGKEITEEVDIQRLMLYAGADHVLRKVLFWEKTQSKIDRLKLRLSEIYYDSLLKLTEPKEGLRDWLDAVTTARIPCAVVSNLDRKNMINALERMGLQKYFQAVVSEEDGMESIAHRFLSAAVKLDRKPSKCVVFEDDPRGITAAHNCTMMAVGLIGAHRAYDLVQADLAVGNFYELSVINLRRLFANKGSTFMDHEKQIIEKSPPKRKLTIDTIF

SEQ ID NO: 6418 - protein, 151 aa, Arabidopsis thaliana
  unsure (1)..(151): unsure at all Xaa locations
  Clone ID: ARATH-23APR03-C37823_1.p
MSGTVTMHSVFVYGSLMADDVVRLLLNRIPQTASATLPDLXFSIKGRVYPAIIPAKSDKVSGKVLFGITDDELNVLDEFEDVEYERENVQVLLTDSSDEKLQTKTYVWAKKDDPDLYGTWDFEEWKQLHMEGFLKMTKEFAEELNLPKSEI

SEQ ID NO: 6419 - protein, 124 aa, Arabidopsis thaliana
  Clone ID: ARATH-23APR03-C37835_1.p
VLTEILESSSSSVKKKPEFLQRFENRLHFLDMDWQGQKLAEQLMQILLLIAAVVSFVVGYTTASFRMMMLIYAGGVVLTTLITIPNWPCFNRHHLKWLDPSEAEKHPKPQVVVVSSKKKSSSKK

SEQ ID NO: 6420 - protein, 340 aa, Arabidopsis thaliana
  Clone ID: ARATH-23APR03-C37872_1.p
MGVCCPFLQPWDRARDQCLLNLPCLSDPVRRSSLLLKLALVALHLVFIGFLFLFDAEFIEKTKRDPWYMGCYILLFSATLLQYFVTSGSSPGYVVDAMRDVCEASAMYRNPSTTSIQHASRKSESVVVNVEGGSASCPRKPPTPWGKLVLDLYPPGTSIRNLTCGYCHVEQPPRTKHCHDCDRCVLQFDHHCVWLVTCIGQKNHSKFWWYICEETTLCIWTLIMYVDYLSNVAKPWWKNAIIILLLVILAISLIFVLLLLIFHSYLILTNQSTYELVRRRRIPYMRNIPGRVHPFSRGIRRNLYNVCCGNYNLDSLPTAFELEDRSRPYTCIDMLKCRCC

SEQ ID NO: 6421 - protein, 117 aa, Arabidopsis thaliana
  unsure (1)..(117): unsure at all Xaa locations
  Clone ID: ARATH-23APR03-C37882_1.p
MREPQLCSRSKYLVNREEASDFRYYSFSRDQPFPPKISRHGQPSDITARRCXLPYLASRQSNITPLSQSNESPIYRTKNLQPAKRKQVTVVFEAQGSSETPKHTESATANKSRKIHR

SEQ ID NO: 6422 - protein, 319 aa, Arabidopsis thaliana
  Clone ID: ARATH-23APR03-C37899_1.p
MNGEGKVVCVTGASGYIASWIVKLLLLRGYTVRATVRNPMDTKKTKHLLTLEGASERLKLFKSDLLEEGSFDQAIEGCDGVFHTASPVSFTVTDPQTEMIDPAVNGTLNVLRTCAKVSSVKRVIVTSSTAATLSINPNDVVDETVFTDLSVYLAMKAWYGYSKTLAEETAWRFAKENGIDLVVMNPGNVIEPVLQPTLNYSVEVIVDLINGKNPSNSFYYRFMDVRDVSLAHIKAFEVPSASGRYILADPDVTMKDIQKLLHELFPDLCRVDKDNENEVGEMAYKVCVDKLKSLGIEFTPIKESLKDTVVSLKERCLLI

SEQ ID NO: 6423 - protein, 311 aa, Arabidopsis thaliana
  Clone ID: ARATH-23APR03-C3789_1.p
MYRTAAKRLLAGGGITTTRLLRLPKLRSTIIPSSYTSGLCTSSIGGNTESPMGNQSVNPNQSGPTASSSTGTGEGQRRHESRKPRAEFQEEQARVLSASLRHVPRLGWTEEAMMAGSRDVGVSPSIVGSFSRKEAALVEFFMDECLQLLMDRIDSGLDLQNLIPSERISKLIRIRLEMQVPYMSKWPQALSIQAHPLNVPTSFKQRAMLVDEIWHAVGDGASDLDWYVKRTILGGVYSTTEIYMLTDDSLEHRDTWAFLDDRVKDAFDLKKSIQEAKYFAEDIGAGVGKSVQGLMNGVMQTMSRRSGGSAF

SEQ ID NO: 6424 - protein, 463 aa, Arabidopsis thaliana
  unsure (1)..(463): unsure at all Xaa locations
  Clone ID: ARATH-23APR03-C37906_1.p
MASSSSSSLLFPFFLILFSCLISVSSSRRSLIDRTLPKNLPRSGFRLSLRHVDSGKNLTKIQKIQRGINRGFHRLNRLGAVAVLAVASKPDDTNNIKAPTHGGSGEFLMELSIGNPAVKYSAIVDTGSDLIWTQCKPCTECFDQPTPIFDPEKSSSYSKVGCSSGLCNALPRSNCNEDKDACEYLYTYGDYSSTRGXLLATETFTFEDENSISGIGFGCGVENEGDGFSQGSGLVGLGRGPLSLISQLKETKFSYCLTSIEDSEASSSLFIGSLASGIVNKTGASLDGEVTKTMSLLRNPDQPSFYYLELQGITVGAKRLSVEKSTFELAEDGTGGMIIDSGTTITYLEETAFKVLXKEEFTSRMSLPVDDSGSTGLDLCFKLPNAAKNIDVPKLIFHFKGADXELPGENYMVADXSTGVLCLAMGSSNGMSIFGNVQQQNFNVLHDLEKETVSFVPTECGKL

SEQ ID NO: 6425 - protein, 493 aa, Arabidopsis thaliana
  unsure (1)..(493): unsure at all Xaa locations
  Clone ID: ARATH-23APR03-C37908_1.p
MGGDLKSQLSRESHVFGLKVWEVIGIAVALLIIAILSVLSCCLTSKKKSRRSKTGLPVIQTPPVVSKEIREVRVEHVSASNFAPGEGILLTIQDKNSKDSEKVMVHLDMRKKRSSSGRSGSFHHLEIIDKHSESAEEVSASSSLYNIATPSPLSGLPESHLGWGHWFTLRDLETATNRFSKENVIGEGGYGVVYRGELMNGTPVAVKKILNQLGQAEKEFRVEVDAIGHVRHKNLVRLLGYCIEGTHRILVYEYVNNGNLEQWLHGAMRQHGYLTWEARMKVLIGTSKALAYLHEAIEPKVVHRDIKSSNILINDEFNAKVXSDFGLAKLLGAGKSHVTTRVMGTFGYVAPEYANSGLLNEKSDVYSFGVVLLEAITGRDPVDYGRPAHEVNLVDWLKMMVGTRRSEEVVDPNIEVKPPTRSLKRALLTALRCVDPDSDKRPKMSQVVRMLESEEYPIPREDRRRSRTREGSMEINSDTDMSTPVSRSQSKRQ

SEQ ID NO: 6426 - protein, 306 aa, Arabidopsis thaliana
  Clone ID: ARATH-23APR03-C37914_1.p
MEPSSGTGPEKRPTVDLVKDRNGTDQILLQNPRGASVKISLHGGQVLSWKTDKGDELLFNSTKANLKPPHPVRGGIPICFPQFGTRGSLEQHGFARNKMWLVENNPPALPSFDSTGKAYVDLVLKSSDEDTMRIWPYSFEFHLRVSLALDGNLTLISRVRNINSKPFSFSIAYHTYFSISDISEVRLEGLETLDYLDNMHDRERFTEQGDALTFESEIDRVYLNSKDVVAIFDHERKRTFLIKKEGLPDVVVWNPWEKKARALTDLGDDEYRHMLCVDGAAIEKPITLKPGEEWTGKLHLSLVLST

SEQ ID NO: 6427 - protein, 483 aa, Arabidopsis thaliana
  Clone ID: ARATH-23APR03-C3797_1.p
MERKVLNTLAFSVFAVLFFTSSASSQYQTLVVNTLPSSATLSWPESESLTDESLSESTTSLSVHLSHVDALSSFSDASPADLFNLRLQRDSLRVKSITSLAAVSTGRNATKRTPRTAGGFSGAVISGLSQGSGEYFMRLGVGTPATNVYMVLDTGSDVVWLQCSPCKACYNQTDAIFDPKKSKTFATVPCGSRLCRRLDDSSECVTRRSKTCLYQVSYGDGSFTEGDFSTETLTFHGARVDHVPLGCGHDNEGLFVGAAGLLGLGRGGLSFPSQTKNRYNGKFSYCLVDRTSSGSSSKPPSTIVFGNAAVPKTSVFTPLLTNPKLDTFYYLQLLGISVGGSRVPGVSESQFKLDATGNGGVIIDSGTSVTRLTQPAYVALRDAFRLGATKLKRAPSYSLFDTCFDLSGMTTVKVPTVVFHFGGGEVSLPASNYLIPVNTEGRFCFAFAGTMGSLSIIGNIQQQGFRVAYDLVGSRVGFLSRAC

SEQ ID NO: 6428 - protein, 686 aa, Arabidopsis thaliana
  Clone ID: ARATH-23APR03-C38022_1.p
MMGCGFHFPWFFFLIIGLQARVRGRVGSQGSALLKFRARVNSDPHGTLANWNVSGINDLCYWSGVTCVDGKVQILDLSGYSLEGTLAPELSQLSDLRSLILSRNHFSGGIPKEYGSFENLEVLDLRENDLSGQIPPELSNGLSLKHLLLSGNKFSDDMRIKIVRLQSSYEVRLKKSPKLSPLAVLGCINRKLGHCVSRNRIIQVKKVEAIVFRIKATSRRFLKAFPSFLEETDIYKRRELLEETSNLAAEPAPSAPSPSPGIITEASPRSSGSFPAVTNAKKRRPPLVPPVPSPDKGSTSPDISKNQPQDNKQSKGSKHVWLYVVIAVASFVGLLIIVAVIFFCRKRAVKSIGPWKTGLSGQLQKAFVTGVPKLNRSELETACEDFSNIIETFDGYTVYKGTLSSGVEIAVASTAIAESKEWTRAMEMAYRRKIDTLSRINHKNFVNLIGYCEEDDPFNRMMVFEYAPNGTLFEHLHVNNVFRLSDKETEHLDWSARMRIIMGTAYCLQHMHGMNPPMAHTDFNSSEIYLTDDYAAKVSEIPFNLEARLNPKKHVSGDLEQTSLLLPPEPEANVHSFGVLMLEIISGKLSFSDEYGSIEQWASKYLEKDDLGEMIDPSLKTFKEEELEVICDVIRECLKTEQRQRPSMKDVAEQLKQVINITPEKATPRSSPLWWAELEILSSEAT

SEQ ID NO: 6429 - protein, 219 aa, Arabidopsis thaliana
  Clone ID: ARATH-23APR03-C38031_1.p
MSMECVVQGIIETQHVEALEILLQGLCGVQRERLRVHELCLRSGPNLGVVSSEVRLLCDLDQPEPTWTVKHVGGAMRGAGADQISVLVRNMIESKVSKNALRMFYALGYKLDHELLKVGFAFHFQRTAHISVSVSSVNKMPKVHAIDEAVPVTPGMQIVDVTAPATSENYSEVAAAVSSFCEFLAPLVHLSKPSISTGVVPTAAAAAASLMSDGGGTTL

SEQ ID NO: 6430 - protein, 760 aa, Arabidopsis thaliana
  unsure (1)..(760): unsure at all Xaa locations
  Clone ID: ARATH-23APR03-C3804_1.p
RAERSEFKSFHVHDKYWKSRIRCLLTSKEPQDKRSSGQTLGAIWNKTCYFAGSLKXINRATFIGSPMFRFNCSNSSYCNNVDMVGVVCIFDEIIQTLGASGYPDNKNSVRSGXIGDAVLRLLIQEQRYGDNQRGSCKLVNNGGTKRLHNAKTRXKRSSANRNRIGNKVTIKRRFIISRLLQGHPVETFLINEALDIIEAAGGSFYLAKCELGQGADAESYSELEVGADDKRVLDQIIDSLTRLANPNEDYISPHREANKISLKIGKVQQENEIKEKPEMTKKSGVLILGAGRVCRPAADFLASVRTISSQQWYKTYFGADSEEKTDVHVIVASLYLKDAKETVEGISDVEAVRLDVSDSESLLKYVSQVDVVLSLLPASCHAVVAKTCIELKKHLVTASYVDDETSMLHEKAKSAGITILGEMGLDPGIDHMMAMKMINDAHIKKGKVKSFTSYCGGLPSPAAANNPLAYKFSWNPAGAIRAGQNPAKYKSNGDIIHVDGKNLYDSAARFRVPNLPAFALECFPNRDSLVYGEHYGIESEATTIFRGTLRYEGFSMIMATLSKLGFFDSEANQVLSTGKRITFGALLSNILNKDADNESEPLAGEEEISKRIIKLGHSKETAAKAAKTIVFLGFNEEREVPSLCKSVFDATCYLMEEKLAYSGNEQDMVLLHHEVEVEFLESKRIEKHTATLLEFGDIKNGQTTTAMAKTVGIPAAIGALLLIEDKIKTRGVLRPLEAEVYLPALDILQAYGIKLMEKAE

SEQ ID NO: 6431 - protein, 501 aa, Arabidopsis thaliana
  Clone ID: ARATH-23APR03-C38070_1.p
MGKKKSKVTEPESQNDESQTIFSTLFSGEVESSGFASLFSADNPFRRKQPQEIKESSIPDEKKGDKRNAENEEEEEETDLPVKTKKSKKEKKLTDSGDEKETISEAVEESGLVSKRKKRKRDEIENEYETKKYGSVEMKEKKVGEKRKKADEVADTMVSKEGFDDESKLLRTVFVGNLPLKVKKKVILKEFSKFGEVESVRIRSVPIVDSKRTRKGAIMLKQINEKASSVHAYVVFETEQSAAASLAHNMSLIDGNHVRVDRACPPRKKQKGHDDTHLYDPKRTVFMGNLPFDVKDEEVYQLFTGKSNLENSIEAVRVIRDPHLNIGKGIAYVLFKTREAANLVLKKGYLKLRERELRISRVKPDTPSKRKSNPSEAYSPAQKRLQKDKVVTPTPTGKANLSYQGVRASRSGDDKKTPYQKSSAQTKMRPRGSSSNDNKKSGNNSASKERSQKRPAVAARKAKANAKGSKESGGKRFAGTKRKQENRTPEIFSKKKKTKRF

SEQ ID NO: 6432 - protein, 386 aa, Arabidopsis thaliana
  Clone ID: ARATH-23APR03-C38178_1.p
MDKASITEGKPIRCKAAILRKAGEPLVIEEIQVDPPQAYEVRIKILCTSLCHTDVTFWKLDSGPLARFPRILGHEAVGVVESIGEKVDGFKQGDVVLPVFHPQCEECKECKSPKSNWCTRYTNDYLSNTRRYGMTSRFKDSRGEDIHHFIFVSSFTEYTVVDIAHLVKISPEIPVDIAALLSCSVATGIGAAWKVADVEEGSTVVIFGLGAVGLAVAEGVRLRGAAKIIGVDSNPAKFEIGKRFGITDFVNPALCGEKKISEVIREMTDVGADYSFECIGLASLMEEAFKSTRPGSGKTIVLGMEQKALPISLGSYDLLRGRTVCGTLFGGLKPKLDIPILVDRYLKKELNLEDLITHELSFEEINKAFHLLAEGNSIRCIIWMDK

SEQ ID NO: 6433 - protein, 442 aa, Arabidopsis thaliana
  Clone ID: ARATH-23APR03-C38183_1.p
AVFNCFIYIERPKILGFALVLFCLNRILKGLCRDCRLQLFYIYREAEEICNHRQRKNKNKMYNLPRDLPEEVLCRIPLTSLRPVRSTCKKWSTLSKCGSFAKKHLAQAKVLADAKEFMVVLMMNFRVYLMRVNLQNNVVESSSSSSSSSSSCIKREAKLISLGDEEADISQVFHCDGLLLCISITESKTRLVVWNPYWGHTRLFEPTHQFNKFDSYSYALGYDKSRKSHKILRGITCLDPFKIYDFNSDLWRDLDVTPEWHLWQMLHGVSLKGNAYWFARENYTETMDTDHFFLLCFDFTSETFGPPLPLPFEFAVSEDTMSVSSVREEQLVVLYQPWDYLQLDIWVTSKIEPNAVSWNSKVFLSVSLKQLVSPQFQLTFGSFFIDEEKKVAVVFDKDYDNKRNIAYIFGVDGSFKAVDLGDSDRKCFPLVCSYVPSLVQLN

SEQ ID NO: 6434 - protein, 317 aa, Arabidopsis thaliana
  unsure (1)..(317): unsure at all Xaa locations
  Clone ID: ARATH-23APR03-C38198_1.p
MWPFWWKGASGFSARSTAEEVTHGIDGTGLTAIVTGASSGIGEETTRVLALRGVHVVMAVRNTDSGNQVRDKILKEIPQAKIDVMKLDLSSMASVRSFASEYQSLDLPLNLLINNAGIMACPFLLSSDNIELQFATNHLGHFLLTNLLLERMKKTASESNREGRIVIVSSEGHRFAYREGVQFDKINDEASYNTLQAYGQSKLGNILHATELARLFKEQGVNITANSLHPGSIMTNLLRYHSFINTIGNAVGKXVLKSIPQGAATTCYAALHPQAKGVSGEYLMDNNISDPNSQGKGKDLAKKLWEFSLRLTGEEES

SEQ ID NO: 6435 - protein, 349 aa, Arabidopsis thaliana
  Clone ID: ARATH-23APR03-C38199_1.p
MATFGAPATANSNPNKSYEVTPSPADSISSLSFSPRADILVATSWDNQVRCWEISRSGASLASAPKASISHDQPVLCSAWKDDGTTVFSGGCDKQAKMWPLLSGGQPVTVAMHEGPIAAMAWIPGMNLLATGSWDKTLKYWDTRQQNPVHTQQLPDKCYTLSVKHPLMVVGTADRNLIVFNLQNPQTEFKRIQSPLKYQTRCVTAFPDQQGFLVGSIEGRVGVHHLDDSQQSKNFTFKCHRDGNDIYSVNSLNFHPVHGTFATAGSDGAFNFWDKDSKQRLKAMSRCNQPIPCSSFNHDGSIYAYAACYDWSKGAENHNPATAKSSIFLHLPQESEVKAKPRVGATGRK

SEQ ID NO: 6436 - protein, 459 aa, Arabidopsis thaliana
  unsure (1)..(459): unsure at all Xaa locations
  Clone ID: ARATH-23APR03-C38223_1.p
MDDRAAVGGRSWLIDSNRIATKIMSASASSDPRQVVWKSNPSRHCPKCQHVIDNSDVVDDWPGLPRGXVKFDPSDPEIIWHLLAQSGLSGLSSHPFIDEFIPTVNQDDGICYTHPKNLPGVKSDGTVSHFFHKAIKAYSTGTRKRRKIHDDDFGDVRWHKTGRTKPVVLDGVQRGCKKIMVLYGGKAVKTNWVMHQYHLGIEEDEKEGDYVVSKIFYQQPQQLVVKRGDKAEQEVSEDIFAAVTPTADPVTPKLATPEPRNAVRICSDSHIASDYVTPSDYVSAHEVSLAETSEVMCMEDEVQSIQPNHERPSSGPELEHGLENGAKEMLDDKEEQEKDRDNENQGEEDPTWFDSGSQFILNSQQLVEALSLCDDLLGSQDREENTNSGSLKDKQPCIADYAPLGPEDFNRDLEECQKIVLDPSNIELDTPPEFRLSQLEFGSQGQLSRLGGLEMTDID

SEQ ID NO: 6437 - protein, 203 aa, Arabidopsis thaliana
  Clone ID: ARATH-23APR03-C38242_1.p
MARNLKSMMLCGFGLLCFLMIVDRAYAREFTVGGATGWTVPSGSQVYSQWAEQSRFQIGDSLLFVYQSNQDSVLQVTRDAYDSCNTDSPTAKFADGKTSVTLNHSGPYYFISGNKDNCKKNEKLVVIVMADRSGNKNTASSPPSPAPAPSGESAPSPPVSGTFEMTPAPTPTTSEDTPNSAASSLSFVAALLGAALASTLFLH

SEQ ID NO: 6438 - protein, 665 aa, Arabidopsis thaliana
  Clone ID: ARATH-23APR03-C3831_1.p
MATGRYIVEVEKGKQGVDGGSPSVGPVYRSIYAKDGFPEPPDDLVSAWDIFRLSVEKSPNNPMLGRREIVDGKAGKYVWQTYKEVHNVVIKLGNSIRTIGVGKGDKCGIYGANSPEWIISMEACNAHGLYCVPLYDTLGAGAIEFIICHAEVSLAFAEENKISELLKTAPKSTKYLKYIVSFGEVTNNQRVEAERHRLTIYSWDQFLKLGEGKHYELPEKRRSDVCTIMYTSGTTGDPKGVLLTNESIIHLLEGVKKLLKTIDEELTSKDVYLSYLPLAHIFDRVIEELCIYEAASIGFWRGDVKILIEDIAALKPTVFCAVPRVLERIYTGLQQKLSDGGFVKKKLFNFAFKYKHKNMEKGQPHEQASPIADKIVFKKVKEGLGGNVRLILSGAAPLAAHIESFLRVVACAHVLQGYGLTESCGGTFVSIPNELSMLGTVGPPVPNVDIRLESVPEMGYDALASNPRGEICIRGKTLFSGYYKREDLTQEVFIDGWLHTGDVGEWQPDGAMKIIDRKKNIFKLSQGEYVAVENLENIYSHVAAIESIWVYGNSYESYLVAVVCPSKIQIEHWAKEHKVSGDFESICRNQKTKEFVLGEFNRVAKDKKLKGFELIKGVHLDTVPFDMERDLITPSYKMKRPQLLKYYQKEIDEMYKKNREVQLRV

SEQ ID NO: 6439 - protein, 126 aa, Arabidopsis thaliana
  Clone ID: ARATH-23APR03-C38334_1.p
MAARGAMLRYLRVNVNPTIQNPRECVLPFSILLRRFSEEVRGSFLDKSEVTDRVLSVVKNFQKVDPSKVTPKANFQNDLGLDSLDSVEVVMALEEEFGFEIPDNEADKIQSIDLAVDFIASHPQAK

SEQ ID NO: 6440 - protein, 94 aa, Arabidopsis thaliana
  Clone ID: ARATH-23APR03-C38381_1.p
MEDSGRKGDPFPGFEMRVHNDDCVFRRSLSCRLQRRAPCPLLLPPRPPPSAEAPSTTTGVSTSTFCQNGTDPIPLLSPLVLPSMLQPNPTTTSH

SEQ ID NO: 6441 - protein, 504 aa, Arabidopsis thaliana
  Clone ID: ARATH-23APR03-C3840_1.p
MSSTLLEQTRSNHEEVERLERLVVEDLQKEPPSSKDRLVQGHRVRHMIESIMLTTEKLVETYEDKDGAWDDEIAALGGQTATGTNVFSEFYDRLKEIREYHKRHPSGRLVDANEDYEARLKEEPIIAFSGEEGNGRYLDLHDMYNQYINSKFGERVEYSAYLDVFSQPEKIPRKLKLSRQYMKYMEALLEYLVYFFQRTEPLQDLDRILSKVCSDFEEQYADGIVEGLDNELIPSQHTVIDLDYYSTVEELVDVGPEKLKEALGALGLKVGGTPQQRAERLFLTKHTPLEKLDKKHFARPPHNGKQNGDAKSTHESENAKEIALTEAKVKKLCNLLDETIERTKQNIVKKQSLTYEEMEGEREGEEANTELESDDEDGLIYNPLKLPIGWDGKPIPYWLYKLHGLGQEFKCEICGNYSYWGRRAFERHFKEWRHQHGMRCLGIPNTKNFNEITSIEEAKELWKRIQERQGVNKWRPELEEEYEDREGNIYNKKTYSDLQRQGLI

SEQ ID NO: 6442 - protein, 848 aa, Arabidopsis thaliana
  Clone ID: ARATH-23APR03-C3878_1.p
KNHTMDLEIVGRHALFFDDDSMATFVNSPTALVDWNSLFIDRYDVRHLLSSPPPPRIKRRRPNSNDADLESELDHERYLDLPSESPSPSDDDEHDMNEDSANTNADGYRAVSFSYGSSSDVNDQKNAADMESGFHPPFPVPDYLRQNLPPTEKLHQIITRTSSFVSKHGGQSEIVLRVKQGDNPTFGFLMPDHHLHLYFRFLVDHQELLTGKSSVEEKKNESEKDGGALSLLGSVYGTVEDEDANEESANDSKTSESAKGDDGVKVTDSNGPEGSKGAAKIASKHSLPLNDHASFIKRNPSVSAVNVVEKKQINTEKLVTSDKSQPKLELQIVEPTTEMKRVIDKIVDFIQKNGKELEATLVAQDVKYGMFPFLRPSSLYHAYYRKVLQEAEELKSGDKGVIIRKEDVKQEKMGNAVKDSKHGFGSVLPDDSAKKEKLKMVSDKPKVELHNEPFKPVQPQMRVNVDANTAAAILQAARRGIRNPQLGILTGKPMDETSQTLGNDVSYPSSKSPDLAKSTGQSLSGSTAASEADSSEAGLSKEQKLKAERLKRAKMFVAKLKPDAQPVQQAEPSRSISVEPLDSGISGLGAKAAKERDSSSIPYVAESKLADDGNSERRSKRNYRSRSQRDEDGKMEQGEEEESSMDEVTEETKTDKKHSCSRKRHKHKTRYSSKDRHSRDKHKHESSSDDEYHSRSRHRHRHSKSSDRHELYDSSDNEGEHRHRSSKHSKDVDYSKDKRSHHHRSRKHEKHRDSSDDEHHHHRHRSSRRKHEDSSDVEHGHRHKSSKRIKKDEKTVEEETVSKSDQSDLKASPGDNIPYLQNEPSQVSDELRAKIRAMLADTLYVSSN

SEQ ID NO: 6443 - protein, 170 aa, Arabidopsis thaliana
  Clone ID: ARATH-23APR03-C38833_1.p
MTIMIKFLLLALLVISPICAEKDLMKEECHNAQVPTICMQCLESDPTSVHADRVGIAEIIIHCLDSRLDIITNNITNILSLGGGTKEVRKILEDCRNDTSTVAPKLLSEAKTGLKTGDYDKAAKSIEYASIPHSCGLKQPSVEFEFLQLFSQISIYTQLSDAAMRIIDRF

SEQ ID NO: 6444 - protein, 433 aa, Arabidopsis thaliana
  unsure (1)..(433): unsure at all Xaa locations
  Clone ID: ARATH-23APR03-C39104_1.p
MAAPTGKGPVIPILGFLTCVAFIYLSFGDLWFGLKTEGELAFVKRNGTQFVVDGKALYVNGWNSYWFMDHAVNDHSRHRVGAMLEAGAKMGLTVCRTWAFNDGGYNALQISPGRFDERVFKALDHVIAEAKTHGVRLLLSLVNNLQAYGGKTQYVNWAWQEGVGLSSSNDSFFFDPSIRRYFKNYLTVLLTRKNSLTGIEYRNDPTIFAWELINEPRCMSDVSGDTLQDWINEMTAFIKSIDNKHLLTVGLEGFYGPNSPKKLTVNPXRWASELGSDFVRNSDSPNIDFASVHIYPDHWFHDQGFEEKLKFVVKWMLSHIEDGDKELKKPVLFTEFGLSNLNKDYDPSQRDRFYRTIFDVIYKSAKRKRSGAGTLVWQFLIEGMEGFNDDFGIVPWEQDSIQRLMIEQSCRLSRITGRHLLDKKSIEMCSHRP

SEQ ID NO: 6445 - protein, 479 aa, Arabidopsis thaliana
  Clone ID: ARATH-23APR03-C3910_1.p
MVKETELIFIPVPSTGLILVHIEFAKRLINLDHRIHTITILNLSSPSSPHASVFARSLIASQPKIRLHDLPPIQDPPPFDLYQRAPEAYIVKLIKKNTPLIKDAVSSIVASRRGGSDSVQVAGLVLDLFCNSLVKDVGNELNLPSYIYLTCNARYLGMMKYIPDRHRKIASEFDLSSGDEELPVPGFINAIPTKFMPPGLFNKEAYEAYVELAPRFADAKGILVNSFTELEPHPFDYFSHLEKFPPVYPVGPILSLKDRASPNEEAVDRDQIVGWLDDQPESSVVFLCFGSRGSVDEPQVKEIARALELVGCRFLWSIRTSGDVETNPNDVLPEGFMGRVAGRGLVCGWAPQVEVLAHKAIGGFVSHCGWNSTLESLWFGVPVATWPMYAEQQLNAFTLVKELGLAVDLRMDYVSSRGGLVTCDEIARAVRSLMDGGDEKRKKVKEMADAARKALMDGGSSSLATARFIAELFEDGSSC

SEQ ID NO: 6446 - protein, 482 aa, Arabidopsis thaliana
  Clone ID: ARATH-23APR03-C39121_1.p
MDLFRVWSGMDFLAWRGMAYTLLLLNFVFACQLLLLQPLVSALDGQSVDAAELFERASQSIKVKRYSDALDDLNAAIEADPALSEAYFKRASVLRHFCRYEDSENSYQKYLEFKSGDSNAEKELSQLHQAKSALETASTLYESKDIAKALEFVDKVVLVFSPACSKAKLLKVKLLMVSKDYSGAISETGYILKEDENNLEALLLRGRAYYYLADHDIAQRHYQKGLRLDPEHSELKKAYFGLKKLLKKTKSAEDNANKGKLRVSAEEYKEAIALDPEHTANNVHLYLGLCKVSVRLGRGKDGLNSCNEALNIDAELIEALHQRGEAKLLLEDWEGAVEDLKQAAQNSQDMEIHESLGKAEKALKMSKRKDWYKILGISRTASISEIKKAYKKLALQWHPDKNVGNREEAENKFREIAAAYEILGDDDKRARFDRGEDLEDMGGGGGGGYNPFHGGGGGGQQYTFHFEGGFPGGGGGFGGFGF

SEQ ID NO: 6447 - protein, 267 aa, Arabidopsis thaliana
  Clone ID: ARATH-23APR03-C391_4.p
MADGEDIQPLVCDNGTGMVKAGFAGDDAPRAVFPSIVGRTTGIVLDSGDGVSHTVPIYEGYALPHAILRLDLAGRDLTDSLMKILTERGYMFTTTAEREIVRDIKEKLAYVALDYEQELETAKSSSSVEKNYELPDGQVITIGAERFRCPEVLFQPSLIGMEAPGIHETTYNSIMKCDVDIRKDLYGNIVLSGGSTMFPGIADRMSKEITALAPSSMKIKVVAPPERKYSVWIGGSILASLSTFQQMWISKSEYDESGPSIVHRKCF

SEQ ID NO: 6448 - protein, 343 aa, Arabidopsis thaliana
  Clone ID: ARATH-23APR03-C39206_1.p
MMEVEGSMNRAPDQSSFLRSRRSKALYQFKQQKLPACKPVLTPISVITVFMLMGFVFIPIGLITLRASRDAIEIIDRYDVECIPEEYRTNKLLYITDSSIPKNCTRYLKVQKYMKAPIFIYYQLDNYYQNHRRYVKSRSDQQLLHGLEYSHTSSCEPEESSNGLPIVPCGLIAWSMFNDTFTFSRERTKLNVSRNNIAWKSDREHKFGKNVYPINFQNGTLIGGAKLDPKLPLSDQEDFIVWMRAAALLSFRKLYGRIEEDLEPGKVVEVNLMNNYNTYSFSGQKKLILSTSNWLGGRNDFLGITYLVVGSSSVVISIIFMLLHLKNPRPYGDNSWNKKSLSS

SEQ ID NO: 6449 - protein, 295 aa, Arabidopsis thaliana
  Clone ID: ARATH-23APR03-C39227_1.p
MAELQLVEGHQINGGFIPPAIINSIEAPETSAAAGVSVGSKRLRRPSVRLGDIGGDQYHQHVVAAYDSPQVRRPKWRPSGGGGGGGGNRKEPNNQSGKTTSSSRTRTMTNLSSGGYENTGTLDEDPVSIGSWRVKKWVKSSGGETAATTTTNTASAKRVRSNWATRNDGVEQGDEKFSGEEEEEEEDEELGGEEGFRDFSREDSESPMKERRRYENREVELLGDWQSGGRGKEGVKIWLQELGLGRYWPMFEMHEVDEQVLPLLTLEDLKDMGINAVGSRRKMYCAIQKLGREFS

SEQ ID NO: 6450 - protein, 303 aa, Arabidopsis thaliana
  Clone ID: ARATH-23APR03-C39232_1.p
MSISQFPPPASPSPASSSRSLASSSPSPGSFSSSMRLWRPAAQRNLRNQWSNLSNCRQQWIVACSAGRSHATLLVNSYLSQKYMPMMELGVLSDMFDIDKKALKKLFTQQSSYRIKLLSSYKEMVAVVVEMVNASRSLRCYTKLSTGSLIQFSGTKEDSNDAGDCGGIPVFNFWNVSAFEKMAEELVEMFKREVMLKRLLIMELISLSTEVPQPINNSWSDELYHGEFDHLTKCSLYSMEVAKPVLPRVKDYNIGSSSISHTNQPTAEILQIYLTTWLAEVNIDTHRVDEILALVGEEIRVTF

SEQ ID NO: 6451 - protein, 467 aa, Arabidopsis thaliana
  unsure (1)..(467): unsure at all Xaa locations
  Clone ID: ARATH-23APR03-C39459_1.p
MGYGWGIFEGMLVIGSLCLLGSAGLWFLNRRLYKEYEEKRALVQIIFSVVFAFSCNLLQLVLFEIIPVLSREARMVNWKVDLFCLIVLLVFMLPYYHCYLMLRNTGVRRERAAVGALLFLTAFLYAFWRMGIHFPMPSDKGFFSMPQLVSRIGVIGVTLMAVLSGFGAVNLPYSYISLFIREIEESEIKSLERQLMQSMETCIAKKKKILLCQVEVERSLVSEEHQKGKSFFRRFVGTVVRSVQDDQKEQDIKLMEAEVEGLEELSKQLFLEIYELRQAKDAAAFSRTWKGHVQNFLGYACSIYCVYKMLKSLQSVVFKEAGTKDPVTMMISIFLQFFDIGVDAALLSQYIXLLFIGMLIVISVRGFLTNLMKFFFAVSRVGSGSSSNVVLFLSEIMGMYFLSSILLIRKSLRNEYRGIITDVLGGDIQFDFYHRWFDAIFVASAFLSLLLLSAHYTSRQIDKHPID

SEQ ID NO: 6452 - protein, 350 aa, Arabidopsis thaliana
  Clone ID: ARATH-23APR03-C39475_1.p
MAAENERKSPSAVSDMGAWAMNVISSVGIIMANKQLMSSSGFAFSFATTLTGFHFALTALVGMVSNATGFSASKHVPMWELIWFSIVANVSIAAMNFSLMLNSVGFYQISKLSMIPVVCVMEWILHSKRYSREVKISVVVVVVGVGICTVTDVKVNAKGFICACVAIFSSSLQQILIGSLQKKYSIGSFELLSKTAPIQAFSLLVVGPLVDYLLSGKFIMKYNMSSGCFLFILLSCGLAENRHMSPSGCAGRFAAAPTGVHGAMTAVGGLAPGGPGFAAAKTFKNVAGMIVAIVGMVIYSWAMELEKQSIIAAKALNSVKHSLTEEEFELLKEGVETTQSKDVELGRTKD

SEQ ID NO: 6453 - protein, 355 aa, Arabidopsis thaliana
  Clone ID: ARATH-23APR03-C39493_1.p
MANRTDPLAKNIRGTNPQNLVEKIVRTKIYQHTFWKEQCFGLTAETLVDKAMELDHLGGTFGGSRKPTPFLCLILKMLQIQPEKEIVVEFIKNDDYKYVRILGAFYLRLTGTDVDVYRYLEPLYNDYRKVRQKLSDGKFSLTHVDEVIEELLTKDYSCDIAMPRLKKRWTLEQNGLLEPRKSVLEDDFEEEEEKEENEGIADGSEDEMDQRRKSPERERERDRDRRRDSHRHRDRDYDRDYDMDRDHDRDYERERGHGRDRDRERDRDHYRERDRDRERGRDRERDRRDRARRRSRSRSRDRKRHETDDVRDREEPKKKKEKKEKMKEDGTDHPNPEIAEMNRLRASLGMKPLRD

SEQ ID NO: 6454 - protein, 175 aa, Arabidopsis thaliana
  Clone ID: ARATH-23APR03-C39519_1.p
MTTSIHITALDGIVNVNSLFTLAVFIGLAWNPTDPDNSLVTDPNCVPTARMAENLVAFHVYSFASFLFSSLIALGLKQAMRLNIASSFHISTRIDPVVYYVNKTALRFGMVTSGLGSVCGCGFLMLALINVVQIKLGTLGCGASGHTYAAVVPLVILVPSALFIYVSLMLYAFTR

SEQ ID NO: 6455 - protein, 151 aa, Arabidopsis thaliana
  Clone ID: ARATH-23APR03-C39524_1.p
MAMELELDDDVFFADISKQLNLLITDEDEQNPISLSSSVSFQGLFRGNYQTSATPYMMYNEQINYNVIRESKGTGVFIPRSSQPRRKHNHHPHQKKQGRFIGSFIPKQQFPHHGHDNNLTTLNNNNQESITFHHASTNPRRTYRDAASLFT

SEQ ID NO: 6456 - protein, 177 aa, Arabidopsis thaliana
  Clone ID: ARATH-23APR03-C39558_1.p
MAETTTVTSSLKRQRDEQEQEIIKTQEETKRQKPSSSSSSYNQVLTLLKDEAENDITSLITTLQQEISNEEQNAAVFEENPSLSSSCSSSSSSCTSKEDEYEGDKEKVMKHLLEATDDELGIPNTEFGGSNYEMIKSETSQDYVNGFSLLDGFGVGLWELEDEAANYYTLLQSELFM

SEQ ID NO: 6457 - protein, 168 aa, Arabidopsis thaliana
  Clone ID: ARATH-23APR03-C39653_1.p
MRALLCSHRLLPLSSLSRTTVKTKSHNPKTLYPNNKPRWESKLHAGPKGFQSSRTSEKPGRPDPDPEDDPPIPQEVFERMMGRIVVSVGTPLGLGVAILKVLEVLKDRNVWDVPLWVPYLTTLVTFGSSALGIAYGSLSTNLDPAKTNSLFGLKEAKENWVEMWKEDQ

SEQ ID NO: 6458 - protein, 180 aa, Arabidopsis thaliana
  Clone ID: ARATH-23APR03-C39679_1.p
MMNVSRPAIHPVDALPVAPTAGAIDRPPVRMKDVQGMPGTTGGLILRLSQFVPALISVSVMVTTSDFRSATAFCCLVLAVSLQSLWSLSLFLVDAYALLVRRSLRNHSVVQCFTVGDGVTSTLTFAAASASAGITVLINDLGQCNVNHCTRFETATAMAFISWFAVSPSFILNFWSLATH

SEQ ID NO: 6459 - protein, 476 aa, Arabidopsis thaliana
  Clone ID: ARATH-23APR03-C39709_1.p
MASLTLRCDSTHLLPSRDVVKGTKPFGTSLVYPRIISKKFNVRMRVIPEEGDVFSSSKSNGSSMGIELQPDLVSFGTLAAEMIPTTMDSPEVEDEEFDLDRPTDGFASIPQAIEDIRHGKMVVVVDDEDRENEGDLIMAASLATPEAMAFVVKHGTGIVCVSMKGEDLERLELPLMVTRKDNEEKLRTAFTVSVDAKKGTSTGVSARDRAQTILTLASKDSKPEDFNRPGHIFPLRYREGGVLKRAGHTEASVDLTVLSGLEPVSVLCEIVDDDGSMARLPRLRQFAQENNLKLISIADLIRYRRKRERLVEFTAVAPIPTMWGPFKAHCFKSLLDGVEHIAMVKGEIGDGKDILVRVHAECITDDIFGNSSGGKQLAIAMRLIEENGRGVFVYLRGPESKGIDLSHKPRTYNTNSDQAEGVSFPVASREYGIGAQILRDLGVREMKVMTNNPAHYVGLKGYGLSISGKVPLITTP

SEQ ID NO: 6460 - protein, 628 aa, Arabidopsis thaliana
  Clone ID: ARATH-23APR03-C3970_1.p
MGRKKFEAFGFVCLISLLLLFNSLWLASSNMEGDALHSLRANLVDPNNVLQSWDPTLVNPCTWFHVTCNNENSVIRVDLGNADLSGQLVPQLGQLKNLQYLELYSNNITGPVPSDLGNLTNLVSLDLYLNSFTGPIPDSLGKLFKLRFLRLNNNSLTGPIPMSLTNIMTLQVLDLSNNRLSGSVPDNGSFSLFTPISFANNLDLCGPVTSRPCPGSPPFSPPPPFIPPPIVPTPGGYSATGAIAGGVAAGAALLFAAPALAFAWWRRRKPQEFFFDVPAEEDPEVHLGQLKRFSLRELQVATDSFSNKNILGRGGFGKVYKGRLADGTLVAVKRLKEERTPGGELQFQTEVEMISMAVHRNLLRLRGFCMTPTERLLVYPYMANGSVASCLRERPPSQLPLAWSIRQQIALGSARGLSYLHDHCDPKIIHRDVKAANILLDEEFEAVVGDFGLARLMDYKDTHVTTAVRGTIGHIAPEYLSTGKSSEKTDVFGYGIMLLELITGQRAFDLARLANDDDVMLLDWVKGLLKEKKLEMLVDPDLQGNYTEAEVEQLIQVALLCTQSSPMERPKMSEVVRMLEGDGLAEKWDEWQKVEVLRQEVELSSHPTSDWILDSTDNLHAMELSGPR

SEQ ID NO: 6461 - protein, 615 aa, Arabidopsis thaliana
  Clone ID: ARATH-23APR03-C3971_1.p
MERRLMIPCFFGLILVLDLVLRVSGNAEGDALSALKNSLADPNKVLQSWDATLVTPCTWFHVTCNSDNSVTRVDLGNANLSGQLVMQLGQLPNLQYLELYSNNITGTIPEQLGNLTELVSLDLYLNNLSGPIPSTLGRLKKLRFLRLNNNSLSGEIPRSLTAVLTLQVLDLSNNPLTGDIPVNGSFSLFTPISFANTKLTPLPASPPPPISPTPPSPAGSNRITGAIAGGVAAGAALLFAVPAIALAWWRRKKPQDHFFDVPAEEDPEVHLGQLKRFSLRELQVASDNFSNKNILGRGGFGKVYKGRLADGTLVAVKRLKEERTQGGELQFQTEVEMISMAVHRNLLRLRGFCMTPTERLLVYPYMANGSVASCLRERPESQPPLDWPKRQRIALGSARGLAYLHDHCDPKIIHRDVKAANILLDEEFEAVVGDFGLAKLMDYKDTHVTTAVRGTIGHIAPEYLSTGKSSEKTDVFGYGVMLLELITGQRAFDLARLANDDDVMLLDWVKGLLKEKKLEALVDVDLQGNYKDEEVEQLIQVALLCTQSSPMERPKMSEVVRMLEGDGLAERWEEWQKEEMFRQDFNYPTHHPAVSGWIIGDSTSQIENEYPSGPR

SEQ ID NO: 6462 - protein, 352 aa, Arabidopsis thaliana
  unsure (1)..(352): unsure at all Xaa locations
  Clone ID: ARATH-23APR03-C39721_1.p
MAMAALTSSSSAITLLNKPFLPNRSSFFSSDSQSPLLRFSASTSVRSRFPSAAISAVAPKSDINKNETPKIEIEETQVFACPVCYEPLMRKGPSGINLQAIYRSGFKCGQCNKTYSSKDEYLDLTVTADLDDYNEVKPITTELFRSPLVSFLYERCWREAFKRSGVSGPDEEFRMAEEYFKEAAGGLLVDVSCGSGLFFRKFAQSGKXCGVSAEAHTGNGPRGSNEHAKNDNTFDNSTNIAVVRADVSRLPFPSGSVDAVHAGAALXCWPSPTNAIAEICRVLRSGGVFVGTTFLRYSPSTPWIIRPFQSRILQSYNYLMQDEIKDVCTSCGLTDYEDYIQDSFIMFTARKP

SEQ ID NO: 6463 - protein, 129 aa, Arabidopsis thaliana
  Clone ID: ARATH-23APR03-C39732_1.p
MGRRILNDALRTIVNAERRGKASVELKPISTVMSSFLRIMKEKGYIKNFQVYDPHRVGRITVDLQGRVNDCKALTYRQDVRAKEIEKYTERTLPTRQWGYVVITTPDGILDHEEAIKRNVGGQVLGFFY

SEQ ID NO: 6464 - protein, 229 aa, Arabidopsis thaliana
  Clone ID: ARATH-23APR03-C39735_1.p
MPSFAFGSHHHLANPTDSPPYSVEISIDGDSSDLDSLSQVDLESGGVPAPEKQLHSGGKKRRTRRRKRRKKKKKKKGGRDCRICHLPLETNKEAEDEDEEEEDDSDDDEDEEDEEEEEEEEEYYGLPLQLGCSCKGDLGVAHSKCAETWFKIKGNMTCEICGAMALNVAGEQSNPESTASTHSQAAAGQSLTQTEPRGIWHGRPVMNFLLAAMVFAFVVSWLFHFKVLK

SEQ ID NO: 6465 - protein, 440 aa, Arabidopsis thaliana
  Clone ID: ARATH-23APR03-C39738_1.p
MTFIDTEMCMRRNNINLTTVIDSNEAIGMEHELDSARHQYSSVLTAIPFFSATFYLSVQKIGLKMQAFALSGKKRIVNHGMCFSKGNLDLGSRLSENFMDDPLIPGLPDDVAKQCLALVPRARFPSMGSVCKKWRFVVQSKEFITVRRLAGMLEEWLYVLTMNAGGKDNRWEVMDCLGQKLSSLPPMPGPAKTGFKVVVVDGKLLVIAGCCMINGSLVASADVYQYDTCLNSWSRLADLEVARYDFACAEVNGHVYVVGGHGVDGESLSSAEVYDPETCTWTFIESLRRPRWGCFASAFNGKLYVMGGRSNFTIGNSKLLDVYNTQCGSWHGSKNGLTMVTAHVEVGKKLFCIDWKNHRKMSVFNAEDETWEVVALPLSGSSRAGFQFGKLSGKLLLFSSQEETGQCTLLYDPDASPGTQWKTSEIKLSGSCVCSVTITA

SEQ ID NO: 6466 - protein, 177 aa, Arabidopsis thaliana
  Clone ID: ARATH-23APR03-C39740_1.p
MAASSSSSSSDVSSDSSDSHRRRKDRRHHRRNDRDRDSLKVRKKSRSTSKKRRRRQHSSDSSDSSYSDSSSESSDSEHEKSRRHKKHEKPKKAKDKERSKSHRHKRHKNRERKKGEGEGSSGPVKLSKFLNRDKDDGERRSAVSGKKILLKVDKSKEDKAAESKRNELLKFLNASFD

SEQ ID NO: 6467 - protein, 305 aa, Arabidopsis thaliana
  Clone ID: ARATH-23APR03-C39794_1.p
MNDLISSSFKRYTDLNHQVQLDDIESQNVSLDSGNLDEFFGYVESVKEDMKAVDEIHKRLQDANEESKTVHDSKAVKKLRARMDSSVTEVLKRVKMIKTKLVALEKSNAAQRKVAGCGPGSSADRTRTSVVSGLGKKLKDMMDDFQRLRTKMATEYKETVERRYFTVTGQKADEETVEKLISSGESERFLQKAIQEQGRGQVMDTLSEIQERHDTVKEIERSLLELHQVFLDMAALVEAQGNMLNDIESNVSKASSFVMRGTDQLHGAKVLQRNNRKWACIATILAIVVVIVILFPILFNTLLRP

SEQ ID NO: 6468 - protein, 171 aa, Arabidopsis thaliana
  Clone ID: ARATH-23APR03-C39829_1.p
MVDSGKEFLMLDSYNNIPWLIWIQMLVFVLLLLLLCVVGIFSLDIGDNSYSSSDSVPSTSGSSLSKRFLSGNTIPISHHGLGFSVNSSLVQSHQVGSSQSIKGEITPAVTRRVTTVTEEGEGSLEKDSSHSLHHPCTLFRLAGSAFLKCFGIDRSTEETEDSLRQESKKER

SEQ ID NO: 6469 - protein, 314 aa, Arabidopsis thaliana
  Clone ID: ARATH-23APR03-C39830_1.p
MATSTTSAIRAPNWRTAVLFWTISLTIFYSLFQMGIRNSPSTSSPSSDSFVSYAEQSTRLYNKMEQDLQENGPVFLKQGETSQSLSLSDLFTLKDGKIAPVLKVANPPVRANVLHLSTEYSVPVSEVVKNVFSPYFENTIWFQDSKMYHFSMFHASNHIFSVPATEVEVEAEAAAVKAVAKELCPLEIILDRVLLTSTGVLLGCWKVNSGDDPITIRLKLRSVLPRAPEKQLYDAAILHTSLARLLGPPISPTEAGSDDHLQLLHELVTRLNNQIRGFKAIVSELWYVEEFDLLALALGGRMNVRSFPLGCAKS

SEQ ID NO: 6470 - protein, 351 aa, Arabidopsis thaliana
  Clone ID: ARATH-23APR03-C39834_1.p
MQKMRVSGFRVLLLVSCFFCKSKGAVVPALIMFGDSIVDVGNNNNLLSIVKSNFLPYGRDFINQRPTGRFCNGKLAVDFSAEYLGFSSYPPAFLSREASNKNILIGANFASASSGYYDATSVPFGSISLTRQLSYYRAYQNRVTRMIGRGNARILFSRGIHILSAGSSDFLQNYYINPLLNILNTPDQFADILLRSFSEFIQNLYELGARRIGVISLPPMGCLPAAITLFGAGNKSCVERLNNDAIMFNTKLENTTRLLMNRHSGLRLVAFNVYQPFLDIITNPTDNGFFETKRACCGTGTIETSFLCNSLSFGTCVNATGYVFWDGFHPTEAVNELLAGQLLGQGISLIN

SEQ ID NO: 6471 - protein, 236 aa, Arabidopsis thaliana
  Clone ID: ARATH-23APR03-C39918_1.p
MDQIVSGEEEDLDVDIEDGRFNETQEITTNLVSAEGDSENVLNHVWSGRLSFDGSEKSADDLVDPLMGEGKRRERSSQSLDLSDMKFDNDKFKKTRKPSKPPRPPKGPLLSANDQKLMREITELAMRKRARIERMKTLRRLKAAKSSSPCSSIFAMIVTVIFFVFLIFQGFFTSNASLNSDNSPAPNNSANNRMVSVQFYNEFAPRERIDPSPTTSFRYKRVSGADNEENTREVTR

SEQ ID NO: 6472 - protein, 352 aa, Arabidopsis thaliana
  Clone ID: ARATH-23APR03-C39919_1.p
MQEEKSKEDHSRLINVTAKDLTVRNRRLVEVPYTATLSHAMNTLVANSISALPVAAPPGHWIGAGGSMIMESDKQTGVVRKHYIGILTMLDILAHIAGEDSNLSDLDRKMSSQVSSIIGHCLEGLSLWTLNPNTSVLECMEVFSKGIHRALVPVESSIESNNTIAGVELIESASAYKMLTQMDLLRFLKDHHFDDLKTVLSRSISDLGAVNDSVYAITERTTVSNAINVMKGALLNAVPIVHAPDIAQEDHLQLVNGRHRKVIGTFSATDLKGCRLPELQTWLPLTALEFTEKTSGKEREVVSCGVESTMEEAIEKVVTRGVHRVWVMDQQGLLQGVVSLTDIIRSLRSTLS

SEQ ID NO: 6473 - protein, 499 aa, Arabidopsis thaliana
  unsure (1)..(499): unsure at all Xaa locations
  Clone ID: ARATH-23APR03-C39972_1.p
MSLDIKKPNITKTKKKKTGFVVKMQLNNNRGGNKRNIFIFFFFRNYYTWILWFCLSLYFFTSYFSVEDQSSPSSIRLLSNHKTSSSLPSRALIESXSPLKPTSIGKDARNENSPLSQIFHFSSKIDFLASADAWADAWVKIYVYDLPASYNDDWVTASDRCASHLFAAEVAIHRALLSSDVRTLDPDEADYFFVPVYVSCNFSTSNGFPSLSHARSLLSSAVDFLSDHYPFWNRSQGSDHVFVASHDFGACFHAMEDMAIEEGIPKFMKRSIILQTFGVKYKHPCQEVEHVVIXPYIPPESVQKAIEKAPVNGRRDIWAFFRGKMEVNPKNISGRFYSKGVRTAILKKFGGRRRFYLNRHRFAGYRSEIVRSVFCLCPLGWAPWSPRLVESAVLGCVPVVIADGIQLPFSETVQWPEISLTVAEKDVRNLRKVLEHVAATNLSAIQRNLHEPVFKRALLYNVPMKEGDATWHILESLWRKLDDRSYRRSRVLSQREVDM

SEQ ID NO: 6474 - protein, 359 aa, Arabidopsis thaliana
  Clone ID: ARATH-23APR03-C39998_1.p
MGFIGKSVLVSLVALWCFTSSVFTEEVNHKTQTPSLAPAPAPYHHGHHHPHPPHHHHPHPHPHPHPPAKSPVKPPVKAPVSPPAKPPVKPPVYPPTKAPVKPPSKPPVKPPVSPPAKPPVKPPVYPPTKAPVKPPTKPPVKPPVYPPTKAPVKPPTKPPVKPPVYPPTKAPVKPPTKPPVKPPVSPPAKPPVKPPVYPPTKAPVKPPVSPPTKPPVTPPVYPPKFNRSLVAVRGTVYCKSCKYAAFNTLLGAKPIEGATVKLVCKSKKNITAETTTDKNGYFLLLAPKTVTNFGFRGCRVYLVKSKDYKCSKVSKLFGGDVGAELKPEKKLGKSTVVVNKLVYGLFNVGPFAFNPSCPK

SEQ ID NO: 6475 - protein, 308 aa, Arabidopsis thaliana
  Clone ID: ARATH-23APR03-C3999_1.p
MAVLEASLSIFSFSSSSSSSKPYLFSKRSSSLKLTALSLRIPSNLSPVFSLRSGSDNSRRLVSVLCSVAEKETSADEETSQEEKTEETQNSNLKRKLFVFNLPWSMSVNDISELFGQCGTVNNVEIIRQKDGKNRGFAFVTMASGEEAQAAIDKFDTFQVSGRIISVSFARRFKKPTPKSPNDLPSPAPGDTRHKLYVSNLAWKARSTHLRELFTAADFNPVSARVVFADPEGRSSGYGFVSFATREEAENAITKLNGKEIMGRPITLKFSLRSASESEDGDSVEANNASEDGDTVEDKNTSEENIVE

SEQ ID NO: 6476 - protein, 299 aa, Arabidopsis thaliana
  Clone ID: ARATH-23APR03-C40017_1.p
MSMSRLGLLLFVAILLVLLQSSTCLISSPSSIINPSKVKQVSSKPRAFVYEGFLTDLECDHLISLAKENLQRSAVADNDNGESQVSDVRTSSGTFISKGKDPIVSGIEDKLSTWTFLPKENGEDLQVLRYEHGQKYDAHFDYFHDKVNIARGGHRIATVLLYLSNVTKGGETVFPDAQEFSRRSLSENKDDLSDCAKKGIAVKPKKGNALLFFNLQQDAIPDPFSLHGGCPVIEGEKWSATKWIHVDSFDKILTHDGNCTDVNESCERWAVLGECGKNPEYMVGTPEIPGNCRRSCKAC

SEQ ID NO: 6477 - protein, 275 aa, Arabidopsis thaliana
  Clone ID: ARATH-23APR03-C40025_1.p
MGTLGRAFYSVGFWIRETGQALDRLGCRLQGKNYFREQLSRHRTLMNVFDKAPIVDKDAFVAPSASVIGDVHIGRGSSIWYGCVLRGDVNTVSVGSGTNIQDNSLVHVAKSNLSGKVHPTIIGDNVTIGHSAVLHGCTVEDETFIGMGATLLDGVVVEKHGMVAAGALVRQNTRIPSGEVWGGNPARFLRKLTDEEIAFISQSATNYSNLAQAHAAENAKPLNVIEFEKVLRKKHALKDEEYDSMLGIVRETPPELNLPNNILPDKETKRPSNLN

SEQ ID NO: 6478 - protein, 667 aa, Arabidopsis thaliana
  unsure (1)..(667): unsure at all Xaa locations
  Clone ID: ARATH-23APR03-C40026_1.p
MQGPRSTGDSSTGINYADGEPICSTNSETTSNNILNPVDVQFPNNTTGSGRPTYASSSSHVVQNHNWWSFGXESSSRLGPSDHLNSNGSKTDRQLLSDGYGFEEGQSGMLLPGESFLRGSSSSHMLSHVNLGKDMDIGSGLQTSGVVIRHNNCETSLGSSSQTAEERSSGPGSSLGGLGSSCKRKALEGAPSHSFPGESHGCFFQTENGAWNEGLAQYDASSSLSLSMPSQNSPNVNNQSGLPEPRFGLGGGRAVTASAFPSTRSTETISRPGRRLNPGQPPESVAFSFTQSGSSVRQQQQLPATSPFVDPLDARAIPVTGSSSSGDGQPSMIHLPALTRNIHQFAWSASSSSRANSMPEEGLSPWDAPRINSEQPVFTTPANETRNPVQDQFCWSFTRGNPSTSGDSPFVPRAGSSSGIHGLQPNPTWVTPHNQSRISEVAPWSLFPSIESESATHGASLPLLPTGPSVSSNEAAAPSGSSSRSHRSRQRRSGLLLERQNDHLHLRHLGRSLAADNDGRNRLISEIRQVLSAMRRGENLRFEDYMVFDPLIYQGMAEMHDRHRDMRLDVDNMSYEELLALGERIGDVSTGLSEEVILKVMKQHKHSTTGAGTREEMGPCCVCQEEYAEGDDLGTLGCGHEFHTACVKQWLMLKNLCPICKTVALST

SEQ ID NO: 6479 - protein, 390 aa, Arabidopsis thaliana
  Clone ID: ARATH-23APR03-C40038_1.p
MYMIESKGGAIACMLLALLFLGTWPAIMTLTERRGRLPQHTYLDYTLTNLLAAVIIALTLGEIGPSRPNFFTQLSQDNWQSVMFAMAGGIVLSLGNLATQYAWAYVGLSVTEVITASITVVIGTTLNYFLDDRINRAEVLFPGVACFLIAVCFGSAVHKSNAADNKTKLQNFKSLETTSSFEMETISASNGLTKGKAKEGTAAFLIELEKQRAIKVFGKSTIIGLVITFFAGICFSLFSPAFNLATNDQWHTLKHGVPKLNVYTAFFYFSISAFVVALILNIRFLYWPILGLPRSSFKAYLNDWNGRGWSFLAGFLCGFGNGLQFMGGQAAGYAAADAVQALPLVSTFWGILLFGEYRRSSRKTYTLLISMLLMFIVAVAVLMASSGHRK

SEQ ID NO: 6480 - protein, 733 aa, Arabidopsis thaliana
  Clone ID: ARATH-23APR03-C4008_1.p
MIGEKDLAGDGECSRTKTSKPRFSNLNNQTHQDDKTGQYHQKGVDFLNVRSNNLDGGFSSKSSPRSGNELTLSYLCENSGKLAESLGQKGKEVVTFSENSSYDDKWVERDFFNLREMNPNSSKRKAHEEEEEAEEEEDKKSNKIETLNLSLALPDVSLSLTASNAVKRPRVVTSERTTTSFSNDFTATAPSMSYSYSHPFSHNISCSMTRNSTDFDCSVGKDDHIWCAGEGTNGSVHSRFRPIGDGGVALANNPVSGKPSSSADYSFFPSELPARPGNEVTISGDSRKKVANLEDNDAVRSERVLYDIVSKSISSVALIIQGMADETLESAKEYLRNLIDSPEKKEKLVNLQNQIDKRSDLSKETLSKCVKDQLDILVAVRTGLKYFLSGKIRIPMNELVEIFLFLRCRNVNCKSLLPVDDCECKICSNNKGFCSSCMCPVCLRFDSASNTCSWVGCDVCSHWCHAACGIQKNLIKPGHSLKGQRGTTEMMFHCIGCAHKSEMFGFVKDVFVCCAKNWGLETLIKELDCVRKVFRGSDDAKGKALHLKANEMVKKLESKQISPLDASNFIIQFFNYAESIPEIPDPPRELTVAAETSYRKDEASVTPSTSKDQKKKSFALTDAMMNSFDSLESMVRIKEAETRMFQKKADEARIEAESFKRMIEMKTEKMEEEYTEKLARLCLQETEERRRNKLEELKKLENSHCDYRNMKLRMEAEIAGLLKRMEVTRQQLV

SEQ ID NO: 6481 - protein, 510 aa, Arabidopsis thaliana
  Clone ID: ARATH-23APR03-C40096_1.p
MDLTDVIIFLFALYFINLWWRRYFSAGSSQCSLNIPPGPKGWPLVGNLLQVIFQRRHFVFLMRDLRKKYGPIFTMQMGQRTMIIITDEKLIHEALVQRGPTFASRPPDSPIRLMFSVGKCAINSAEYGSLWRTLRRNFVTELVTAPRVKQCSWIRSWAMQNHMKRIKTENVEKGFVEVMSQCRLTICSILICLCFGAKISEEKIKNIENVLKDVMLITSPTLPDFLPVFTPLFRRQVREARELRKTQLECLVPLIRNRRKFVDAKENPNEEMVSPIGAAYVDSLFRLNLIERGGELGDEEIVTLCSEIVSAGTDTSATTLEWALFHLVTDQNIQEKLYEEVVGVVGKNGVVEEDDVAKMPYLEAIVKETLRRHPPGHFLLSHAAVKDTELGGYDIPAGAYVEIYTAWVTENPDIWSDPGKFRPERFLTGGDGVDADWTGTRGVTMLPFGAGRRICPAWSLGILHINLMLARMIHSFKWIPVPDSPPDPTETYAFTVVMKNSLKAQIRSRT

SEQ ID NO: 6482 - protein, 395 aa, Arabidopsis thaliana
  Clone ID: ARATH-23APR03-C40137_1.p
MASENLNDKISVFKKLKAKSDNKICFDCNAKNPTWASVTYGIFLCIDCSAVHRSLGVHISFVRSTNLDSWSSEQLKMMIYGGNNRAQVFFKQYGWSDGGKTEAKYTSRAADLYKQILAKEVAKSKAEEELDLPPSPPDSTQVPNGLSSIKTSEALKESNTLKQQEKPDVVPVSPRISRSVKKPLGAKKTGKTGGLGARKLTTKSSGTLYDQKPEESVIIQATSPVSAKSARSSFSSRFDYADNVQNREDYMSPQVVSHVAPPKSSGFFEEELEMNGGRFQKKPITSSSKLQIQETDEARKKFTNAKSISSAQYFGNDNNSADLEAKSSLKKFSGSSAISSADLFGDGDGDFPLDLTAGDLLNRLSLQAQQDISSLKNMAEETKKKLGSVASSLWV

SEQ ID NO: 6483 - protein, 493 aa, Arabidopsis thaliana
  Clone ID: ARATH-23APR03-C401_1.p
MESQGPSNGHPMDISSNSIPSSACNLCGRVVQSASDDLEIFSLCVDCKFLLLEDFGTPAPPLARRQTIRRRRMRRRRRTTRHDSSESVGVGDLSSQQFTHLISIARQSLSTVQASEDLRDDLRTSSHTTPSGSTRWRLFSESESDDFDNFGETESNASFSLYRFPHADNDTISFSAYGGESDASTDRHADIFVQPDDRSDIDFDTDIDPMRAGLNQWNSDEEDREWEEGAGPSGVAGTRYRNYLASPSESYSSMTRFDSPELERSFRQRIIERRHSLSRNIFTGLEDLDFSPYAANVGDYLDERGFDELLEQLAESDNSRRGAPPASVSCVRNLPRVIIAEEHVMKGLVCAICKELFSLRNETTQLPCLHLYHAHCIVPWLSARNSCPLCRYELPTDDKDYEEGKRNVLDVSEDSSSSDDGTESGEEEYVERGESESGVSRVSRGRWLFLAAAPVVSLVGVVLAMWLSSPHRRGIAISHSQRENRTRRWLPFF

SEQ ID NO: 6484 - protein, 386 aa, Arabidopsis thaliana
  Clone ID: ARATH-23APR03-C40229_1.p
MEEHLNPLAVTHLLQHTLRSLCIHENSQWVYAVFWRILPRNYPPPKWDGQGAYDRSRGNRRNWILVWEDGFCNFAASAAEMSSGEGSGGGGGSAAYGNSDFQQYQGLQPELFFKMSHEIYNYGEGLIGKVAADHSHKWIYKEPNDQEINFLSAWHNSADSYPRTWEAQFQSGIKTIALISVREGVVQLGAVHKVIEDLSYVVMLRKKLSYIESIPGVLLPHPSSSGYPFINASPSDTWHFPGVAPPHQQPEHQFYHSDHNHRFLIGHHNQPQAVGGAAPPLPLSMKITPSMSSLEALLSKLPSVVPPATQPGYYPFHHSAKEEMSQEEQNDAFRVERNDLVGEGSNNHNHNNNYNSNNDIYNYSNNCSNNNYDRENKIGGFLSEDY

SEQ ID NO: 6485 - protein, 682 aa, Arabidopsis thaliana
  Clone ID: ARATH-23APR03-C40239_1.p
MATASSSESPSEETQTNQEAMQQQDLPKETTTEEEILYKTKSIQFLGRTTPIILQNENGPCPLLAICNVLLLRNNLNLNPDCYEVSQERLMSLVVDRLIDSNSKVNNKDEGYIENQQQNIADAIDLLPRLTTGIDVNIKFRRIDDFEFTPECAIFDLLDIPLYHGWIVDPQDVEAANAIGSKSYNALMGELVALETQNVEAQGDQNPGEDSVDFAAATTAVLGVPSPCLSKTRSFDDSPPAAAELRRMRKGDLEEETELLQALQLSQGQGNDPTPNTNGDSTNQDSAFTFSDASPTSTHITNISQLDQFKTDDDKASENDGNMIKVGKFPTTITTKSEDLNHDQLSSKQSGGETACDVENVSSSKEAIVDVTSSEALSVDKGNLESAKSESSSESVLKSDAASIDPDLSCRSQHDDAPNAFIPPVSTDEPMYEGEECVNTVPPVCADKEPVYEGESLLGKRVEKDVGDCSSEGRATDGLTAEEGELIRNFMKNSASQLTFCGLFRLQEGLKERELCVFFRNNHFCTMFKYEGELYLLATDQGYLNQPDLVWEKLNEVNGDTAFMTATFKDFTIDSSTGGASGTWDERNAVTNTADYLASINNVADAGIDVNSDLQLAIALQQQEFEDQSPRSNPTPQPTSVAASRLVTGPQVPRSSHRPSSAASSRHDGKSPKDKDSKCRIM

SEQ ID NO: 6486 - protein, 374 aa, Arabidopsis thaliana
  Clone ID: ARATH-23APR03-C40257_1.p
MGAAKNIWALANAEDAANDAEQIPYSSFVVDTSLPLPLMIPRIIELCKDLFKNWGELDDSLFSVERVSGGITNLLLKVSVKEDTNKEVSVTVRLYGPNTEYVINREREILAIKYLSAAGFGAKLLGGFGNGMVQSFINARTLEPSDMREQKIAAQIARELGKFHKVDIPGSKEPQLWVDILKFYEKASTLTFEEPDKQKLFETISFEELHTEIIELREFTGLLNAPVVFAHNDLLSGNFMLNDEEEKLYLIDFEYGSYNYRGFDIGNHFNEYAGYDCDYSLYPSKEEQYHFIKHYLQPDKPDEVSIAEVESVFVETDAYKLASHLYWAIWAIIQARMSPIEFEYLGYFFLRYNEYKKQKPLTFSLVTSHLSASM

SEQ ID NO: 6487 - protein, 424 aa, Arabidopsis thaliana
  Clone ID: ARATH-23APR03-C40264_1.p
MRTLLPSHTPATVTTAARRRHVIHCAGKRSDSFSINSSSSDWQSSCAILSSKVNSQEQSESLSSNSNGSSSYHVSAVNGHNNGAGVSDLNLVPFNNNQSIQSKKPLSISDLSPAPMHGSNLRVAYQGVPGAYSEAAAGKAYPNCQAIPCDQFEVAFQAVELWIADRAVLPVENSLGGSIHRNYDLLLRHRLHIVGEVQLPVHHCLMALPGVRKEFLTRVISHPQGLAQCEHTLTKLGLNVAREAVDDTAGAAEFIAANNIRDTAAIASARAAEIYGLEILEDGIQDDASNVTRFVMLAREPIIPRTDRPFKTSIVFAHEKGTCVLFKVLSAFAFRNISLTKIESRPNHNVPIRLVDEANVGTAKHFEYMFYIDFEASMAESRAQNALSEVQEFTSFLRVLGSYPMDMTSWSPSSSSSSSSTFSL

SEQ ID NO: 6488 - protein, 263 aa, Arabidopsis thaliana
  Clone ID: ARATH-23APR03-C40434_1.p
MISMEEKNTYGKRKTVPLIPANYISILQLQERWLNEKEKKRKEEEERRRKLQAEEEKKIEEEDLKKAEEEKRMNRSNRKHFGRKKESIDGGEARFVEKEKPEVTVAIESGGGEDAADGLPKKKKKKKKKNKGAWRKRYNSKTNKNQDGAVVEDVIDCGCVSSIVPPESVVTENNTPVKDVVPVYWMKATKSKEITKSMAIETQFENFSINRGEAKTLKTQTKWRYRNRPMPRGASSSTMVWVKKEQNERAGDGIASGVKPFNA

SEQ ID NO: 6489 - protein, 288 aa, Arabidopsis thaliana
  Clone ID: ARATH-23APR03-C40495_1.p
MEVPIINRIGDFDMGINSINDPSYLSRALAVSGVGKLHQAYSFWKWGALLLLAFFASFTSLTTRIKTLVFRLRNVNVSLPSQTLLCNYDSDSDWSFSSDSSDEEKDEDDNKEDDSVNGDSRVQRFGYYHDDDDKGISGSVPWLRRCSGSFGDLLDLGSSGVVKLWDNLDFNGEGSPVASFFSKCGSYSLLSSAVLLAAEKKGSDGLEVSAWDARVGFGVPALLAEWKQPGRLLGKIIRVDVGDVDKIYVGDDVEGEITVGDMRMVNGALTELTESEVERMVRRRRRRH

SEQ ID NO: 6490 - protein, 190 aa, Arabidopsis thaliana
  Clone ID: ARATH-23APR03-C40511_1.p
MFGVVFPNRSFPIDISTFTQIDTFHWVLDMNHFVGEAYDQISEMCIFLLNNFNLPPDKALAVYVQSPGSAFVFCGAVTLARPSAVLSLQWPEPGSAAKMQLTAGDSSSLSAKIGVSVEDVATLRSLDVVAERRIEKLAMKVGENLFNFMQSFCGVDGSKLVVPMDILDRWFKKFQEKAKRDPDFLKSFAL

SEQ ID NO: 6491 - protein, 400 aa, Arabidopsis thaliana
  Clone ID: ARATH-23APR03-C40551_1.p
MADPETLAALKRAYADTILNTTKEAAARVMVSEKKARRYQQELVTVRNEALHTLVRLKQMLDSKVKETEMQSLKQQQKVEELEAQLGEAEDIVGELRLELRVLHDELKKLTDGQKHLEKNHEENLCWNNRDAAVSVMPEVSCSHENTEAVGFCIPVEQNGSVVANGIKVPSLTRINSINRCSYKDNKDQCHYTLPSILTKRRETEGLAQMIHTVDSSMANGVLSSSVEVGDVNDGVCLHEVSSCKIVESLEMSGCADATDSISSVKDGEAPIVSPNSSQKDVGTLISLKTSPPREHENDRKLEISETEARKEEKESCENMEVSASPLCEETPVLALSKNRCIKYTFKRKRKKEVLSNLEGDSSFEESRNMKQKTVEKDDGYLESLKPSFTSESSRDVVYA

SEQ ID NO: 6492 - protein, 291 aa, Arabidopsis thaliana
  Clone ID: ARATH-23APR03-C40601_1.p
MASKSKQHLRYQPRKSVSRSTQAFTVLILLLVVILILLGLGILSLPNANRNSSKTNDLTNIVRKSETSSGDEEGNGERWVEVISWEPRAVVYHNFLTNEECEHLISLAKPSMVKSTVVDEKTGGSKDSRVRTSSGTFLRRGHDEVVEVIEKRISDFTFIPVENGEGLQVLHYQVGQKYEPHYDYFLDEFNTKNGGQRIATVLMYLSDVDDGGETVFPAARGNISAVPWWNELSKCGKEGLSVLPKKRDALLFWNMRPDASLDPSSLHGGCPVVKGNKWSSTKWFHVHEFKV

SEQ ID NO: 6493 - protein, 204 aa, Arabidopsis thaliana
  Clone ID: ARATH-23APR03-C4064_1.p
MGSVQLSGSGLVASLPPNHSFSHKTKLNKPNSYFFRSKHNAARTKTVRAISTAPASQPPAADEPDEPPAVDFAFVHSVLLPDGTPDVHWRRANGGQKLRDIMLDSNIELYGPYSKPLSNCAGVGTCATCMVEIVNGKELLNPRTDIEKEKLKRKPKNWRLACQTNVGNPDSTGLVVIQQLPEWKAHEWNIPKNIPNDDDLETST

SEQ ID NO: 6494 - protein, 369 aa, Arabidopsis thaliana
  unsure (1)..(369): unsure at all Xaa locations
  Clone ID: ARATH-23APR03-C4067_1.p
MTENSEKNDRLNDLTIFISTKTGVKGLVDAEITEVPRMFHVPSSILSNNRPSDISGLNLTVPIIDLGDRNTSSRNLVVSKIKDAAENWGFFQVINHGVPLTVLEEIKESVRRFHEQEPEVKNQYLPTDNNKKFVYNNDFDLYHSSPMNWRDSFTCYIAPDPPNPEEIPLACRSAVIEYTKHVMELGAVLFQLLSEALGLDSETLKRIDCLKGLFMLCHYYPPCPQPDLTLGISKHTDNSFLTLLLQDQIGGLQVLHEDYWVDVPPIPGALXVVNIGDFMQLXITNDKLLELGXGYDPNKDRPQQIEXRFLVACCFCSSLSPNSTVXGPIKDLLSDENPAKYKDITIPEYTAGFLASIFDEKSYLTNYMI

SEQ ID NO: 6495 - protein, 196 aa, Arabidopsis thaliana
  Clone ID: ARATH-23APR03-C40681_1.p
MGLIAGKVRVFVLVFALVTDFTMGEAEFGDEKPLFPHPHPHPLLHKKGFKKEFGDLGGGGGISGGGGFGAGGGWIGGSVGGFGGGFGGGGFGGGAGKGVDGGFGKGVDGGAGKGVDGGAGKGFDGGVGKGVDGGAGKGFDGGVGKGFEGGIGKGIEGGVGKGFDGGAGKGVDGGAIGGIGGGAGKEIGGGIGGGGH

SEQ ID NO: 6496 - protein, 152 aa, Arabidopsis thaliana
  Clone ID: ARATH-23APR03-C40731_1.p
MNTPMSLSAARGRMLPFLEKEKSEEESETLESSLLQLIDDNRRSSLQLREKTERSRKEAIRHAARTADLLVKAVNGGVEECFVNEKRIESEIRNLAITVAKFGKQTDQWLAVTHAVNSAVKEIGDFENWMKTMEFDCKKITAAIRNIHEDQQ

SEQ ID NO: 6497 - protein, 230 aa, Arabidopsis thaliana
  unsure (1)..(230): unsure at all Xaa locations
  Clone ID: ARATH-23APR03-C4081_12.p
MQIFVKTLTGKTITLEVESSDTIDNVKAKIQDKEGIPPDQQRLIFAGKQLEDGRTLADYNIQKESTLHLVLRLRGGMQIFVKTLTGKTITLEVESSDTIDNVKAKIQDKEGIPPDQQRLIFAGKQLEDGRTLADYNIQKESTLHLVXLRLRGGMQIFVKTLTGKTITLEVESSDTIDNVKAKIQDKEGIPPDQQRLIFAGKQLEDGRTLADYNIQKESTLHLVLRLRGGF

SEQ ID NO: 6498 - protein, 305 aa, Arabidopsis thaliana
  unsure (1)..(305): unsure at all Xaa locations
  Clone ID: ARATH-23APR03-C4081_13.p
MQXFVKXXTGKTITLEVESSDXIDNVKXKIQDKEGIPPDQQRLIFAGKQLEDGRTLADYNIQKESTLHLVLRLRGGMQIFVKTLTGKTITLEVESSDTIDNVKAKIQDKEGIPPDQQRLIFAGKQLEDGRTLADYNIQKESTLHLVLRLRGGMQIFVKTLTGKTITLEVESSDTIDNVKAKIQDKEGIPPDQQRLIFAGKQLEDGRTLADYNIQKESTLHLVLRLRGGMQIFVKTLTGKTITLEVESSDTIDNVKAKIQDKEGIPPDQQRLIFAGKQLEDGRTLADYNIQKESTLHLVLRLRGGF

SEQ ID NO: 6499 - protein, 357 aa, Arabidopsis thaliana
  unsure (1)..(357): unsure at all Xaa locations
  Clone ID: ARATH-23APR03-C4081_7.p
MQIFVKTLTGKTITLEVESSDTIDNVKAKIQDKEGIPPDQQRLIFAGKQLEDGRTLADYNIQKESTLHLVLRLRGGMQIFVKTLTGKTITLEVESSDTIDNVKAKIQDKEGIPPDQQRLIFAGKQLEDGRTLADYNIQKESTLHLVLRLRGGMQIFVKTLXGXTITLEVESSDTIDNVKAKIQDKEGIPPDQQRLIFAGKQLEDGRTLADYNIQKESTLHLVLRLRGGMQIFVKTLTGKTITLEVESSDTIDNVKAKIQDKEGIPPDQQRLIFXGKQLEDGRTLADYNIQKESTLHLVLRLRGGMQIFVKTLTGKTTTLEVESSDTIDNVKAKIQEQRGYSSRTSKRLNLSAWKGQA

SEQ ID NO: 6500 - protein, 500 aa, Arabidopsis thaliana
  Clone ID: ARATH-23APR03-C4095_1.p
MILQKTMQSPFLHLCKSFTSSSPLSCHNHNICFGFHNALLSPSICNFQRRNNVNGRKIVAQGSRLNDGNSRPAGNKGKVSLKGNKENIWSVDNEMAEKDKRKVKPKGRKSGKRLGGGRKGKFGRVLVSGTMLIESETVLQTQEPVIKPVWRTFASSVSGIWKGVGAVFSPITGEMEPIEIGKKNESLYDCYTLSKIEALPSPSSGANTESEIQRKINWVTLNPHGECSESKDEVFVDQSGVDSRLPKFESFNLKASDVMEEDSMVDAPGLVYFEDGSYSRGPVTIPVGEMSESNYYLTPTFKFEQCLVKGCHKRLRVVHTIEFANGGADIQIMRVGVYEELWVSPSNYEEQSDNDAPLELKPFSQRKRTQPSELTGSWKVFEVNATPLYGEEAEFEQPGESTPVVYLCTEALKRRNLPETLVSFGEEEMIDMQDVSVMWLPGGVSAYVDVKKDGVLCIGVGWYSDEGINLVMERDYGLDGNLKEVRSKSEMKRRWTEEPK

SEQ ID NO: 6501 - protein, 211 aa, Arabidopsis thaliana
  Clone ID: ARATH-23APR03-C40972_1.p
MERSRGERHESAPNSLFIRFLQDIPTFRAMAAANKQQVDVSDDLNYEIWARIAKTTLTEKGLWDVVENGVPPDPSKVPELAAKIQPEDMKALQNLQSSLTDSAFRKTLYASSAKDVWDLLEKGNNEQAKLRRLEKQFEELSMDEAEQTNSYLDKVREIAEQLRRLKNGKSDYEVVTKVLGSLSESHEDLATLLEEQVDLKKVSLKSLAEFF

SEQ ID NO: 6502 - protein, 156 aa, Arabidopsis thaliana
  Clone ID: ARATH-23APR03-C40988_1.p
MDSASSNTKAIDPPLHMLGFEFDELSPTRITGRLPVSPVCCQPFKVLHGGVSALIAESLASMGAHMASGFKRVAGIQLSINHLKSADLGDLVFAEATPVSTGKTIQVWEVKLWKTTQKDKANKILISSSRVTLICNLPIPDNAKDAANMLKMVAKL

SEQ ID NO: 6503 - protein, 223 aa, Arabidopsis thaliana
  Clone ID: ARATH-23APR03-C40_1.p
MDTTLSPAVEAEQIADSTIDTVSRLIAGVFSGALTGIFAMAGAFTGAVTGAVAGRAAQYGVLRGAALGAVAGAILSVEVLEASRAYWYLELSGSRGPSSMADFVEQLFRGRLVDEQLMSTMINSHHWQLRISDVSYEEREDVYGELEARGLSGDSLRKLPCYIMSSEMVRRQVTHCTICLQDIKTGEITRSLPKCDHTFHLVCVDKWLIRHGSCPICRQAVKD

SEQ ID NO: 6504 - protein, 116 aa, Arabidopsis thaliana
  Clone ID: ARATH-23APR03-C41041_1.p
MNVLKCLAIISVLGIFFIPRYSESAISCSVVLQDLQPCVSYLTSGSGNPPETCCDGVKSLAAATTTSADKKAACQCIKSVANSVTVKPELAQALASNCGASLPVDASPTVDCTTVG

SEQ ID NO: 6505 - protein, 332 aa, Arabidopsis thaliana
  Clone ID: ARATH-23APR03-C41056_1.p
MAERKKRSSIQTNKPNKKPMKKKPFQLNHLPGLSEDLKTMRKLRFVVNDPYATDYSSSEEEERSQRRKRYVCEIDLPFAQAATQAESESSYCQESNNNGVSKTKISACSKKVLRSKASPVVGRSSTTVSKPVGVRQRKWGKWAAEIRHPITKVRTWLGTYETLEQAADAYATKKLEFDALAAATSAASSVLSNESGSMISASGSSIDLDKKLVDSTLDQQAGESKKASFDFDFADLQIPEMGCFIDDSFIPNACELDFLLTEENNNQMLDDYCGIDDLDIIGLECDGPSELPDYDFSDVEIDLGLIGTTIDKYAFVDHIATTTPTPLNIACP

SEQ ID NO: 6506 - protein, 319 aa, Arabidopsis thaliana
  Clone ID: ARATH-23APR03-C41096_1.p
MASAWKKDKNQKLLSPKTLISLLVLSIIFLSSLFFFFSNSSLQYSNPNLSINSPYPIPPFDCFKCPQSKPIIANVVENLKYPFVYSLADLGNLPEKPHKNIVRLLKGKPFRKPDISATIQEVLDSMRASGKNGIVVDVGANVGMASFAAAVMGFKVLAFEPVFENLQRICDGIWFNRVSSLVTVFEAAASDRTGDITFHKLVGRLDNSAVSEVGARLAFKSNKEIAVQVKSIPLDKLIPPSQPVLLIKIDVQGWEYHVLKGAKKLLSRKPAEAPYLIYEEDERLLTASNSSSKEIRDFLKSVGYSKCSQHGTDAHCTKE

SEQ ID NO: 6507 - protein, 330 aa, Arabidopsis thaliana
  Clone ID: ARATH-23APR03-C412_1.p
MVFSSIQAYLDSSNWQQAPPSNYNHDGTGASANGGHVLRPQLQPQQQPQQQPHPNGSGGGGGGGGGSIRAGSMVDRARQANVALPEAALKCPRCESTNTKFCYFNNYSLTQPRHFCKTCRRYWTRGGALRNVPVGGGCRRNRRTKSNSNNNNNSTATSNNTSFSSGNASTISTILSSHYGGNQESILSQILSPARLMNPTYNHLGDLTSNTKTDNNMSLLNYGGLSQDLRSIHMGASGGSLMSCVDEWRSASYHQQSSMGGGNLEDSSNPNPSANGFYSFESPRITSASISSALASQFSSVKVEDNPYKWVNVNGNCSSWNDLSAFGSSR

SEQ ID NO: 6508 - protein, 344 aa, Arabidopsis thaliana
  Clone ID: ARATH-23APR03-C413_1.p
ISPFHDKVTNASFTCIYTSFHSLFSTQIKSSSFSVFLSFLKILSMATPNEVSALWFIEKHLLDEASPVATDPWMKHESSSATESSSDSSSIIFGSSSSSFAPIDFSESVCKPEIIDLDTPRSMEFLSIPFEFDSEVSVSDFDFKPSNQNQNQFEPELKSQIRKPPLKISLPAKTEWIQFAAENTKPEVTKPVSEEEKKHYRGVRQRPWGKFAAEIRDPNKRGSRVWLGTFDTAIEAARAYDEAAFRLRGSKAILNFPLEVGKWKPRADEGEKKRKRDDDEKVTVVEKVLKTEQSVDVNGGETFPFVTSNLTELCDWDLTGFLNFPLLSPLSPHPPFGYSQLTVV

SEQ ID NO: 6509 - protein, 295 aa, Arabidopsis thaliana
  Clone ID: ARATH-23APR03-C41545_1.p
MARQINIESSVSQVTFISSAIPAVSSSSSITASASLSSSPTTSSSSSSSTNSNFIEEDNSKRKASRRSLSSLVSVEDDDDQNGGGGKRRKTNGGDKHPTYRGVRMRSWGKWVSEIREPRKKSRIWLGTYPTAEMAARAHDVAALAIKGTTAYLNFPKLAGELPRPVTNSPKDIQAAASLAAVNWQDSVNDVSNSEVAEIVEAEPSRTVVAQLFSSDTSTTTTTQSQEYSEASCASTSACTDKDSEEEKLFDLPDLFTDENEMMIRNDAFCYYSSTWQLCGADAGFRLEEPFFLSE

SEQ ID NO: 6510 - protein, 732 aa, Arabidopsis thaliana
  unsure (1)..(732): unsure at all Xaa locations
  Clone ID: ARATH-23APR03-C41697_1.p
MGSGFSSLLPCFNQGHRNRRRHSSAANPSHSDLIDSFREPLDETLGHSYCYVPSSSNRFISPFPSDRFVSPTASFRLSPPHEPGRIRGSGSSEQLHTGFRAISGASVSANTSNSKTVLQLEDIYDDATESSFGGGVRRSVVNANGFEGTSSFSALPLQPGPDRSGLFMSGPIERGATSGPLDPPAGEISRSNSAGVHFSAPLGGVYSKKRRKKKKKSLSWHPIFGGEKKQRPWVLPVSNFVVGAKKENIVRPDVEAMAASSGENDLQWALGKAGEDRVQLAVFEKQGWLFAGIYDGFNGPDAPEFLMANLYRAVHSELQGXLFWELEEEDDNPTDISTRELEQQGEFEDHVNEMASSSCPATEKEEEEMGKRLTSSLEVVEVKERKRLWELLAEAQAEDALDLSGSDRFAFSVDDAIGAGNAVSVGSKRWLLLSKLKQGLSKQGISGRKLFPWKSGVEENETEEVDNVGVEEGVDKRRKRRKAGTVDHELVLKAMSNGLEATEQAFLEMTDKVLETNPELALMGSCLLVALMRDDDVYIMNIGDSRALVAQYQVEETGESVEGAATREERRNDLDRDDGNKEPLVVDSSDSTVNNEAPLPQTKLVALQLTTDHSTSIEDEVTRIKNEHPDDNHCIVNDRVKGRLKVTRAFGAGFLKQPKLNDALLEMFRNEYIGTDQYISCTPSLRHYRLTENDQSSDISSNKVYQYLSNVEVALQLTTDHSTSIEDVSLTL

SEQ ID NO: 6511 - protein, 188 aa, Arabidopsis thaliana
  Clone ID: ARATH-23APR03-C4179_1.p
TTSLPLPAIFTSYASPLVTLMVWEALGNADGMGSIRDQELHRACAVLKVPLQQLKILDHPNLQDGFGQLWSHDLLTEIIEEEVTNHYIHTIITFDNYGVWGHCNHRDVHRGVLKFLQTNSGRNVKAWELVSLNIFRKYCGPDDIWLFILSFVKNTLQLYLILDNAKQTEAQQQSTKANTQNIGCEMKA

SEQ ID NO: 6512 - protein, 232 aa, Arabidopsis thaliana
  Clone ID: ARATH-23APR03-C4180_1.p
MLGLSYGELLLIVGATAALVGPKDLPIIARAGGRLFGRAIGYINMARGHLDGVMKQPQMQEISKEVQDLRAQVDAISHGARFSLFDSSPLTRRVDNQKTQEPSPSTTNGIVTSVNVEEKQKPVDHYTKAQEFSGSSSASVNLHAQATSFARLSETVNGKTHSLNSDSPVLPVSAEMAKLLPQRKESARGSDLMLEAVLEAEVAHKAKSFFAQAEKETPALKGKFFSDRKGEN

SEQ ID NO: 6513 - protein, 233 aa, Arabidopsis thaliana
  Clone ID: ARATH-23APR03-C41836_1.p
MRMSCNGCRVLRKGCSENCSIRPCLQWIKSAESQANATVFLAKFYGRAGLMNLLNTGPDHLRPAIFRSLLYEACGRIVNPIYGSVGLLWSGNWHLCQAAVEAVMRGSPVTPIACDAAVTGQAPPFNNKLCDIRHVSSRDENVKRRSRGACKEERNVRSLSHESSLSHESPVSSEETTTEEPKTWIGLELTLGLEPLARGNHVVVPMKKRKLERCGTSEDEDTCKIELGLVCSE

SEQ ID NO: 6514 - protein, 272 aa, Arabidopsis thaliana
  Clone ID: ARATH-23APR03-C4187_1.p
MQVISPSSPAPRFAGKERFSEVYGELNDDFGSKLKISSKEEENRDDDSWWNQNGTDKDDEGREEDFSFASVNADNSPITADEAFEDGQIRPVYPLFNRNIFFDDPEEKTLRSPLKKLFVESTTTEEEEEESDTVGPYCSWTNRTVEQASPETCRKSNSTGFSKLWRFRDLVLRSNSDGKDAFVFLSNGSSSTSSTSSTAARLSGVVKSSEKGKEKTKTDKKKDKMRTKSAHEKLYMRNRAMREEGKRRSYLPYKHVGFFTNVNGLTRNVHPY

SEQ ID NO: 6515 - protein, 178 aa, Arabidopsis thaliana
  Clone ID: ARATH-23APR03-C41930_1.p
MEKSGGRIVMDEIRSFEKAHLFDLGHPLLNRIADSFVKAAGVGALQAVSREAYFTVVDGAGFDSNNVGPPSEITGNKKHRFPNLRGESSKSLDALVKNTGKESLQWGLAAGLYSGITYGMTEVRGGAHDWRNSAVAGALTGAAMAMTTSERTSHEQVVQSALTGAAISTAANLLSSVF

SEQ ID NO: 6516 - protein, 315 aa, Arabidopsis thaliana
  Clone ID: ARATH-23APR03-C4212_1.p
MIGSFLTRGLVMVFGYAYPAYECYKAVEKNKPEMQQLRFWCQYWILVAALTIFERVGDALASWVPLYCEAKLAFFIYLWFPKTRGTTYVYDSFFQPYVAKHENEIDRSLIELRTKAGDLAVIYCRKAVSYGQTRIVEILHFVALQSTPKPKPKEKKQAAAPEEEEQKQPDLKATSQAASSNPQVRLQSKKPQLVTKEPISPKPLSSPRKQQQLQTETKEAKASVSQTKLTTLTPPGPPPPPPPPPPSPTTAAKRNADPAQPSPTEAEEASQTVAALPEPASEIQRASSSKETIMEETLRITRGSLRKARSAGAPR

SEQ ID NO: 6517 - protein, 274 aa, Arabidopsis thaliana
  Clone ID: ARATH-23APR03-C4217_1.p
MAYHSIPSSGFHYLNSPFGDTTFTKVFVGGLAWETQSETLRRHFDQYGDILEAVVITDKNTGRSKGYGFVTFRDPEAARRACVDPTPIIDGRRANCNLASLGRSRPPMQYAVIPHAPGRVRPHSPYVGSVQSPRGLHFGSHPYHQPPTYNYQQGVVYPYGVTPYGPDYMYSQSQGFYGPYMGQQYLQVYGVPGAVNSPGYQYGQLSHTIPGAHGYTAGQGYSHPGSHVLQLGATSPMSAIQSPYPSPSAPTHQRVIVQTPPQYIQSSGSDQTTG

SEQ ID NO: 6518 - protein, 210 aa, Arabidopsis thaliana
  Clone ID: ARATH-23APR03-C42217_1.p
MASSSALALRRLLSSSTVAVPRALRAVRPVAASSRLFNTNAARNYEDGVDRNHHSNRHVSRHGGDFFSHILDPFTPTRSLSQMLNFMDQVSEIPLVSATRGMGASGVRRGWNVKEKDDALHLRIDMPGLSREDVKLALEQNTLVIRGEGETEEGEDVSGDGRRFTSRIELPEKVYKTDEIKAEMKNGVLKVVIPKIKEDERNNIRHINVD

SEQ ID NO: 6519 - protein, 225 aa, Arabidopsis thaliana
  Clone ID: ARATH-23APR03-C42221_1.p
MIRAVLLFLVFVVETRVQAQLVPPVRQDGFVYPPGHRFDPDTILIEAYFDPVCPDSRDSWPPLKQALHHYGSRVALLLHLLPLPYHDNAYVTSRALHIVNTVHANATFSLLEGFFKHQSLFYNAQTQLLSRPAVVEKIVELGTVSLGNSYQSVLKSGFSDKKSDRATRVSFKYSASRGVYGTPTFYVNGFVLSDAASPSNFGGWKKIIDPLVQAHEMEDNFIPFL

SEQ ID NO: 6520 - protein, 624 aa, Arabidopsis thaliana
  Clone ID: ARATH-23APR03-C4226_1.p
MGTVVGTVEDRRDMFEGNAQTRITPFSSTNQIGNPVAYKLVRVSGDGSLVPATDEEILEVNDTDMHIPSDTCQTIGYLATDEENVEVDETDMHIASDACQTIGYLPAEGIPSRLSQIESSEAINSGLLHSDNVQPYTDQYNEEMLQKVEQEERLENVHGSQMPSTPADANIQCSNENNFFEEDQVHHEALLQDECKMNESDMMERCSNAVASPKETALSAAAQKPDFSRVRGEICLDNLPIKALQETFRATFGRDTTVKDKTWLKRRIAMGLINSCDVPTTNLRVKDNKLIGNQEKSNDVTNAIRKEMGDDVRATKMKDAPSSTDHVNGHSNGGNHYYASEDYSSEQRAAKRVRKPTRRYIEELSETDDKQQNDKSVIPSKDQRLSEKSEVRSISVSSGKRVTVTRMVSLAGSEIEVPYVSHVRRSRPRENIMALLGCHSSYLEDKASAAESNLNLSPSQLSSEVVNRDSVEKSASRPVQNEFATSDENNVEHILSEVDQEMEPEHIDSSGNSSDENNIGVPIMQGGALRRKHHRAWTLSEIAKLVEGVSKYGAGKWSEIKKHLFSSHSYRTSVDLKDKWRNLLKTSFAQSPSNSVGSLKKHGSMHIPTQILLRVRELAEKQSQ

SEQ ID NO: 6521 - protein, 212 aa, Arabidopsis thaliana
  Clone ID: ARATH-23APR03-C42347_1.p
MLLQCVVLCSSLAVVVISVASTSPLVGVHPLDEKYFDSDVIKCKDGSKSFTRDRLNDNFCDCLDGTDEPGTSACPNGKFYCRNIGSSPKFVYSSRVNDRICDCCDGSDEYESSIHCPNTCIMGGNVNYIYKPRANLKSIHLQLGSTPHPKEFYTIGNLQDMVKNLQGMKLVFALQMVFIGFLVILWMLRSRARSKRRRYLLKNVPPINRSAN

SEQ ID NO: 6522 - protein, 160 aa, Arabidopsis thaliana
  Clone ID: ARATH-23APR03-C4249_1.p
MNKLLEYGRKAMFYVRVLSGYEERRIRSYRLQLEKRIQQANQRKVEINRLPEQIVLSEVRRMVEEMQNLNKQIENTEAQIEDYFKPIDKHASTIMEIQLEGEKKTMGTMMNATQQEAIRKIEEAEKLARARGNANVTTDANMGDKIQDSESSANEKSQAK

SEQ ID NO: 6523 - protein, 175 aa, Arabidopsis thaliana
  Clone ID: ARATH-23APR03-C42543_1.p
MENLPPGYRPNVGVCLINSDNLVFVASRLNVPGAWQMPQGGIEDGEDPKSAAMRELQEETGVVSAEIVSEVPNWLTYDFPPAVKAKVNRLWGGEWHGQAQKWYLVRLRNDEDEKEINLANNEADSEFAEWKWAKPEEVVEQAVDYKRPTYEEVIKTFGSFLNDTGRAAKCKSAKW

SEQ ID NO: 6524 - protein, 316 aa, Arabidopsis thaliana
  Clone ID: ARATH-23APR03-C4276_1.p
MGFLRCLQLLLLLFLSLRLQKLSAQSSSPNASSSSSLDALLQDYSFRALLRPRTGILYEATTVPSNLTGIKLAAMRLRSGSFRKRGVTPFNEFSIPSGVIVKPYVTRLVLVYQNLANFSHLYYPLSGYDYVAPVLGLLAYDAKNLSALNLPQLDLRVSNDPIRIDFSDLERIPQGSSAKCVRFDSKGEASFSDSIQPGNTCETEHQGHFSVVVKSVASAPSLAPPGIESKKKKKSSDSNSKTWIIVGSVVGGLILLGLLLFLVLRCRNYKKQEKMREMERAGETGEALRMTQVGETRAPTATTTRTQPMLETEYAA

SEQ ID NO: 6525 - protein, 508 aa, Arabidopsis thaliana
  Clone ID: ARATH-23APR03-C4278_1.p
MSSLYKLKFREDKTHFVLCRKRLTSSDIARFRDIIAQDYYFQMYYDDLPLWGFVGKVEGDYFGQGEKHTKYYIFSHLKFNVLYNADKVIEINSFSDPSYMVDISENTEIDVQFTYSVGWNLTSERSETRMNKYSRASFHPISQKIHFFSFLNSITVVVLLIGLISFLFMRHLKNELRSYSIGDEEERKEAGWKLVHSDVFRCPRNISWLCAILGTGTQLLILIIALFALAFTGFLYPYNRGMLLTSLVIMYTLTSIVAGYTSTSFHSQFEGNKQKRSVRLAGILYPVPFFIILSVLNTVAITYGATAALPFGTIVIIILIFTLLNIPFLMLGGVLGNRFGLLEFQPPSAVKRNPREIPPQNWYRRKLYQVFLGGFVPFSAVVLEWHQLYASLWGFKIYTSPGIMLFTFIVLIFLSSSVGIILTYIQLSGEDHEWWWRSILCGGFTAVFMYGYGVLFYLRSDMTGFLQLSFYLGYTALLCYALFLVLGTISFLASLMFIRHIYRSVKLE

SEQ ID NO: 6526 - protein, 386 aa, Arabidopsis thaliana
  Clone ID: ARATH-23APR03-C4298_1.p
MASSSCLNLFFFSFLSALIISKSQISDSVNGVVFPVVKDLPTGQYLAQIRLGDSPDPVKLVVDLAGSILWFDCSSRHVSSSRNLISGSSSGCLKAKVGNERVSSSSSSRKDQNADCELLVKNDAFGITARGELFSDVMSVGSVTSPGTVDLLFACTPPWLLRGLASGAQGVMGLGRAQISLPSQLAAETNERRRLTVYLSPLNGVVSTSSVEEVFGVAASRSLVYTPLLTGSSGNYVINVKSIRVNGEKLSVEGPLAVELSTVVPYTILESSIYKVFAEAYAKAAGEATSVPPVAPFGLCFTSDVDFPAVDLALQSEMVRWRIHGKNLMVDVGGGVRCSGIVDGGSSRVNPIVMGGLQLEGFILDFDLGNSMMGFGQRTRSDSTSL

SEQ ID NO: 6527 - protein, 434 aa, Arabidopsis thaliana
  unsure (1)..(434): unsure at all Xaa locations
  Clone ID: ARATH-23APR03-C4306_1.p
MKKGAKRKGVSKAGRKAAVAETQNDEVIEETTKTTQEESQQHEEEVVDEVKENGEEEEAKGDQEEEEDAKPDSLEEDEENQEDEVKAEEVKEEVEKKPVARRGGKRKRATKKDTEIKDEKKPVPKAKKPRAAKVKEEPVYFEEKRSLEDLWKVAFPVGTEWDQLDALYEFNWDFQNLEEALEEGGKLYGKKXYVFGCTEPQLVPYKGANKIVHVPAVVVIESPFPPSDKIGITSVQREVEEIIPMKKMKMDWLPYIPIEKRDRQVDKMNSQIFTLGCTQRRSALRHMKEDQLKKFEYCLPYFYQPFKEDELEQSTEVQIMFPSEPPVVCEFDWEFDELQEFVDKLVEEEALPAEQADEFKEYVKEQVRAAKKANREAKDARKKAIEEMSEDTKQAFQKMKFYKFYPQPSPDTPDVSGVQSPFINRYYGKAHEVL

SEQ ID NO: 6528 - protein, 687 aa, Arabidopsis thaliana
  Clone ID: ARATH-23APR03-C4307_1.p
MSSYVGVLVSDPWLQSQFTQVELRTLKSKFVSNKTQLGRFTVGDLPPVFEKLKAFNGTIDEDEIKSVLDKSYPNADDEVDFEFFLRAFLSVQARGVEKSGGSKGASSFLKTSTTTVHHAINESEKASYVSHVNNYLRDDPFLKSYLPIDPATNAFFDLVKDGVLLCKLINVAVPGTIDERAINTKKTLNPWERNENLTLGLNSAKAIGCTVVNIGTQDIAEGRPYLVLGLISQIIKIQMLADLNFKKTPSLFQLVDDTQDAEELMGLAPEKVLLKWMNFHLKKAGYEKQVTNFSSDLKDGEAYAYLLNALAPEHSTHVALETKDPTERAKKVLEQAEKLDCKRYLSPKDIVDGSANLNLAFVAQIFQHRNGLTVDDSKTSFAEMMTDDVETSREERCFRLWINSLGTATYVNNVFEDLRNGWVLLEVLDKVSPGSVNWKHANKPPIKMPFKKVENCNEVIKIGKELRFSLVNVAGNDIVQGNKKLLLAFLWQLMRYTMLQLLRNLRSHSQGKEITDADILNWANRKVKRGGRTSQADSFRDKNLSSGMFFLELLSAVEPRVVNWSLVTNGETEEDKKLNATYIISVARKLGCSIFLLPEDIIEVNQKMMLILAASIMYWSLQQQSDTESTVSEDATDDGDANSVAGEISNLSIDGASESSPTVQDQELLTKADNDEDEVDGENNKDA

SEQ ID NO: 6529 - protein, 197 aa, Arabidopsis thaliana
  Clone ID: ARATH-23APR03-C4310_1.p
MSWSLCSTHGVSSSIALTYGFRHRRRSTFRIFATSDGLEPKDDPPESPLPSSSSALGKDLKKVVNKTAATFAPRASTASKNPALPGTTLYKVFEVQGYASMFLGGVLSFNLLFPSSEPDLWRLMGMWSIWMFTIPSLRARDCPSKEKEALNYLFLIVPLLNVAIPFFWKSFALVWSADTVAFFAMYAWKLGWLERTE

SEQ ID NO: 6530 - protein, 289 aa, Arabidopsis thaliana
  Clone ID: ARATH-23APR03-C4315_1.p
MANRYDPNPFAEEEEVNPFANARGVPPASNSRLSPLPPEPVGFDYGRTVDIPLDRAGTQDLKKKEKELQAKEAELKRREQDLKRKEDAAARAGIVIEVKNWPPFFPLIHHDIANEIPVHLQRLQYVTFATYLGLVLCLFWNIIAVTTAWIKGEGVTIWLLALIYFIAGVPGGYVLWYRPLYRAFRTDSALSFGWFFLFYMLHIAFCVFAAVAPPVVFKGKSLAGILPAIDVLSGQAIVGIFYFIGFAFFCLESVVSIWVIQQVYMYFRGSGKQDQMRREAARGALRAAV

SEQ ID NO: 6531 - protein, 330 aa, Arabidopsis thaliana
  Clone ID: ARATH-23APR03-C4319_1.p
MAAISPVQCLFSCNSHHHHQQREQSGSLWRLGSRVLVSSSLWKLSLFSGLHLNRRRTLICAVKGDPEDAFKKTVEIDRMIDALRDANPRQVEKIVVENILAFDEVFWIRLAARSDTCKSEDDKKDYEELATTVMTIVDCVVNKTREKIETSTDILKGILRPAIDGVEEISWPPRDPEAINLMKKEIIQREKEGQLDEGFLSEVNAQLRQAKEDKDKPGLLAMLQKVLQLYSATILSKRSYAKKGNEVVKAEHFLETLIKAPEEQWNKLFVDGLTIGKGDITPDELSAVIKKRIERTLIRTEGGSYQQRILTEYLKGIESRANEIMKLLQG

SEQ ID NO: 6532 - protein, 417 aa, Arabidopsis thaliana
  Clone ID: ARATH-23APR03-C4328_1.p
MAENLFSGLPPPSSSQQQELPISPIPDESKIETSSPAPILVLKSALKRSKPEESAPNLSAPPVLKSALKRSKPSESTPEPVPEPEAPKKRLQFKTSTDASEEQVIEAMQKITSHIKNPSKFSKASKLAIRLIQAGSVKPETSSYFIAILEAAMSSKTPCTDRSVRADYHALFSAAQDVAECLDKSQKNLLTIWTFKAVVANDLFTDDSFMFSKTATRIKEAISDLPVSTEEDDVEEAAALEEAAVKDNGDGQTTQDVAEAASAGDNEAVESDPFGLDAWIPSSGKKNGKTKIKRTNEDPDAEENKRFLRSKREALITCLEIAARRYKVPWCQTVIDILVKHAFENVSRFTSQQRQAVEKLWASVREQHLRRKQGKSVTGKLDVTAFESLQDKYANEKMSIRSSVGASGERRAQQWLG

SEQ ID NO: 6533 - protein, 296 aa, Arabidopsis thaliana
  Clone ID: ARATH-23APR03-C43364_1.p
MMVVNSFDLWQKDVFFSAAEEVQKSTDIMESAYRLWIREKKDEICKELQAALGTAKWQLEEFEKAVRLSHKRCGDDDSSSTRHKQFVTAIENQIHRVETSLQEAYSENGKKPLRWVDLNEEERDDLAMFLSGSSRTSQSFSGESSIKSRESTNSSLVENVMEVSAKVTFKKAKVYGDGSECVIDIEERVTPGQAEKSVGLRRIWSSPNFNSLRIIVPGGDNEEEKETLVAQIEATPKVKGTKSVLWMQRLPDHNQLFDKTGCFQNPIRLPFNHPIKFIVSLMLMVFLLLPFVVYLS

SEQ ID NO: 6534 - protein, 141 aa, Arabidopsis thaliana
  Clone ID: ARATH-23APR03-C4336_1.p
MAMSLSGAVLSGMGSSFHNVGAKQSGVGTVRVGRKSELVVVAQRKKSLIYAVKSDGNILDDLNEATKKASDFVTDKTKEALADGEKTKDYIVEKTIEANETATEEAKKALDYVTEKGKEAGNKAAEFVEGKAEEAKNATKS

SEQ ID NO: 6535 - protein, 378 aa, Arabidopsis thaliana
  Clone ID: ARATH-23APR03-C4343_1.p
MEPVIIGALILDVHAKPSTTPISGTTVPGQVLFAPGGVARNVADCIFKLGITPFMIGTLGLDGPANVLLKEWKLSMKGILRREDISTPIVSLVYDTNGEVAAGVAGVDAVENFLTPEWIQRFEYNISSARLLMVDANLSSLALEASCKLAAESSVPVWFEPVSVTKSQRIASIAKYVTIVSPNQDELIAMANALCAKNLFHPFRSDENKLSIEDMFRALKPAILVLLKNGVKVVIVTLGSNGALLCSKGNPKKALNIDRKFLRSGEVFKRVQSVCSPNRFSELGSNRSPSLFAMHFPTIPAKVKKLTGAGDCLVGGTVASLSDGLDLIQSLAVGIASAKAAVESDDNVPPEFKLDLISGDAELVYNGAKMLMVHQSML

SEQ ID NO: 6536 - protein, 694 aa, Arabidopsis thaliana
  Clone ID: ARATH-23APR03-C4349_1.p
MATEQEFTRASRFSRDSSSVGYYSEEDNTEEEDEEEEEMEEIEEEEEEEEEEDPRIGLTCGGRRNGSSNNNKWMMLGRILDPRSKWVREWNKVFLLVCATGLFVDPLFLYTLSVSDTCMCLLVDGWLALTVTALRSMTDLLHLWNIWIQFKIARRWPYPGGDSDGDTNKGGGTRGSTRVAPPYVKKNGFFFDLFVILPLPQVVLWVVIPSLLKRGSVTLVVSVLLVTFLFQYLPKIYHSIRHLRRNATLSGYIFGTVWWGIALNMIAYFVAAHAAGACWYLLGVQRSAKCLKEQCENTIGCDLRMLSCKEPVYYGTTVMVLDRARLAWAQNHQARSVCLDINTNYTYGAYQWTIQLVSSESRLEKILFPIFWGLMTLSTFGNLESTTEWSEVVFNIIVLTSGLLLVTMLIGNIKVFLHATTSKKQAMHLKMRNIEWWMKKRHLPIGFRQRVRNYERQRWAAMRGVDECEMVQNLPEGLRRDIKYHLCLDLVRQVPLFQHMDDLVLENICDRVKSLIFTKGETIQKEGDAVQRMLFVVRGHLQSSQLLRDGVKSCCMLGPGNFSGDELLSWCLRRPFVERLPPSSSTLVTLETTEAFGLDAEDVKYVTQHFRYTFVNEKVKRSARYYSPGWRTWAAVAVQLAWRRYKHRLTLTSLSFIRPRRPLSRCASLGEDKLRLYAAILTSPKPNPDDFDDY

SEQ ID NO: 6537 - protein, 3365 aa, Arabidopsis thaliana
  unsure (1)..(3365): unsure at all Xaa locations
  Clone ID: ARATH-23APR03-C4350_1.p
MLEGYVQGFVNLLLGYLGRYIKDIQKDQLKISLWNGEVLLENVELNPEAFEYLQLPIALKQGRVGKLSIKIPWKKLHRDPVTIMIEDVFICASQRNDQEWSSDVVEKREFAGKKAKLASAELAKLSRRVFDNPGGNSYMSYITAKILDSVQVSIKNFHILYSDAQPESGQVVLGLRFSSLTVTKQNSVGPSVGRVRGGQVNILVEVEGLEIYCDMYEGNMDFPSVNEKIGFDNWCQSRLQSNRFGYLLKPVHVSVTLLVNRSGELYDDLPQYSISAELTDVQILILLDYLQTSQLRERYGRYRPCSTSLSRKPPGWQKLWWHYAQNSVLSDVRKKLWKTSWRFLEQRIQILLECIQAVCSLLDFCFGEKIQENPQESIDKSIRLGLEELEKKSDIDDILSYRSAAEGEMQEACSELTVNMGATGATRSEKEQSAPEKEPSDDPTLNKSRGWLNWLSRGMLGAGGTEDSSQFSGVVSDEVVKDIHKATKFYPLSSSPRNTSATGKICTCSIRLNVRKFSATLQHISGSSSQVITELDILGVIVECKSWKDSTAMILSVISGRLVYPHNGKEILTMKRVCSQSDTLETKPSYGARLELSKDHDVALSLKATLQPLEAAYDGGFILAVSNFFSGSRYFKLQHERILSSLNGLESETRLAAKAEYLLSSRNKVKWDLDIKDLTLSFPGRLVESESYNLVLVLESLSITSSSTDALSQIPRLQSDVDHVVNSLQSSVEALDAFQVKDLYDHFDIKICNLEMKLMKIHPFQELPLVEKSSLLIKFASCIIPEESILKQLEVEATLPMFNVHFSPSIFKGVMSVIEYLDIQDHGTRNPPPSPAPIFHFTIKTDLAFLRLHVNLENKGENSTVLVLSIQQLDLWYSRAIFEEWSVRAKTLEITACSSKDAADSHILCSSGNLLKSSSHGHGMDAHTSDETNIIDYRTTPEAAISLNCKVSQSKSFIFHKYTVYWRSAELHCYPYIFGLLTNFLDKIASYKISSSYTNPSSLATDTIAPTEIPQFDFERFGFSNFTESRSCGCIPLDKFPFVTINNSGSLHSLESSLCYSTSDWRKLFILKNRKDGAQIGLNCECNSCTFQLKRDCPLNGLASSRDLGQTNHFTVDMHVFNTNVHFHDSSSVFGTIILPVSRYFLNISDDLLDLVASAEDLMLVSSLFTNYSGGFLWKQSSTDVSQVLNLRVRKRGLEPSGSQLEVSIGIQHTYCILPPEYLAIIIGYFSLSDWTSKSGLQSLPQATELTKAHSEFAISYKIEILDSSIVLPVEGDDRRQLKVDIQQLYISFIPECALSNVVQHIPQECVIPLNQVLGRADCLNIFGRDLSVSLLLSESDISTFKKNAVCRSITLAASIIADTWIRFPCDHNPLTELACVMSRVDVCEIVVDDSDALDGFKAFLDVVDQLSLVDEESKLFVSDVPQFLHTKMRLKQELSVAPLEPSTSFIKFRIFVNLLTSKLHRLRKAPGTLLSEPVLQADMKFVCSGELKNNFPMSLDVQFFKIGLYSLLSSVMLARCINADGDPSALRVRFTEQAENEYDLCFSLPSLDIWLHFFDWIEVIELLKSYSQKLEDSSEDRFFSKGSKLDMDESIGVVRTICDNTDRVLNVLQTEVSENSSEVMSFAARSENIGVKIHIPLCTSHTEFPGFMATDVHEISEEEHTNCFKGNYCKYVSVTACSRSGELSILGRDVKLSYKIEKLNGILAISGVDTVRSCSLFGAAQLLVETSIQMDQNKIMSIDVGILSDKVEMHASHQVLSFWHGITFDAPETPSSQNSEGNMSIKVQIRDVSLLISDGKWGCSGMLLEVLMRNFLLQANLAEKNMESLVSCDLEVNYNNMHKVLWEPFIEPWNFDIKLSRKFDANSLLNNAGLTEVIVASSNQLNLNLTESLFEQQSKLIRVYSTVIILNSTSMPLELRFDIPFGISPKILDPIFPGQEFPLPLHLAKSGRLRWRPLGDSYLWSEAHSISKVLSQDSGIGFRRSFACYPCHPSHEPFRCCISVQSTSLPASFHINDLSAGNFGQQLHNLDQSREQFIHQVTLSTPFVVSNCLPDPISLSIESGGITQTASLPEGETPFHHIDPSHDLVLEFKLNGCRTSSLKFSRSETFSTEAKFSGGKFSQIETISFDSHVGGGSVYVSCEKTMDATCGAREVLIFVPFLLYNCTGTPLIVSDCTNETKGIYSVIPSCYNLIEQHFVQSRKVGLGILTSEKDLLDKAVMEDIPCSPSSSECSNTASSTERFIDKHATQSTRQVPFAAYPKDSAIVRKRSLSSKSLREVCFQGNDESGKVKACIYSPCPISRVSDTMIRVKRDLPGWVNSSSPYPLWSAPFPLVPPSGSTNVVVPQPSPGESSLLSVTCSILGGALAGRTQAITFQPRYIICNSCSHNLCYKQKGTNLVSHLAVGQHSQLQWTDTTRELLVSIRLNEPGWQWSGSFLPDHLGDTQLKIWNYVNKAFNMVRVEVQNANMSSGDEKIVGSVHGHVGTNFILLSDDDMGYMPYRIDNFSNERLRVYQQKCETFDTIVHPYTSCPYAWDEPCYRTRGRTRVPGDRVLGSYAFEITKQPIAVHLRSTSEKPERTLLLSICAEGATKVFSVVDSGYHAIKDIKETFDSRFHEKGKKKLQTDNIIRYTETFLLVLPSIGISLVNSHPQELVYACASNVVLELSQSVDQQKLSFQISSLQIDNPLQNSSYPVILSFNHDHEVIPPDWGMKNNKAILLSEIVQQVRGNSCDAVVYVDLAKWRKKDVSLVSFEYINIRIGEFGLELELQTLLSLLEFVKAVLPNSQARLLPLSDPTLRPLIYDTGSKDISSEDTPHARNIPVFNKNQRSIVALPIVVPIGAPWQHIHLLARRRRKIYVETFDLAPIQFTLRITILLVTYLHVDSHGSFVCHNIDSFCSAPWMLRNGILTSGESLIHRGLMALADVEGARIHLKQLTIAHQITSWESFQEILVGHYTRQILHEIYKVFGSAGVIGNPMGFARNVAFGITDFLSAPSRSISKXSPAGIIQRMAHGTTSLFSSTIYALSDAATQFSKAAHKGIVAFTFNDHDVATMENHQLGQGSRSKXGVIGDVFEGLTGLLQSPIRGAANHGLPGVFPGXARGITGLVATPTPSFPGGPRKTPPRLRNRSRIHNIRSQRHRLRLPRPLSREQPLRPYSWEEAVGTAVLMEVGDSLKFKGEKLVKCKALKQEGAFVVITGRLVLVLSSLSLVDFRKQGFLGVPIDLVWNIEREIGLESVIHTDCSGGVVRIIGSNSDGVWNWRQDQQKKSSPTKKRWNNPSAQPLLQTNLEFPSEEEAEDLLSVLLSTIETGKSRSWHSRFVLSRRFIGFSRSGFSSQFWVPRSTFRLFRNQCGPRPIFYFWNSL

SEQ ID NO: 6538 - protein, 674 aa, Arabidopsis thaliana
  unsure (1)..(674): unsure at all Xaa locations
  Clone ID: ARATH-23APR03-C43606_1.p
MILMITAPVCPPHLLLRHSSLLRHESSIGNFHRKKNPRFRTVSCSSLLPQPSVRPDKASELKTLWKKFYKVASPYWFSEDKDQARLRLAAVFALTLATTGISVGFNFLGRDFYNSLANKDQEQFTKQLFYYLCAFAGGIPFFVLRDYTKETLSLRWRSWMTKYYLQRYLKDQTFYKIQSQSIIDNPDQRLVDDLSSFTGTALSFSLTLVNATIDLISFSNILFTIYPPLFLVLLLYSFGGTAISVFLGKGLVNLNFLQEKKEADFRYSLVRVRENAESIAFFFFFFLAVHFPAXKLGLNYVLCTTYSQSFIVSANQLLRLNEKLHLLXRLGFSFYASNNIKTSSNTGEFDDLLDNNIFRDPSDTVDEIELTYQSEMNSSLLDTNGSIKSQPNQKRLEIEELTLQTPTNGTTLVHNLSADVYDKDHLLIMGPSGSGKTSLLRAMAGLWRSGKGKITFYLDPEVDFTQEKSDTQENSGKRGDVLFLPQRPYMVLGSLRQQLLYPTWSATVEETTPTPGGSNGDAPLLIREDGNEKPTTDDLMRTLEKVCLGHIADRFGGLDSIHEWSSVLSLGEQQRLAFARLLLSQPKLALLDQSTSALAEDEAIEAFLHLQIHSAGITYISIGRRRTLTKFHNKILQISTADPKSNERNWRIEDVDAQDSLYGRLNQKEVPSES

SEQ ID NO: 6539 - protein, 282 aa, Arabidopsis thaliana
  Clone ID: ARATH-23APR03-C43609_1.p
MSVIGSKSCIFSVARYTRENEKSSCFTSINKKSSLDLSLPRNLAGVSCKFSGENPGTNGVSLSSKNKMEDYNTAMKRLMRSPYEYHHDLGMNYTLIRDELIVGSQPQKPEDIDHLKQEQNVAYILNLQQDKDIEYWGIDLDSIVRRCKELGIRHMRRPAKDFDPLSLRSQLPKAVSSLEWAVSEGKGRVYVHCSAGLGRAPGVSIAYMYWFCDMNLNTAYDTLVSKRPCGPNKGAIRGATYDLAKNDPWKEPFESLPENAFEDIADWERKLIQERVRALRGT

SEQ ID NO: 6540 - protein, 443 aa, Arabidopsis thaliana
  Clone ID: ARATH-23APR03-C4377_1.p
MDGNFPQGGVVRSGASSYGGFDLQGSMRVHHQDSMNQQHRHNPNSRPLHEGLPFTMVTGQTCDHHQNQNMSMSEQQKAEREKNSVSDDDEPSFTEEGGDGVHNEANRSTKGSPWQRVKWTDKMVKLLITAVSYIGDDSSIDSSSRRKFAVLQKKGKWKSVSKVMAERGYHVSPQQCEDKFNDLNKRYKKLNDMLGRGTSCQVVENPALLDSIGYLNDKEKDDVRKIMSSKHLFYEEMCSYHNGNRLHLPHDLALQRSLQLALRSRDDHDNDDSRKHQMEDLDDEDHDGDGDEHDEYEEQHYAYGDCRVNHYGGGGGPLKKIRPSLSHEDGDHPSHVNSLECNKVSLPQIPFSQADVNQGGAESGRAGSVQKQWMESRTLQLEEQKLQIQVELLELEKQRFRWQRFSKKRDQELERMRMENERMKLENDRMGLELKQRELGVEL

SEQ ID NO: 6541 - protein, 412 aa, Arabidopsis thaliana
  unsure (1)..(412): unsure at all Xaa locations
  Clone ID: ARATH-23APR03-C43836_1.p
MATLSSYLLSSPPLCKSRFSATSLVSGIDFISFSPRTTLSSSSTVLPAILSLSVKHNRRRNSLQVKSVASPTETISEFDEMVSGTKRKYYMLGGKGGVGKTSCAASLAVRFANNGHPTLVVSTDPAHSLSDSFAQDLTGGMLVPVEGPEAPLFALEINPEKAREEFRSASQMNGGTGVKDFMDGMGLGMLVEQLGELKLGELLDTPPPGVDEAMAISKVIQFLESPEYNMVTRIVFDTAPTGHTLRLLSLPGFLDASIGKILKLRQKITSATSAIKSVFGKEEKGPDAADKLEKLRERMVKVRELFRDTESTEFVIVTIPTVMAVSESSRLSASLKKESVPVKRLIVNQLLPPSSSDCKFCSIKRKDQMXRALDMIREDSELSALTLMEAPLVDMEIRGVPALRFLGDIIWK

SEQ ID NO: 6542 - protein, 337 aa, Arabidopsis thaliana
  Clone ID: ARATH-23APR03-C4393_1.p
MGERKVLNKYYPPDFDPAKLQRLRRPKNQQIKVRMMLPMSVRCGTCGNYIYKGTKFNSRKEDVIGETYLGIQIFRFYFKCTKCSAELTMKTDPQNSDYIVESGASRNYEPWRAEDEEVDKDKQKRDAEEMGDAMKSLENRTLDSKREMDIIAALDEMKSMKSRHATVSVDAMLEALQRTGAEKVKRIEEEDEAVIKSIFGKEKLGIRRIADEEIDDDYDDDDIDDYPSLQKEKKGSSSDLSKKRKATEVSPSNPTDILTSSSAENPKEPKKQAISKQPFKSVHIKVIKKQPQPTSSSTPAPAKPEEKKSDGAANTSLASLFQNYGSSNNIVELFLNR

SEQ ID NO: 6543 - protein, 693 aa, Arabidopsis thaliana
  Clone ID: ARATH-23APR03-C4405_1.p
MSSNSLRHVESMSQLPSGAGKISQLNAVVLGESLASEENDLVFPSKEFSGQALVSSPQQYMEMHKRSMDDPAAFWSDIASEFYWKQKWGDQVFSENLDVRKGPISIEWFKGGITNICYNCLDKNVEAGLGDKTAIHWEGNELGVDASLTYSELLQRVCQLANYLKDNGVKKGDAVVIYLPMLMELPIAMLACARIGAVHSVVFAGFSADSLAQRIVDCKPNVILTCNAVKRGPKTINLKAIVDAALDQSSKDGVSVGICLTYDNSLATTRENTKWQNGRDVWWQDVISQYPTSCEVEWVDAEDPLFLLYTSGSTGKPKGVLHTTGGYMIYTATTFKYAFDYKSTDVYWCTADCGWITGHSYVTYGPMLNGATVVVFEGAPNYPDPGRCWDIVDKYKVSIFYTAPTLVRSLMRDDDKFVTRHSRKSLRVLGSVGEPINPSAWRWFFNVVGDSRCPISDTWWQTETGGFMITPLPGAWPQKPGSATFPFFGVQPVIVDEKGNEIEGECSGYLCVKGSWPGAFRTLFGDHERYETTYFKPFAGYYFSGDGCSRDKDGYYWLTGRVDDVINVSGHRIGTAEVESALVLHPQCAEAAVVGIEHEVKGQGIYAFVTLLEGVPYSEELRKSLVLMVRNQIGAFAAPDRIHWAPGLPKTRSGKIMRRILRKIASRQLEELGDTSTLADPSVVDQLIALADV

SEQ ID NO: 6544 - protein, 396 aa, Arabidopsis thaliana
  unsure (1)..(396): unsure at all Xaa locations
  Clone ID: ARATH-23APR03-C4426_1.p
MFSLILHGRKSVELQKWRNLRVTVSIVQNAFPFTTKSFSSTIAKDSSPKGSTFTVSYLVESLGLTKKLAETISKKVTFEDQMTQNXFSEAPTMLYKKGEESVSLYYDFAKDIMQDGKNLCISCPEGKKGNRIRNISVLRELGVPQKLLFSLLISRYQPVCGKEKFEESLKKVVDMGFDPAKSKFVEALHVVYEMSEKTIEEKVNVYKRLGFSEAEIWAIFKKWPYFLKFSEKKIILMFETLKKCGLVEEEIISVLKSRPQCIRSSEQKILDSIEMFLGLGFSRDDFKMMVKRYPCCTAYSGETLRKKFEVLVKMMNWPLEAVVMIPTVLGYSLEKRIVPRSNVIKALMSKGLIGSENPPISSVLVCTDQEFLKRYVMKHDKLVPKLMAIFNRGRVS

SEQ ID NO: 6545 - protein, 775 aa, Arabidopsis thaliana
  Clone ID: ARATH-23APR03-C4446_1.p
MKKKQEESSLEKLSTWYQDGEQDGGDRSEKRRMSLKASDFESSSRSGGSKSKEDNKSVVDVEHQDRDSKRERDGRERTHGSSSDSSKRKRWDEAGGLVNDGDHKSSKLSDSRHDSGGERVSVSNEHGESRRDLKSDRSLKTSSRDEKSKSRGVKDDDRGSPLKKTSGKDGSEVVREVGRSNRSKTPDADYEKEKYSRKDERSRGRDDGWSDRDRDQEGLKDNWKRRHSSSGDKDQKDGDLLYDRGREREFPRQGRERSEGERSHGRLGGRKDGNRGEAVKALSSGGVSNENYDVIEIQTKPHDYVRGESGPNFARMTESGQQPPKKPSNNEEEWAHNQEGRQRSETFGFGSYGEDSRDEAGEASSDYSGAKARNQRGSTPGRTNFVQTPNRGYQTPQGTRGNRPLRGGKGRPAGGRENQQGAIPMPIMGSPFANLGMPPPSPIHSLTPGMSPIPGTSVTPVFMPPFAPTLIWPGARGVDGNMLPVPPVLSPLPPGPSGPRFPSIGTPPNPNMFFTPPGSDRGGPPNFPGSNISGQMGRGMPSDKTSGGWVPPRGGGPPGKAPSRGEQNDYSQNFVDTGMRPQNFIRELELTNVEDYPKLRELIQKKDEIVSNSASAPMYLKGDLHEVELSPELFGTKFDVILVDPPWEEYVHRAPGVSDSMEYWTFEDIINLKIEAIADTPSFLFLWVGDGVGLEQGRQCLKKWGFRRCEDICWVKTNKSNAAPTLRHDSRTVFQRSKEHCLMGIKGTVRRSTDGHIIHANIDTDVIIAEEPPYG

SEQ ID NO: 6546 - protein, 93 aa, Arabidopsis thaliana
  Clone ID: ARATH-23APR03-C4496_1.p
MDASMMAGLDGLPEEDKAKMASMIDQLQLRDSLRMYNSLVERCFVDCVDSFTRKSLQKQEETCVMRCAEKFLKHTMRVGMRFAELNQNAPTQD

SEQ ID NO: 6547 - protein, 312 aa, Arabidopsis thaliana
  Clone ID: ARATH-23APR03-C4509_2.p
MAGITSSTVGFNAVFTGITKTVSSHSLFSVDSKLCSLRLSKTELSFTNLTPSPRRAFAVTCRFGGGGGGYRFSGDNRRGRPKEAEIDEALDISSIRSATVRLIDGQQNMLGLVSKDEAVRMADDAELDLVILSPDADPPVVKMMDYSKYRYEQQKRKKDQQKKTTRMDLKELKMGYNIDQHDYSVRLRAAQKFLQDGDKVKVIVSMKGRENEFRNIAIELLRRFQTEIGELATEESKNFRDRNMFIILVPNKEMIRKPQEPPTRKKKKTAENEASASAAEITAEPEPEPEPEPEPEPEPEPEPEPEPLQIDS

SEQ ID NO: 6548 - protein, 557 aa, Arabidopsis thaliana
  unsure (1)..(557): unsure at all Xaa locations
  Clone ID: ARATH-23APR03-C4539_2.p
RHPVSXGPVPTATVKXEPSTVLSMAPVPSFPHIPAVARXATQAIPSIQTSSASPVSQDMVSTRXNAPDIKPVVVSGMTPPLRTGPPGGANVNLLNNLSQVRQVMSSAALAGAASSVGQSAVAMHMSNMISTGMATSLPPSQTVFSTGQQGITSMAGSGALMGSAQTGQSPGPNNAFSPQTTSNVASNLGVSQPMQGMNQGSHSGAMMQGGISMNQNMMSGLGQGNVSSGTGGMMPTPGVGQQAQSGIQQLGGSNSSAPNMQLSQPSSGAMQTSQSKYVKVWEGNLSGQRQGQPVLITRLEGYRSASASDSLAANWPPTMQIVRLISQDHMNNKQYVGKADFLVFRAMSQHGFLGQLQDKKLCAVIQLPSQTLLLSVSDKACRLIGMLFPGDMVVFKPQIPNQQQQQQQQLHQQQQQQQQIQQQQQQQQHLQQQQMPQLQQQQQQHQQQQQQQHQLSQLQHHQQQQQQQQQQQQQHQLTQLQHHHQQQQQASPLNQMQQQTSPLNQMQQQTSPLNQMQQQQQPQQMVMGGQAFAQAPGRSQQGGGGGQPNMPGAGFMG

SEQ ID NO: 6549 - protein, 173 aa, Arabidopsis thaliana
  Clone ID: ARATH-23APR03-C4541_1.p
MLSLSIATPGTAAIFRRGTASATSTSSSFHGVRIQHQVSARVPAAATISSSSPKPSVVMMSKREAELKEIRSKTTEQLQEEVVDLKGELFMLRLQKSARNEFKSSDFRRMKKQVARMLTVKREREIKEGIKKRLSRKLDRQWKKSIVPRPPPSLKKLQEEEAAEEAAEAAKSA

SEQ ID NO: 6550 - protein, 302 aa, Arabidopsis thaliana
  Clone ID: ARATH-23APR03-C4561_1.p
MDQASSSSTMEEDKKSSTDPVNVDDNEEREAIEIALFQVPECYVYLIPPRKTAASYRADEWDVNKWAWEGALKVVSKGEECIIKLVDKTTGELYAQAFLREGELHPVEAVIDSSRYFVLRVEEKIDGRVRHAFIGLGFRERTEAYDFQAALHDHMKYLNKKKTAEEMEQHYQNTSSVDYSLKEGETIVLQLKNRSDKDSKSKTVEKSLGNLSLEDKGKSIETTIPSIILPPPPPGPLSPVTTAQKSPSSLPPSLSLQRSSEQQDLDTKREEEEEEKKEDLKAKDGGVEDAPDDDFGDFQAAG

SEQ ID NO: 6551 - protein, 422 aa, Arabidopsis thaliana
  Clone ID: ARATH-23APR03-C4582_1.p
MATLKCIDWQFSGSEAAKDAAAASLGSYTSALYALCDPHGKPILPPRNEILETSNTAEKAVVKAVLYGSGNAYAPSLGLAAAKSAVAEYLNQGLPKKLTADDVFMTLGCKQAIELAVDILAKPKANVLLPSPGFPWDLVRSIYKNLEVRHYNFLPEKNFEIDFDSVRALVDENTFAIFIINPHNPNGNTYSEAHLKQLAELAKELKIMVVSDEVFRWTLFGSNPFVPMGKFSSIVPVVTLGSISKGWKVPGWRTGWLTLHDLDGVFRNTKVLQAAQDFLQINNNPPTVIQAAIPDILEKTPQEFFDKRQSFLKDKVEFGYSKLKYIPSLTCYMKPEACDFLWTELDLSSFVDIEDDQDFCNKLAKEENLVVLPGIAFSQKNWLRHSIDMETPVLEDALERLKSFCDRHSNKKAPLKDVNGVK

SEQ ID NO: 6552 - protein, 572 aa, Arabidopsis thaliana
  Clone ID: ARATH-23APR03-C45949_1.p
MMGSENDEESHLHSSKEEMEKLFLREDGDPLTKSNVNGDKSNSNYRSAMSTLFDSRHPSIVVTPADSDPLFAPPSYYSESRSPRSKPNGGDRVSSYLEPPSYADVIFSPFDDISEINGSEDGHSQSSDSLSRSPSSLSSDYIKITVSNPQKEQEATNSMIPGGSTYITYQITTRTNLSDYGGSEFSVRRRFRDIVTLADRLAESYRGFCIPPRPDKSVVESQVMQKQEFVEQRRVALEKYLRRLVAHPVIRNSDELKVFLQAQGKLPLATSTDVASRMLDGAVKLPKQLFGEGGGASSVEVVQPGRGGRDFLRMFKELRQSVSNDWGGSKPPVVEEDKEFLEKKEKMYDLEQQIINASQQAESLVKAQQDMGETMGELGLAFIKLTKFENEEAVFNSQRARANDMKNLATSAVKASRFYRELNSQTVKHLDTLHDYLGLMMAVQGAFADRSSALLTVQTLLSELSSLEARAEKLEVASSKVFGGDKSRIKKIEELKETIKVTEDSKNVAIREYEQIKENNWSEVERLDRERRADFLNMMKGFVANQVGYAEKIANVWTKVAEETRQYDRESS

SEQ ID NO: 6553 - protein, 223 aa, Arabidopsis thaliana
  Clone ID: ARATH-23APR03-C4603_1.p
MAMLFRPPPSQCRSFSPFVFNYSSREVSSSSRLSLKTSGDEENWVSRFRSKSLSLVFSGALALGLSLSGVGFADAKVGVNKPELLPKEFTSVIDVADFLSNGQEKRIAQEIANLEKDTGFKLRVLAQNYPVTPGLAIKDFWQVDDSTIVFVADPTFGNILNFNVGATVDLDIPRSFWSRLAGKYGNMFYWKEKGEDASIEAAVMAISSCLREPVGRNNCAEIQ

SEQ ID NO: 6554 - protein, 272 aa, Arabidopsis thaliana
  Clone ID: ARATH-23APR03-C4624_1.p
MELLSSSPAQLLRPNLSSRALLPPRTSIASSHPPPPRFLVMNSQSQHRPSISCASPPPGDNGFPAITTASPIESARIGEVKRETKETNVSVKINLDGHGVSDSSTGIPFLDHMLDQLASHGLFDVHVRATGDTHIDDHHTNEDVALAIGTALLKALGERKGINRFGNFTAPLDEALIHVSLDLSGRPYLGYNLEIPTQRVGTYDTQLVEHFFQSLVNTSGMTLHIRQLAGKNSHHIIEATFKAFARALRQATESDPRRGGTIPSSKGVLSRS

SEQ ID NO: 6555 - protein, 216 aa, Arabidopsis thaliana
  Clone ID: ARATH-23APR03-C46632_1.p
MAPPIEVSTKSYVEKHVSLPTLNERILSSMSHRSVAAHPWHDLEIGPEAPIIFNCVVEIGKGSKVKYELDKTTGLIKVDRILYSSVVYPHNYGFIPRTLCEDSDPIDVLVIMQEPVIPACFLRAKAIGLMPMIDQGEKDDKIIAVCADDPEYRHYNDISELPPHRMAEIRRFFEDYKKNENKEVAVNDFLPATAAYDAVQHSMDLYADYVVENLRR

SEQ ID NO: 6556 - protein, 378 aa, Arabidopsis thaliana
  unsure (1)..(378): unsure at all Xaa locations
  Clone ID: ARATH-23APR03-C4681_1.p
MICIDYYYGPRAHRDQSDSASPCLYNSAHGSRVLRSLLPSKFKTNTMDKTATLLSTLXFLFTFLTTCLSKDLCNQNDKNTLLKIKKSLNNPYHLASWDPQTDCCSWYCLECGDATVNHRVTALTIFSGQISGQIPAEVGDLPYLETLVFRKLSNLTGTIQPTIAKLKNLRMLRLSWTNLTGPIPDFISQLKNLEFLELSFNDLSGSIPSSLSTLPKILALELSRNKLTGSIPESFGSFPGTVPDLRLSHNQLSGPIPKSLGNIDFNRIDLSRNKLQGDASMLFGSNKTTWSIDLSRNMFQFDISKVDIPKTLGILDLNHNGITGNIPVQWTEAPLQFFNVSYNKLCGHIPTGGKLQTFDSYSYFHNKCLCGAPLEICK

SEQ ID NO: 6557 - protein, 452 aa, Arabidopsis thaliana
  unsure (1)..(452): unsure at all Xaa locations
  Clone ID: ARATH-23APR03-C4683_1.p
MDEKPAGIXVMLVTVTAQRHIYQVIFLAKTLHLKGFSEKIARRRFIXFSSSADFTVFPMVTIPESLQXSDFXNLVPKNILHKLNKECEVSFEDCLGKMLLHQGNEIACDVYDEFMYFAEAAAKEFKLPNVIFSTTSATAFVCRSAFDKLYANSILTPLKEPKGQQNELVPEFHPLRCKDFPVSHWASLESMMELYRNTVDKRTASSVIINTASCLESSSLSRLQQQLQIPVYPIGPLHLVASASTSLLEENKSCIEWLNKQKKNSVIFVSLGSLALMEINEVIETALGLDSSKQQFLWVIRPGSVRGSEWIENLPKEFSKIISGRGYIVKWAPQKEEVLSHPAVGGFWSHCGWNSTLESIGQGVPMICRPFSGDQKVNARYLECVWKIGIQVEGELDRGVVERAVKRLMVDEEGEEMRKRAFSLKEQLRASVKSGGSSHNSLEEFVHFIRTL

SEQ ID NO: 6558 - protein, 812 aa, Arabidopsis thaliana
  unsure (1)..(812): unsure at all Xaa locations
  Clone ID: ARATH-23APR03-C4685_1.p
MASVSPSPSCSTIPIPLRRTSFAVAELRRLKQRRAIPPVSVGLGHFADVVRNDVDFLKNKIGIGLRWANEAFRVPEVTKSAEELFWLRHLEDHTSQNLKSQSWPQPSYSGLTGVDLFMADVKALETYAGYFYSLSKMWSRPLPEVYDSQAVADYFNCRPHVVAFRLLEVFSAFTIAAIRLRTSASVKGKSLEASEQIFGMVLKETMLHLGPTFIKVGQSLSTRPDIIGTEISKALSELHDRIPPFPWPEAVKILEGELGGPVESFFSQFSQETVAAASFGQVYRGRTLDGADVAVKVQRPDLRHAVLRDIYILRLGLGVLRKVAKRENDIRVYADELGMGLAGELDFTLEAANASEFQXHARFSYIRVPKVYQHLTRKRVLTMEWMVGESPTDLLAISSGYSDHDNESHEKQKIEARRRLLDLVNKGVEATLVQLLDTGILHADPHPGNLRYTTSRQIGFLDFGLVCRMQRKHQLAMLASIVHIVNGDWACLVESLIDMDVITPGVNTRRFTLDLEYALGEVKLINGIPDIEFTKVLSKIVNVALKYQLRMPPYFTLVLRSLACLEGLAAAGDPNFKTFEAAYPFVVQKLITENSAATRKILHXVLNRKKEFRWERVALFLSKSSTRKQSPLLKLSRDETSVDSSSNLTDKDADNVSLVLRLLASKNGVVLRRLLMAANGTSLIRTFISREALVIRQKLCMTIATTMYQWMVGSLGIESLKFISLSDPPPSSGINITVKDFKILINDKRVRVILRKILESAKSDRVLMLRFCWTSFVMSLTTTALACHRFVISVSEGYVNYLSLSAPVALRT

SEQ ID NO: 6559 - protein, 809 aa, Arabidopsis thaliana
  Clone ID: ARATH-23APR03-C4696_1.p
MGETGDDAGPSEQGPSNQTWWPSEFVEKFGSVYLGSQEETSSTKDSPRNLGQDGLPSSTASNILWSTGSLSEPIPNGFYSVIPDNRLKQLFNNIPTLEDLHALGDEGLKADVILVDFQKDKKLFRQKQLITKLVSGLNSKPATIIKKIAGLVADVYKQSTLQSPAKSTQSFENCGIQLLGQIKHGSCRPRAILFKVLADTVGLQSRLVVGLPSDGAAESVDSYSHISVTVLLNSVEMLVDLMRFPGQLIPLSTKAIFMSHISAAGESDSAENDSCDSPLEPNSPMFGYPEKFDHENAEKDENLSLHRKLDGSPNTSGPPSRNMLLRSASALERKLSFSQSESNMANEFWRQSRRKVIADQRTASSSPEHLSFRARTKSMLSGDKNLARDFTGDVATSSCKSVGGAKMETKRIRRRSISITPEIGDDIVRAVRAMNEALKQNRLSKEQGDDDSSPNSPNDRTESSHLQKNVSGFHLDAHDQVSGGRSTLSREPLDPQKAISLPSSPQNYRSQYEQSGSSHRNISHIWDKVLGSPMFQNKPLLPYEEWNIDFSELTVGTRVGIGFFGEVFRGIWNGTDVAIKVFLEQDLTAENMEDFCNEISILSRLRHPNVILFLGACTKPPRLSLITEYMEMGSLYYLLHLSGQKKRLSWRRKLKMLRDICRGLMCIHRMGIVHRDIKSANCLLSNKWTVKICDFGLSRIMTGTTMRDTVSAGTPEWMAPELIRNEPFSEKCDIFSLGVIMWELCTLTRPWEGVPPERVVYAIAYEGARLEIPEGPLGKLIADCWTEPEQRPSCNEILSRLLDCEYSLC

SEQ ID NO: 6560 - protein, 610 aa, Arabidopsis thaliana
  Clone ID: ARATH-23APR03-C4705_1.p
MARDQFYGHNNHHHQEQQHQMINQIQGFDETNQNPTDHHHYNHQIFGSNSNMGMMIDFSKQQQIRMTSGSDHHHHHHQTSGGTDQNQLLEDSSSAMRLCNVNNDFPSEVNDERPPQRPSQGLSLSLSSSNPTSISLQSFELRPQQQQQGYSGNKSTQHQNLQHTQMMMMMMNSHHQNNNNNNHQHHNHHQFQIGSSKYLSPAQELLSEFCSLGVKESDEEVMMMKHKKKQKGKQQEEWDTSHHSNNDQHDQSATTSSKKHVPPLHSLEFMELQKRKAKLLSMLEELKRRYGHYREQMRVAAAAFEAAVGLGGAEIYTALASRAMSRHFRCLKDGLVGQIQATSQALGEREEDNRAVSIAARGETPRLRLLDQALRQQKSYRQMTLVDAHPWRPQRGLPERAVTTLRAWLFEHFLHPYPSDVDKHILARQTGLSRSQVSNWFINARVRLWKPMIEEMYCEETRSEQMEITNPMMIDTKPDPDQLIRVEPESLSSIVTNPTSKSGHNSTHGTMSLGSTFDFSLYGNQAVTYAGEGGPRGDVSLTLGLQRNDGNGGVSLALSPVTAQGGQLFYGRDHIEEGPVQYSASMLDDDQVQNLPYRNLMGAQLLHDIV

SEQ ID NO: 6561 - protein, 312 aa, Arabidopsis thaliana
  unsure (1)..(312): unsure at all Xaa locations
  Clone ID: ARATH-23APR03-C4727_2.p
MADKKIRIGINGFGRIGRLVARVVLQRDDVELVAVNDPFITTEYMTYMFKYDSVHGQWKHHELKVKDDKTLLFGEKPVTVFGIRNPEDIPWGEAGADFVVESTGVFTDKDKAAAHLKGGAKKVVISAPSKDAPMFVVGVNEHEFGIVEGLMTTVHSITATQKTVDGPSMKDWRGGRAASFNIIPSSTGAAKVVGKVVPSLNGKLTGMSFRVPTVDVSVVDLXVRLEKAATYDEIKKAIKEESEGKMKGILGYTEDDVVSTDFVGDNRSSIFDAKAGIALSDKFVKLVSWYDNEWGYXSSRVVDLIVXHMSKA

SEQ ID NO: 6562 - protein, 470 aa, Arabidopsis thaliana
  Clone ID: ARATH-23APR03-C4742_1.p
MKLLSNSLMFLPLLALALTAVSSLKYSRNDFPPGFVFGSGTSAYQVEGAADEDGRTPSIWDVFAHAGHSGVAAGNVACDQYHKYKEDVKLMADMGLEAYRFSISWSRLLPSGRGPINPKGLQYYNNLIDELITHGIQPHVTLHHFDLPQALEDEYGGWLSQEIVRDFTAYADTCFKEFGDRVSHWTTINEVNVFALGGYDQGITPPARCSPPFGLNCTKGNSSIEPYIAVHNMLLAHASATILYKQQYKATARVNDFYIGWILHPLVFGDYPETMKTNVGSRLPAFTEEESEQVKGAFDFVGVINYMALYVKDNSSSLKPNLQDFNTDIAVEMTLVGNTSIENEYANTPWSLQQILLYVKETYGNPPVYILENGQMTPHSSSLVDTTRVKYLSSYIKAVLHSLRKGSDVKGYFQWSLMDVFELFGGYERSFGLLYVDFKDPSLKRSPKLSAHWYSSFLKGTLHHPSYASS

SEQ ID NO: 6563 - protein, 185 aa, Arabidopsis thaliana
  Clone ID: ARATH-23APR03-C47589_1.p
MKKFYQNADHETDKSKSAETKKRKNMRRLGGGGLSLQTFANMKSENNRYNPSLIKKQKEFYKNAKYVSKFRKSLKQQNIPDKNETGETSKVGDDDDDDKRKGKSNKRIGVEDLYKQTREEMERVRKEREAMFQAKKEAKEEAESRRKEAKGKMLRKTRHGQPVMKYRIEHLLESIKKSAGINEIA

SEQ ID NO: 6564 - protein, 462 aa, Arabidopsis thaliana
  Clone ID: ARATH-23APR03-C47_1.p
NLPSQTCLNNVKVLQAIVLFILFWVWLSWMGGSSSKESPRGGGSGRRYERSVSGSSSYSSAWDQSSYYQTPNHPSASPVSSYNSGRQTPKNLERKYSRIADNYRSIDEVTAALSHAGLESSNLIVGIDVTKSNEWTGARSFGRKSLHFIGTTPNPYQQAISIIGKTLSVFDEDNLIPCYGFGDATTHDQDVFSFNPNDTYCNGFEEVLMCYREIVPQLRLSGPTSFAPIIERAMTIVEESGGQYHVLLIIADGQVTRSVDTDNGGFSPQEQQTIDAIVRASEYPLSIVLVGVGDGPWDTMRQFDDNIPARAFDNFQFVNFTDIMSKNIDPARKEAEFALSALMEIPSQYKATLELGLLGQRTGHCPDRIALPPPTYATQSMRNSPRTSRSTSFQNKPYDNGVSSTPPSTTHNESQQQFCPVCLVSAKNMAFNCGHQTCAGCGEDLHVCPICRSSISVRIKLY

SEQ ID NO: 6565 - protein, 343 aa, Arabidopsis thaliana
  Clone ID: ARATH-23APR03-C4813_1.p
MGFKRKKDDGDGEEMESDVRGKSTFSGGEKRNVILPSMIKNKDKRSKVYAKQKHEKKLEKQKKIRARDAAEKRALELGEEPPQKMIPKTIENTRESDETVCRPDDEELFADIDADEFNPVLRREIAPKVLLTTCRFNSTRGPALISELLSVIPNSHYQKRGTYDLKKIVEYATKKDFTSLIVVHTNRREPDALLIIGLPNGPTAHFKLSNLVLRKDIKNHGNPTSHQPELVLNNFTTRLGNRVGRFFQSLFPPDPNFRGRRVVTFHNQRDFIFFRHHRYIFETKESKSDKGKEETIKPRLQECGPRFTLKLVTLQHGTFDTKGGEFEWVHKPEMDTSRRRFFL

SEQ ID NO: 6566 - protein, 194 aa, Arabidopsis thaliana
  Clone ID: ARATH-23APR03-C4840_1.p
TLSITKSEPCHIKKISISILSISLSSSSMASQASLLLQKQLKDLCKHPVDGFSAGLVDEKNIFEWSVTIIGPPDTLYEGGFFNAIMTFPQNYPNSPPTVRFTSDMWHPNVYSDGRVCISILHPPGDDPSGYELASERWTPVHTVESIMLSIISMLSGPNDESPANVEAAKEWRDKRDEFKKKVSRCVRKSQEMF

SEQ ID NO: 6567 - protein, 449 aa, Arabidopsis thaliana
  unsure (1)..(449): unsure at all Xaa locations
  Clone ID: ARATH-23APR03-C4844_1.p
MNPSHGGDDKQRPAMYPQVDQSIPDNPFASTNPYVASSPYLYPSLSSHNLGPNLFPDHGDASNDQSPSAPPQATEEVLIRVPGAILNLIDKSYSVELACGDFTIFRIIQGQNIVAVLANVGNEIQWPLTKNEVAAKVDGSHYFFSIHPPKEKGQGSGSDSDDEQGQKSKSKSDDEILNYGLTIASKGQENVLLVLDQVLRDYSCFTEQRMSEKAKETGEEVLGNSVVADTSPEELKGERKDVVEGQCAAYWTTLAPNVEDYTHSTAKMIASGSGKLIRGILWCGDVTVERLKKGNEVMKNRLSRAEKEKDVSPETLRRIKRVKRVTQMTEKVATGVLSGVVKVSGFITGSMANSKAGNKAXICDAVEVAGKNVMSTSSTVTTELVNHRYGTKAFINSEATNEGLDAAGHAFGTAWVAFKIRKAFNPKNVIKPSSLAKSVSELKAKKGSK

SEQ ID NO: 6568 - protein, 484 aa, Arabidopsis thaliana
  Clone ID: ARATH-23APR03-C4855_1.p
MVRRFLSSHKSLITVFWIATFASLFIWQFGGVSTNLYSGFSLFWSSSSTTTTVFSGGFPKLRPVVFNLTDFGAVGDGVTINTEAFEKAIYKISKLAKKGGGQLNVPPGRWLTAPFNLTSYMTLFLSENAEILALQDEKYWSLLPPLPSYGYGREHHGPRYGSFIHGQNLRDVVVTGNNGSINGQGQTWWKKYRQKLLNHTRGPLVQIMWSSDIVFANITLRDSPFWTLHPYDCKNVTITNMTILAPVFEAPNTDGIDPDSCEDMLIENSYISVGDDGIAIKSGWDQYGTTYGKPSKNILIRNLIIRSMVSAGISIGSEMSGGVSNITVENILIWSSRRGVRIKTAPGRGGYVRDITFRNVTLDELRVGIVIKTDYNEHPDGGFNPQAFPILENINYTGIYGQGVRVPVRIQGSKEIPVKNVTFRDMSVGITYKKKHIFQCAYVEGRVIGTIFPAPCDNLDRYDEQERLVKQSDSQNATDIDYEI

SEQ ID NO: 6569 - protein, 353 aa, Arabidopsis thaliana
  Clone ID: ARATH-23APR03-C4880_1.p
MKLTDNEEITMNGTREMETTEQETSSPCSLVIEAFPVKKSIIVGYALTSKKIKSFLQPKLEGLARNKGILIVAIDQNKPLSEQGPFDIVLHKQIGKEWRRILEEFRLAHPDVTVLDPPDAILHLRNRQSMLQCVADMNLSDSNGRVGVPKQLVIKKDASSIPEAVNNAGLRLPLVAKPLVADGSAKSHELSLAYDQHSLLKLEPPLVLQEFVNHGGVLFKVYIVGEAIRVVRRFSLPDVSRRELPKSAGVFRFPRVSCAAASADDADLDPSIAELPPRPLLERLAKELRRGLGLRLFNLDIIREHGTRDRFYVIDINYFPGYGKMPEYEHVFTDFLLSVVQSQCKKRALADQY

SEQ ID NO: 6570 - protein, 514 aa, Arabidopsis thaliana
  Clone ID: ARATH-23APR03-C4887_1.p
MTTIEFQSCFIFLLLCLFSLVCYSLFFRKPSSRRDAHGCDLPPSPPSLPVIGHLHLILSSLVHKSFQKISSNYGPLLHLRIFNVPIVLVSSASVAYDIFRVHDLNVSSRGSPPFEESLLFGSTGFISAPYGDYFKFMKKHLLMVTKLLGPHALERSRKIRADELYRLYTNLLDKAMKKESVEIGKETMKLTNNTICKMIMGRSCSEENGEAKIVRGLIAESFTLSKKFFLAATLRRLLEKLGISLFQKEIMGVSRGFDELLERILREHEEKPDEHHDTDMMDALLAAYNDEKAEYKITRNQIKAFIVDMFIAGTDISALTTQGTMAEIINNPNVLVRIREKIDSVVGKSRLIQETDLPKLPYSQAVVKEGLRLHPPTPLMVREFQEGCKVKGFYIPASTTLVVNGYAVMRDPNVWEEPEEFKPERFLASSRLREEEEIREQALKYIAFGSGRRGCPGTNIAYIFVGTAIGMMVQCFDWKIKGDKVDMKEAIGGLNLTLAHPLKCTPVARSPKPF

SEQ ID NO: 6571 - protein, 201 aa, Arabidopsis thaliana
  Clone ID: ARATH-23APR03-C49046_1.p
MAMMLLQIPPSSSLLNTRNLQIRFFHSSVSASSKKFRCRAVREKAEDIDKNISPPSSSPPPPSAEEVTKKYGLEVGLWKILSSKDDEGSDGDNKKKKSKTDEAKELLAKYGGAYLATSITLSLISFSLCYVLVTSGVDVQALLLKVGISTNETGEKVGAFALAYAAHKAASPIRFPPTVALTPIVANWIGKKVDKEKDDDK

SEQ ID NO: 6572 - protein, 439 aa, Arabidopsis thaliana
  Clone ID: ARATH-23APR03-C4909_1.p
MASDADMEDYGFEYSDEEQEEQDVDIENQYYNSKGMVETEPEEALSGFAEVVQMEPEKADWGFKALKQTVKIYYRLGKYKEMMEAYTEMLTYIKSAVTRNYSEKCINNIMDFVSGSASQNTGLLQEFYQTTLKALEEAKNERLWFKTNLKLCNIWFDIGEYRRMTKILKELHKSCQKEDGTDDQKKGSQLLEVYAIEIQIYTETKDNKKLKQLYHKALAIKSAIPHPRIMGIIRECGGKMHMAERQWEEAATDFFEAFKNYDEAGNQRRIQCLKYLVLANMLMESEVNPFDGQEAKPYKNDPEILAMTNLIAAYQRNEIIEFERILKSNRRTIMDDPFIRNYMEDLLKKVRTQVLLKLIKPYTKIGIPFISKELNVPETDVTELLVSLILDSRIDGHIDEMNRYLLRGDSGNGRKLHKAVDKWNSQLKSLSSNITSRVC

SEQ ID NO: 6573 - protein, 146 aa, Arabidopsis thaliana
  Clone ID: ARATH-23APR03-C4967_1.p
MGSVQMQTSPESDNDPRYATVTDERKRKRMISNRESARRSRMRKQKQLGDLINEVTLLKNDNAKITEQVDEASKKYIEMESKNNVLRAQASELTDRLRSLNSVLEMVEEISGQALDIPEIPESMQNPWQMPCPMQPIRASADMFDC

SEQ ID NO: 6574 - protein, 345 aa, Arabidopsis thaliana
  Clone ID: ARATH-23APR03-C4983_1.p
MESLPTTVSGKSDRRGRFSKSQNTSKPSLILAFFSCLAWLYVAGRLWQDAQYRAALNTVLKMNYDQRPKVLTVEDKLVVLGCKDLERRIVETEMELAQAKSQGYLKKQKSVSSSGKKMLAVIGVYTGFGSHLKRNKFRGSWMPRDDALKKLEERGVVIRFVIGRSANRGDSLDRKIDEENRATKDFLILENHEEAQEELPKKVKFFYSAAVQNWDAEFYVKVDDNVDLDLEGMIALLESRRSQDGAYIGCMKSGDVITEEGSQWYEPEWWKFGDDKSYFRHATGSLVILSKNLAQYVNINSGLLKTYAFDDTTIGSWMIGVQATYIDDNRLCCSSTRQEKVCSMA

SEQ ID NO: 6575 - protein, 430 aa, Arabidopsis thaliana
  Clone ID: ARATH-23APR03-C4986_1.p
MTNTNTLFLRHDDDSEILIFQENSVFPLFVFASWGIWRAMATFAELVLSTSRCTCPCRSFTRKPLIRPPLSGLRLPGDTKPLFRSGLGRISVSRRFLTAVARAESDQLGDDDHSKGIDRIHNLQNVEDKQKKASQLKKRVIFGIGIGLPVGCVVLAGGWVFTVALASSVFIGSREYFELVRSRGIAKGMTPPPRYVSRVCSVICALMPILTLYFGNIDILVTSAAFVVAIALLVQRGSPRFAQLSSTMFGLFYCGYLPSFWVKLRCGLAAPALNTGIGRTWPILLGGQAHWTVGLVATLISFSGVIATDTFAFLGGKTFGRTPLTSISPKKTWEGTIVGLVGCIAITILLSKYLSWPQSLFSSVAFGFLNFFGSVFGDLTESMIKRDAGVKDSGSLIPGHGGILDRVDSYIFTGALAYSFIKTSLKLYGV

SEQ ID NO: 6576 - protein, 422 aa, Arabidopsis thaliana
  Clone ID: ARATH-23APR03-C5005_1.p
MADLIPFYLNIVAFLCTVGAIALAIFHIYRHLLNYTEPTYQRYIVRIIFMVPVYAFMSFLSLVLPKSSIYFDSIREVYEAWVIYNFLSLCLAWVGGPGSVVLSLSGRSLKPSWSLMTCCFPPLTLDGRFIRRCKQGCLQFVIRKRGLVAVTLVLYAKGKYKDGNFSPDQSYLYLTIIYTISYTVALYALVLFYVACRDLLQPFNPVPKFVIIKSVVFLTYWQGVLVFLSAKSGFIKNAEAAALFQNFIICVEMLIAAACHFYAFPYKEYAGANVGGSGSFSGSLSHAVKLNDFYHDTVHQFAPTYHDYVLYNHQDGGDEGTKKYRSRTFVPTGQEMDAMRKNKPVYANKIDGVSVSSSLSSEASSPKSSSVTSDPARSDAVKSSLLVDASDSLETMYDMSLIDIDLSSFPSNVPSASESGPR

SEQ ID NO: 6577 - protein, 384 aa, Arabidopsis thaliana
  Clone ID: ARATH-23APR03-C5040_1.p
MTCLLLLLLLLLFLFSSADSLTSPSDVSALKAFKATVKPNSIPPWSCLASWDFTVSDPCASPRRTHFTCGITCSSDSTRVTQLTLDPAGYTGRLTPLISGLTELLTLDLAENNFYGLIPSSISSLTSLKTLILRSNSFSGSLPDSVTRLNSLESIDISHNSLTGPLPKTMNSLSNLRQLDLSYNKLTGAIPKLPKNLIDLALKANTLSGPISKDSFTESTQLEIVEIAENSFTGTLGAWFFLLESIQQVDLANNTLTGIEVLPPNLAGENNLVAVELGFNQIRGNAPASFAAYPRLSSLSMRYNVLHGVIPSEYERSKTLRRLYLDGNFLTGKPPARFVRTDAEVMGSLGNNCLQGCPGKAKMCAPSQKPFYICKQAYGGKPKS

SEQ ID NO: 6578 - protein, 447 aa, Arabidopsis thaliana
  Clone ID: ARATH-23APR03-C5041_1.p
MRKLYRKLVSFRDPFARVKRHVSSHSGFRAFSDRKWLFPFLASLIMSITLLILLISGQFDNFFGEEDQLPVDVVSESNDYFVESDFKQSMNSTADVNPEPPRLAYLISGTKGDSHRMMRTLQAVYHPRNQYVLHLDLEAPPRERMELAMSVKTDPTFREMENVRVMAQSNLVTYKGPTMIACTLQAVSILLRESLHWDWFLNLSASDYPLVTQDDLLYVFSNLSRNVNFIENMQLTGWKLNQRAKSIIVDPALYLSKKSDIAWTTQRRSLPNSFRLFTGSAWIMLTRSFLEYCIWGWDNFPRTILMYYTNFVSSPEGYFHTVICNSKEFINTAIGHDLHYIAWDSPPKQHPRSLSLKDFDNMVKSKAPFARKFHKNDPALDKIDKELLGRTHRFAPGGWCVGSSANGNDQCSVQGDDSVLKPGPGSERLQELVQTLSSEEFRRKQCS

SEQ ID NO: 6579 - protein, 314 aa, Arabidopsis thaliana
  unsure (1)..(314): unsure at all Xaa locations
  Clone ID: ARATH-23APR03-C5054_1.p
MSSHKVLLRHFWISILIMYLYTIITDGLPLPDRQDVFTPWFVTTILDFYINLVPIAVWIVYKESTWSGSILWTILLIIFGSLTTCVYLFLQLLKLTNQEASEDPMYYLLLRDSIKDGVGLRDKNSLVVTARFVFGALGCVMLGALVYTCFTYGSPFHMELLYPWMVVLLVNFYIDVAVLSVWVVYKESSLIIGILWVALLIGLGSVGTSAVIVVQLFRLSPLDPLYLVLXTTAIAKLKVKAKLVNSLMGQWQGWRYVRAHSFCGFAYNVKLCHFIFNILPQKFKTYFYLHFKFVCFIVFFCIYFLLCDDNYLCT

SEQ ID NO: 6580 - protein, 292 aa, Arabidopsis thaliana
  Clone ID: ARATH-23APR03-C5056_1.p
MKDRENDGNLESRIFVGGLSWDVTERQLESTFDRYGKITECQIMVGRDTGRPRGFGFITFTDRRGADDAIKHMHGRELGNKVISVNKAEPKVGGEDVDQLKKGGGYSSRGKGTEDECFKCRRPGHWARDCPSTGDDRERFRVPLAMRSRIGDIDGHRDRYGDRDLEREREREREFDRYMDGRRDRDGGRYSYRDRFDSGDKYEPRDHYPFERYAPPGDRFVSDRYGMPEHHLENEYRGRERSYDRDRYARDTSDRYGDMGPIRDEGRPYRSRPGPYDRPSRPGGRPSSYERW

SEQ ID NO: 6581 - protein, 457 aa, Arabidopsis thaliana
  Clone ID: ARATH-23APR03-C5060_1.p
MQSSHRILSRLLHSPRKGYIRASVGGSVHFLALFDEKDNGFVDTTHRSFSSLIRSSSHVRGLISTNCLNKGLGVRCSVSLDRETPLIDTYSSHRNFFTRAKQVKRIEINDQHSQRAVTTALWCNFLVFSLKFGVWWTSSSHVIMAEVVHSVADFANQALLAYGLSSSRRAPDALHPYGYSKERFVWSLISAVGIFCLGSGATIVNGVQNLWTSSPPPNMELAAVVIGGSFLIEGASLLVAIQSVKKGAAQEGMTIRDYIWRGHDPTSVAVMTEDGAAVAGLAIAAASLVAVRMTGNPIYDPIGSIVVGNLLGMVAIFLIQRNRHALIGRAMDDQDMSKVLKFLRNDSVVDSLYDCKSEVIGPGSFRFKAEIDFNGQMVVQNYLKRTGREEWAKMFREAAKNGDDSAMLNIMSNYGEEVVTALGSEVDRLEKEIQELVPGIQHVDIEAHNPTPTDPSL

SEQ ID NO: 6582 - protein, 597 aa, Arabidopsis thaliana
  unsure (1)..(597): unsure at all Xaa locations
  Clone ID: ARATH-23APR03-C5068_1.p
MDDYFSAEEEACYYSSDQDSFDGIDNEESELQPLSSKRSNTQVITQESLLAAQREDLLRVMELLSIKEHHARTLLIHYQWDVEKLFAVFVEKGKDSLFSGAGVTVFDYQYGNSSFPQSSQMSCDVCMEDLPGDHMTRMDCGHCFCNNCWTEHFTVQINEGQSKRIRCMAHQCNAICDEDIVRSLVSKKRPDLAAKFDRYLLESYIEDNRMVKWCPSTPHCGNAIRAEDDKLCEVECSCXLQFCFSCLCQAHSPCSCLMWELWRKKCRDESETINWITVHTKLCPKCYKPVEKNGGCNLVRCICGQCFCWLCGGATGSDHTYRSIAGHSCGRYQDDKEKQMERAKRDLNRYTHYHHRYKAHTDSSKLEDKLRDTIHEKVSKSEKRELKLKDFSWVTNGLDRLFRSRRVLSYSYAFAYYMFGEEMFKDEMTPEEREIKKNLFEDQQQQLESNVEKLSQFLEEPFDEFSNDKVMAIRIQIINLSVAVDTLCKKMYECIENDLLGSLQLGIHNISPYRSKGIEQAAQFYASWNSKDADKFQPLDSGTSGVTSRPEQASGSRSSEDTICSSSQKRPKKEGSFLNNKVTLLDLNLPADFVDQN

SEQ ID NO: 6583 - protein, 492 aa, Arabidopsis thaliana
  Clone ID: ARATH-23APR03-C5071_1.p
MATEDDGELSARYQNTLDALSSLITKRGRLASNNQSHRFRLLFHYLKVLELEDAVSQMKIIHVAGTKGKGSTCTFAESILRCYGLRTGLFTSPHLIDVRERFRLNGIEISQEKFVNYFWCCFHKLKEKTSNEVPMPTYFCFLALLAFKIFTTEQVDVVILEVGLGGRFDATNVIQKPVVCGISSLGYDHMEILGYTLAEIAAEKAGIFKSGVPAFTVAQPDEAMRVLNEKASKLEVNLQVVEPLDSSQRLGLQGEHQYLNAGLAVALCSTFLKEIGIEDKNGLDQTNGLPEKFISGLSNAYLMGRAMIVPDSELPEEIVYYLDGAHSPESMEACAIWFSKQIKQNQERNQKRSEQILLFNCMSVRDPSLLLPRLRSKCIDQGVDFKRAVFVPNVSVYNQVGSSTNVGTRVESMSWQFGLQRIWESLARGEAKSNSKSDSKGKEEEKSFVFSSLPVAVDWLRDNARQSKQVRFQVLVTGSLHLVGDLLRFIKK

SEQ ID NO: 6584 - protein, 234 aa, Arabidopsis thaliana
  Clone ID: ARATH-23APR03-C5084_1.p
MATSLSVSRFMSSSATVISVAKPLLSPTVSFTAPLSFTRSLAPNLSLKFRNRRTNSASATTRSFATTPVTASISVGDKLPDSTLSYLDPSTGDVKTVTVSSLTAGKKTILFAVPGAFTPTCSQKHVPGFVSKAGELRSKGIDVIACISVNDAFVMEAWRKDLGINDEVMLLSDGNGEFTGKLGVELDLRDKPVGLGVRSRRYAILADDGVVKVLNLEEGGAFTNSSAEDMLKAL

SEQ ID NO: 6585 - protein, 263 aa, Arabidopsis thaliana
  Clone ID: ARATH-23APR03-C5128_1.p
MKTLVVKCFLLLALVCSCRAADSIWQLCNTNSNISASSQVSKNIDSLLATLVSKTPSKGFKTTTSSSYNNKEKVYGLAQCRGDISNTDCSTCIQDAAKKIREVCQNQSDSRILYDFCFLRYSQENFIGKLDTGAGLIYFNVANVTEIDPKKFDNELGALFDKIRSEAVLPKNKGLGKGKTKLTPFVTLNGLVQCTRDLSELDCAQCFATAVGSFMTTCHNKKGCRVLYSSCYVRYEFYPFYFPLDPAKTGPSVGRISSVHLSP

SEQ ID NO: 6586 - protein, 460 aa, Arabidopsis thaliana
  Clone ID: ARATH-23APR03-C5146_1.p
MFAKEKTIMEEDRVRFICKRTVVSTRSIEPGRLYQLSVLDHVMEPNHIRLVYYYRCSKTREPGEITKKLRESLAYTLNCYPIVTGRLVKEVDGMEENKDLSQRWMVKSNDAGVGMVEARATGSVKEWLRSVNREEELKLVHWEDMYHLQYYWSTFCVQVTEFESGGLAIGLSCSHLLADPVCAMMFIRAWADLTLSRSMMAPPLFHPLPPRRFSNQRLISNNQLLSHYIKSCSLTASPSNMTEDHMVTVTFLFPDPLVRAGENEPRISTFEILAGLFWVCVSRAKGKRNELMDMSLCLDVRKLLRLDQSYFGNCMVYHKVPYSKPVKTKDKLLFHAVQEIESITKRLDYDTVMDLIEWLSSNNGAISNGSDLVCTNLENMSHSRPMMFEEDLALSHVSCYVEGPVAGGGQVIVLPSPPGKEPMSRVVMVSLPQRVMVKVIEDELLLSFSPVVIMEDTKQL

SEQ ID NO: 6587 - protein, 235 aa, Arabidopsis thaliana
  Clone ID: ARATH-23APR03-C5149_1.p
MSNVLLSPNGYVFASPKPLGRFINSKSGGRKLFFSVVRASSDDADCNAEECAPEKEVGTVSMEWLAGEKTKVVGTFPPRKPRGWTGYVEKDTAGQTNVYSIEPAVYVAESAISSGTAGSSADGAENTAAIVAGIALIAVAAASSILLQVGKDAPTRPKAVDYSGPSLSYYINKFKPSEIVQPSTPSVTEAPPVAELETSLPETPSVAQQETSLPETMASEAQPEASSVPTTSSTS

SEQ ID NO: 6588 - protein, 716 aa, Arabidopsis thaliana
  Clone ID: ARATH-23APR03-C5183_1.p
MNSVSVTLAFHVTSDCSAVNQCRINVKCLVSCMRVSKQAMHELWMPGFGNSHLRSDHKPFYLIRALVMGLPQTASSEQSQEALSTPSCSLSQSLPVYATSHDSDVLNSGSEEGICSSIAEFDRKTSLEPLEFTDDSCRFRGTCVVTSSSAHGSTSYAAGKVSSSLTGARRIVGFASGETSSLDNKQTSVAVDHSLSSTVGVAGVDIGGALVRKRVLSPLNTLFPVKFRGDLHDISCGNHQQITYSGQSNGFCNSVAQDHIKANTPSRLHLSTTPTTTSCWEWKNVSNSGRLSSMVFTDGPLLDSVDLRQPVKGGEVCLYSPLYETSSTPNKPLPCDKEISVSPPLCLSPLGPKFSERVKAVRSCQTGKILEDLRNISEEAELRVDRRLFDDAYAIRRAFSMERSTESAPASPCKRFIRSLSGRPIQRSLVGSFEESLLTGRLSCGPTNQKIDGFLAVLSIAGGNISPKSQKLPFSVTSAGDDCLLLYYASIDLAGGSKLNKFWGQKVKTSQMNSDAQSSKSQLRIPMKGRIQLVLSNPEKTPLHTFLCNYDLTDMPAGTKTFLRQKVTLGSSNPTSEATQENTRKATSLEKENSKHGDKESCEGSDSVDSVEGDVLHESGKICLKPSKECNGGSGALRYALHLRFLCPLPKKSSKKSEETESTGQKKNLDSDGKRRFYLYNDLRVVFPQRHTDSDEGKLNVEYHYPENPRYFDITE

SEQ ID NO: 6589 - protein, 301 aa, Arabidopsis thaliana
  unsure (1)..(301): unsure at all Xaa locations
  Clone ID: ARATH-23APR03-C5203_1.p
MFYQSSSSLIEPSKTRIGWIGIGIMGSAMVSHILAAVYSVTVYARDLRKTKDLQTKGGRTANSPKELGEMSDVVSTIVGNSNDVRXLLLGDDGVLSGLKPGGVTVDMTSSKPGLARLAREIHAEARRRNCWAVDAPVSGGDAGAREGTLGIFAGGDSEIVEWLSPVMKNIGTVTYMGEAGSGQSCKIGNQIAGASNLVGLAEGIVFAEKAGLDTVKWLEAVKDGAAGSAVMRLFGEMMVKRDYRATGFAEYMVKDLGMAAEAAMPGAALSKQLFTGMVANGDGKLGIQGVVSVIRRLNGIS

SEQ ID NO: 6590 - protein, 924 aa, Arabidopsis thaliana
  Clone ID: ARATH-23APR03-C5208_1.p
MNELRGRKAQKIESPVPGCLGKMVNLFDLGIAVNGNKLLTDKPHLDGSSLSRSRSDVTRMPGPSYKGHSEAELIMSDLRRSASSKLSGTPMKKLIAREMSKEVEHKQSPTNVVAKLMGLETLPQTHQETATQRSKSRSNSHSSLNHSMTSTDNEVQKYQDFSREFKDVYETWQSPQKVSRSRDCSPRKGRYDESTTEKQMALVRQKFSEAKRLVTDDSLHQSKEFQDALEVLSSNKDLFVQFLQESNSFSQQNLSDFHHVPPHSEAKRITVLRPSKAGETEKYVVQGRRNKQVKKLASSSQETGWGNRDLGYPSPYVNRGTEEHTVQPTRIVVLKPSLGKSLDIKAVSSSQSSPRGLHSRGYFDEPEDVETKEVAKEITRQVRENLMGHHRNETQSSSVLSNGYIGDDSSFNKSDNEDLVGNLSDSEIMSPASRHSWDCPNRFDSLFSPSSFSRASFSPESSVCREAKKRLSERWALMSVSGRTQPLKHVSRTSSTLGEMLALTETKVTTESGEGSYEIVPATRVSTSCITSDLSQVEMASDSLNILARSKSVSDVRLNGETSVLGSSKVQAPRELTKTGSLKSSWKVSNLFFFKNNKASKEKRDASQCSSMSQLAAPSPVTLTGKTSEDCVFPIDCLPPVSSEQQSIILGEEEVTTPKPLATGNTSENQDQPSPISVLFPPFEEECASIPECSGSTKHWSSQGDEMSLKSNLIDKSPPIGSIARLLSWDDDSCTDNIAKPAMGVHEEEDWHLFIEMILTAAGFSSGCIVSHDPIMSRWHMPNSPLDPSLRDKYTNPDNNNIKEFIHEGKRRQQRSTRKLIFDRINSIVSETTTTRTGNGSLHFDLVEHVWAQLKDWVSDEPSKRDSGEDMDANSLAAESLVKDEIVGRTWTHSLQVEIDDFGIEIEKRLLQELVEEAVIDLTR

SEQ ID NO: 6591 - protein, 79 aa, Arabidopsis thaliana
  Clone ID: ARATH-23APR03-C52449_1.p
MSKKNNLAKRKKQHEYNLQKEKELQDKKIKKLHANKNKMKVDGSGKKKKGGFSVGKKKLKTKLTPTAKAKAAQAMELDN

SEQ ID NO: 6592 - protein, 621 aa, Arabidopsis thaliana
  Clone ID: ARATH-23APR03-C5279_1.p
MGSKHNPPGNNRSRSTLSLLVVVGLCCFFYLLGAWQKSGFGKGDSIAMEITKQAQCTDIVTDLDFEPHHNTVKIPHKADPKPVSFKPCDVKLKDYTPCQEQDRAMKFPRENMIYRERHCPPDNEKLRCLVPAPKGYMTPFPWPKSRDYVHYANAPFKSLTVEKAGQNWVQFQGNVFKFPGGGTMFPQGADAYIEELASVIPIKDGSVRTALDTGCGVASWGAYMLKRNVLTMSFAPRDNHEAQVQFALERGVPAIIAVLGSILLPYPARAFDMAQCSRCLIPWTANEGTYLMEVDRVLRPGGYWVLSGPPINWKTWHKTWNRTKAELNAEQKRIEGIAESLCWEKKYEKGDIAIFRKKINDRSCDRSTPVDTCKRKDTDDVWYKEIETCVTPFPKVSNEEEVAGGKLKKFPERLFAVPPSISKGLINGVDEESYQEDINLWKKRVTGYKRINRLIGSTRYRNVMDMNAGLGGFAAALESPKSWVMNVIPTINKNTLSVVYERGLIGIYHDWCEGFSTYPRTYDFIHASGVFSLYQHSCKLEDILLETDRILRPEGIVIFRDEVDVLNDVRKIVDGMRWDTKLMDHEDGPLVPEKILVATKQYWVAGDDGNNSPSSSNSEEE

SEQ ID NO: 6593 - protein, 497 aa, Arabidopsis thaliana
  Clone ID: ARATH-23APR03-C52_1.p
MDRWSSKRAMEARPDSKKKGGVVFRDRFNSNSCKVPICSDEKKSMNFTRFVGSSDKKEKSVLSTYRSSPNGKEVIGTSSKICISSSSSVKSGEKQPFSQIAIDSSESSRGSEDEVESEILQVPLGRDKRRMNNKLIYGKVITPEAECSKLPSSSRIKRGFRQRFGLSKQEFHPGPSGQSTSANRGCSPLLSGVIPSGFGLDKRLSRKADTISKTKVYGESSSSSSARGKNVTEPPPVEVRRRSFNPRGSVSDSRRARHCILDDDNDVASVGSQRLANRNNSRIRGSGRDGLSSVTAAEMSQTETSNNLNSPVSLELFSGFPEFGLSGSLLSHDSFRSYNLDGISEILPELDRIEQDIELNYEDLLIMETGLLLGGLSFHDQHRDMRLDIDNMSYEELLALEERIGTVSTALTEEAISKCLKTSIYQMKPLSYGSITKSPSDNKEDAKCSICQEEYTIGDEVGRLHCEHTYHVKCVQEWLRMKSWCPICKATAETSSK

SEQ ID NO: 6594 - protein, 735 aa, Arabidopsis thaliana
  Clone ID: ARATH-23APR03-C5300_1.p
MKPTTNGGLLASQSSSSFSFPRFRGQLPIIFSANNNQKKKNLPNPNVVTLCLHSHSNVSSSQIAVTRRAILVAPPLLAAAASLFLSISSAASAETSAESVALPPVATAPPPPPVEKEEAITSRIYDASVLGEPMAVGKDKKRVWEKLLNARIVYLGEAEQVPTRDDKVLELEIVRNLRKRCIESDRQLSLALEAFPLDLQEQLNQYMDKRMDGEVLKSYVSHWPVQRWQEYEPLLSYCRDNGVKLIACGTPLKVLRTVQAEGIRGLSESERKLYTPPAGSGFISGFTSFSRSSSLNMNPLTQIVPFGPSSYLSAQARVVEDHTMSQVIVQAVADGGGTGMLVVVTGANHVEYGSRGTGLPARISRKIPKKSQLVVLLDPERQFLRKEGESPVADFLWYSAARPCSRNCFDRAEIARVMNAAGRRRDALPQDIQKGLDLGLVSPEILQNFFDLEQYPLISELTQRFQGFRERLLADPKFLNRLAIEEAISITTTLVAQYEKRKENFFEELDYVITDSVRASVVDFFTVWLPAPTLSFISYADETIGPNSIDALRGLLGSIPDNAFQKSLGGQEWTLSLRIASVIIGGLKLAGVGVVSSFAAVGSSNALYAIRKFIKPELGVGEQAKRSPMLKTALVYGGYLGTSSNIRYQIIAGLIEHRISDELSSQPLLVNMISFVVRVANSYFGTQQWIDLARSTGLQTQKSVTTSNQIPEVASQSTVEYSTTEEASMDDLKNQ

SEQ ID NO: 6595 - protein, 111 aa, Arabidopsis thaliana
  Clone ID: ARATH-23APR03-C5302_1.p
MAPRTPLALFVSLNLLFFTYTSATTGTCPKNSIEIGTCVTVLNLVDLTLGNPPVKPCCSLIQGLADLEAAACLCTALKASILGIVNINLPINLSVLLNVCSRNAPKSFQCA

SEQ ID NO: 6596 - protein, 257 aa, Arabidopsis thaliana
  Clone ID: ARATH-23APR03-C535_1.p
MALEALNSPRLVEDPLRFNGVEQWTKCKKRSKRSRSDLHHNHRLTEEEYLAFCLMLLARDGGDLDSVTVEEKPSYKCGVCYKTFSSYQALGGKRSKRSRSDLHHNHRLTEEEYLAFCLMLLARDGGDLDSVTVAEKPSYKCGVCYKTFSSYQALGGHKASHRSLYGGGENDKSTPSTAVKSHVCSVCGKSFATGQALGGHKRCHYDGGVSNSEGVGSTSHVSSSSHRGFDLNIIPVQGFSPDDEVMSPMATKKPRLK

SEQ ID NO: 6597 - protein, 305 aa, Arabidopsis thaliana
  Clone ID: ARATH-23APR03-C537_1.p
MTQKLFIQYSLRSYIVFWKYDQITPWFVHKYQAPTIQFFPFPLLISLISLLEKLLAIMLSTAPAFSFSEPGLVNQFSGFQTGFTPWEWDCSDLFFVDQMSLEPAIPSPCYGESDTGSVKINSGSHDMKTGSDESCAGFVKINPRCDDADISNDLPCSQADEPDSDDTKQLTAITNFGSGENNHNRKKMIQPEMTDERKRKRMESNRESAKRSRMRKQSHIDNLREQVNRLDLENRELGNRLRLVLHQLQRVNSDNNRLVTEQEILRLRLSEMRRILIIRQLQQQQQWELHNRRMIMTEQNHPHLQ

SEQ ID NO: 6598 - protein, 309 aa, Arabidopsis thaliana
  Clone ID: ARATH-23APR03-C5415_1.p
MAGFTLLPSRLLAFPSRALPRRLHHHHAKLILRCKMSSSSSSLTQSITLPSQPNEPVLVSATAGISSSDFRDAIDSSLFRNWLRNLESESGILADGSMTLKQVLIQGVDMFGKRIGFLKFKADIFDKETGQKVPGIVFARGPAVAVLILLESDGETYAVLTEQVRVPTGKIVLELPAGMLDDDKGDFVGTAVREVEEEIGIKLKKEDMVDLTAFLDPSTGYRIFPSPGGCDEEMSVFLYRGQVEKETIRQLQGKETGLREHGEFIKVRLIPYRELWRKTADAKVLMSIGLYEMAQREGLVSSQRLKPNS

SEQ ID NO: 6599 - protein, 609 aa, Arabidopsis thaliana
  Clone ID: ARATH-23APR03-C5427_1.p
MIPSYDPNDTEAGLKLLEDLTTNAEAIQQQVLHQILSQNSGTQYLRAFLDGEADKNQQSFKNKVPVVNYDDVKPFIQRIADGESSDIVSAQPITELLTSSGTSAGKPKLMPSTAEELERKTFFYSMLVPIMNKYVDGLDEGKGMYLLFIKPEIKTPSGLMARPVLTSYYKSQHFRNRPFNKYNVYTSPDQTILCQDSKQSMYCQLLCGLVQRSHVLRVGAVFASAFLRAVKFLEDHYKELCADIRTGTVTSWITDSSCRDSVLSILNGPNQELADEIESECAEKSWEGILRRIWPKAKYVEVIVTGSMAQYIPTLEFYSGGLPLVSTMYASSECYFGINLNPLCDPADVSYTLLPNMAYFEFLPVDDKSHEEIHFATHSNTDDDDDALKEDLIVNLVNVEVGQYYEIVITTFTGLYRYRVGDILKVTGFHNKAPQFRFVQRRNVVLSIDTDKTSEEDLLNAVTQAKLNHLQHPSSLLLTEYTSYADTSSIPGHYVLFWELKPRHSNDPPKLDDKTMEDCCSEVEDCLDYVYRRCRNRDKSIGPLEIRVVSLGTFDSLMDFCVSQGSSLNQYKTPRCVKSGGALEILDSRVIGRFFSKRVPQWEPLGLDS

SEQ ID NO: 6600 - protein, 152 aa, Arabidopsis thaliana
  Clone ID: ARATH-23APR03-C5457_1.p
MPLKRSGSYGCETLFSCCGRLQHHFEDQGDRSKMEKGKGRKEEVVTREYTINLHRRLHSCTFKKKAPNAIKEIRKFALKAMGTKDVRVDVKLNKQIWSKGIRGPPRRIRVRVARKRNDDEDAKEEFFSLVTVAEIPAEGLSGLGTKVIEEEE

SEQ ID NO: 6601 - protein, 351 aa, Arabidopsis thaliana
  Clone ID: ARATH-23APR03-C5466_1.p
MGSDRDGAPPENTKREVEDRDIRRKSSREKPSGSGKDSGEEKDVSRRRESKRRTKDGNDSGSESGLESGSESEKEERRRSRKDRGKRKSDRKSSRSRRRRRDYSSSSSDSESESESEYSDSEESESEDERRRRKRKRKEREEEEKERKRRRREKDKKKRNKSDKDGDKKRKEKKKKKSEKVKKGAVTESWGKYGIIRETDMWNKRPEFTAWLLEVKKVNLESLPPWEEKKMFKDFMEDHNTGTFTSKKYYDIDGYYRLKLEKEMKKGLKKAGISERTVFNDEEQRRLEMQELRERQKEEEVLALKRSMEGGMAQAMKEQARLKEEMVYLYKIGDMEGAAAIQRRLDPDVPM

SEQ ID NO: 6602 - protein, 299 aa, Arabidopsis thaliana
  Clone ID: ARATH-23APR03-C5473_1.p
MPVETRRLSSWFLISKYMEVLWIRWRIAIVREEKDDRSKETMKIFHVPCLQDNYSYLIIDESTGDAAVVDPVDPEKVIASAEKHQAKIKFVLTTHHHWDHAGGNEKIKQLVPDIKVYGGSLDKVKGCTDAVDNGDKLTLGQDINILALHTPCHTKGHISYYVNGKEGENPAVFTGDTLFVAGCGKFFEGTAEQMYQSLCVTLAALPKPTQVYCGHEYTVKNLEFALTVEPNNGKIQQKLAWARQQRQADLPTIPSTLEEELETNPFMRVDKPEIQEKLGCKSPIDTMREVRNKKDQWRG

SEQ ID NO: 6603 - protein, 465 aa, Arabidopsis thaliana
  Clone ID: ARATH-23APR03-C5533_1.p
MGIMMMILGLLVIIVCLCTALLRWNQMRYSKKGLPPGTMGWPIFGETTEFLKQGPDFMKNQRLRYGSFFKSHILGCPTIVSMDAELNRYILMNESKGLVAGYPQSMLDILGTCNIAAVHGPSHRLMRGSLLSLISPTMMKDHLLPKIDDFMRNYLCGWDDLETVDIQEKTKHMAFLSSLLQIAETLKKPEVEEYRTEFFKLVVGTLSVPIDIPGTNYRSGVQARNNIDRLLTELMQERKESGETFTDMLGYLMKKEDNRYLLTDKEIRDQVVTILYSGYETVSTTSMMALKYLHDHPKALEELRREHLAIRERKRPDEPLTLDDIKSMKFTRAVIFETSRLATIVNGVLRKTTHDLELNGYLIPKGWRIYVYTREINYDTSLYEDPMIFNPWRWMEKSLESKSYFLLFGGGVRLCPGKELGISEVSSFLHYFVTKYRWEENGEDKLMVFPRVSAPKGYHLKCSPY

SEQ ID NO: 6604 - protein, 361 aa, Arabidopsis thaliana
  Clone ID: ARATH-23APR03-C5543_1.p
MALEEEEESQNAPFCVLDGLFCEEESEFHEQVDLCDESVEKFPFLNLGLSDHDMLWDDDELSTLISKQEPCLYDEILDDEFLVLCREKALDWIFKVKSHYGFNSLTALLAVNYFDRFITSRKFQTDKPWMSQLTALACLSLAAKVEEIRVPFLLDFQVEEARYVFEAKTIQRMELLVLSTLDWRMHPVTPISFFDHIIRRYSFKSHHQLEFLSRCESLLLSIIPDSRFLSFSPSVLATAIMVSVIRDLKMCDEAVYQSQLMTLLKVDSEKVNKCYELVLDHSPSKKRMMNWMQQPASPIGVFDASFSSDSSNESWVVSASASVSSSPSSEPLLKRRRVQEQQMRLSSINRMFFDVLSSSPR

SEQ ID NO: 6605 - protein, 415 aa, Arabidopsis thaliana
  unsure (1)..(415): unsure at all Xaa locations
  Clone ID: ARATH-23APR03-C5545_1.p
MDAMRKQLDVLMGANRNGDVTEVNRKYYDRDVCRLYLSGLCPHELFQLTKMDMGPCPKVHSLQLRKEYREARAKGVDNYDRELEDAIDRLIVECDRKIGRALKRLQEEDAKAAIAISVSEVTQSPEILELSEKIKEKMKEADIHDLEGKMDLKIRALELVEEMRTKRADQQAVLLLEAFNKDRASLPQPVPAQPPSSELPPPDPRTQEMINEKLKKAEELGEQGMVDEAQKALEEAEALKKLTARQEPVVDSTKYTAADVRITDQKLRLCDICGAFLSVYDSDRRLADHFGGKLHLGYMLIRDKLAELQEEKNKVHKERVEERRSKERSRERESSKDRDGGDNRDRGRDVDRRSRDRDRHHDHREHDRNYNQSRGYDSRSRRSSRPRXRERPRDHGPGRGKDRGYYDRHRRHNRY

SEQ ID NO: 6606 - protein, 140 aa, Arabidopsis thaliana
  Clone ID: ARATH-23APR03-C5573_1.p
MMNIDDTTSPMAHPIGPSQPPSDQTKQDPPSLPQEAASSVSADKKDLALLEEKPKQSQEEDRVDTGRERLKKHRREIAGRVWIPEIWGQEELLKDWIDCSTFDTCLVPAGISSARTALVEEARRAASASGGLHNRCLILR

SEQ ID NO: 6607 - protein, 126 aa, Arabidopsis thaliana
  Clone ID: ARATH-23APR03-C55755_1.p
MSQMDPDAVSKAFVEHYYSTFDTNRVGLAGLYQEASMLTFEGQKIQGVQSIVAKLTSLPFQQCKHHISTVDCQPSGPASGMLVFVSGNLQLAGEEHALKFSQMFHLMPTPQGSFYVFNDIFRLNYA

SEQ ID NO: 6608 - protein, 515 aa, Arabidopsis thaliana
  Clone ID: ARATH-23APR03-C5579_1.p
MLATHALVTPIPKLTAFVLSLSTTPSRLSGSVPGLIDFYRRRRFCRVITSMAEAGSVYVDVAGESKSEHVTGKWFSVPELRLRDHRFIVPLDYSKSSPKITVFAREIVAVGKEEQAMPYLLYLQGGPGFEGPRPSEASGWIQRACEEFRVVLLDQRGTGLSTPLTCSSMLQFKSAKELADYLVHFRADNIVKDAEFIRVRLVPKADPWTILGQSFGGFCALTYLSFAPEGLKQVLITGGIPPIGKACTADDVYEAGFEQVARQNEKYYKRFPQDIEIVRELVNYLAESEGGGVPLPSGGILTPKGLQTLGLSGLGSSTGFERLHYMLERVWDPILVTGAPKCISQFFLNAFESWHSFDTNPLYALLHEAIYCEGASSGWSAHRLRDKYEYKFDAMKAVKESQPVLFTGEMIFPWMFDEIHALKPFKAAADLLAKKEDWPPLYDVPRLQNNKVPVAAAVYYEDMYVNFKLVTETASHISGIRLWVTNEFMHSGLRDAGRQIIDHLLGMINGKKPLF

SEQ ID NO: 6609 - protein, 417 aa, Arabidopsis thaliana
  Clone ID: ARATH-23APR03-C5605_1.p
MSNSKSYWRKQRWGTPPQALTPLMEGPDPDMQDERTKKESSWEAIREWFKVHKGISGNMSSPSVQPLCNSYDVPAKGQDLRLLLGVLGCPLAPISVVVSDLFPDDPLLGSFQIKNVPFETSTAHYIIQQYLAATGCLKRAKAAKNMYATGIMKMSCCETEIAAGKSVKTLGGGGNGRSGDSGCFVLWQMQPGMWSLELVLGGTKLISGSDGKTVWRHTPWLGTHAAKGPQRPLRRLIQGLDPKTTASLFAKAQCLGERRIGDDDCFVLKVSADRDSLLERNDAGAPAEVIRHALYGYFCQKSGLLVYLEDSHLTRVMTISPEDEAVYWETTIGTSIGDYRDVDGVAVAHCGRAVATVFRFGETSLQYSRTRMEEIWRIDDVVFDVPGLSLDSFIPPADIFEDTNPNNNNIYSIVNSR

SEQ ID NO: 6610 - protein, 909 aa, Arabidopsis thaliana
  unsure (1)..(909): unsure at all Xaa locations
  Clone ID: ARATH-23APR03-C5611_1.p
MPTAVNVAKQCLTAEASYALEEAVNVARRRGHSQTTSLHAISALLSLPTSVLRDACARVRNSAYSPRLQFKALDLCLSVSLDRIQSGHQLGSDDSPPVSNSLMAAIKRSQAHQRRLPENFRIYQEMSQSQNQNSLSCVKVELRQLILSILDDPVVSRVFGEAGFRSSELKLSIIRPVPHLLRYSSQQPLFLCNLTGNPEPNPVRWGFTVPSLNFNGDLDYRRISAVFTKDKGRNPLLVGVSAYGVLTSYLNSLEKNQTDGMILPTKLHGLTAVNIGSEISDQISVKFDKTYTDTRFHDLGKLAEQGSGPGLLLHYGDLRVFTNGEGNVPAANYIVNRISELLRRHGRRVWLIGATTSNEVYEKMMRRFPNVEKDWDLQLLTITSLKPCLPHNKSSLIGSFVPFGGFFSTTPSELKLPFSGFKTEITGPVSSISDQTQSTLPPWLQMTTRTDLNQKSSAKCXTKEGLESVCGNKFTSSASASTCSAKSVTTDLNLRVSSVTTGSGLKKHLDSKDFSQPQSVSSYSFDNPRDLNAESFKIIYRRLTDMVSGQDEAARVISCALSQPPKSVTRRDVWLNLVGPDTVGKRRMSLVLAEIVYQSEHRFMAVDLGAAEQGMGGCDDPMRLRGKTMVDHIFEVMCRNPFCVVFLENIEKADEKLQMSLSKAIETGKFMDSHGREVGIGNTIFVMTSSSQGSATTTSYSEDPRFRTAARRRQKGIETVSSLPMVRSVYGPTSVNKRKLMGLGNLQETKDTVESVKRLNRTTNGVLDLNLPAQETEIEEKYHCEENSNVWLMNLKNHKRLIEVPFKPFDFEGLAEKIKKSVKENFDKCVRSDCLLEVDPKIIERLLAAVYFSDSRKDIKELLENIMSPVFLRIKERYEITTSCVVKLVGRDLDIFLEDQMDLFFVKSQ

SEQ ID NO: 6611 - protein, 231 aa, Arabidopsis thaliana
  Clone ID: ARATH-23APR03-C5634_1.p
MSNPRVFFDMSLSGTPIGRSESALYAVTPHYRHRFTNPNLPSSLSQSSSSISLFQISQKMSNPRVFFDMSLSGTPIGRIEMELFADTTPNTAENFRALCTGEKGMGKLGKPLHFKGSIFHRVIPGFMCQGGDFTAKNGTGGESIYGAKFKDENFIKKHTGAGILSMANSGPNTNGSQFFICTDKTSWLDGKHVVFGQVVKGLDVVKAIEKVGSDSGKTSKVVTITDCGQLS

SEQ ID NO: 6612 - protein, 802 aa, Arabidopsis thaliana
  Clone ID: ARATH-23APR03-C5651_1.p
MMMDEDVEQASLMSFNDRPRAFPNMRSKTYSPLIFRIIRKLNVRVLSIILLFCFGAIFYMGASTSPIIVFVFTVCIISFLLSIYLTKWVLAKDEGPPEMVEISDAIRDGAEGFFRTQYSTISKMAILLAFVILCIYLFRSLTPQQEAAGLGRAMSAYITVAAFLLGALCSGIAGYVGMWVSVRANVRVSSAARRSAREALQIAVRAGGFSALVVVGMAVIGIAILYSTFYVWLGVGSPGSMNVTDLPLLLVGYGFGASFVALFAQLGGGIYTKGADVGADLVGKVEQGIPEDDPRNPAVIADLVGDNVGDCAARGADLFESIAAEIISAMILGGTMAKKCKIEDPSGFILFPLVVHSFDLIISSIGILSIKGTRDASVKSPVEDPMAVLQKGYSLTIILAVITFGASTRWLLYTEQAPSAWFNFALCGLVGIITAYIFVWISKYYTDYKHEPVRTLALASSTGHGTNIIAGVSLGLESTALPVLTISVAIISAYWLGNTSGLVDENGIPTGGLFGTAVATMGMLSTAAYVLTMDMFGPIADNAGGIVEMSQQPESVREITDLLDAVGNTTKATTKGFAIGSAALASFLLFSAYMDEVSAFANVSFKEVDIAIPEVFVGGLLGAMLIFLFSAWACAAVGRTAQEVVNEVRRQFIERPGIMEYKEKPDYSRCVAIVASAALREMIKPGALAIASPIVVGLVFRILGYYTGQPLLGAKVVASMLMFATVCGILMALFLNTAGGAWDNAKKYIETGALGGKGSEAHKAAVTGDTVGDPFKDTAGPSIHVLIKMLATITLVMAPVFL

SEQ ID NO: 6613 - protein, 745 aa, Arabidopsis thaliana
  Clone ID: ARATH-23APR03-C5661_1.p
MAVRATVSRFPIDSDAQEASGLPWGLTVTPFAAKDENGIGPACGSNGHLLPRCENCYAYFNTYCELDQWAWNCSLCGTLNGLPSDAIARYSNPHSIPEMTSSFIDLEMPLDGSEEEMTQARPVYVAAIDISSSEEFLELTKSALLAALEALSPGALFGLVTFSHKIGLYDVQGPIPVVKNVFIPPDGESSLSLELEDVMPLLQFLAPVETCKDRIAAALETLRPITSWERSAGAGQGMDSVLMGGRGFGTAMEALFNYLGSEFGNTFALARVFAFLSGPPDYGRGQLDTSRYGEQYASKRVDADRALLPEQTPFYKDLATIAVQSGVCVDLFAVTNEYTDLASLKFLSIESGGSLFLYSSTDDSTLPQDMFRMLNRPYAFNCVLRLRTSTEFKPGNSFGHFFPDPQYENLQHIICCDSYATYAYDFEFADNTGFSRHSGEQPVVQIAFQYTVVVPPEGLSNSEMSSSSRGKHTLQRRLRIRTMQFGTAHNINEIYDSVDHEVVLSLLVHKVILASLEDGVREGRALLHDWLVILTAQYNDAFNLVQYKNGNKSMSSQIDITFSQCPQLEPLPRLVFALLRNPLLRFHEEGVHPDYRIYLQCLFSVLDPSSLHCGIYPALMSYSTPDTLAYPRHSLSRAALITSGSPIFFLDAYTTLIVFYSSTADPSIPFPPPQDCLLRQTINKVKQERSITPKLVFIRGGRDDATVFENYLIEEQDVDGNGFASAMGFVSFLDDISQRVTEYMK

SEQ ID NO: 6614 - protein, 514 aa, Arabidopsis thaliana
  unsure (1)..(514): unsure at all Xaa locations
  Clone ID: ARATH-23APR03-C5688_1.p
MGVFSNLRGPRAGATHDEFPATNGSPSSSSSPSSSIKRKLSNLLPLCVALVVIAEIGFLGRLDKVALVDTLTDFFTQSPSLSQSPPARSDRKKIGLFTDRSCEEWLMREDSVTYSRDFTKDPIFISGGEKDFQWCSVDCTFGDSSGKTPDAAFGLGQKPGTLSIIRSMESAQYYPENDLAQARRXRGYDIVMTTSLSSDVPVGYFSWAEYDIMSPVQPKTERAIAAAFISNCGARNFRLQALEALMKTNIKIDSYGGCHRNRDGKVDKVEALKRYKFSLAFENTNEEDYVTEKFFQSLVAGSVPVVVGPPNIEEFAPASDSFLHIKTMEDVEPVAKRMKYLAANPAAYNQTLRWKYEGPSDSFKALVDMAAVHSSCRLCIFLATRVREQEEESPNFKKRPCKCSRGGSDTVYHVFVRERGRFEMESVFLRGKSVTQEALESAVLAKFKSLKHEAVWKKERPGNLKGDKELKIHRIYPLGLTQRQALYNFKFEGNSSLSSHIQNNPCAKFEVVFV

SEQ ID NO: 6615 - protein, 479 aa, Arabidopsis thaliana
  Clone ID: ARATH-23APR03-C5710_1.p
MVPKIASMASTRPLSSLPYLFLSLSLLFVVSLLFFFSNSLISNPNPSISHNTLQNGINVYVAELPRSLNYGLLDKYWSSSTPDSRIPTDPDHPTRKTHLPKPDTHPPYPENPLIKQYSAEYWIMGDLETSPEKRIGSFAKRVFSESDADVVFVPFFATLSAEMELGNGKGSFRKKSGNEDYQRQRQVLDFLKNTKAWKRSNGRDHVFVLTDPVAMWHVREEIALSILLVVDFGGWFRQDSKSSNGTSLPERIEHTQVSVIKDVIVPYTHLLPRLDLSQNQRRHSLLYFKGAKHRHRGGLIREKLWDLLVNEPGVVMEEGFPNATGKEQSIRGMRNSEFCLHPAGDTPTSCRLFDAIQSLCIPVIVSDTIELPFEGIIDYSEFSVFASVSDALTPKWLANHLRRFSEREKETLRSRIAKVQSVFVYDNGHADGIGPIEPDGAVNHIWKKVQQKVPMVKEAVIRERRKPAGASVPLRCQCI

SEQ ID NO: 6616 - protein, 258 aa, Arabidopsis thaliana
  Clone ID: ARATH-23APR03-C5752_1.p
MAAKVITFMAVMVVTAFTANAKIPGVYTGGPWINAHATFYGEADASGTMGGACGYGNLYSQGYGVNTAALSTALFNNGLSCGSCFELKCINDPGWCLPGNPSILITATNFCPPNFNQASDNGGWCNPPREHFDLAMPMFLSIAKYKAGIVPVSYRRIPCRKKGGIRFTINGFKYFNLVLVTNVAGAGDVIKVSVKGSNTQWLDLSRNWGQNWQSNALLVGQSLSFRVKTSDGRSSTSNNIAPSNWQFGQTYSGKNFRV

SEQ ID NO: 6617 - protein, 169 aa, Arabidopsis thaliana
  Clone ID: ARATH-23APR03-C5757_1.p
KFTHFGTVKFAESRSSSSVSLPKKITQIKAQISDLTAVASVEERMTREHPPEPLDFFIWTVEDVGSWLEEINLGGYRQIFKENGVNGEYLESMSVFTTEQILHFIRRHHMKWGDFITLCKELRRIKVACLKGEQRVRRPWWAPSCLSVVFVKAAKRNRQSRVVSLKLES

SEQ ID NO: 6618 - protein, 335 aa, Arabidopsis thaliana
  Clone ID: ARATH-23APR03-C5794_1.p
MPPQKENHRTLNKMKTNLFLFLIFSLLLSLSSAEQCGRQAGGALCPNGLCCSEFGWCGNTEPYCKQPGCQSQCTPGGTPPGPTGDLSGIISSSQFDDMLKHRNDAACPARGFYTYNAFITAAKSFPGFGTTGDTATRKKEVAAFFGQTSHETTGGWATAPDGPYSWGYCFKQEQNPASDYCEPSATWPCASGKRYYGRGPMQLSWNYNYGLCGRAIGVDLLNNPDLVANDAVIAFKAAIWFWMTAQPPKPSCHAVIAGQWQPSDADRAAGRLPGYGVITNIINGGLECGRGQDGRVADRIGFYQRYCNIFGVNPGGNLDCYNQRSFVNGLLEAAI

SEQ ID NO: 6619 - protein, 550 aa, Arabidopsis thaliana
  Clone ID: ARATH-23APR03-C5799_1.p
MTKLLEINHIQTLCFAKGFSPARLNVATSPFLISRRGGGGYCSNACIPYRLKFTCYATLSAVVKEQASDFSGKEAALLVDELRSNFNSGRTKSYEWRISQLQNIARMIDEKEKCITEALYQDLSKPELEAFLAEISNTKSSCMLAIKELKNWMAPETVKTSVTTFPSSAQIVSEPLGVVLVISAWNFPFLLSVEPVIGAIAAGNAVVLKPSEIAPAASSLLAKLFSEYLDNTTIRVIEGGVPETTALLDQKWDKIFFTGGARVARIIMAAAARNLTPVVLELGGKCPALVDSDVNLQVAARRIIAGKWACNSGQACIGVDYVITTKDFASKLIDALKTELETFFGQNALESKDLSRIVNSFHFKRLESMLKENGVANKIVHGGRITEDKLKISPTILLDVPEASSMMQEEIFGPLLPIITVQKIEDGFQVIRSKPKPLAAYLFTNNKELEKQFVQDVSAGGITINDTVLHVTVKDLPFGGVGESGIGAYHGKFSYETFSHKKGVLYRSFSGDADLRYPPYTPKKKMVLKALLSSNIFAAILAFFGFSKDS

SEQ ID NO: 6620 - protein, 401 aa, Arabidopsis thaliana
  unsure (1)..(401): unsure at all Xaa locations
  Clone ID: ARATH-23APR03-C5816_1.p
MSSSVDFVTEQGRCGDDGNGAGETVKNGEIDHLLSEPSAPTISLPTESFLRAATLLKNQVVEATWKGGVEALASGSGPVLDPTVYTGLLGTAFTCLKSYEVTRNHQDLLTCAEIIDTCANVARATTRHVTFLCGRGGVCTLGAIVANYRGDQSKRDFFLGLFLELAEERELPAGPEEGGFGMSYDLLYGRAGFLSSALFLNRYLDQGTDHHNHDYSLFRGLAGPVCLWVRSCVTGSPVYSTFYNLLXRISNRFPNRENYPCSEGNPRDKLVQWAHGATGMAITLAKASQVFPKERDFREAAIEAGEVVWKSGLVKKVGLADGVAGNAYAFLSLYRLTGDVVYEERAKAFASYLCRDAIELVNMTSQETEHDYSLFRGLAGPVCLWFDLVSPVDSKFPGYEI

SEQ ID NO: 6621 - protein, 409 aa, Arabidopsis thaliana
  unsure (1)..(409): unsure at all Xaa locations
  Clone ID: ARATH-23APR03-C58197_1.p
MACCLASCCASATCGLCSSVASGISRKSARIAYCGLFGASLVVSWILRETGAPLLEKLPWINTSDSYTKEWYQQQAVLRVSFGNFLFFAIYALIMIGVKDQNDRRDSWHHGGWGLKMIVWFLLVVLMFFVPNVIVSLYGTLSKFGAGAFLLVQVVLLLDATHNWNDSWVEKDEKKWYIALLVISIVCYIATYTFSGILFIWFNPSGQDCGLNVFFIVMPMILAFVFAIIALHPAVNGSLLPASVISVYXKQKKISETMACCLASCCASATCGLCSSVASGISRKSARIAYCGLFGASLVVSWILRETGAPLSSGVKDALLGDPEXGKKSGEAEARSVSYSYSFFHIIFALASMYAAMLLSGWTDSSESATLIDVGWTSVWVKICTGWVTAGLYIWTLIAPLILPDREFY

SEQ ID NO: 6622 - protein, 580 aa, Arabidopsis thaliana
  Clone ID: ARATH-23APR03-C5834_1.p
MKFMKLGSKPDSFQSEGDNVRYVSSDLATDVIVIIGDVKFYLHKFPLLSKSARLQKLITTSTSSSNEENQIHHHHHEDEIEIAEIPGGPASFEICAKFCYGMTVTLNAYNVVAARCAAEFLEMYETVEKGNLVYKIEVFLNSSILQSWKDSIIVLQTTRALSPYSEELKLTGRCLDSIASRASIDTSKVEWSYTYSKKKNLDNGLRKPQAVPRDWWVEDLCDLHIDLYKRALATIEARGNVSADVIGEALHAYAIKRIPGFSKSSSVQVTDFAKYRALADSIIELIPDEKRSVSSSFLTKLLRASIFLGCDEVAGLKNRVGERLDEANLGDVLLYDVELMQSLVEVFLKSRDPREDDVTAKASVAKLVDGYLAEKSRDSDNLPLQKFLSLAEMVSSFPRQSHDGVYRAIDMFLKEHPEMNKSEKKRICRLMDCRKLSAEACAHAVQNERLPMRVVVQVLFFEQVRANNNGSSSTGNSTPEVIPASRSTNTTDQEDTECWDTEDIKALRGELANLRLAKNQQESHNQGKLMKGGGLGVSRVFSKLWSGKERSGDMISSSGTSSPGSVNDDSKSSSSTSKKH

SEQ ID NO: 6623 - protein, 480 aa, Arabidopsis thaliana
  Clone ID: ARATH-23APR03-C5856_1.p
MASSSPQSLFSLFCLALFSHLQIVCSLTLWSHHCLLYHLAHNHSLRSLSLSLTSSMASSSLQSLFSLFCLALFSLPLIVSSIGINYGQVANNLPPPKNVIPLLKSVGATKVKLYDADPQALRAFAGSGFELTVALGNEYLAQMSDPIKAQGWVKENVQAYLPNTKIVAIVVGNEVLTSNQSALTAALFPAMQSIHGALVDCGLNKQIFVTTAHSLAILDVSYPPSATSFRRDLLGSLTPILDFHVKTGSPILINAYPFFAYEENPKHVSLDFVLFQPNQGFTDPGSNFHYDNMLFAQVDAVYHALDAVGISYKKVPIVVSETGWPSNGDPQEVGATCDNARKYNGNLIKMMMSKKMRTPIRPECDLTIFVFALFNENMKPGPTSERNYGLFNPDGTPVYSLGIKTSSTHSSGSGSSNSTGGSSSGGGGNTGGSSSGGGIYQPVTGNPSPDYMSISSAGGKGRFVECVLFFFLLCIIKLRL

SEQ ID NO: 6624 - protein, 405 aa, Arabidopsis thaliana
  unsure (1)..(405): unsure at all Xaa locations
  Clone ID: ARATH-23APR03-C5874_1.p
MSSPESPSGSDSSTPLIRSRQSSPRRQPVIAVLLNRASGRRGASMVVRETAAQELAERRADWGYSKPVVALDMLWNNAFVLVAIVMLLVFKEEMPIVPIRIWICGYAIQCRDHVVLDWLEFRQRNARSRPGDFDTDYATDRNREWEDNDLWLLISRTYEWMNSLISLXSGIVPFFWLHCDGSILANNSIQXYLKTFGVLAYDETQTIFCGVLAWCVASQFXDLLPCINALLYADTWQEGAAKSSLSTLPEYTGSMKNIFAQRFDGSGGRIPVAIASDELGNERVPLPEPTHPYISLSIYEDQAELVSLPSNHHFLSPGIGKGAIMNTTSTLSYLQMIKYDPLERKIAAQAPALIVFRLVILYIELRNTNMIVVWVTHKTFCFVNSIFLKFYSLDYQITKDVMRMH

SEQ ID NO: 6625 - protein, 578 aa, Arabidopsis thaliana
  Clone ID: ARATH-23APR03-C5882_1.p
MGNCCSDVASGAGATAGVGGSGSSAALGATNDALDYYLKSKGFNGLFSQIELSFSASNLRDRDVLSKSDPMVVVYQKEKDATLSEVFRSEVVLNSLAPKWIKKFIVAYHFETVQTLVFRVYDVDTKFQNSREEMLKLDEQQFLGEATCALSEIITKSTRTSTLELKRKDGFAPQAQPHHGKLIIHAEESLASKISTEIVFRCSNLESKDLFSKSDPFLVVSKIVEHGTPIPVSKTEVRKNDLNPIWKPVFLSVQQVGSKDSPVIIECSDFNSNGKHSLIGKVQKSLSDLEKLHLAGQGINFSLPTGAGQNKVLKSQLFVDKFTETVHHTFLEYLASGFELNFMVAIDFTASNGNPRLPDSLHYIDPSGRLNAYQRAIMDVGEVLQFYDSDKRFPAWGFGARPIDAPVSHCFNLNGSSSYSEVDGIQGIMTSYTSALFNVSLAGPTLFGPVINAAAMIASASLAQGSRKYYVLLIITDGVITDLQETKDALVSASDLPLSILIVGVGGADFKEMEILDADKGERLESSSGRLASRDIVQFVALRDVQYGEISVVQALLAELPSQFLTYMRIRNMKPIPP

SEQ ID NO: 6626 - protein, 1431 aa, Arabidopsis thaliana
  unsure (1)..(1431): unsure at all Xaa locations
  Clone ID: ARATH-23APR03-C5886_1.p
MVAVDSTFPSHGSSYSSRRKKVSALEPNYFGSMCMGVYSDDVSISAREVAQDYSCDSCGDLATVSSACCNFDELCGLDSALEMGCRSNEDCRAGQEASGSGIASGLDKSVPGYTMYASGWMYGNQQGQMCGPYTQQQLYDGLSTNFLPEDLLVYPIINGYTANSVPLKYFKQFPDHVATGFAYLQNGIISVAPSVTSFPPSSSNATVHQDEIQTEHATSATHLISHQTMPPQTSSNGSVLDQLTLNHEESNMLASFLSLGNEHACWFLVDGEGRNHGPHSILELFSWQQHGYVSDAALIRDGENKLRPITLASLIGVWRVKCGDANCDEPVTGVNFISEVSEELSVHLQSGIMKIARRALLDEIISSVISDFLKAKKSDEHLKSYPPTSAVESISSRVINAEKSVVSNTESAGCKNTMNEGGHSSIAAESSKYTKSVGSIENFQTSCSAVCRTLHHHCMQIMWNAVFYDTVATHSSCWRKNKIWFRSSDISTVNYCKGSHTKYSDKPESFESFTCRVDSSSSKTAYSDEFDLATNGARVRGLSSDTYGTESVIASISEHVENELFLSLKTHLTDYTSILIKDGANNTTSSARDGKMHEGSFREQYNLEGSSKKKNGLNVVPAKLRFSNDFSDSQRLLQEGESSEQITSEDIIANIFSTALETSDIPVNDELDALAIHEPPPPGCESNINMPCLRYKYQPVRSKESIPEIKAYVSMALCRQKLHNDVMRDWKSLFLKCYLNEFLASLKGSHQVSRKETLALKKRKTVTRNKKLVQSNISNQTAEKSXXKPCVGAXSEKKFWLNESKKLSXDSHSMEKKSLXKVDTPRLDLSVRKPSQQKMRNTDRRDHCIIKDATKLHKEKVGKDAFSKVICDKSQDLEMEDEFDDALLITRLRRISRNKTKELRECRNAAKSCEEISVTAEESEETVDCKDHEESLSNKPSQKVKKAHTSKLKRKNLSDARDEGTKSCNGAVKSFTEISGKEGDTESLGLAISDKVSHQNLSKRRKSKIALFLFPGFENTSRKCFTKLKRRKNAAKNGQDMSNPTGNPPRLAEGKKFVEKSACSISQKGRKSSQSSILKRKHQLDEKISNVPSRRRLSLSSTDSEDAVIKEDYDVRNEEKLPCHTSDKLQKVGPNKLIRRRKPLAKHTTERSPIKDLSVDDGRPKPIALKPLEKLSSKPSKKKLFLSIPKSDGCARTSINGWHWHAWSLKASAEERARVRGSSCVHMQHFGSKSSLTQNVLSARTNRAKLRNLLAAADGADVLKMSQLKARKKHLRFQQSKIHDWGLVALEPIEAEDFVIEYVGELIRSSXISEIRERQYEKMGIGSSYLFRLDDGYVLDATKRGGIARFINHSCEPNCYPKIITGGRKKKIFIYAKRHIDAGEEISYNYKFPLEDDKIPCNCGAPNVYCFCEQVPWIAKLKRRTWFSRRN

SEQ ID NO: 6627 - protein, 124 aa, Arabidopsis thaliana
  Clone ID: ARATH-23APR03-C5917_1.p
MTTIAAAGLNVATPRVVVRPVARVLGPVRLNYPWKFGSMKRMVVVKATSEGEISEKVEKSIQEAKETCADDPVSGECVAAWDEVEELSAAASHARDKKKAGGSDPLEEYCNDNPETDECRTYDN

SEQ ID NO: 6628 - protein, 140 aa, Arabidopsis thaliana
  Clone ID: ARATH-23APR03-C5930_1.p
MGNHFLTLSLLLVTVCVCVSFITTKLNPKEAIVSVSSDSEIPTEIHGVKILRQASDTKLAQLGVASWPKWEGAPSKFPWEFKKTETIYFMEGKVKVNVDGYDEEEETFEIGKGDVVVFPKDMKVVWEITEAVKKQYSLEE

SEQ ID NO: 6629 - protein, 98 aa, Arabidopsis thaliana
  Clone ID: ARATH-23APR03-C59389_1.p
MEKYFGNAYRGDPGVPHADADRFVNIWIGSAAFSVLTWVNPYMWQLSNQFNYHDKWMLFEQYHWKKARAKKQPYEFKWNKIPKEVRDSYYYNWPVYFP

SEQ ID NO: 6630 - protein, 249 aa, Arabidopsis thaliana
  Clone ID: ARATH-23APR03-C5947_1.p
MGHLGFLVMIMVGVMASSVSGYGGGWINAHATFYGGGDASGTMGGACGYGNLYSQGYGTSTAALSTALFNNGLSCGSCFEIRCENDGKWCLPGSIVVTATNFCPPNNALANNNGGWCNPPLEHFDLAQPVFQRIAQYRAGIVPVSYRRVPCRRRGGIRFAINGHSYFNLVLITNVGGAGDVHSAAIKGSRTVWQAMSRNWGQNWQSNSYLNGQALSFKVTTSDGRTVVSFNAAPAGWSYGQTFAGGQFR

SEQ ID NO: 6631 - protein, 314 aa, Arabidopsis thaliana
  Clone ID: ARATH-23APR03-C5977_1.p
MESLLHASSSLVSLRPRIDGRDSFINPSRVCLNPSLGRRGSKPLPLVAAAKKKKSKKDDNHNFSARPDEATGPFPESILLKEKKIDEEGDLLPEFADAEEKELYQFLDLQLQSDLNEERMRHYEVVYLIHEKHAEEVESINQKVQDYLKEKKGKVWRFSDWGMRRLAYKIQKAENAHYILMNFEIEAKYLNEFKGLLDSDERVIRHLVMKRDEAITEDCPPPPEFHSVRAGDEYYDDDEEEEIEEDEDEGEGEDEEDADNIEYEVDDDGNVVMVLYGDEEEGEEEEDGASEQEEGQDKSTNGRRETRRTVNVGG

SEQ ID NO: 6632 - protein, 212 aa, Arabidopsis thaliana
  Clone ID: ARATH-23APR03-C5993_1.p
MDSLKNRTLLKVIVLGDSGVGKTSLMNQYVYKKFNKQYKATIGADFVTKELHIDEKSVTLQIWDTAGQERFQSLGAAFYRGADCCVLVYDVNNLKSFETLNNWHTEFLKQANPMEPETFPFVLIGNKTDVDGGNSRVVSNKRAIEWCGSKGNIPYHETSAKEDTNIDEAFLSVAHIALSNERKQSNDIYPRGQYHDSVTDIIDPDQSRGCAC

SEQ ID NO: 6633 - protein, 199 aa, Arabidopsis thaliana
  Clone ID: ARATH-23APR03-C6029_1.p
MENGGTIPGQEIGSGLQKPVNPDGFVTIDVESFSNVIHKDFSSSSPRITLQRNVSRKGSPRSNNERKLHFDANGNDKEISFPQSPLRGSSTPEKASTVGPTEHAGTATTAATAVSASPLHQITVTTAATAAGNMITDQNRERRFGFSRKSSFKRSHTSWMLDPKKIVLFFATLSSMGSILLIIFTLSISKSNPGDMPLD

SEQ ID NO: 6634 - protein, 567 aa, Arabidopsis thaliana
  Clone ID: ARATH-23APR03-C6030_1.p
MGRGSVTSLAPGFRFHPTDEELVRYYLKRKVCNKPFKFDAISVTDIYKSEPWDLPDKSKLKSRDLEWYFFSMLDKKYSNGSKTNRATEKGYWKTTGKDREIRNGSRVVGMKKTLVYHKGRAPRGERTNWVMHEYRLSDEDLKKAGVPQEAYVLCRIFQKSGTGPKNGEQYGAPYLEEEWEEDGMTYVPAQDAFSEGLALNDDVYVDIDDIDEKPENLVVYDAVPILPNYCHGESSNNVESGNYSDSGNYIQPGNNVVDSGGYFEQPIETFEEDRKPIIREGSIQPCSLFPEEQIGCGVQDENVVNLESSNNNVFVADTCYSDIPIDHNYLPDEPFMDPNNNLPLNDGLYLETNDLSCAQQDDFNFEDYLSFFDDEGLTFDDSLLMGPEDFLPNQEALDQKPAPKELEKEVAGGKEAVEEKESGEGSSSKQDTDFKDFDSAPKYPFLKKTSHMLGAIPTPSSFASQFQTKDAMRLHAAQSSGSVHVTAGMMRISNMTLAADSGMGWSYDKNGNLNVVLSFGVVQQDDAMTASGSKTGITATRAMLVFMCLWVLLLSVSFKIVTMVSAR

SEQ ID NO: 6635 - protein, 333 aa, Arabidopsis thaliana
  Clone ID: ARATH-23APR03-C60717_1.p
MSISVVDSSLCHPTASFPSSMVHSNRFSKRISGNGNWVRERRRLYVKSSNSEGKKEEAAQKSSSNNTSSFLSFLCPLLKAFSGGDPSQQRNHALEVATSSLASVARLPWGSRVSTGSIDNQDVSSNPPLRLQLFEFEACPFCRRVREAMTELDLSVEVYPCPKGSIRHRELVRRSGGKEMFPFLVDPNTETLMYESGDIVKYLFKQYGNGRGPSTGLLESTLFTGWMPTLLRAGRGMSLWDKASTDLPPKMLELFSYENNPYSRLVREALCELELPYVLHNIGEGSTRMKSLLNASGSNKVPFLVDPNTGVQLGDYEKILAYLFKTYSSAASA

SEQ ID NO: 6636 - protein, 375 aa, Arabidopsis thaliana
  Clone ID: ARATH-23APR03-C610_1.p
MDIPYYHYDHGGDSQYLPPGFRFHPTDEELITHYLLRKVLDGCFSRRVGAEVDLNKCEPWQLPGRAKMGEKEWYFFSLRDRKYPTGLRTNRATEAGYWKATGKDREIFSSKTCALVGMKKTLVFYKGRAPKGEKSNWVMHEYRLEGKFSYHFISRSSKDEWVISRVFQKTTLASTGAVSEGGGGGGATVSVSSGTGPSKKTKVPSTISRNYQEQPSSPSSVSLPPLLDPTTTLGYTDSSCSYDSRSTNTTVTASAITEHVSCFSTVPTTTTALGLDVNSFSRLPPPLGFDFDPFPRFVSRNVSTQSNFRSFQENFNQFPYFGSSSASTMTSAVNLPSFQGGGGVSGMNYWLPATAEENESKVGVLHAGLDCIWNY

SEQ ID NO: 6637 - protein, 399 aa, Arabidopsis thaliana
  unsure (1)..(399): unsure at all Xaa locations
  Clone ID: ARATH-23APR03-C6165_1.p
MILNKIKNLQYLKKYKMAKIYRKLTGYGGEGGREWDDDVYEGVRKVYVGQDINRITYVKFEYVKEDGQVVTTEYGKIIQQPKEFVLQYPDEHIIAVEGNYRGVALCATEVITNLVFKTSKGRKSPLFGPNLLGITTGTKFVIEDGGKKIVGFHGRSGNALDALGVYFVHGSLTTSPPVYKLDAQGGTDGRVWDDGSYDGVKSLRIGQDNSRITYLEFEYEKGGKLETCRHGVKQERSLKFELNPDEYIKSVEATYDKPDIFRNVVITSLTFETSKGRTSFSGYKGGKKFKLEQKGRRLVGFHGKEGSAIDALGAYFAPIPTPTPIIXANYDKIIGVGGAIVVCLXFKTNKRESMPFGMDSGKKFSLGEEGHKIVGFHGQATSDVVHSIGVTVVPITNTK

SEQ ID NO: 6638 - protein, 545 aa, Arabidopsis thaliana
  Clone ID: ARATH-23APR03-C6211_1.p
MAELIPWYYTSGSGIVLVLQTIFLFSIVRADLPGSWELIVQDAGIASMHTAVTRFNTVILLDRTNIGPSRKALDRHRCRRDPKDAALKRDCYAHSVLFDLGTNQIRPLMIQTDTWCSSGQFLSDGSLLQTGGDKDGFKKIRKFEPCDPNETCDWVELQDTELITGRWYASNQILPDGSVIIVGGRGTNTVEYYPPRENGAVPFQFLADVEDKQMDNLYPYVHLLPDDDGGNLFIFANSRAVKYDHRINAVVKEYPPLDGGPRNYPSGGSSAMLAIQGDFTTAEILICGGAQSGAFTARAIDAPAHGTCGRIVATAADPVWVTEEMPFGRIMGDMVNLPTGEILIINGAQAGSQGFEMGSDPCLYPLLYRPDQPIGLRFMTLNPGTVPRMYHSTANLLPDGRILLAGSNPHYFYKFNAEFPTELRIEAFSPEYLSPDRANLRPEIQEIPQIIRYGEVFDVFVTVPLPVVGIIQMNWGSAPFATHSFSQGQRLVKLTVAPSVPDGVGRYRIQCTAPPNGAVSPPGYYMAFAVNQGVPSIARWIRIVS

SEQ ID NO: 6639 - protein, 589 aa, Arabidopsis thaliana
  Clone ID: ARATH-23APR03-C6228_1.p
MTMITPSSNTTHYRESWYACRYRSLFLSNTHPLMASRRVLSSLLRSSSGRSAAKLGNRNPRLPSPSPARHAAPCSYLLGRVAEYATSSPASSAAPSSAPAKDEGKKTYDYGGKGAIGRVCQVIGAIVDVRFEDQEGLPPIMTSLEVQDHPTRLVLEVSHHLGQNVVRTIAMDGTEGLVRGRKVLNTGAPITVPVGRATLGRIMNVLGEPIDERGEIKTEHYLPIHRDAPALVDLATGQEILATGIKVVDLLAPYQRGGKIGLFGGAGVGKTVLIMELINNVAKAHGGFSVFAGVGERTREGNDLYREMIESGVIKLGEKQSESKCALVYGQMNEPPGARARVGLTGLTVAEYFRDAEGQDVLLFIDNIFRFTQANSEVSALLGRIPSAVGYQPTLASDLGALQERITTTKKGSITSVQAIYVPADDLTDPAPATTFAHLDATTVLSRQISELGIYPAVDPLDSTSRMLSPHILGEEHYNTARGVQKVLQNYKNLQDIIAILGMDELSEDDKLTVARARKIQRFLSQPFHVAEIFTGAPGKYVDLKENINSFQGLLDGKYDDLSEQSFYMVGGIDEVVAKAEKIAKESAA

SEQ ID NO: 6640 - protein, 427 aa, Arabidopsis thaliana
  Clone ID: ARATH-23APR03-C6231_1.p
MEEINPSSSVDNKRDMAEEAKVDVKTSAKKDIRNYLCQYCGISRSKNYLITKHIQSHHQMELEEERDDEACEVDEESSSNHTCQECGAEFKKPAHLKQHMQSHSLERSFTCYVDDCAASYRRKDHLNRHLLTHKGKLFKCPKENCKSEFSVQGNVGRHVKKYHSNDNRDKDNTGLGDGDKDNTCKGDDDKEKSGSGGCEKENEGNGGSGKDNNGNGDSQPAECSTGQKQVVCKEIGCGKAFKYPSQLQKHQDSHVKLDSVEAFCSEPGCMKYFTNEECLKSHIRSCHQHINCEICGSKHLKKNIKRHLRTHDEDSSPGEIKCEVEGCSSTFSKASNLQKHMKAVHDDIRPFVCGFPGCGMRFAYKHVRNKHENSGYHVYTCGDFVETDEDFTSRPRGGLKRKQVTAEMLVRKRVMPPRFDAEEHETC

SEQ ID NO: 6641 - protein, 385 aa, Arabidopsis thaliana
  Clone ID: ARATH-23APR03-C6232_1.p
MLVSARVEKQKRVAYQGKATVLALGKALPSNVVSQENLVEEYLREIKCDDLSIKDKLQHLCKSTTVKTRYTVMSRETLHKYPELATEGSPTIKQRLEIANDAVVQMAYEASLVCIKEWGRAVEDITHLVYVSSSEFRLPGGDLYLSAQLGLSNEVQRVMLYFLGCYGGLSGLRVAKDIAENNPGSRVLLTTSETTVLGFRPPNKARPYNLVGAALFGDGAAALIIGADPTESESPFMELHCAMQQFLPQTQGVIDGRLSEEGITFKLGRDLPQKIEDNVEEFCKKLVAKAGSGALELNDLFWAVHPGGPAILSGLETKLKLKPEKLECSRRALMDYGNVSSNTIFYIMDKVRDELEKKGTEGEEWGLGLAFGPGITFEGFLMRNL

SEQ ID NO: 6642 - protein, 1067 aa, Arabidopsis thaliana
  unsure (1)..(1067): unsure at all Xaa locations
  Clone ID: ARATH-23APR03-C6245_2.p
MGDPLERLGYEASMATESVMKEDLCLEIDPHLTKXIATSEDWRRXLGKVLPSVGVLRTTTCLALDXESAGTSYATSFIHEPRRKIIHIQRKVINVGSRFAGXIFLEQDEIQIYPVYRDPVLNLGYFCYEPXFDLRWCYLVNPLALWASLPGLEISVLGTVRREHCPTLAGFRKNLXSSWVRLKRVSRLLLPSLSQPPPQDYDELLGXAIVNEYGTMAVAFQSGDHRNVASGVFLLPSEVVMTLRXLAKSKGKTLTSSGANLPLSSLLTRSSSALFLAERISLASKLANCLARISPIPRLAPVIQTTLPCMASRFTCFFEIKVKSPSANANLKSRTIRRSAPREKKSRVSILSDLSDLRPLKYQQARNFRLPCGLAYVADPGYMLFRAGVPRHAIIKKVANEDISSLGDLVSVLSKLSRGARVPLEYMSHTDRHRKKSVLVTIDHHEWYAPPQLYTRNDSSGLWDAKPAIEPASVSPSIGNNGFPISQDISLCHHDTEPMHEVNVRGVTDIAAIMETSSGDGSQNDFGSEAKKQRVDEDSSDGIAANGSLYGSEFKSDDAMETDTTVLRDFEGATALSANASLAERAIEPALVMFEVHVPPSCSLDGVHSQHFFGTGIIIYHSSNMGLAVVDKNTVAISASDVMLSFAALCDPFHTYPRTYDLLHAAGLFSIERKRCNMTTMMLEMDRILRPGGRVYIRDTINVTSELQEIGNATRWHTSLRETAEGPHSSSRALLYENRFKYVLEVXTQEGSSFSGKMTDEHGRIRAIWGSFSTQVIDSTANXRLARRSFGTXIKTMGPETVKIITGGNGPALLINGVKRPMPLVRILEVELYPTLLSKARSFGLSDEWIQVLVKKDPVRRQVLRVKGCLAGSKAENLLEQGDMVLAVNKMPVTCFNDIEAACQTLDKGSYSDENLNLTILRQGQELELVVGTDKRDGNGTTRVINWCGCVVQDPHPAVRALGFLPEEGHGVYVTRWCHGSPAHRYGLYALQWIVEVNGKKTPDLNAFADATKELEHGQFVRIRTVHLNGKPRVLTLKQDLHYWPTWELRFDPETALWRRNILKALQ

SEQ ID NO: 6643 - protein, 237 aa, Arabidopsis thaliana
  Clone ID: ARATH-23APR03-C6248_1.p
MAEDFSVVVLASDLGIDARPFLTRSDDVDEQENWHDCPQYLGDEDFSDLDLLQFFTLQGLDRSGNRIFRIVGKYFPARVVSAERLKKYISQKISNQCPEGPLCLVYMHSTVQKDDNSPGITILRWIYEDLPSESKDRLQLVYFIHPGLRSRLVIATLGRLLLSGGLYWKIKYVSRLQYLWEDIKKGEVEIPDFVKNHDNVLEHRPLTDYGIEPDPFQLSEVQSSSFSLNRYENRWVS

SEQ ID NO: 6644 - protein, 336 aa, Arabidopsis thaliana
  unsure (1)..(336): unsure at all Xaa locations
  Clone ID: ARATH-23APR03-C6261_1.p
MGTVLDSHFLALTAIVTVVYQFIFFFNTDHLHLGASSAFFFSLDIMGTVLDSHFLALTVICHXVFYQFIFFVITALFKFDQVTDFAGSTNFGILAVLTLVLKASWHFRQIVLTLLVVVWGLRLGIFLLMRILQWGEDRRFDEQRGNIVRLIIFWTLQAVWVWTVSLPLTLVNASDGGGSLKPADVIGWTMWVFGFLIEAAADQQKLSFKNSPENRGKWCDVGVWKYSRHPNYFGEMLLWWGIFVAASPVLEGAEYLVIFGPLFLTLLLLFVSGIPLLEASADKKHGNSGAYRSYKKTTSPLILFPRGVYGNLPGWFKTVFLFEFPFYSRNLPQELG

SEQ ID NO: 6645 - protein, 523 aa, Arabidopsis thaliana
  unsure (1)..(523): unsure at all Xaa locations
  Clone ID: ARATH-23APR03-C6289_1.p
MKTQHQWWEVLDPFLTQHEALIAFLTFAAVVIVIYLYRPSWSVCNVPGPTAMPLVGHLPLMAKYGPDVFSVLAKQYGPIFRFQMGRQPLIIIAEAELCREVGIKKFKDLPNRSIPSPISASPLHKKGLFFTRDKRXWSKMRNTILSLYQPSHLTSLIPTMHSFITSATHNLDSKPRDIVFSNLFLKLTTDIIGQAAFGVDFGLSGKKPIKDVEVTDFINQHVYSTTQLKMDLSGSLSIILGLLIPILQEPFRQVLKRIPGTMDWRVEKTNARLSGQLNEIVSKRAKEAETDSKDFLSLILKARESDPFAKNIFTSDYISAVTYEHLLAGSATTAFTLSSVLYLVSGHLDVEKRLLQEIDGFGNRDLIPTAHDLQHKFPYLDQVIKEAMRFYMVSPLVARETAKEVEIGGYLLPKGTWVWLALGVLAKDPKNFPEPEKFKPERFDPNGEEEKHRHPYAFIPFGIGPRACVGQRFALQEIKLTLLHLYRNYIFRHSLEMEIPLQLDYGIILSFKNGVKLRTIKRF

SEQ ID NO: 6646 - protein, 236 aa, Arabidopsis thaliana
  Clone ID: ARATH-23APR03-C628_1.p
MGRSPCCEKAHTNKGAWTKEEDQRLVDYIRNHGEGCWRSLPKSAGLLRCGKSCRLRWINYLRPDLKRGNFTDDEDQIIIKLHSLLGNKWSLIAGRLPGRTDNEIKNYWNTHIKRKLLSHGIDPQTHRQINESKTVSSQVVVPIQNDAVEYSFSNLAVKPKTENSSDNGASTSGTTTDEDLRQNGECYYSDNSGHIKLNLDLTLGFGSWSGRIVGVGSSADSKPWCDPVMEARLSLL

SEQ ID NO: 6647 - protein, 568 aa, Arabidopsis thaliana
  Clone ID: ARATH-23APR03-C6345_1.p
MEAKIVKVSDSSYKDGLGKKRKHPGNYTPYDSGRSYAKLQWVLSPNSSTQKLEKRRNLDGENKVIVSENHVEKSLVRYFSYYKKTGVPKRVMFHENGEWIDLPDHILCDIRNDLEAKRATIEFNWCGRHFLLDFLHMYRLDLETGVKTQLAWIDIAGKCFFPETFDTLERDGCHHIRGEDPEQHDQREIKLHIEIDVNSGELPRLNLNVVTDESGDNMDDFQAVQRSSNGPNDEASEDSCSRELDDAVEKWDKTETDRFSGVKPAEEELDKDAVKQMFALGAATLGHVESLDVYQFSSEIAKARLSLFQKQADITKKHRGDANIRYAWVPAKKEVLSAVMMHGLGVGGAFIKKSMYGVGVHAANCPYFSARYCDIDDNGVRHMVLCRVIMGNMEPLRGDNTQYFTGGEEYDNGVDDVESPKHYLIWNMNMNTHIYPEFVVSFKLSIPNAEGNILPTTQSRHESSGLTLEGPKGSPSNEPGRVSNGGSGSEKNSSSSRRPRSPIMPFPLLFKAISSKIARKDMDLIIAGYQELREKKVSRKEFYKTLSMIVGDDDLLISTITGLQRSLG

SEQ ID NO: 6648 - protein, 344 aa, Arabidopsis thaliana
  Clone ID: ARATH-23APR03-C6348_1.p
MAPGLTQTADAMSTVTITKPSLPSVQDSDRAYVTFLAGNGDYVKGVVGLAKGLRKVKSAYPLVVAMLPDVPEEHRRILVDQGCIVREIEPVYPPENQTQFAMAYYVINYSKLRIWKFVEYSKMIYLDGDIQVYENIDHLFDLPDGYLYAVMDCFCEKTWSHTPQYKIRYCQQCPDKVQWPKAELGEPPALYFNAGMFLYEPNLETYEDLLRTLKITPPTPFAEQDFLNMYFKKIYKPIPLVYNLVLAMLWRHPENVELGKVKVVHYCAAGSKPWRYTGKEANMEREDIKMLVKKWWDIYDDESLDYKKPVTVVDTEVDLVNLKPFITALTEAGRLNYVTAPSAA

SEQ ID NO: 6649 - protein, 120 aa, Arabidopsis thaliana
  Clone ID: ARATH-23APR03-C6354_1.p
MINCLKDSIHVLMSCLKDSIHVLMSVLLSTSDDDGLTNAEDREEVDAKEEEGQIVGDTLTLKSSLRKVDSNSTEAEKREKKKVQWVDVIGKELAEIREFEPSDEDDIDSDRGKTCVCIIL

SEQ ID NO: 6650 - protein, 422 aa, Arabidopsis thaliana
  Clone ID: ARATH-23APR03-C6372_1.p
MRSVAAAAAAAAAASKPSNPLVAFEHKRDAYGFPVRPQHVQRYREYADIYKEEEEERSDRWSSFLEDHVESTELPANGSSENSHTPFSESEKEKEKELNKGTGEDLHTDKLGSDVTPDNASEEEGHPDAEKNVHRVQLWTEIRPSLGSIEDLMSIRVKKKGDLSKSEQDAPKVKVSPSFDDDKSSKGASDIDSEDEFYDVERSDVQDGSSSDGTSVSGIPVAADASPLSTCPWKEELEVLIRGGVPMALRGELWQAFVGVRKRRCKDYYQNLLAADGSVNTIEQEDMQHVDDKGSSTESIAVVEKWKGQIEKDKKKKKLEGGPGTDDGRNALRRLLTAYARHNPSVGYCQAMNFFAALLLLLMPEENAFWALIGLIDDYFNGYYSEEMIESQVDQLVLEELVRERFPKLVHHLDYLGVQVAT

SEQ ID NO: 6651 - protein, 360 aa, Arabidopsis thaliana
  Clone ID: ARATH-23APR03-C6380_1.p
MDSSSSMCKQAQPIVRKARKKKVKGVVDPIKQAEKKNRRLEKAIATSAAIRAELEKKKQMKKEGQLEAADEEDSADAAKKKQERDELERIKQAENKKNRLEKSIATSAAIMAELEKKKLRKLEEQKRLAEEGAAIAEKKKRRLEKAIATTAAIRAELEKKKQMKKEGQLDAAVEEDSAYAAKKKQEREELERIKQAERKKRRIEKSIATSAAIRAELEKKKLRKLEEQRRLDEEGAAIAEAVALHVLLGEDCDDSYRNTLNQETGFKPWDYTTKINLFSGGINRFFPHQRCSSYAVHDNNRTRDSNWSSVSYEPFARGWDNNNNNMGISADLFDTQAVSSLQISENTDVDAIVFNGMFRR

SEQ ID NO: 6652 - protein, 296 aa, Arabidopsis thaliana
  Clone ID: ARATH-23APR03-C6388_1.p
SNYFEDFLLHDLYELTAFSQRQTNADRLKEGITLILSLIERQCRPLVNGLKLLEDLHRNKHTLSTGDKETDSLLQGGFREGQLTELVGPSSSGKTQFCMQAAASVAENHLGRVLYLDTGNSFSARRIAQFICSSSDATLGQKVMSRILCHTVYDIYTLFDTLQDLEITLRLQMNVNESRLRLLVVDSISSLITPILGGSGSQGRALMVAIGYLLKKLAHEHSIAILVTNHTVGAGGEGGKTKPALGETWKSIPHVRLSLSRDHKNSNCTISILKHTSLPSGQAAKTLTRKENQQCP

SEQ ID NO: 6653 - protein, 379 aa, Arabidopsis thaliana
  Clone ID: ARATH-23APR03-C6392_1.p
METLFHTLLRLLLFVAISHTLSPLAGSFRISNDFPAVFNFGDSNSDTGELSSGLGFLPQPSYEITFFRSPTSGRFCNGRLIVDFLMEAIDRPYLRPYLDSISRQTYRRGCNFAAAASTIQKANAASYSPFGFGVQVSQFITFKSKVLQLIQQDEELQRYLPSEYFFSNGLYMFDIGQNDIAGAFYTKTVDQVLALVPIILDIFQDGIKRLYAEGARNYWIHNTGPLGCLAQVVSIFGKDKSKLDEFGCVSDHNQAAKLFNLQLHGLFKKLPQQYPNSRFTYVDIFSIKSDLILNHSKYGFDHSIMVCCGTGGPPLNYDDQVGCGKTARSNGTIITAKPCYDSSKYVNWDGIHYTEAANRFVALHILTGKYSETASSLNL

SEQ ID NO: 6654 - protein, 605 aa, Arabidopsis thaliana
  Clone ID: ARATH-23APR03-C6467_1.p
MASSSTSSLNLHSLPKASSGLGQWKSGFRYELLGSSVSRNRLFVSPVVIHHRSPRLPAIKAAYNSDGGSKRSRVYKESQAASGFPNAKVQQIASSVLPLGSFAVVTFVLWKVVGKFMSPKSPKTSAGENNSSTQGVKWSIGAGTNLLQGFAAKVDREAKQRLNEFAKELRSFRSVDMSGCNFGDEGLFFLAESLGYNQTVEEVSFSANGITAAGVKAFDGVLQSNIMLKILNLSGNPIGDEGAKTLCATLMENSSIEILQLNSTDIGDEGAKEIAELLKRNSTLRIIELNNNMIDYSGFTSLAGALLENNTIRNLHLNGNYGGALGANALAKGLEGNKSLRELHLHGNSIGDEGTRALMAGLSSHKGKVALLDLGNNSISAKGAFYVAEYIKRSKSLVWLNLYMNDIGDEGAEKIADSLKQNRSIATIDLGGNNIHAEGVNAIAQALKDNAIITTLEVGYNPIGPDGAKALSEILKFHGNVKTLKLGWCQIAAKGAEHVADMLRYNNTISVLDLRANGLRDEGASCLARSLKVVNEALTSVDLGFNEIRDDGAFAIAQALKANEDVTVTSINLGNNFITKFGQSALTDARDHVLEMTEKEVEIFF

SEQ ID NO: 6655 - protein, 438 aa, Arabidopsis thaliana
  Clone ID: ARATH-23APR03-C6498_1.p
MASSSLCHRYFNKITVTPFFNTKKLHHSSSRRISLRVNRRSFSISATMSSSTKKVLIPVAHGTEPFEAVVMIDVLRRGGADVTVASVENQVGVDACHGIKMVADTLLSDITDSVFDLIMLPGGLPGGETLKNCKPLERMVKKQDTDGRLNAAICCAPALAFGTWGLLEGKKATCYPVFMEKLAACATAVESRVEIDGKIVTSRGPGTTMEFSVTLVEQLLGKEKAVEVSGPLVMRPNPGDEYTITELNQVSWSFEGTPQILVPIADGSEEMEAVAIIDVLKRAKANVVVAALGNSLEVVASRKVKLVADVLLDEAEKNSYDLIVLPGGLGGAEAFASSEKLVNMLKKQAESNKPYGAICASPALVFEPHGLLKGKKATAFPAMCSKLTDQSHIEHRVLVDGNLITSRGPGTSLEFALAIVEKFYGREKGLQLSKATLV

SEQ ID NO: 6656 - protein, 407 aa, Arabidopsis thaliana
  unsure (1)..(407): unsure at all Xaa locations
  Clone ID: ARATH-23APR03-C6520_1.p
MKALSSSSPILGASQPATATAPTARSGRSEWLSSCDIVTSNVISHVXSQFLPVPPGSGGVVPLNDHNSSAARLPXLXLKLVSQLVTTRGWPKSVLITPSXLPMTGLSPAPMHGSNLRVAYQGVPGAYSEPAAGKAGLPAEFKHINXAEEKKLTRIPLVTASEPGRAQLENXDVFGVRIVVWRSVLSDGPGLSSLERGAREGESPVVPGPCRTTRXVYESGCLGMQPQSGGKFRPRLNTGERPIANKYREVKMKRTLXESQRVLEIVGREADGGRGSVLVGRGTEQSREPINSRTXDRRFKTSIVFAHDKGTSVLFKVLSAFAFRDISLTKIESRPNHNRPIRVVDDANVGTAKHFEYMFYVDFEASMAEARAQNALAEVQEFTSFLRVLGSYPMDMTPWSPTSSTSS

SEQ ID NO: 6657 - protein, 513 aa, Arabidopsis thaliana
  Clone ID: ARATH-23APR03-C6532_1.p
MSSSPSLEILVREAEGFTVWNGPPFTNGQPTLKLERVSCSNTKFSVDGSKLMAMKSDGVISIYDATSLTEVRSFTIANVTAAELSPCGTYLQTFQKPTTPQEKNVSIWNTETGDLAHSHYQKSITKASWPSIRFCPDESSACRLATNEVQFFDPKDFSKGITSRIRVPGIAAFELSKTPASHVAVFVPESKGSPGSVQIFGCGEELQSQPSARRSFFRCSSVQFSWNHGSTGLLVVVQSDVDKTNQSYYGETKLHYLTIDGTHEGLVPLRKEGPVHDVQWSFSGSEFAVVYGFMPACVTIFDKNCKPLMELGEGPYNTLRWNPKGRVLCVAGFGNLPGDMAFWDVVNKKQLGSNKAEWSVTSEWSPDGRYFLTASTAPRRQIDNGMKIFNYDGKRYYKKMFERLYQAEWKPESPERFGDISELIKSVESLKLGEGKSQGQGSAQKKTIAPNPIAQKPAAYRPPHAKHAAAVQAELLGISTTGEMSKNALKNKKKREIRKAAAAAAAASGSNNA

SEQ ID NO: 6658 - protein, 342 aa, Arabidopsis thaliana
  unsure (1)..(342): unsure at all Xaa locations
  Clone ID: ARATH-23APR03-C6554_1.p
MFFSKDLPSPTSVFTAYASMAGYMMMIRSMAHELIPAPLQDFIYRTLRSLFFRSSSSTLTLTIDDDNMGMNNEIYRAAQTYLSTKISPDAVRLRISKGHKDKHVNLYLSDGEIVNXDVYEDVQLVWRFVTDGGDKKGGGGGVGGRGGGGGRRGGMDDDGKSEYFELSFDKKHKDLILNSYVPYIESKAKEIRDERRILMLHSLNSLRWESVILEHPSTFETMAMEDDLKRDVIEDLDRFIRRKEFYKRVGKAWKRGYLLYGPPGTGKSSLVAAMANYLKFDVYDLQLASVMRDSDLRRLLLATRNRSILVIEDIDCAVDLPNRIEQPVEGKNRGESQVRFLL

SEQ ID NO: 6659 - protein, 350 aa, Arabidopsis thaliana
  Clone ID: ARATH-23APR03-C66004_1.p
MGSLPPPSLDFSSIDHNSLKNGGSSHQEISHDNLLNLFKSQQDLLNHFFKHLDLSQTLDFSRILLSTTGTVFFTGVGKSAFVANKVSQTLVSLSFRSSFLSPLDALHGDIGALSPRDVLVFFSKSGATEELLRLVPCARAKGAFLVSLTSVSGNPLAGVCDMNVHLPLQRELCPFNLAPVTSTAIQMVFGDTIAVALMAARNLSKEEYAANHPAGRIGKSLIFKVKDVMKKQEELPVCKEGDLIMDQLVELTSKGCGCLLVVDEHSRLIGTFTDGDLRRTLKASGEAIFKLSVGEMCNRKPRTIGPETMAVEAMKKMESPPSPVQFLPVVNEDNTLIGIVTLHGLVSAGL

SEQ ID NO: 6660 - protein, 1103 aa, Arabidopsis thaliana
  Clone ID: ARATH-23APR03-C6600_1.p
MADLVTYSNADHNLEQALITLKKGTQLLKYGRKGKPKFYPFRLSSDEKSLIWISSSGEKRLKLASVSKIVPGQRTAVFQRYLRPEKDYLSFSLLYNGKKKSLDLICKDKVEAEIWIGGLKTLISTGQGGRSKINGWSGGGLSVDASRELTSSSPSSSSASASRGHSSPGTPFNIDPITSPKSAEPEVPPTDSEKSHVALDNKNMQTKVSGSDGFRVSVSSAQSSSSHGSAADDSDALGDVYIWGEVICDNVVKVGIDKNASYLTTRTDVLVPKPLESNIVLDVHQIACGVRHAAFVTRQGEIFTWGEESGGRLGHGIGKDVFHPRLVESLTATSSVDFVACGEFHTCAVTLAGELYTWGDGTHNVGLLGHGSDISHWIPKRIAGSLEGLHVASVSCGPWHTALITSYGRLFTFGDGTFGVLGHGDKETVQYPREVESLSGLRTIAVSCGVWHTAAVVEIIVTQSNSSSVSSGKLFTWGDGDKNRLGHGDKDPRLKPTCVPALIDYNFHKIACGHSLTVGLTTSGQVFTMGSTVYGQLGNLQTDGKLPCLVEDKLASEFVEEISCGAYHVAALTSRNEVYTWGKGANGRLGHGDLEDRKVPTIVEALKDRHVKYIACGSNYTAAICLHKWVSGAEQSQCSTCRLAFGFTRKRHNCYNCGLVHCHSCSSKKAFRAALAPSAGRLYRVCDSCYVKLSKVSEINDTNRRNSAVPRLSGENRDRLDKSEIRLAKFGTSNMDLIKQLDSKAAKQGKKTDTFSLGRNSQLPSLLQLKDAVQSNIGDMRRATPKLAQAPSGISSRSVSPFSRRSSPPRSATPMPSTSGLYFPVGIADNMKKTNEILNQEIVKLRTQVDSLTQKCEFQEVELQNSVKKTQEALALAEEESAKSRAAKEAIKSLIAQLKDVAEKLPPGESVKLACLQNGLDQNGFHFPEENGFHPSRSESMTSSISSVAPFDFAFANASWSNLQSPKQTPRASERNSNAYPADPRLSSSGSVISERIEPFQFQNNSDNGSSQTGVNNTNQVEAEWIEQYEPGVYITLVALHDGTRDLRRVRFSRRRFGEHQAETWWSENREKVYEKYNVRVSEKSTASQTHRDRDEEEEDIPH

SEQ ID NO: 6661 - protein, 626 aa, Arabidopsis thaliana
  Clone ID: ARATH-23APR03-C6623_1.p
MLKQFLLLQSFSFFLFNVVIVGGRTFGGGFSAEENPFTPKASLVRYWNKEIRGQSPRSEFLISKASPLNAVDSATFSKLAAANSLPTRFPDFCSAANLFCFPDLGASLEKHDDDVKFSVYDQKNFTNYGNARAGGADSFKNYSKDGNVVTDSFRRYSRNAAGHDDKFTVYGENSNVVEEGFNSYGTFGTGGAGDFTNYQNNVNNPTSRFTAYSDGGNGRSQTFKTYTHEANAGNGQSFTSYGKNGNGVPNEFTSYGVSSNVIGSGFSNYGESGNAANDTFTSYGSDGNVPQNNFNNYGASGNAAVDTFANYRDKANVGDDSFSSYAKDSNSEKVNFVNYGQSFNPGSETFTGYGKGAEGSKLSFKTYTPNSTFKDYAKKGVAFAKYNVSTTTANTVGDGKTVNKWIEPGKFFRESSLKEGTVIPMPDIKDKMPKRSFLPRSIITKLPFSTSKLGEIKRIFHAVENSTMGGIITDAVTECERPPSVGETKRCVGSAEDMIDFATSVLGRSVVLRTTENVAGSKEKVVIGKVNGINGGKLTKAVSCHQSLYPYLLYYCHSVPKVRVYEADLLELNSKKKINHGIAICHMDTSSWGPSHGAFLALGSKPGRIEVCHWIFENDMNWAIAD

SEQ ID NO: 6662 - protein, 166 aa, Arabidopsis thaliana
  Clone ID: ARATH-23APR03-C6652_1.p
MGNCALKPKVLSETGAPAPEELKDSLLEYHKMDAAKSLSNLFLQDKADKITKEDEKITPEKIPVTDDLKTALEEENTPTKEAKSPATETKYSVTEKRAPADKKITPEMMPVTEDLKTVLEEEAKPPATETKAMVDDQKVKNEVAVREEKIIDLVTVKENETEAKTE

SEQ ID NO: 6663 - protein, 393 aa, Arabidopsis thaliana
  Clone ID: ARATH-23APR03-C6672_1.p
MAVHIHNPNFFHTHHLRASLTSASASPSSYLFHRHSASKYPSFLCKSNNKDDYLIDAPVSVGDGFSFSGGKYSDQPSPSDEWLKQGKWVKAHRVGGSGVEAKDPIFGLTMGASSQASKDLFRWFSVESGSVDSPPVILIHGFPSQAYSYRKTIPVLSKNYRAIAFDWLGFGFSDKPQAGYGFNYTMDEFVSSLESFIDEVTTSKVSLVVQGYFSAAVVKYARNRPDKIKNLILLNPPLTPEHAKLPSTLSVFSNFLLGEIFSQDPLRASDKPLTSCGPYKMKEDDAMVYRRPYLTSGSSGFALNAISRSMKKELKKYAEEMRTSLMDKNWKIPITVCWGQRDRWLSYEGVEEFCKSSGHNLVELPNAGHHVQEDCGEELGGIISRIISKSALF

SEQ ID NO: 6664 - protein, 343 aa, Arabidopsis thaliana
  Clone ID: ARATH-23APR03-C6673_1.p
MPRRLNDGEPGRFTATVLLLIGLISCVIVYAVFSSVLRPSQDPTLVDSAVRFKEEPRDHDATEDGEGGCCRGIDNLELWGPAVKWGTDFKFNSSDGCCKACKVMCSGNDGPCLCDSWVFCGNKEDCGSKFGECWLKKQKDVLVPDRQGGGEKVMWTSGLIFGQGQGIVGFETEHGVIHVKLHPECAPHSVYYILSLLTLRHCAGCQFHRAENRGSYWDSEGNHVKNAPFGPPYAMIQGILQAEGNIFTPIPTEHCPTISRGSVAWVGSGPEFFISLANHHEWKQSYTVFGLVLPEDMDVVETIAGLPTRADVWNSVNVSVLEKPVSLTVRRMKTGQEQEETGS

SEQ ID NO: 6665 - protein, 526 aa, Arabidopsis thaliana
  Clone ID: ARATH-23APR03-C6674_1.p
MTETGDDLATVKKPIPFLVIFKDLRHVFSRDTTGREILGIAFPAALALAADPIASLIDTAFVGRLGAVQLAAVGVSIAIFNQASRITIFPLVSLTTSFVAEEDTMEKMKEEANKANLVHAETILVQDSLEKGISSPTSNDTNQPQQPPAPDTKSNSGNKSNKKEKRTIRTASTAMILGLILGLVQAIFLIFSSKLLLGVMGVKPNSPMLSPAHKYLSIRALGAPALLLSLAMQGIFRGFKDTKTPLFATVVADVINIVLDPIFIFVLRLGIIGAAIAHVISQYFMTLILFVFLAKKVNLIPPNFGDLQFGRFLKNGLLLLARTIAVTFCQTLAAAMAARLGTTPMAAFQICLQVWLTSSLLNDGLAVAGQAILACSFAEKDYNKVTAVASRVLQMGFVLGLGLSVFVGLGLYFGAGVFSKDPAVIHLMAIGIPFIAATQPINSLAFVLDGVNFGASDFAYTAYSMVGVAAISIAAVIYMAKTNGFIGIWIALTIYMALRAITGIARMATGTGPWRFLRGRSSSSSS

SEQ ID NO: 6666 - protein, 208 aa, Arabidopsis thaliana
  Clone ID: ARATH-23APR03-C6687_1.p
MLRTIFLLSLLFALSNASVQDFCVANLKRAETPAGYPCIRPIHVKATDFVFSGLGTPGNTTNIINAAVTPAFAAQFPGLNGLGLSTARLDLAPKGVIPMHTHPGASEVLFVLTGSITAGFVSSANAVYVQTLKPGQVMVFPQGLLHFQINAGKSSASAVVTFNSANPGLQILDFALFANSLPTELVVGTTFLDATTVKKLKGVLGGTG

SEQ ID NO: 6667 - protein, 343 aa, Arabidopsis thaliana
  Clone ID: ARATH-23APR03-C6711_1.p
MEAEKKMVLPRIKFTEHKTNTTTIVSELTNTHQTRILRISVTDPDATDSSSDDEEEEHQRFVSKRRRVKKFVNEVYLDSGAVVTGSCGQMESKKRQKRAVKSESTVSPVVSATTTTTGEKKFRGVRQRPWGKWAAEIRDPLKRVRLWLGTYNTAEEAAMVYDNAAIQLRGPDALTNFSVTPTTATEKKAPPPSPVKKKKKKNNKSKKSVTASSSISRSSSNDCLCSPVSVLRSPFAVDEFSGISSSPVAAVVVKEEPSMTTVSETFSDFSAPLFSDDDVFDFRSSVVPDYLGGDLFGEDLFTADMCTDMNFGFDFGSGLSSWHMEDHFQDIGDLFGSDPLLAV

SEQ ID NO: 6668 - protein, 190 aa, Arabidopsis thaliana
  Clone ID: ARATH-23APR03-C6757_1.p
MFKNTFQSGFLSILYSLGSKPLQIWDKEVVDGHVKRCHDDDIQSNVLEVVGSNIQSTYITCPADLSATLGIKLPFLVLVVKDMKKYFSFEIQILDDKNVRRRFRASNFQAVTRVKPYICTMPLKMDEGWNQIQLNLADLTRRAYGTNYAETLRVQIHANCRLRRIYFADRLYSEEELPPEFKLYLPVQKA

SEQ ID NO: 6669 - protein, 398 aa, Arabidopsis thaliana
  Clone ID: ARATH-23APR03-C67729_1.p
MYLVESKGGAIACMLLALLSLGTWPAVLTLLERRGRLPQHTYLDYSITNLLAAIIIAFTFGQIGSTKPDSPNFITQLAQDNWPSVMFAMAGGIVLSLGNLSTQYAWALVGLSVTEVITSSITVVIGSTLNYFLDDKINKAEILFPGVACFLIAVCLGSAVHRSNADDNKAKLRDFETAKQEASGPSTEIGTNSSKDLETNVTTKPKEGTARFLIELENTRAIKVFGKRKIIGLAITFFAGLCFSLFSPAFNLATNDQWNRLKQGVPKLVVYTAFFYFSVSCFIIALILNVVFLYYPVLGLPKSSFKAYLNDWNGRYWAFLAGFLCGFGNGLQFMGGQAAGYAAADSVQALPLVSTFWGVVLFGEYRRSSRKTYLLLFCMLFMFISAVAVLMASSGHRK

SEQ ID NO: 6670 - protein, 236 aa, Arabidopsis thaliana [sequence omitted]

SEQ ID NO: 6671 - protein, 155 aa, Arabidopsis thaliana
  unsure (1)..(155): unsure at all Xaa locations
  Clone ID: ARATH-23APR03-C6813_1.p
XXGXXXXXXLXGNFLRXXXXXSQFXLSAIXXXRQXLGKXGSXGGPFXAXTPXGEKGECXAKATAGGWGGGGPRAPAGRLRGVGRALFFFCRDWFPAAAFFFFFFCKSPKYWNFITSNIFSFRHCLQLSNYLARRNKQLQEKDQCNLSLLLHMGSD

SEQ ID NO: 6672 - protein, 166 aa, Arabidopsis thaliana
  Clone ID: ARATH-23APR03-C6850_1.p
REELLNSADRIILVNCRPKFWAFARHLFGFVSKDGRSSSGKSGFYKRFWPAFILPPPFDRLFLLIALVSFSVFLSIISKDFNWRLILGHNSLRLSFRICIFRKFDLQNYLKYERKFCFQHIGIACSRFYMFMELRSIKFEEYSDFSFLITCFCQISWLMILACRWN

SEQ ID NO: 6673 - protein, 486 aa, Arabidopsis thaliana
  Clone ID: ARATH-23APR03-C6852_1.p
MAVQPTRIGLAGLAVMGQNLALNIAEKGFPISVYNRTTSKVDETVERAKKEGNLPLYGFHDPESFVKSIQKPRVIIMLVKAGSPVDQTIKTLSAYLEKGDCIVDGGNEWYENTERREKAVAENGFLYLGMGVSGGEEGARNGPSMMPGGSYEAYKNIEDIVLKVAAQVRDSGPCVTYIGKGGSGNFVKMVHNGIEYGDMQLIAEAYDVLKSVGKLSNEELHSVFSDWNKGELESFLVEITADIFGIKDDKGDGHLVDKVLDKTGMKGTGKWTVQQAAELSVPAPTIESSLDARFLSGLKDERVQAAKVFKAGGFGDILTDQKVDKKQLVDDVRKALYASKICSYAQGMNLIRAKSIEKGWGLKLGELARIWKGGCIIRAIFLDRIKQAYDRNAELANLLVDPEFAKEIIERQSAWRRVVCLAINSGISTPGMSASLAYFDSYRRERLPANLVQAQRDYFGAHTYERTDVEGSFHTEWFKIARQSKI

SEQ ID NO: 6674 - protein, 680 aa, Arabidopsis thaliana
  Clone ID: ARATH-23APR03-C6856_1.p
MSDDPGQMLLIYDDPSDQRSLSLDDASSTEESPDDNNLSLEAVHNAIPYLGQIFLTHDTAYEFYSTFAKRCGFSIRRHRTEGKDGVGKGLTRRYFVCHRAGNTPIKTLSEGKPQRNRRSSRCGCQAYLRISKLTELGSTEWRVTGFANHHNHELLEPNQVRFLPAYRSISDADKSRILMFSKTGISVQQMMRLLELEKCVEPGFLPFTEKDVRNLLQSFKKLDPEDENIDFLRMCQSIKEKDPNFKFEFTLDANDKLENIAWSYASSIQSYELFGDAVVFDTTHRLSAVEMPLGIWVGVNNYGVPCFFGCVLLRDENLRSWSWALQAFTGFMNGKAPQTILTDHNMCLKEAIAGEMPATKHALCIWMVVGKFPSWFNAGLGERYNDWKAEFYRLYHLESVEEFELGWRDMVNSFGLHTNRHINNLYASRSLWSLPYLRSHFLAGMTLTGRSKAINAFIQRFLSAQTRLAHFVEQVAVVVDFKDQATEQQTMQQNLQNISLKTGAPMESHAASVLTPFAFSKLQEQLVLAAHYASFQMDEGYLVRHHTKLDGGRKVYWVPQEGIISCSCQLFEFSGFLCRHALRVLSTGNCFQVPDRYLPLRWRRISTSFSKTFRSNAEDHGERVQLLQNLVSTLVSESAKSKERLDIATEQTSILLSRIREQPVSSLAIRDISSSVQRNF

SEQ ID NO: 6675 - protein, 286 aa, Arabidopsis thaliana
  unsure (1)..(286): unsure at all Xaa locations
  Clone ID: ARATH-23APR03-C6859_2.p
MEDRVLIKNDVTELIGNTXXMVYLNKIVDGCVARIAAKLEMMEPCSSIKDRIAYSMIKDAEDKGLITPGKSTLIEATGGNTGIGLASIGASRGYKVILLMPSTMSLERRIILRALGAEVHLTDISIGIKGQLEKAKEILSKTPGGYIPHQFINPENPEIHYRTTGPEIWRDSAGKVDILVASVGTGGTVTGTGKFLKEKNKDIKVCVVEPSEIAVLSGGKPGPHLIQGIGSGEIPANLDLSIVFKHNKVGTGGGKKSGTKRGSPRSTFDSGNWLWYRPIQFGLSHC

SEQ ID NO: 6676 - protein, 473 aa, Arabidopsis thaliana [sequence omitted]

SEQ ID NO: 6677 - protein, 366 aa, Arabidopsis thaliana
  Clone ID: ARATH-23APR03-C6877_1.p
MMTKNSIEFDPYIERKAFDETKQGVKGLVDAKITEVPRIFHHRQDILTNKKPSASVSDLEIPIIDFASVHADTASREAIVEKVKYAVENWGFFQVINHSIPLNVLEEIKDGVRRFHEEDPEVKKSFFSRDAGNKKFVYNSNFDLYSSSPSVNWRDSFSCYIAPDPPAPEEIPETCRDAMFEYSKHVLSFGGLLFELLSEALGLKSQTLESMDCVKTLLMICHYYPPCPQPDLTLGITKHSDNSFLTLLLQDNIGGLQILHQDSWVDVSPIHGALVVNIGDFLQLITNDKFVSVEHRVLANRQGPRISVASFFSSSMRPNSRVYGPMKELVSEENPPKYRDITIKEYSKIFFEKGLDGTSHLSNIRI

SEQ ID NO: 6678 - protein, 153 aa, Arabidopsis thaliana
  Clone ID: ARATH-23APR03-C688_1.p
MEREQEESTMRKRRQPPQEEVPNHVATRKPYRGIRRRKWGKWVAEIREPNKRSRLWLGSYTTDIAAARAYDVAVFYLRGPSARLNFPDLLLQEEDHLSAATTADMPAALIREKAAEVGARVDALLASAAPSMAHSTPPVIKPDLNQIPESGDI

SEQ ID NO: 6679 - protein, 327 aa, Arabidopsis thaliana
  Clone ID: ARATH-23APR03-C6935_1.p
MDGMYNFHSAGDYSDKSVLMMSPESLMFPSDYQALLCSSAGENRVSDVFGSDELLSVAVSALSSEAASIAPEIRRNDDNVSLTVIKAKIACHPSYPRLLQAYIDCQKVGAPPEIACLLEEIQRESDVYKQEVVPSSCFGADPELDEFMETYCDILVKYKSDLARPFDEATCFLNKIEMQLRNLCTGVESARGVSEDGVISSDEELSGGDHEVAEDGRQRCEDRDLKDRLLRKFGSRISTLKLEFSKKKKKGKLPREARQALLDWWNLHYKWPYPTEGDKIALADATGLDQKQINNWFINQRKRHWKPSENMPFAMMDDSSGSFFTEE

SEQ ID NO: 6680 - protein, 492 aa, Arabidopsis thaliana
  Clone ID: ARATH-23APR03-C6_1.p
MSDFSSSVKLKYVKLGYQYLINNFLTLLLIPVIATVAIELLRMGPEEILSVLNSLHFELLHILCSSFLIIFVSTVYFMSKPRTVYLVDYSCYKPPVTCRVPFSSFMEHSRLILKDNPKSVEFQMRILERSGLGEETCLPPAIHYIPPTPTMESARNEAQMVIFTAMEDLFKNTGLKPKDIDILIVNCSLFSPTPSLSAMIINKYKLRSNIKSYNLSGMGCSASLISVDVARDLLQVHPNSNAIIISTEIITPNYYKGNERAMLLPNCLFRMGGAAILLSNRRSDRWRAKYKLCHLVRTHRGADDKSYNCVMEQEDKNGNVGINLSKDLMTIAGEALKANITTIGPLVLPASEQLLFLSSLIGRKIFNPKWKPYIPDFKQAFEHFCIHAGGRAVIDELQKNLQLSGEHVEASRMTLHRFGNTSSSSLWYELSYIEAQGRMKRNDRVWQIAFGSGFKCNSAVWKCNRTIKTPTDGAWSDCIERYPVFIPEVVKL

SEQ ID NO: 6681 - protein, 463 aa, Arabidopsis thaliana
  Clone ID: ARATH-23APR03-C7019_1.p
MEGVAMKLPSFPNAISIGHRSFSRVRCSSSLSVCSAAAASSATISTDSESVSLGHRVRKDFRILHQEVNGSKLVYLDSAATSQKPAAVLDALQNYYEFYNSNVHRGIHYLSAKATDEFELARKKVARFINASDSREIVFTRNATEAINLVAYSWGLSNLKPGDEVILTVAEHHSCIVPWQIVSQKTGAVLKFVTLNEDEVPDINKLRELISPKTKLVAVHHVSNVLASSLPIEEIVVWAHDVGAKVLVDACQSVPHMVVDVQKLNADFLVASSHKMCGPTGIGFLYGKSDLLHSMPPFLGGGEMISDVFLDHSTYAEPPSRFEAGTPAIGEAIALGAAVDYLSGIGMPKIHEYEVEIGKYLYEKLSSLPDVRIYGPRPSESVHRGALCSFNVEGLHPTDLATFLDQQHGVAIRSGHHCAQPLHRYLGVNASARASLYFYNTKDDVDAFIVALADTVSFFNSFK

SEQ ID NO: 6682 - protein, 491 aa, Arabidopsis thaliana
  unsure (1)..(491): unsure at all Xaa locations
  Clone ID: ARATH-23APR03-C7043_1.p
MGFDSVKVMENWQSKTSNENEKKKKKRRRKKNNNVRNSEHYEEEANGCWVKFRYIVCCASSTSDVETSLTLSTSTVGSQSAIVQSNDQPVGPVSSTTTTSNAESSLSTPIISEELNIYSHLKKFSFIDLKLATRNFRPESLLGEGGFGCVFKGWVEENGTAPVKPGTGLTVAVKTLNPDGLQGHKEWLAEINYLGNLLHPNLVKLVGYCIEDDQRLLVYEFMPRGSLENHLFRRSLPLPWSIRMKIALGAAKGLSFLHEEALKPVIYRDFKXTSNILLDGEYNAKLSDFGLAKDAPDEGKTHVSTRVMGTYGYAAPEYVMTGHLTSKSDVYSFGVVLLEMLTGRRSMDKNRPNGEHNLVEWARPHLLDKRRFYRLLDPRLEGHFSVKGAQKVTQLAAQCLSRDSKIRPKMSEVVEVLKPLPHLKDMASASYYFQTMQAERLKAGSGSGSGRGFGSRNGQPVFRTLSSPHGQAGSSPYRHQIPSPKPKGATT

SEQ ID NO: 6683 - protein, 442 aa, Arabidopsis thaliana
  Clone ID: ARATH-23APR03-C704_1.p
MSELKERLLPPRPASAMNLRDASVTRPSASGSPPLLGVDVLGLKKRGQGLRSWIRVDTSGNTQVMEVDKFTMMRRCDLPARDLRLLDPLFVYPSTILGREKAIVVNLEQIRCIITADEVLLLNSLDNYVLRYVVELQQRLKTSSVGEMWQQENSQLSRRRSRSFDNAFENSSPDYLPFEFRALEIALEAACTFLDSQASELEIEAYPLLDELTSKISTLNLERVRRLKSRLVALTRRVQKVRDEIEQLMDDDGDMAEMYLTEKKRRMEGSMYGDQSLLGYRSNDGLSVSAPVSPVSSPPDSRRLDKSLSIARSRHDSARSSEGAENIEELEMLLEAYFVVIDSTLNKLTSLKEYIDDTEDFINIQLDNVRNQLIEFELLLTTATFVVAIFGVVAGIFGMNFEIDFFNQPGAFRWVLIITGVCGFVIFSAFVWFFKYRRLMPL

SEQ ID NO: 6684 - protein, 379 aa, Arabidopsis thaliana
  Clone ID: ARATH-23APR03-C7082_1.p
MLPSRKTKRVFSCDFTPGRKRRRCVVVPSSVSPVPENTTGADLLDSIPDDLVISILCKLGSTSRCPADFINVLLTCKRLKGLAMNPIVLSRLSPKAIAVKAHNWSEYSHRFLKRCVDAGSLEACYTLGMIRFYCLQNRGNGASLMAKAAISSHAPALYSLAVIQFNGSGGSKNDKDLRAGVALCARAAFLGHVDALRELGHCLQDGYGVPQNVSEGRRFLVQANARELAAVLSSGIQARSTWLSLSQPPPPVVPNHGQQTCPLLSDFGCNVPAPETHPANRFLADWFAVRGGDCPGDGLRLCSHAGCGRPETRKHEFRRCSVCGVVNYCSRACQALDWKLRHKMDCAPVQRWLEEGDGGEGNVQIDGNGNGDNVLLPMS

SEQ ID NO: 6685 - protein, 241 aa, Arabidopsis thaliana
  unsure (1)..(241): unsure at all Xaa locations
  Clone ID: ARATH-23APR03-C7116_1.p
TKRSQTKNTWRILLWPDKEHVADSTMSAAAIDGVAALRSVFQRVNQAAEKAGRGSDQIRVVAVSKTKPVSLIRQVYDAGQRSFGENYVQEIIEKAPQLPEDIEWHFIGNLQSNKVXKPLLCKLSLLFLSSSSLVXCIELXIGCKTTHLSSMLNCXGLKNACSNLEFSGLMTIGMADYTSTPENFKLLAKCRSEVCKELGIPEEQCELSMGMSGDFELAIELGSTNVRIGSTIFGAREYPKK

SEQ ID NO: 6686 - protein, 404 aa, Arabidopsis thaliana
  Clone ID: ARATH-23APR03-C7139_1.p
MLCFTHVPPLPLFSTSGIYLPASRRFTSFRIRMSSSSSIDSVPPPPDNAIVLGCGGIAVDFLATVDSYPQADDKIRSTSLKVQGGGNAANALTCAARLGLNSRLISKVANDSQGKGMLEELEADGVDTSFIVVSKEGNSPFTYILVDNQTKTRTCIHTPGDPPMLPTDLSQSSMLSALDRASIVYFDVRLHETALVIAKEASRKKIPILVDTEKKRDGLDDLLPFADYVVCPENFPQTWTEVSSTPGALVSMLLRLPKLKFVIVTSGEHGCLMVQRASKAEVFESQETDIESLLETLKHRKDSTTTFPTCVSSETTKLKANGVGTMTGRLFLGTAEKIPPEELVDTTGAGDAFIGAVLYAICAGMPPEKMLPFAAQVAGCSCRALGARTGLPHRTDPRLVPFLV

SEQ ID NO: 6687 - protein, 355 aa, Arabidopsis thaliana
  Clone ID: ARATH-23APR03-C7165_1.p
MEMENHRPGSFTYMGRKFSDLSLNDDSSAFSDCNSDRSGEFPTASSESRRLLLSCASENSDDLINHLVSHLDSSYSIDEQKQAAMEIRLLSKNKPENRIKIAKAGAIKPLISLISSSDLQLQEYGVTAILNLSLCDENKESIASSGAIKPLVRALKMGTPTAKENAACALLRLSQIEENKVAIGRSGAIPLLVNLLETGGFRAKKDASTALYSLCSAKENKIRAVQSGIMKPLVELMADFGSNMVDKSAFVMSLLMSVPESKPAIVEEGGVPVLVEIVEVGTQRQKEMAVSILLQLCEESVVYRTMVAREGAIPPLVALSQAGTSRAKQKAEALIELLRQPRSISNGGARSSSQL

SEQ ID NO: 6688 - protein, 422 aa, Arabidopsis thaliana
  Clone ID: ARATH-23APR03-C7186_1.p
MANARSLVAKANNINVGSLILMALVFGSCVANGEYLGGRRGLAANSGNPTVYDITKFGAVGDGSTNTFKAFLNTWIQVCDSPVPATLLVPKGTFLAGPVIFAGPCKSKVTVNVIGTIIATTSGYATPEWFLFERVDNLVLTGTGTFHGKGEAVWKADGCGKKVQCNLPPTSLKFRNMKNVEINGISSVNAKAFHMFLVKTENVNIQNIKLTAPAESPNTDGIHLSNADNVSILDSTIATGDDCVSVGRGSNNVTVERVICGPGHGLSVGSLGKYKNEEDVSGIHVNNCTMIETDNGLRIKTWGGSDPSKAVDIKFENIIMQSVKNPIIIDQNYGSRGGDSQVAISDILFKNIRGTTITKDVVQIMCSKSVPCQGVNVVDVNLDYVGKTGGEKKSSSGGLVGALCDNANVIFGGKLSFPMCPK

SEQ ID NO: 6689 - protein, 426 aa, Arabidopsis thaliana
  Clone ID: ARATH-23APR03-C7193_1.p
MGNCLDSSAKVDSSSHSPHANSASLSSRVSSKTSRSTVPSSLSINSYSSVESLPTPRTEGEILSSPNLKAFTFNELKNATRNFRPDSLLGEGGFGYVFKGWIDGTTLTASKPGSGIVVAVKKLKTEGYQGHKEWLTEVNYLGQLSHPNLVKLVGYCVEGENRLLVYEFMPKGSLENHLFRRGAQPLTWAIRMKVAIGAAKGLTFLHDAKSQVIYRDFKAANILLDAEFNSKLSDFGLAKAGPTGDKTHVSTQVMGTHGYAAPEYVATGRLTAKSDVYSFGVVLLELLSGRRAVDKSKVGMEQSLVDWATPYLGDKRKLFRIMDTRLGGQYPQKGAYTAASLALQCLNPDAKLRPKMSEVLAKLDQLESTKPGTGVGNRQAQIDSPRGSNGSIVQKSPRRYSYDRPLLHITPGASPLPTHNHSPRVR

SEQ ID NO: 6690 - protein, 413 aa, Arabidopsis thaliana
  Clone ID: ARATH-23APR03-C7194_1.p
MVEAERAENSWIASETSPSSSPVVIESSDFSITDGMRDVSGFGIASRPQLDKGLSENNIGFTERVFSAAGAAVLSAVTLNPLDVVKTRLQAQAAGMSYSHPLSNSIGRMAFFGPNMMFADLRCSPSCARAGVEGTVSICPPDCFQYKGTFDVFTKIIRQEGLGRLWRGTNAGLALAVPMVGIYLPFYDMFRNRLEELSREKAPAMTFCVPTVAGSLARSLACTVCYPIDLARTRMQAFKEAKAGVKPPGVFKTLVGVFSEVRTANNLESSLHNYRGLWRGLGAQLARDVPFSAICWSTLEPIKKRLLGVAGNDTNLVGVFGATFSAGFIAGSIAAAATCPLDVARTRRQIEKDPGRALMMTTRQTLIEVWRDGGMRGLFMGMGPRVARAGPSVGIVVSFYEVVKYVLHRHASS

SEQ ID NO: 6691 - protein, 552 aa, Arabidopsis thaliana
  Clone ID: ARATH-23APR03-C7198_1.p
MALSDDLMSKCSEHMSAYKSACEEHPKLKSFDASLQQRTNKMIDSLTVDAKNGSSSPHDAHMELSKHLVEVTQGVADFITEIEDDVWDNQALKYLVLAYFENTKKTLEIFKTIENCVENAEMGQLLIREALAEFEKESAEKDVGGKKKKYEKTLEDLKSFKEMGDPFDGKVLTTQFELMALSKDLMLKCSEDMMSAYKSACEEHPKLKSFDASLQQRTNKMIDSLTVEDKNGSSSPHDAHMELSKHLVEVTQGVADFITEIEDDVWDNQALKYLVLAYFENTKKTLEIFKTIENCVENAEMGQLLIREALAEFEKESAEKDVGGKKKKYEKTLEDLKSFKEMGDPFDGKVLTTQFERIKKQQESLLEEVSETRKKIQDEISNLEKKTLITNVVFGAAFAIVAVASIALIATGVGAAAGFGALAAPLLAAGWAGVYTTLDKKKDALNKQLEGLKKVEEIEESVEKGIKTNEEATETVSILVDGLEDRIKNMLKLVDNAIDHEDNEAATRIVLTQISKKVEKLTKKITEVGESVEDHSKLIAKARLQVLQKINR

SEQ ID NO: 6692 - protein, 388 aa, Arabidopsis thaliana
  Clone ID: ARATH-23APR03-C7214_1.p
MKQCDRSSLSPFPISSSSLSSSFVASESDPEDSLWSDFTFDFSFLTSEDHKISPNDDNDATTVPKGKELNPLAPQFLPFNAKKNLNKNGREIEVNSSNQNTRIGVLIHDADESLGLVSQDSVSNTMSMLDISNEFQKSKKLDPLAPVFVPACAKLSEKHGAADHMLTMETNVGSTSGVSSSDSMLLNTFKVVGTHSLVVDRSLRNRYSNTRLDRSSNKSHGRKKLNPLAPRFSLADHKQNVYGCEVNQAANDFGDRHGCSTSSPSQKVDVKKLLTTIHGLSELLTHVHSSETSDLPNEQYLDLINCTVQNLNSYINNRVQEHSGDYASAVHSSCDLYSLPNMRKVIRNHHQTEEQINPEVCFYKSLWLKAKAERSLMEHETFLSKARS

SEQ ID NO: 6693 - protein, 261 aa, Arabidopsis thaliana
  Clone ID: ARATH-23APR03-C7266_1.p
MAGQNARLNVVPTVTMLGVMKARLVGATRGHALLKKKSDALTVQFRALLKKIVTAKESMGDMMKTSSFALTEVKYVAGDNVKHVVLENVKEATLKVRSRTENIAGVKLPKFDHFSEGETKNDLTGLARGGQQVRACRVAYVKAIEVLVELASLQTSFLTLDEAIKTTNRRVNALENVVKPKLENTISYIKGELDELEREDFFRLKKIQGYKRREVERQAANAKEFAEEMVLEDISMQRGISINAARNFLVGGAEKDSDIIF

SEQ ID NO: 6694 - protein, 514 aa, Arabidopsis thaliana
  Clone ID: ARATH-23APR03-C7273_1.p
MGLHKLRLAAAVPVTFSSRLFLKPFTNTLTLGLFSRHLQPRNKPLLVRAFSASAAVQDIPATQTSDSSVAARPLWKAAIDFKWIRDNKEAVEINIRNRNSNANLEAVLQLYENMVNLQKEVERLREERNNVAKKMKGKLEPSERERLVEEGKNLKESLVTLEEDLVKLKDELQHVAQSIPNMTHPDVPVGGEDSSAIRQEVGSPREFSFPIKDHLQLGKDLDLIDFDSAAEVSGSKFFYLKNEAVLLEMALLNWTLSQVMKKGYTPLTTPEIVRSSIVEKCGFQPRGDNTQVYSIDGTDQCLIGTAEIPVGGIHMDSILLESALPLKYIAFSHCFRTEAGAAGAATKGLYRVHQFSKAEMFVICQPEDSESFHQELIQIEEDLFTSLGLHFKTLDMATADLGAPAYRKFDIEAWMPGLGRFGEISSASNCTDYQSRRLGIRYRPSEPPQTGPKKGKANLPATKFVHTLNATACAVPRMMVCLLENYQQEDGSVVIPEPLRPFMGGIELIKPKHK

SEQ ID NO: 6695 - protein, 229 aa, Arabidopsis thaliana
  unsure (1)..(229): unsure at all Xaa locations
  Clone ID: ARATH-23APR03-C7310_1.p
MFSFLILQVSEVFQVVIAAVVSIVFLVLAXLTLAGSATALTITTPLFIIFSPILVPATIATAVITTGLTAGGALGTMAAASLLSLRRRFGRRRFGGGRRFGGRFGKPGGGGLGGGGLPGGLGGLGGGGLPGGLGGLGGGENPLAKISKMFGPGAAGGGLPGALGGLGGGGLPGGLGGLGGGENPLAKISKMFGPGAAGAAXGDAPPAETAPAAGAAPAAGAEPAAPPTW

SEQ ID NO: 6696 - protein, 479 aa, Arabidopsis thaliana
  Clone ID: ARATH-23APR03-C7338_1.p
MDPSRHTHVMLVSFPGQGHVNPLLRLGKLIASKGLLVTFVTTEKPWGKKMRQANKIQDGVLKPVGLGFIRFEFFSDGFADDDEKRFDFDAFRPHLEAVGKQEIKNLVKRYNKEPVTCLINNAFVPWVCDVAEELHIPSAVLWVQSCACLTAYYYYHHRLVKFPTKTEPDISVEIPCLPLLKHDEIPSFLHPSSPYTAFGDIILDQLKRFENHKSFYLFIDTFRELEKDIMDHMSQLCPQAIISPVGPLFKMAQTLSSDVKGDISEPASDCMEWLDSREPSSVVYISFGTIANLKQEQMEEIAHGVLSSGLSVLWVVRPPMEGTFVEPHVLPRELEEKGKIVEWCPQERVLAHPAIACFLSHCGWNSTMEALTAGVPVVCFPQWGDQVTDAVYLADVFKTGVRLGRGAAEEMIVSREVVAEKLLEATVGEKAVELRENARRWKAEAEAAVADGGSSDMNFKEFVDKLVTKHVTREDNGEH

SEQ ID NO: 6697 - protein, 409 aa, Arabidopsis thaliana
  Clone ID: ARATH-23APR03-C7358_1.p
MASTKPDSAINLEEEAEGDGVAVDDPIFIPETTNLLVRYSPFDDRDIDCNPYFPFTGPISDSGSGSYSDSEPDPNSCPIDFFDRDSSDVDVAEYLESGGLTAGDYNIWGFYDPKEDEEEEEIVLGTSGSDLQPGDSGEQGLRVTGIDSDSDCEDGVFDFISEDSSGNRGNDSGRVEVGTGLPPVWDHLFGEGTVLADEEWEEVQNAINWTAFSGPEDEDEEDELSSLSRDDEEEDHELDWQVLLTVNNVVNYIEQAEGIMLNPDDIDPDYYLYLSGLDEFDENQSGHYDADAILGQMFDDETGIRGNPPAAKSVIQDLPVVELAVEELDKGNNVCAVCKDEMLVEEKVRRLPCSHFYHGECIIPWLGIRNTCPVCRYELPTDDLEYERHKSSERGDTGLARNVLPGRYS

SEQ ID NO: 6698 - protein, 319 aa, Arabidopsis thaliana
  unsure (1)..(319): unsure at all Xaa locations
  Clone ID: ARATH-23APR03-C7369_1.p
MSLKRSSSSFFIFLFSFFFLSSHVSSQACQKTCGQIPIKYPLGTGSGCGDPRFTRYITCDPDQQTLTLTTHTGSYPITSVDYAKQEIYVTDPSMSTCACTRPSHGFGLDWDAPFSFHDDTVFTLLDCSVDESPVFTPLSNGSGRVSLCDRQSSSICTFLYSNCRAISLINLQVSTCCVYVPLDLGPSFEMDLNKLKCSSYSGFYNLGPGQESHPENWNYGIALKYKFNVFDEYPGVCGSCERSNGACGFNTQSSSFVCNCPGGINTTSDCFFLYNSASILVPWFSRXMGNVPFVMVCCLDGDGSALKEHQRMERFKEEA

SEQ ID NO: 6699 - protein, 451 aa, Arabidopsis thaliana
  Clone ID: ARATH-23APR03-C7376_1.p
MTTALFSPSNRRKRRLTHFFFTVLAFILLAAFIYGHDFISFSRRSLHSPTIVHQSAIVVVVDEPPPPPPTSPPPPSPPPPSPPPPSPPPPSPPPPAFAVGKTPEGCDVFKGNWVKDWSTRPLYRESECPYIQPQLTCRTHGRPDSDYQSWRWRPDSCSLPSFNATVMLESLRGKKMMFVGDSLNRGMYVSLICLLHSQIPENSKSMDAFGSLTVFSLKDYNATIEFYWAPFLLESNSDNATVHRVSDRIVRKGSINKHGRHWRGADIVVFNTYLWWRTGFKMKILEGSFKDEKKRIVEMESEDAYRMALKTMVKWVKKNMDPLKTRVFFATMSPTHYKGEDWGGEQGKNCYNQTTPIQDMNHWPSDCSKTLMKVIGEELDQRAEFPVTVLNITQLSGYRKDAHTSIYKKQWSPLTKEQLANPASYSDCIHWCLPGLQDTWNELFFAKLFYP

SEQ ID NO: 6700 - protein, 461 aa, Arabidopsis thaliana
  Clone ID: ARATH-23APR03-C7395_1.p
MASSLPLLPKPISPFFKTPPFSTSKPLVFLNFQTRLTSRSSDVSVNLKKKNNPWLDPFDSGEDPDNEYGSLFADGKQDEDPRPPDNPDNPYGFLKFPKGYTVELASLPLKIRGDVRRCCCVISGGVYENLLFFPTIQLIKDRYPGVQVDILTTERGKQTYELNKNVRWANVYDPDDHWPEPAEYTDMIGLLKGRYYDMVLSTKLAGLGHAAFLFMTTARDRVSYIYPNVNSAGAGLMLSETFTAENTNLSELGYSMYTQMEDWLGRPFRSVPRTPLLPLRVSISRKVKEVVAAKYRNAGAVTGKFIVIHGIESDSKASMQSKGDADSLLSLEKWAKIIKGVRGFKPVFVIPHEKERENVEDFVGDDTSIVFITTPGQLAALINDSAGVIATNTAAIQLANARDKPCIGLFSSEEKGKLFVPYAEEKSNCVIIASKTGKLADIDIGTVKNAMQVFEGSLALV

SEQ ID NO: 6701 - protein, 390 aa, Arabidopsis thaliana
  Clone ID: ARATH-23APR03-C7405_1.p
MSSSSSTTTNTTTESDSSSLPTHIGRSNSDGIIDTTPFLPPTVTRTISVDEESNPIHRSARRQGLREAARFLRHAGSRRMMREPSMLVRETAAEQLEERQSDWAYSKPVVFLDILWNLAFVAIGVAVLILSRDEKPNMPLRVWVVGYGIQCWLHMACVCVEYRRRRRRRHPEDGGGSGLTNSSSQQYVSLAQLEDRGETSNPAKHLESANTMFSFIWWIIGFYWVSAGGQTLSSDSPQLYWLCIIFLGFDVFFVVFCVALACVIGLAVCCCLPCIIAILYAVADQEGASKNDIDQMPKFRFTKTGNVEKLSGKARGIMTECGTDSPIERSLSPEDAECCICLCEYEDGVELRELPCNHHFHCTCIDKWLHINSRCPLCKFNILKNANNEV

SEQ ID NO: 6702 - protein, 1111 aa, Arabidopsis thaliana
  Clone ID: ARATH-23APR03-C7575_1.p
MSSNTSRSCSTRSRQNSRVSSQVLVDAKLHGNFEESERLFDYSASINLNMPSSSCEIPSSAVSTYLQKIQRGMLIQPFGCLIVVDEKNLKVIAFSENTQEMLGLIPHTVPSMEQREALTIGTDVKSLFLSPGCSALEKAVDFGEISILNPITLHCRSSSKPFYAILHRIEEGLVIDLEPVSPDEVPVTAAGALRSYKLAAKSISRLQALPSGNMLLLCDALVKEVSELTGYDRVMVYKFHEDGHGEVIAECCREDMEPYLGLHYSATDIPQASRFLFMRNKVRMICDCSAVPVKVVQDKSLSQPISLSGSTLRAPHGCHAQYMSNMGSVASLVMSVTINGSDSDEMNRDLQTGRHLWGLVVCHHASPRFVPFPLRYACEFLTQVFGVQINKEAESAVLLKEKRILQTQSVLCDMLFRNAPIGIVTQSPNIMDLVKCDGAALYYRDNLWSLGVTPTETQIRDLIDWVLKSHGGNTGFTTESLMESGYPDASVLGESICGMAAVYISEKDFLFWFRSSTAKQIKWGGARHDPNDRDGKRMHPRSSFKAFMEIVRWKSVPWDDMEMDAINSLQLIIKGSLQEEHSKTVVDVPLVDNRVQKVDELCVIVNEMVRLIDTAAVPIFAVDASGVINGWNSKAAEVTGLAVEQAIGKPVSDLVEDDSVETVKNMLALALEGSEERGAEIRIRAFGPKRKSSPVELVVNTCCSRDMTNNVLGVCFIGQDVTGQKTLTENYSRVKGDYARIMWSPSTLIPPIFITNENGVCSEWNNAMQKLSGIKREEVVNKILLGEVFTTDDYGCCLKDHDTLTKLRIGFNAVISGQKNIEKLLFGFYHRDGSFIEALLSANKRTDIEGKVTGVLCFLQVPSPELQYALQVQQISEHAIACALNKLAYLRHEVKDPEKAISFLQDLLHSSGLSEDQKRLLRTSVLCREQLAKVISDSDIEGIEEGYVELDCSEFGLQESLEAVVKQVMELSIERKVQISCDYPQEVSSMRLYGDNLRLQQILSETLLSSIRFTPALRGLCVSFKVIARIEAIGKRMKRVELEFRIIHPAPGLPEDLVREMFQPLRKGTSREGLGLHITQKLVKLMERGTLRYLRESEMSAFVILTEFPLI

SEQ ID NO: 6703 - protein, 391 aa, Arabidopsis thaliana
  Clone ID: ARATH-23APR03-C758_1.p
MLPVTSRRHFTMSLYMLRSSSPHINHHSFLLPSFVSSKFKHHTLSPPPSPPPPPPMAACIDTCRTGKPQISPRDSSKHHDDESGFRYMNYFRYPDRSSFNGTQTKTLHTRPLLEDLDRDAEVDDVWAKIREEAKSDIAKEPIVSAYYHASIVSQRSLEAALANTLSVKLSNLNLPSNTLFDLFSGVLQGNPDIVESVKLDLLAVKERDPACISYVHCFLHFKGFLACQAHRIAHELWTQDRKILALLIQNRVSEAFAVDFHPGAKIGTGILLDHATAIVIGETAVVGNNVSILHNVTLGGTGKQCGDRHPKIGDGVLIGAGTCILGNITIGEGAKIGAGSVVLKDVPPRTTAVGNPARLLGGKDNPKTHDKIPGLTMDQTSHISEWSDYVI

SEQ ID NO: 6704 - protein, 368 aa, Arabidopsis thaliana
  Clone ID: ARATH-23APR03-C7611_1.p
MNSTSTHFVPPRRVGIYEPVHQFGMWGESFKSNISNGTMNTPNHIIIPNNQKLDNNVSEDTSHGTAGTPHMFDQEASTSRHPDKIQRRLAQNREAARKSRLRKKAYVQQLETSRLKLIQLEQELDRARQQGFYVGNGIDTNSLGFSETMNPGIAAFEMEYGHWVEEQNRQICELRTVLHGHINDIELRSLVENAMKHYFELFRMKSSAAKADVFFVMSGMWRTSAERFFLWIGGFRPSDLLKVLLPHFDVLTDQQLLDVCNLKQSCQQAEDALTQGMEKLQHTLADCVAAGQLGEGSYIPQVNSAMDRLEALVSFVNQADHLRHETLQQMYRILTTRQAARGLLALGEYFQRLRALSSSWATRHREPT

SEQ ID NO: 6705 - protein, 588 aa, Arabidopsis thaliana
  Clone ID: ARATH-23APR03-C7627_1.p
MEIAPSTSRFKLYDQFELLEFPDKYVVKPIESPEEGFSVNRRDGNIKPLDENASSGSPTRVSTIYGVGGTIRLLAGTYLLVITSREEVGNFLGLPIFRVTAMKFLPCNEALRFATAQEKKDETYFRTLLQALETTPGLYFSYETDLTLNLQRRCKLAEGWNRKPMWKQADPRYVWNWHLLEDLIECKLDGFIIPILQGSYQVAELKLKNSPAVVSIMSRRCTRRLGTRMWRRGANLEGDAANFVESEQIVEINGFKFSLLQVRGSIPLLWEQIVDLSYKPRLKINKHEETPKVVQRHFHDLCQRYGEIMAVDLTDQHGDEGALSKAYATEMEKLPDVRYVSFDFHQVCGTTNFDNLGVLYEQIGDEFEKQGYFLVDADENILEEQKGVIRSNCIDCLDRTNVTQSFMGQKSLNLQLQRIGVCDSTECISTFEDDYTKFRTIWAEQGDEVSLQYAGTYALKGDLVRYGKQTMTGAIKDGLSAMSRYYLNNFQDGVRQDALDLISGRYTVGTHSPSQLQPIGSQPSFLPVASALLIGGVTVTSFTIHQAGRNTQQYLASALWAGVTAGVVAMIKANGRHLTSRPRLCHLI

SEQ ID NO: 6706 - protein, 502 aa, Arabidopsis thaliana
  Clone ID: ARATH-23APR03-C7659_1.p
MKAAVFRNEDGDEEEEEEEEEEVCNVFDGGEVESKRNNETKNLKGFFTSLLLMEEHEKQDQEARNAASRREMSDFQSNYRKRARTMSDYYSDLNDYYADAEESGDINLKKSRVSRAVASVAVAAASEIEAESSEITGSGSVRGTGSGQQRRLWVKDRSRAWWEECSRLDYPEEDFKKAFRMSKSTFELICDELNSAVAKEDTALRNAIPVRQRVAVCIWRLATGEPLRLVSKKFGLGISTCHKLVLEVCKAIKDVLMPKYLQWPDDESLRNIRERFESVSGIPNVVGSMYTTHIPIIAPKISVASYFNKRHTERNQKTSYSITIQAVVNPKGVFTDLCIGWPGSMPDDKVLEKSLLYQRANNGGLLKGMWVAGGPGHPLLDWVLVPYTQQNLTWTQHAFNEKMSEVQGVAKEAFGRLKGRWACLQKRTEVKLQDLPTVLGACCVLHNICEMREEKMEPELMVEVIDDEVLPENVLRSVNAMKARDTISHNLLHHGLAGTSFL

SEQ ID NO: 6707 - protein, 411 aa, Arabidopsis thaliana
  Clone ID: ARATH-23APR03-C7676_1.p
MAAISPANATTAASLSLPQFSSTSSSLSSSSSPSFLNFKTASVSNRCVKCGVRSLENHSGHRSLDFLSNGDPISLINPNSSSPITMAAATSESGSKSSKRVCLFHSDETRDLAERIVAKSDCIELRSINWKKFDDGFPNLFIQNAQGIRGQHVAFLASFSSPAVIFEQLSVIYALPKLFVSSFTLVLPFFPTGTSERMEDEGDVATAFTLARILSNIPTSRGGPTSLVTFDIHALQERFYFGDTILPCFESGIPLLKSRLQSLPDSDNISIAFPDDGAWKRFHKQLQHYPTIVCNKVRMGDKRIVRIKEGDAEGRHVVIVDDLVQSGGTLIECQKVLAAHGAAKISAYVTHGIFPRSSWKRFKLDTKGDPAEGLSYFWITDSCGMTVKEVMNKPPFEVLSLAGSIASALQV

SEQ ID NO: 6708 - protein, 425 aa, Arabidopsis thaliana
  Clone ID: ARATH-23APR03-C7682_1.p
MQTISPAFSCDLKSVIQPNLTAKKARYSHVNGKRVSVRCSYRSESFSFPNGVGSSRADWQSSCAILASKVVSAENSSSVAVVNGHSNGSVDLSLVPSKSQHNGKPGLIQPLTITDLSPAPSHGSTLRVAYQGVPGAYSEAAAGKAYPNSEAIPCDQFDVAFQAVELWIADRAVLPVENSLGGSIHRNYDLLLRHRLHIVGEVQIPVHHCLLALPGVRTDCITRVISHPQALAQTEGSLNKLTPKAAIEAFHDTAAAAEYIAANNLHDTAAVASARAAELYGLQILADGIQDDAGNVTRFLMLARDPIIPRTDRPFKTSIVFAAQEHKGTSVLFKVLSAFAFRNISLTKIESRPHQNCPVRVVGDENVGTSKHFEYTFYVDFEASMAEARAQNALAEVQEYTSFLRVLGSYPMDMTPWSTLPSEDV

SEQ ID NO: 6709 - protein, 560 aa, Arabidopsis thaliana
  unsure (1)..(560): unsure at all Xaa locations
  Clone ID: ARATH-23APR03-C7684_1.p
MSQKLMFLFTLACLSSLPSPFISAQIPAIGNATSPSNICRFAPDPSYCRSVLPNQPGDIYSYGRLSLRRSLSXARRFISMIDAELDRKGKVAAKSTVGALEDCKFLASLTMDYLLSSSQTADSTKTLSLSRAEDVHTFLSAAITNEQTCLEGLKSTASENGLSGDLFNDTKLYGVSLALFSKGWVPRRQRSRPIWQPQARFKKFFGFRNGKLPLKMTERARAVYNTVTRRKLLQSDADAVQVSDIVTVIQNGTGNFTTINAAIAAAPNKTDGSNGYFLIYVTAGLYEEYVEVPKNKRYVMMIGDGINQTVITGNRSVVDGWTTFNSATFILSGPNFIGVNITIRNTAGPTKGQAVALRSGGDLSVFYSCSFEAYQDTLYTHSLRQFYRECDVYGTVDFIFGNAAVVLQNCNLYPRQPRKGQSNEVTAQGRTDPNQNTGTAIHGCTIRPADDLATSNYTVKTYLGRPWKEYSRTVVMQTYIDGFLEPSGWNAWSGDFALSTLYYAEYNNTGPGSDTTNRVTWPGYHVINATDASNFTVTNFLVGEGWIGQTGVPFVGGLIA

SEQ ID NO: 6710 - protein, 513 aa, Arabidopsis thaliana
  Clone ID: ARATH-23APR03-C7690_1.p
MHLKNSTVAERRYIGKETAGYLTSSSDLDPKPKIKHHRPLQVPEILTPDIGAGAGFSVYNNQVQAQSRHHLTVEIPDSSSHNLTSKRPVVVQSSNPFNVDDFRRQQRTSLGSISSYCPSYLLSFFSSSLPSIPSATNQKLLRHVLRVRLICFHLRFLLLLSVPPLYIFFLLISFRFFLLFVFSIIAFSFVLSISLKFALPHLPSIRLIIARLLSLKLTPTRSSSSSQENTKHVIWSIGSKPVTEKKTNSGSWVQKYSSGDVYEGEFHRGKCSGSGVYYYSMKGKYEGDWIDGKYDGYGVETWAKGSRYRGQYRQGMRHGTGIYRFYTGDVYAGEWSNGQSHGCGVYTSEDGSRFVGEFKWGVKHGLGHYHFRNGDTYAGEYFADRMHGFGVYQFGNGHRYEGAWHEGRRQGLGMYTFRNGETQAGHWEDGVLNCPTEQTTRPDSSFSISHSKVVDTVQQARKAAKKAREVVKVEERVNRAVMVANRAANAARVAATKAVQTQTFHCSSGDDPL

SEQ ID NO: 6711 - protein, 434 aa, Arabidopsis thaliana
  Clone ID: ARATH-23APR03-C7700_1.p
MAGVIRAKQLFLCSSILSSNNNKVLSRLPRRSINVIAGNLNSSETKKKEKEKRKRRKEIEVEKATAEAVVNKEKRRTRSSRGYELADGDEVPSSHVPVMLGEVLDIFSSVRLRSFVDCTLGAAGHSSSIIQSHSELKNFVGMDVDPVARKLGHFHIDSLMHPTLKASIVLKNFKYIKSVIADTQPELLDVGVDGILMDLGMSSMQVNNPERGFSVLQEGPLDMRMDPQATLTAEDIVNSWPESELGRVLRDYGEESNWYLLQNRIVKARLNGGLHSTGELVDLIRGTSPASRGGRQGWIKTATRVFQGLRIAVNDELKTLQNSLYSSFDVLAPGGRLAVISFHSLEDRVVKQTFLDILGFQREEINGEGSSVKPERQIEERVEKELKEKEEWIKQTVIASKGVILTKRPITPSEEEERLNRRARSAKLRVIQKL

SEQ ID NO: 6712 - protein, 338 aa, Arabidopsis thaliana
  Clone ID: ARATH-23APR03-C7720_1.p
MASSTLFKLNSQTFKALNPSPPSLSPPNSRIFHLHFSKSLSQQHSKLNHKSTTTRLFAPLCSSLPSPSSSSPPLSKEEAINQAKTCLLSCLIKPLNNPKLASPKLRKLKQPRFRLEIPILDDDSPSSLSQLAFSIFHDLPISRRGSNVKLLFLWPNPSFIDPAVKAFRSDSIHHIAMSPVSDSLKTALRSADVAIFMAPEKSQLEDVKTASEAFSTKPVVMINPRWLFEEEKSFGDGFIGSFEVIYAFTGLEVRGVFSKRKGVIFKCVRDGVVSGERWNVLVEEEEGNGTLKVVSQFNSRPSIEEVELVLYNLMAMNSPITKSAKFLSDLVSNITGKK

SEQ ID NO: 6713 - protein, 309 aa, Arabidopsis thaliana
  Clone ID: ARATH-23APR03-C7724_1.p
MASCSSSSISLLQPLHSLSSSTLFFSQPSFHFSSSLKPNKSKRHNLSKSLTLRFALTESDSTKPLEIEEPSSKSLLLQLSKCFDLPSDYFQQLPNDLRLDLNDAAFDLSNGPVIDECGQELGETLLNLSRAWEQADTSTSRSLVEKLPELEILLTDGARSAFGKRLISAGKRFQGMGQYAKGELQKIAKAMITTGGVLSAKTSSVSVSNESKSGTRMFKFGELQVAVTPEKAYTGAAIAFIYGILSWQISQGIQSIPENSLQYANDNALLIGKSLRGSLLALFYASTVLSGFTTAGLILLAKQLSSEKE

SEQ ID NO: 6714 - protein, 633 aa, Arabidopsis thaliana
  Clone ID: ARATH-23APR03-C7746_1.p
MGNYRWPSKLSKLSLRAKQTNLYRVILIAILCVTFYFVGVWQHSGRGISRSSISNHELTSVPCTFPHQTTPILNFASRHTAPDLPPTITDARVVQIPSCGVEFSEYTPCEFVNRSLNFPRERLIYRERHCPEKHEIVRCRIPAPYGYSLPFRWPESRDVAWFANVPHTELTVEKKNQNWVRYEKDRFLFPGGGTMFPRGADAYIDEIGRLINLKDGSIRTAIDTGCGVASFGAYLMSRNIVTMSFAPRDTHEAQVQFALERGVPAIIGVLASIRLPFPARAFDIAHCSRCLIPWGQYNGTYLIEVDRVLRPGGYWILSGPPINWQRHWKGWERTRDDLNSEQSQIERVARSLCWRKLVQREDLAVWQKPTNHVHCKRNRIALGRPPFCHRTLPNQGWYTKLETCLTPLPEVTGSEIKEVAGGQLARWPERLNALPPRIKSGSLEGITEDEFVSNTEKWQRRVSYYKKYDQQLAETGRYRNFLDMNAHLGGFASALVDDPVWVMNVVPVEASVNTLGVIYERGLIGTYQNWCEAMSTYPRTYDFIHADSVFSLYKDRCDMEDILLEMDRILRPKGSVIIRDDIDVLTKVKKITDAMQWEGRIGDHENGPLEREKILFLVKEYWTAPAPDQSSDP

SEQ ID NO: 6715 - protein, 731 aa, Arabidopsis thaliana
  Clone ID: ARATH-23APR03-C7752_1.p
MLSLRNLTTSFVALPSRSKPSSSPSLRRRLVRCRLTEAATFSPIDVVSGESERAVGSLTELKNGGGWKVEDELPSAEDGGEGGVEDDDSEEEEGISSIHVPREKYINVSKSDLVNGIVTKLLDSQDGGDADIFLLLSSCLDSILHAEHKRILEQMRADFVATQSLEEVKTGGDSSGDEESSTSDGEIDSEEELKNSEPRSVNGYEGLSFPLADGFDIWNFLISSGKHAKKRSAESVMAATRFQRSFIQLLDNAGFEELSARDLALTSALNTDYLLTLPVYVDWKKASESNAIVFRRGFATEKEKGLLLVEKLDYIQSKVLQVIFSTIAKPLRKVGKLINKALSEASQTQEIQDLSEGMKVWLKDLSLFKESYLDQTSDNFLKDGFLPDSVLPMQLAAQRAVSRYEGLLTPVGPRAKLFRKLLGWIGFISRDYETPSQLANDSSSSEPYLRPIFLSRMTLADIWKPASKKACGNDIWKRIKTSISILLSPSTLQEPAFEELILLYTKDASEKDDKNKDETRSSLQLEIFERIPIPDLPVIFPHKKLYFRIIDTVRLDIASILGLTAYFVNYKFENISSSPSAFFLDVIAVTALVIYATRVVLGYKQTWDRYQLLVNKTLYEKTLASGFGSVHFLLDASEQQQYKEAILTYAIILQAGKNQNMSYKGVGDRCERFMYDTFKIKVEMRVEKAISTLVRLGLVTETLVDSNTKLQAVPCPQAYISLKELWSSLLG

SEQ ID NO: 6716 - protein, 341 aa, Arabidopsis thaliana
  Clone ID: ARATH-23APR03-C7774_1.p
MAIYRSLRKLVEINHRKTRPFFTAATASGGTVSLTPPQFSPLFPHFSHRLSPLSKWFVPLNGPLFLSSPPWKLLQSATPLHWRGNGSVLKKVEALNLRLDRIRSRTRFPRQLGLQSVVPNILTVDRNDSKEEDGGKLVKSFVNVPNMISMARLVSGPVLWWMISNEMYSSAFLGLAVSGASDWLDGYVARRMKINSVVGSYLDPLADKVLIGCVAVAMVQKDLLHPGLVGIVLLRDVALVGGAVYLRALNLDWKWKTWSDFFNLDGSSPQKVEPLFISKVNTVFQLTLVAGAILQPEFGNPDTQTWITYLSWLVASTTMASTAAYGVQYWKKRPISMIKRS

SEQ ID NO: 6717 - protein, 420 aa, Arabidopsis thaliana
  Clone ID: ARATH-23APR03-C77_15.p
MVCSSFIRSFIVQAGCRIGVLAQGRHQFIHIKKTLSVGFGFRTSVIGFRTTSGIGFRTSAKMMVDTSAGEKRISLVDMPPEKVDDGGYIGGGWKNDDGSLSCGYCSFRGKRSTMEDFYDIKASTIEGQAVCMFGIFDGHGGSRAAEYLKEHLFNNLMKHPQFLTDTKLALNETYKQTDVAFLESEKDTYRDDGSTASAAVLVGNHLYVANVGDSRTIVSKAGKAIALSDDHKPNRSDERKRIESAGGVIMWAGTWRVGGVLAMSRALGNRMLKQFVVAEPEIQDLEIDHEAELLVLASDGLWDVVPNEDAVALAQSEEEPEAAARKLTDTAFSRGSADNITCIVVKFRHDKTESPKIETNAMAESEPELNPTTELEPESNPSTALETESIPKAELESEPDAIPDPKPETEPETKGEKAGE

SEQ ID NO: 6718 - protein, 507 aa, Arabidopsis thaliana
  Clone ID: ARATH-23APR03-C77_20.p
MSYLLRRNKFVALLKRQSLIFPITSTEAKTLINPDPNIPQFQNPCSIFRIAHYATQSSKFPEYEMPTVTWGVIQGKKEKLVNRVKICDYLKGLGIITDELESIELPSTIEVMCERVEFLQKLGLTIDDINEYPLMLGCSVRKNLIPVLAYLEKIGISRSKLGEFVKNYPQVLHASVVVELAPVVKFLRGLDVEKQDLGYVLMKYPELLGFKLEGTMSTSVAYLVSIGVSPRDIGPMVTQYPYLLGMRVGTMIKPLVDYLISIGLPKKIVARMLEKRSYIVGYNLEETVKPNVDCLISFGVKKELLPLLIAQYPQILGLPVKAKMSTQQYFFSLKLKIDPEGFARVVEKMPQIVSLKQNVIMKPIEFLLGRAFQVEDIAKMVVRCPQILCSRVELMKNSYYFYKTEMGRPMKELVEYPEYFTYSLESRIKPRYQKLQSKGIRSSLNWFLNCSDQRFEERLQGNFIDPDTEGPTFDMGGKLEMPGGEIVTDEEEDESDDEVLYRRTLTL

SEQ ID NO: 6719 - protein, 1053 aa, Arabidopsis thaliana
  Clone ID: ARATH-23APR03-C7802_1.p
MGIFNGLPVPSDKTYLREELARIDESWAAARFDSLPHVVHILTSKDREADIHILKEQSDVVEEVVDEVVHAYHGGFNKAIQNYSQILRLFSESTEKIGDLKHDLAEAKQSLGARNKQLHQLWYRSVTLRHIISLLDQIEGIAKVPSRIEKLIADKQFYAAIQVYLQSSLMLEREGLQTVGALQDVRSELTKLRGALFFKILDDLHAHLYNRGEYSSVASSIYERDDEVPTTTAVAASRMSSQPLSRRTRTLKGDSQFGVRGLTNGSYRTASNDESSSFDGHDEEDSVEHDESTADTARNGTDSKLLSHQLPPWLSDSTPDEFIEAVRKSDDPLHVKYLQTLVQCLCMLGKVAAAGAIICQKLRPTIHEIIISKIKAHLETTNLSKSACSQGDRSVAAGLHLIKGQSEAYRLSKEKPQNGISNSGTHLAVSPVSPLMAPGGKAQAAAKELLDSILDTIVKIFENHVVIGELLEMKASQHDINTPRSLPTDVNWNTESEASQATGGYTISFPLTVLQSECQQLICEILRATPEAASADAAAQTAKLAKKAPKKDKRDAPEDGLTFTFRFTDATVSISNQGADLIRQGWGKRAPNASLEGYGSAAVLPEQGIYLAASIYRPVLQFTDKITSMLPKKHSQLVNDGLLTFTENFVKDHLLPTMFVDYRKGVQQAISSAAAFRPRAHTTTYTATVEKGRPILQGLLAIDLLAKEVLGWAQAMPKFATDLVKYVQTFLERTFERCRTSYMEAVLEKLSYMLIGRHDIEKLMRLDAASACLPSTLGHAVSHSEAVGTEVELSDLFLSLRPIKQDNLIRDDNKLILLASLSDSLEYVADSIERLGQAVPRVASQAEGNSRNQAASPRNLASFADEYRKLATDCLKVLRVEMQLETVFHLQEMTNREYLEDEDAEEPDDFVISLTSQITRREEGMAPFISGEKRNYVFGGISGIAANASIKALADMRSINLFGVQQICRNTIAVEQAMAAIPYIDGETVQQNLDRVRTYFELLNMPFEALLAFIAEHDQMFTPTEYSNLLKVNVPGRDTPSDAQSRLLEILSH

SEQ ID NO: 6720 - protein, 395 aa, Arabidopsis thaliana
  Clone ID: ARATH-23APR03-C78276_1.p
MALFLSPKTITLLFFSLSLALYCSIDPFHHCAISDFPNFVSHEVISPRPDEVPWERDSQNSLQKSKILFFNQIQGPESVAFDSLGRGPYTGVADGRVLFWDGEKWIDFAYTSSNRSEICDPKPSALSYLRNEHICGRPLGLRFDKRTGDLYIADAYMGLLKVGPEGGLATPLVTEAEGVPLGFTNDLDIADDGTVYFTDSSISYQRRNFLQLVFSGDNTGRVLKYDPVAKKAVVLVSNLQFPNGVSISRDGSFFVFCEGDIGSLRRYWLKGEKAGTTDVFAYLPGHPDNVRTNQKGEFWVALHCRRNYYSYLMARYPKLRMFILRLPITARTHYSFQIGLRPHGLVVKYSPEGKLMHVLEDSEGKVVRSVSEVEEKDGKLWMGSVLMNFVAVYDL

SEQ ID NO: 6721 - protein, 379 aa, Arabidopsis thaliana
  Clone ID: ARATH-23APR03-C78327_1.p
MAMSNSLKKLSSCVLIDLDGTLINTDGVVGDILRKYLCKYGKQWDGRESLKIVGKTPLEAATTIVEDYELPCKVDEFNSEFYPLFSAQMDKIKSLPGANRLIRHLKCHGVPVALASNSSRANIESKISYHEGWKECFSVIVGSDEVSKGKPSPDIFLEAAKRLNKDPEDCLVIEDSVPGVMAGKAAGTKVIAVPSLPKQTHLYTSADEIINSLLDIRLEKWGLPPFQDWIENTLPIDPWHIGGPVIKGFGRGSKVLGIPTANLSTKDYADELLEHPSGVYFGWAGLATRGVFKMVMSIGWNPYFNNKEKTIEPWLLHDFTEDFYGEELRLIIVGYIRPEANFSSLESLIAKIHEDREVAEKALDLPSYAKFKGDPYLTK

SEQ ID NO: 6722 - protein, 487 aa, Arabidopsis thaliana
  Clone ID: ARATH-23APR03-C7842_1.p
MFGSTLDSSRGNSAASGQLLTPTRFVWPYGGRRVFLSGSFTRWTEHVPMSPLEGCPTVFQVICNLTPGYHQYKFFVDGEWRHDEHQPFVSGNGGVVNTIFITGPDMVPAGFSPETLGRSNMDVDDVFLRTADPSQEAVPRMSGVDLELSRHRISVLLSTRTAYELLPESGKVIALDVNLPVKQAFHILYEQGIPLAPLWDFGKGQFVGVLGPLDFILILRELGTHGSNLTEEELETHTIAAWKEGKAHISRQYDGSGRPYPRPLVQVGPYDNLKDVALKILQNKVAAVPVIYSSLQDGSYPQLLHLASLSGILKCICRYFRHSSSSLPILQQPICSIPLGTWVPRIGESSSKPLATLRPHASLGSALALLVQAEVSSIPVVDDNDSLIDIYSRSDITALAKDKAYAQIHLDDMTVHQALQLGQDASPPYGIFNGQRCHMCLRSDSLVKVMERLANPGVRRLVIVEAGSKRVEGIISLSDVFQFLLGL

SEQ ID NO: 6723 - protein, 378 aa, Arabidopsis thaliana
  Clone ID: ARATH-23APR03-C785_1.p
MAILCTTTSPAEKEHEPKQDLEKDQTSPLIFNPSLLNLQSQIPNQFIWPDEEKPSIDIPELNVPFIDLSSQDSTLEAPRVIAEACTKHGFFLVVNHGVSESLIADAHRLMESFFDMPLAGKQKAQRKPGESCGYASSFTGRFSTKLPWKETLSFQFSNDNSGSRTVQDYFSDTLGQEFEQFGKVYQDYCEAMSSLSLKIMELLGLSLGVNRDYFRGFFEENDSIMRLNHYPPCQTPDLTLGTGPHCDPSSLTILHQDHVNGLQVFVDNQWQSIRPNPKAFVVNIGDTFMALSNGIFKSCLHRAVVNRESARKSMAFFLCPKKDKVVKPPSDILEKMKTRKYPDFTWSMFLEFTQKHYRADVNTLDSFSNWVITNNNPI

SEQ ID NO: 6724 - protein, 170 aa, Arabidopsis thaliana
  Clone ID: ARATH-23APR03-C7883_1.p
MGDFSIQISSKLINQLAEGNDQPKRRAKKTKPKVSPQSKQKTNQDEEKKPNPVAELPMQPPFFFPIPPQGAASTELESIKSVVKESEKVLEKLELQEKNIVREVTERAKDLREKEFKIPEPKPMPCSSDHEAWMKCYKENIGSPLKCSGFVKSFQDCARRSRQQVNPEEK

SEQ ID NO: 6725 - protein, 288 aa, Arabidopsis thaliana
  Clone ID: ARATH-23APR03-C7909_1.p
MLNSITLTREPPLPFNSVGFSGNHSSSFGRRTITEGSSSKALSFGYKNVGSLKCGRSNWPGRSGTAFGHLVRVSAVPGGNSGGSGGLGGSGGGGGGSGGGGGDGSDGKGKKWSLLSWYQALLSNSPVLTKAVTAALLNLVGDLICQLTINKTSSLDKKRTLTFTFLGLGLVGPTLHFWYLYLSKVVTASGLSGAVIRLLLDQFVFAPIFVGVFLSAVVTLEGKPSNVIPKLQQEWTGAMIANWQLWIPFQFLNFRFVPQNYQVLASNVVALAWNVILSFKAHKEVVAK

SEQ ID NO: 6726 - protein, 462 aa, Arabidopsis thaliana
  unsure (1)..(462): unsure at all Xaa locations
  Clone ID: ARATH-23APR03-C7913_1.p
MQSSTYAVKGNAAFAFQRRTFSSDRSATSTGIRFAGTKSLATTGSLYCSDSKAMGATLARADDGIQSVMSFSSVKARSVRAQASSDGDEEEAIPLRSEGKSSGTVLPFVGVACLGAILFGYHLGXGIGFSSAIVPLYISEISPTEIRGALGSVNQLFICIGILAALIAGLPLAANPLWWRTMFGVAVIPSVLLAIGMAFSPESPRWLVQQGKVSEAEKAIKTLYGKERVVELVRDLSASGQGSSEPEAGWFDLFSSRYWKVVSVGAALFLFQQLAGINAVVYYSTSVFRSAGIQSDVAASALVGASNVFGTAVASSLMDKMGRKSLLLTSFGGMALSMLLLSLSFTWKALAAYSGTLAVVGTVLYVLSFSLGAGPVPALLLPEIFASRIRAKAVALSLGMHWISNFVIGLYFLSVVTKFGISSVYLGFAGVCVLAVLYIAGNVVETKGRSLEEIELALTSGA

SEQ ID NO: 6727 - protein, 319 aa, Arabidopsis thaliana
  Clone ID: ARATH-23APR03-C79243_1.p
MESEIASEFLPFCRIYKDGRVERLIGTDTIPASLDPTHDVVSKDVIYSPENNLSVRLFLPHKSTKLTAGNKLPLLIYIHGGAWIIESPFSPLYHNYLTEVVKSANCLAVSVQYRRAPEDPVPAAYEDVWSAIQWIFAHSNGSGPVDWINKHADFGKVFLGGDSAGGNISHHMAMKAGKEKKLDLKIKGIAVVHPAFWGTDPVDEYDVQDKETRSGIAEIWEKIASPNSVNGTDDPLFNVNGSGSDFSGLGCDKVLVAVAGKDVFVRQGLAYAAKLEKCEWEGTVEVVEEEGEDHVFHLQNPKSDKALKFLKKFVEFIIG

SEQ ID NO: 6728 - protein, 241 aa, Arabidopsis thaliana
  Clone ID: ARATH-23APR03-C79361_1.p
MASTKINSLTTTIYNYKSPRRYINHKSQNQIKLISNSLNPKPNTTQLPNTLYSVSFKTIGTGKLGISRYPDFEYSPLGGSGAGTAKKIDDKNRASNSELSVCFNVATLYIPSLTSQTTKFLGFPLPPFLKIDISPEIFQGTINQESGKVELEFMAKFFFTAGGGIYRAPALVVRTVLTTEESIGENKRGKGERLDEEGKCRLVGVAKVETIDDLFMNTFLSLPAECLADLQAIISVSDNQS

SEQ ID NO: 6729 - protein, 137 aa, Arabidopsis thaliana
  Clone ID: ARATH-23APR03-C7947_1.p
MASSSIALFLALNLLFFTTISACGSCTPCGGGCPSPKPKPTPKPTPSPSSGSSKCPKDTLKLGVCANVLNGLLDLTLGKPPVEPCCSLIQGLADVEAAVCLCTALKANILGINLNLPISLSLLLNVCSKQLPPGFQC

SEQ ID NO: 6730 - protein, 697 aa, Arabidopsis thaliana
  Clone ID: ARATH-23APR03-C7959_1.p
MAMTSWPSTGRQRRHQLASMLLLVLVVVGIYVPVFALLPSLSYTPQSLPSAIPQDEKMISRKFYIKDDNFWKDGNRFQIIGGDLHYFRVLPEYWEDRLLRANALGLNTIQVYVPWNLHEPKPGKMVFEGIGDLVSFLKLCEKLDFLVMLRAGPYICGEWDLGGFPAWLLAVKPRLQLRTSDPVYLKLVERWWDVLLPKVFPLLYSNGGPVIMVQIENEYGSYGNDKAYLRKLVSMARGHLGDDIIVYTTDGGTKETLDKGTVPVADVYSAVDFSTGDDPWPIFKLQKKFNAPGRSPPLSSEFYTGWLTHWGEKITKTDAEFTAASLEKILSRNGSAVLYMVHGGTNFGFYNGANTGSEESDYKPDLTSYDYDAPIKESGDIDNPKFQALQRVIKKYNASPHPISPSNKQRKAYGSIKMQMTTSLFDLVRMTDPADVITSANPISMESVGQMFGFLLYESSYIAKKSGNTLRIPKVHDRAQVFVSCLSQDVDVGVLRYIGTTERWNNQPISLPTIECTTNTSLFILVENMGRVNYGPYIFDDKGILSSVYLDGQILHGWKMIPIPFHNLNQEPNLTFEMQHTKNRSKKFELTNDVGRKEPALFAGEFSINSEEEIKDTYLSFNGWGKGVAFVNEFNIGRYWPSVGPQCNLYVPAPLLKRGKNTLVVFELESPHLELSLEAVDHQDFTCGSNVSKVNQL

SEQ ID NO: 6731 - protein, 368 aa, Arabidopsis thaliana
  Clone ID: ARATH-23APR03-C8008_1.p
MDLNSNHKSSVLKDPSPSVNQSRLGVSSRFMMSQWKKPAKLDDVRSNGWLDAMISSSPPRKKLVKDFNVEVAPEDDFAQRAWMVKYPSAISSFAHIAAQAKKKKIAVFLDYDGTLSPIVDDPDRAIMSDAMRSAVKDVASYFPTAIISGRSRDKVYQLVGLTELYYAGSHGMDIMTSSDGPNCFKSTDQQGKEVNLFQPAREFIPVIDEVFRTLVEKMKDIKGAKVENHKFCASVHYRNVDEKDWPIIAQRVHDHLKQYPRLRLTHGRKVLEVRPVIDWNKGRAVEFLLESLGLSNKDDLLPIYIGDDTTDEDAFKVLRDGNRGFGILVSSIPKESNAFYSLRDPSEVKKFLKTLVKWAKLEKNSTGF

SEQ ID NO: 6732 - protein, 439 aa, Arabidopsis thaliana
  Clone ID: ARATH-23APR03-C8014_1.p
MDLSSRFSSILILLLISISIASAEIRKSEIRSDDRPIIPLDEFGFTHSGRLELDASKIWLSNSNPDLDLSKVGFFLCTRDAWVHVIQQLEEEEITCALQSDLVKHVFTFNNLKGGDKSRFSTVFTENDADQYSLVFANCLQQVKISMDVRSAMYNLEGKKGGRDYLSAGRTVLPKVYFLFSVIYFSLAATWIYVLYKKRLTVFAIHFFMLGVVVLKALNLLCEAEDKSYIKKTGTAHGWDVLFYIFNFLKGITLFTLIVLIGTGWSFLKPYLQDKEKKVLMIVIPLQVVANFAQVVIDETGPYGQDWVTWKQIFLLVDVVCCCAVLFPIVWSIKNLREAAKTDGKAAVNLVKLTLFRQYYIVVICYIYFTRVVVYALETITSYKYMWTSVVASELATLAFYLFTGYKFRPEVHNPYFVVDDEEEEAAAEALKLEDEFEL

SEQ ID NO: 6733 - protein, 304 aa, Arabidopsis thaliana
  unsure (1)..(304): unsure at all Xaa locations
  Clone ID: ARATH-23APR03-C8015_1.p
MPSNGDLDRQIEQLMECKPLXEADVKILCDQAKAILVEEYNVQPVKCPVTXCGDIHGQFYDLIELFRIGGNAPDTNYLFMGDYVDRGYYSVETVSLLVALKVRYRDRLTILRGNHESRQITXGFYDECLRKYGNANVWKYFTDLFDYLPLTALIESQVFCLHGGLSPSLDTLDNIRSLDRIQEVPHEGPMCDLLWSDPDDRCGWGISPRGAGYTFGQDIAAQFNHNNGLSLISRAHQLVMEGYNWCQDKNVVTVFSAPNYCYRCGNMAAILEIGENMEQNFLQFDPAPRQVEPDTTRKTPDYFL

SEQ ID NO: 6734 - protein, 385 aa, Arabidopsis thaliana
  Clone ID: ARATH-23APR03-C801_1.p
MTTTGSNSNHNHHESNNNNNNPSTRSWGTAVSGQSVSTSGSMGSPSSRSEQTITVVTSTSDTTFQRLNNLDIQGDDAGSQGASGVKKKKRGQRAAGPDKTGRGLRQFSMKVCEKVESKGRTTYNEVADELVAEFALPNNDGTSPDQQQYDEKNIRRRVYDALNVLMAMDIISKDKKEIQWRGLPRTSLSDIEELKNERLSLRNRIEKKTAYSQELEEQYVGLQNLIQRNEHLYSSGNAPSGGVALPFILVQTRPHATVEVEISEDMQLVHFDFNSTPFELHDDNFVLKTMKFCDQPPQQPNGRNNSQLVCHNFTPENPNKGPSTGPTPQLDMYETHLQSQQHQQHSQLQIIPMPETNNVTSSADTAPVKSPSLPGIMNSSMKPEN

SEQ ID NO: 6735 - protein, 91 aa, Arabidopsis thaliana
  Clone ID: ARATH-23APR03-C8058_1.p
MPSLQTSLPPELANNVVRLYRECLRRAKFIGKQQHNTELVVGMVRQQFKKHMNETDPEKIQKLKDDAARGLINHMLFESAKLTGGKVSQRS

SEQ ID NO: 6736 - protein, 760 aa, Arabidopsis thaliana
  Clone ID: ARATH-23APR03-C8074_1.p
MAMTPVASSSPVSTCRLFRCNLLPDLLPKPLFLSLPKRNRIASCRFTVRASANATVESPNGVPASTSDTDTETDTTSYGRQFFPLAAVVGQEGIKTALLLGAVDREIGGIAISGRRGTAKTVMARGLHEILPPIEVVVGSISNADPACPDEWEDDLDERIEYNADNTIKTEIVKSPFIQIPLGVTEDRLIGSVDVEESVKRGTTVFQPGLLAEAHRGVLYVDEINLLDEGISNLLLNVLTDGVNIVEREGISFRHPCKPLLIATYNPEEGAVREHLLDRVAINLSADLPMSFEDRVAAVGIATQFQERCNEVFRMVNEETETAKTQIILAREYLKDVKISREQLKYLVLEAVRGGVQGHRAELYAARVAKCLAAIEGREKVTIDDLRKAVELVILPRSSLDETPPEQQNQPPPPPPPPQNSESGEEENEEEQEEEEEDESNEENENEQQQDQIPEEFIFDAEGGLVDEKLLFFAQQAQKRRGKAGRAKNVIFSEDRGRYIKPMLPKGPVKRLAVDATLRAAAPYQKLRREKDISGTRKVFVEKTDMRAKRMARKAGALVIFVVDASGSMALNRMQNAKGAALKLLAESYTSRDQVSIIPFRGDAAEVLLPPSRSIAMARNRLERLPCGGGSPLAHGLTTAVRVGLNAEKSGDVGRIMIVAITDGRANITLKRSTDPESIAPDAPRPTSKELKDEILEVAGKIYKAGMSLLVIDTENKFVSTGFAKEIARVAQGKYYYLPNASDAVISATTRDALSDLKNS

SEQ ID NO: 6737 - protein, 633 aa, Arabidopsis thaliana
  Clone ID: ARATH-23APR03-C8098_1.p
MANLDMEQHSSENEEIKKKKHKKRARDEAKKLKQPAMEEEPDHEDGDAKENNALIDEEPKKKKKKKNKKRGDTDDGEDEAVAEEEPKKKKKKNKKLQQRGDTNDEEDEVIAEEEEPKKKKKKQRKDTEAKSEEEEVEDKEEEKKLEETSIMTNKTFESLSLSDNTYKSIKEMGFARMTQIQAKAIPPLMMGEDVLGAARTGSGKTLAFLIPAVELLYRVKFTPRNGTGVLVICPTRELAIQSYGVAKELLKYHSQTVGKVIGGEKRKTEAEILAKGVNLLVATPGRLLDHLENTNGFIFKNLKFLVMDEADRILEQNFEEDLKKILNLLPKTRQTSLFSATQSAKVEDLARVSLTSPVYIDVDEGRKEVTNEGLEQGYCVVPSAMRLLFLLTFLKRFQGKKKIMVFFSTCKSTKFHAELFRYIKFDCLEIRGGIDQNKRTPTFLQFIKAETGILLCTNVAARGLDFPHVDWIVQYDPPDNPTDYIHRVGRTARGEGAKGKALLVLTPQELKFIQYLKAAKIPVEEHEFEEKKLLDVKPFVENLISENYALKESAKEAYKTYISGYDSHSMKDVFNVHQLNLTEVATSFGFSDPPKVALKIDRGGYRSKREPVNKFKRGRGGGRPGGKSKFERY

SEQ ID NO: 6738 - protein, 288 aa, Arabidopsis thaliana
  Clone ID: ARATH-23APR03-C8102_1.p
MPLHMKIQPIDESDVSEEVPYPETMRQMPKSRLKRLFERQFTNKNVSEKFTGSDVEAPLSRGNSGDFEPSSVCLAKMVLNFMEDNNGGEKQRCGRSRCNCFSGSGTESSDDETECSSGEACEILKSLVLCKSIRVRNLLTDVTKIAETSYDAALCKSRWEKSPSCPAGEYEYVDVIMKGERLLIDIDFKSKFEIARATKTYKSMLQTLPYIFVGKADRLQKIIVLICKAAKQSLKKKGLHVPPWRRAEYVKSKWLSSHVRVDQNSNGEVKQESVEVIAESVSSIVFGV

SEQ ID NO: 6739 - protein, 139 aa, Arabidopsis thaliana
  Clone ID: ARATH-23APR03-C8114_1.p
MAASPLVVQKTEEEWRAVLSPEQFRILRQKGTEKPGTGEYDKFFEEGIFDCVGCKTPLYKSTTKFDSGCGWPAFFEGLPGAINRTPDPDGRRTEITCAACDGHLGHVFKGEGYGNPTDERHCVNSVSISFNPAKSSSII

SEQ ID NO: 6740 - protein, 419 aa, Arabidopsis thaliana
  Clone ID: ARATH-23APR03-C8180_1.p
MGACISFFSSSSPSKTGLHSHATTNNHSNGTEFSSTTGATTNSSVGQQSQFSDISTGIISDSGKLLESPNLKVYNFLDLKTATKNFKPDSMLGQGGFGKVYRGWVDATTLAPSRVGSGMIVAIKRLNSESVQGFAEWRSEVNFLGMLSHRNLVKLLGYCREDKELLLVYEFMPKGSLESHLFRRNDPFPWDLRIKIVIGAARGLAFLHSLQREVIYRDFKASNILLDSNYDAKLSDFGLAKLGPADEKSHVTTRIMGTYGYAAPEYMATGHLYVKSDVFAFGVVLLEIMTGLTAHNTKRPRGQESLVDWLRPELSNKHRVKQIMDKGIKGQYTTKVATEMARITLSCIEPDPKNRPHMKEVVEVLEHIQGLNVVPNRSSTKQAVANSSRSSPHHYRYKAGALGAERKRATPGRFGSVEK

SEQ ID NO: 6741 - protein, 440 aa, Arabidopsis thaliana
  Clone ID: ARATH-23APR03-C8242_1.p
MAAAKLVALLLLLALVFNFTTCIFADAGIDGGDEPKLRSDGGDIELDQLNAKIRALESQIDDKTKELKGREELVTEKEKLLQERQEKVASLETEVSSLRKKGSSDSVELLSKAQARATELEKQVEVLKNFLEQKNKEKELIEAQTSETEKKLNELNSRVEKLHKTNEEQKNKIRKLERALKISEEEMLRTKHEATTKAKELMEVHGAWLPPWFAVHWSSFQTVAGTHWDAHGKPVMEKVTQKVTLAKNQAEKWAKPHMANVKTKYIPAIKETVKTHVEPHVQTLSTKAKEAYHASKSAVTPHIVKFQEHVDPYYQEAKKFSKPYVDQVATATKPHVDKVRATMKPYTTKTVHYYKEFLESASTYHHQLQANVESKLKSHELLEPFATKEFIWFAASALLALPIFIVYKFLCSLFCTKTKKPIRQSHQHTRRKARRGHSDK

SEQ ID NO: 6742 - protein, 887 aa, Arabidopsis thaliana
  Clone ID: ARATH-23APR03-C824_1.p
MSTVPIESLLHHSYLRHNSRIYRGTRTFIPFSLNLPSHFTSNKLLHSIGKSVGVSSMNKSPVAIRATSSDTAVVETAQSDDVIFKEIFPVQRIEKAEGKIYVRLKEVKEKNWELSVGCSIPGKWILHWGVSYVGDTGSEWDQPPEDMRPPGSIAIKDYAIETPLKKLSEGDSFFEVAINLNLESSVAALNFVLKDEETGAWYQHKGRDFKVPLVDDVPDNGNLIGAKKGFGALGQLSNIPLKQDKSSAETDSIEERKGLQEFYEEMPISKRVADDNSVSVTARKCPETSKNIVSIETDLPGDVTVHWGVCKNGTKKWEIPSEPYPEETSLFKNKALRTRLQRKDDGNGSFGLFSLDGKLEGLCFVLKLNENTWLNYRGEDFYVPFLTSSSSPVETEAAQVSKPKRKTDKEVSASGFTKEIITEIRNLAIDISSHKNQKTNVKEVQENILQEIEKLAAEAYSIFRSTTPAFSEEGVLEAEADKPDIKISSGTGSGFEILCQGFNWESNKSGRWYLELQEKADELASLGFTVLWLPPPTESVSPEGYMPKDLYNLNSRYGTIDELKDTVKKFHKVGIKVLGDAVLNHRCAHFKNQNGVWNLFGGRLNWDDRAVVADDPHFQGRGNKSSGDNFHAAPNIDHSQDFVRKDIKEWLCWMMEEVGYDGWRLDFVRGFWGGYVKDYMDASKPYFAVGEYWDSLSYTYGEMDYNQDAHRQRIVDWINATSGAAGAFDVTTKGILHTALQKCEYWRLSDPKGKPPGVVGWWPSRAVTFIENHDTGSTQGHWRFPEGKEMQGYAYILTHPGTPAVFFDHIFSDYHSEIAALLSLRNRQKLHCRSEVNIDKSERDVYAAIIDEKVAMKIGPGHYEPPNGSQNWSVAVEGRDYKVWETS

SEQ ID NO: 6743 - protein, 2171 aa, Arabidopsis thaliana
  Clone ID: ARATH-23APR03-C8263_1.p
MANLGGGAEAHARFKQYEYRANSSLVLTTDNRPRDTHEPTGEPETLWGKIDPRSFGDRVAKGRPQELEDKLKKSKKKERDVVDDMVNIRQSKRRRLREESVLTDTDDAVYQPKTKETRAAYEAMLGLIQKQLGGQPPSIVSGAADEILAVLKNDAFRNPEKKMEIEKLLNKIENHEFDQLVSIGKLITDFQEGGDSGGGRANDDEGLDDDLGVAVEFEENEEDDEESDPDMVEEDDDEEDDEPTRTGGMQVDAGINDEDAGDANEGTNLNVQDIDAYWLQRKISQAYEQQIDPQQCQVLAEELLKILAEGDDRVVEDKLLMHLQYEKFSLVKFLLRNRLKVVWCTRLARAEDQEERNRIEEEMRGLGPELTAIVEQLHATRATAKEREENLQKSINEEARRLKDETGGDGGRGRRDVADRDSESGWVKGQRQMLDLESLAFDQGGLLMANKKCDLPPGSYRSHGKGYDEVHVPWVSKKVDRNEKLVKITEMPDWAQPAFKGMQQLNRVQSKVYDTALFKAENILLCAPTGAGKTNVAMLTILQQLEMNRNTDGTYNHGDYKIVYVAPMKALVAEVVGNLSNRLKDYGVIVRELSGDQSLTGREIEETQIIVTTPEKWDIITRKSGDRTYTQLVRLLIIDEIHLLHDNRGPVLESIVARTLRQIETTKENIRLVGLSATLPNYEDVALFLRVDLKKGLFKFDRSYRPVPLHQQYIGISVKKPLQRFQLMNDLCYQKVLAGAGKHQVLIFVHSRKETSKTARAIRDTAMANDTLSRFLKEDSVTRDVLHSHEDIVKNSDLKDILPYGFAIHHAGLSRGDREIVETLFSQGHVQVLVSTATLAWGVNLPAHTVIIKGTQVYNPEKGAWMELSPLDVMQMLGRAGRPQYDQHGEGIIITGYSELQYYLSLMNEQLPIESQFISKLADQLNAEIVLGTVQNAREACHWLGYTYLYIRMVRNPTLYGLAPDALAKDVVLEERRADLIHSAATILDKNNLVKYDRKSGYFQVTDLGRIASYYYITHGTIATYNEHLKPTMGDIDLYRLFSLSDEFKYVTVRQDEKMELAKLLDRVPIPIKETLEEPSAKINVLLQAYISQLKLEGLSLTSDMVYITQSAGRLVRALYEIVLKRGWAQLAEKALNLSKMVGKRMWSVQTPLRQFHGLSNDILMQLEKKDLVWERYYDLSAQELGELIRSPKMGKPLHKFIHQFPKVTLSAHVQPITRTVLNVELTVTPDFLWDEKIHKYVEPFWIIVEDNDGEKILHHEYFLLKKQYIDEDHTLHFTVPIFEPLPPQYFVRVVSDKWLGSETVLPVSFRHLILPEKYPPPTELLDLQPLPVTALRNPNYEILYQDFKHFNPVQTQVFTVLYNTNDNVLVAAPTGSGKTICAEFAILRNHHEGPDATMRVVYIAPLEAIAKEQFRIWEGKFGKGLGLRVVELTGETALDLKLLEKGQIIISTPEKWDALSRRWKQRKYVQQVSLFIVDELHLIGGQHGPVLEVIVSRMRYISSQVINKIRIVALSTSLANAKDLGEWIGASSHGLFNFPPGVRPVPLEIHIQGVDISSFEARMQAMTKPTYTAIVQHAKNKKPAIVFVPTRKHVRLTAVDLMAYSHMDNPQSPDFLLGKLEELDPFVEQIREETLKETLCHGIGYLHEGLSSLDQEIVTQLFEAGRIQVCVMSSSLCWGTPLTAHLVVVMGTQYYDGRENSHSDYPVPDLLQMMGRASRPLLDNAGKCVIFCHAPRKEYYKKFLYEAFPVESQLQHFLHDNFNAEVVAGVIENKQDAVDYLTWTFMYRRLPQNPNYYNLQGVSHRHLSDHLSELVENTLSDLEASKCIEVEDEMELSPLNLGMIASYYYISYTTIERFSSLLSSKTKMKGLLEILTSASEYDMIPIRPGEEDTVRRLINHQRFSFENPKCTDPHVKANALLQAHFSRQNIGGNLAMDQRDVLLSATRLLQAMVDVISSNGWLNLALLAMEVSQMVTQGMWERDSMLLQLPHFTKDLAKRCQENPGKNIETVFDLVEMEDEERQELLKMSDAQLLDIARFCNRFPNIDLTYEIVGSEEVNPGKEVTLQVMLERDMEGRTEVGPVDSLRYPKTKEEGWWLVVGDTKTNQLLAIKRVSLQRKVKVKLDFTAPSEPGEKSYTLYFMCDSYLGCDQEYSFSVDVKGSGAGDRMEE

SEQ ID NO: 6744 - protein, 395 aa, Arabidopsis thaliana
  unsure (1)..(395): unsure at all Xaa locations
  Clone ID: ARATH-23APR03-C8271_1.p
MAGAASSDRLVTSFPLLDPYGLFQDLSLGSDANEVPMNFTKGSFQHPYGHAPSGQSSHXKGYPDPRFGYDRNSNHSSFSHLMNPHSSQEVPSFDQLGYNDHLYSNHGLYGLYGNVIDSGHAYGTFGYDSWKLGRGWYPVDGYRKTRSFNHGRGYSDEKADRLNELCRGPRSSDFKNPQVLNSSMLDAMKQDVSAVDLQRYNGENFPESFVKAKFFVIKSYSEDDVHNCIKYGAWSSTPTGNKKLNAAYYEAKENSQECPVYLLFSVNASGQFVGLAEMVGPVDFNKTMEYWQQDKWIGCFPVKWHIIKDIPNSLLRHITLANNENKPVTNSRDTQEVNLEHGTKIIKIFKEYMSKTCILDDYKFYETRQKIIRDKKIKQKKQALDGASGETINLS

SEQ ID NO: 6745 - protein, 259 aa, Arabidopsis thaliana
  Clone ID: ARATH-23APR03-C8320_1.p
TRVFFIWKHLLSYLREFPTGEVNECFILHESVFFLSGFPYIFLERTGFLSNYKIQTKSNTPEAQGKCIARLLLYHCCVNLPLMMASYPVFRFMGMESSFPLPSWKVVSAQILFYFIIEDFVFYWGHRILHTKWLYKNVHSVHHEYATPFGLTSEYAHPAEILFLGFATIVGPALTGPHLITLWLWMMLRVIETVEAHCGYHFPWSPSNFLPLYGGADFHDYHHRLLYTKSGNYSSTFVYMDWIFGTDKGYRKLKALKET

SEQ ID NO: 6746 - protein, 395 aa, Arabidopsis thaliana
  Clone ID: ARATH-23APR03-C8450_1.p
MKRKQQEDDNDDGVEKAVSPVLATTSNTMSTDLLLQSSSKLSQKQDYIFHGGRRHVRPYYFEFISHVNKRWTGKTIVDLFADEFKGRPRDYYVGAVKSGRIKVDGEIVPVSYIVKSSQKITHFLHRHEPPVMIDDVVILHQEPDVVTVCKPASVPVHPCGQYRKNTIVGILDAEHDLGTLFSIHRLDRLVSGLLIIARTAAKADFFRQQIEGGMVKKRYIAKVIGVFPEDEMIVDANINYNGSEGRSTAEDANSSGDDKKVKGKPACTKFTRIDTNGTHSLVSCEPVTGRTHQIRVHLQYTGHPIANDPLYLNQHIDNLETYIAKRIDAGERKIVSPDDYVYSSEDFSIDPMCTNCPKLIPQGYEEHDEALWLHCVQYCGTGWEYECPYPSWASL

SEQ ID NO: 6747 - protein, 398 aa, Arabidopsis thaliana
  Clone ID: ARATH-23APR03-C8464_1.p
MTAPMILTGSGSAAERDARMAHTAMAFVQLFNGGYHVITKVALNVGVNQLVFCVCRDLLALSILAPLAYFRERKIRTPMNKSLLLSFFFLGLAGVFGNQLLFLIGLTYTNPTYAAAIQPSIPVFTFLLAVMMGTERVNLLRIEGQTKVGGTLVCVMGAVFMVVFRGPALLGDKDADFAMNNEISAKGQPEPTGWLVSGFLDLGFEQWHIGVLCLIGNCMCMATFLAIQAPLLKKYPANLSVAALSYFFGTVLMCTTAFFMVKEPLDWKLTQSEVLAVIYAGVIASALNYGLLTWSNKIIGPALVALYNPLQPAASAFLSRIFLGSPIYLGSVVGGFFIILGLYMVTWASFRERKTAVSGIGIAPHGLKTSEPLIFNGTVNRLGQLFSGLPSSSVKSAD

SEQ ID NO: 6748 - protein, 527 aa, Arabidopsis thaliana
  Clone ID: ARATH-23APR03-C8467_1.p
MMALMNCAYSSSSSSSSTSSPTSSSSSSSYSPRNRESMFLQSVVDASPSSFSSDRKSILPIEKTLIRHQNSSLCLIPKSSEELKKEIASIEIEILHMERYLLSLYRKSFEQQLPNSFSNLSVTTTLPRSVTTSPTSLTHYQAYQKPISYPRSFNTSLKALSSREGTRVVSGTHSLGELLGSSHIVDHNNFINPNKLSEDIMRCISSVYCTLSRGSTSTTSTCFPASPVSSNASTIFSSKFNYEDKWSLNGASEDHFLNHCQDQDNVLPCGVVVIEALRVHLDDGSFGYAALMLQNFRSLVQNLEKVDPSRMKREEKLAFWINIHNALVMHAYLAYGTHNRARNTSVLKAAYDIGGYRINPYIIQSSILGIRPHYTSPSPLLQTLFSPSRKSKTCSVRHIYALEYPEALAHFAISSGAFTDPTVRVYTADRIFRDLRQAKQEYIRSNVRVYKGTKILLPKIFQHYVKDMSMDVSKLMEATSQCLPEDARKIAEKCLKEKKSKNFEWLPENLSFRYVIAGELVGARNKT

SEQ ID NO: 6749 - protein, 150 aa, Arabidopsis thaliana
  Clone ID: ARATH-23APR03-C8475_1.p
MATRFLVKRLTAVNVSRTPGGDFSGYALRQATIGINHFSTGFKQTEGSTHDDKSTTSYVADKAKEGVKKATDAAVSTGDNMKDAMDGAWKAAKETGQNISDAVTGDDDDGRIQEDKVAVELKDVQQPVDTTEYRGVEDLHQQTGGEVKSP

SEQ ID NO: 6750 - protein, 484 aa, Arabidopsis thaliana
  Clone ID: ARATH-23APR03-C8481_1.p
MSSYDRRFADPNSYRQRSGAPVGSSQPMDPSAAPYNPRYTGGGGGYGPSPVMAGDNSGYNRYPSFQPPSGGFSVGRGGGRGGYGQYGDRNGGGNWGGGGGRGGSSKRELDSVSLPKQNFGNLVHFEKNFYVESPTVQAMTEQDVAMYRTERDISVEGRDVPKPMKMFQDANFPDNILEAIAKLGFTEPTPIQAQGWPMALKGRDLIGIAETGSGKTLAYLLPALVHVSAQPRLGQDDGPIVLILAPTRELAVQIQEESRKFGLRSGVRSTCIYGGAPKGHEWGDLRRGVEIVIATPGRLIDMLECQHTNLKRVTYLVLDEADRMLDMGFEPQIRKIVSQIRPDRQTLLWSATWPREVETLARQFLRDPYKAIIGSTDLKANQSINQVIEIVPTPEKYNRLLTLLKQLMDGSKILIFVETKRGCDQVTRQLRMDGWPALAIHGDKTQSERDRVLAEFKSGRSPIMTATDVAARGLVSSGIREKST

SEQ ID NO: 6751 - protein, 453 aa, Arabidopsis thaliana
  Clone ID: ARATH-23APR03-C8483_1.p
MSVERSLEAWEEVQRHGQDLADRLAQGFNGLIQINPPSFPSKLFDLEFSSQHFGIRDSRFSIHQPINGVSAILDIGNKIGQAGVDFGSGLNVMVQQFFRRLPVPFRHDENVFVSTERDTVTRSHRAYVDTKENSAFSKTDTASSGTVYEEKVTEFDLRTIGLHRRAKGTVELSSSYETRTSSMEHSLAARGDLWRVEASTSNSPVRDDSSSLFLLQLGPLLFLRDSTLLLPVHLSKQHLLWYGYDRKKGMHSLCPALWSKHRRWLMMSMLCLNPLDCSFVDLQFPNGQLTYVSGEGLTTSVFVPLCGGLLQAQGQYPGDMRFSFSCKSKQGTRITPMINWPDKSLALGVSQALAWRRSGVMLKPAIQLSVCSTFGGSNPGIKTEVIQSLNDNINMICGCAFTAHPSTFASVSFGRSKWNGNIGRTGIVVRADTPLPNVARPSFSIQINNAFEF

SEQ ID NO: 6752 - protein, 595 aa, Arabidopsis thaliana
  Clone ID: ARATH-23APR03-C8510_1.p
MGKKQHSKDRMFITKTEWATEWGGAKSKENRTPFKSLPYYCCALTFLPFEDPVCTIDGSVFEITTIVPYIRKFGKHPVTGAPLKGEDLIPLIFHKNSEGEYHCPVLNKVFTEFTHIVAVKTTGNVFCYEAIKELNIKTKNWKELLTEEPFTRADLITIQNPNAVDGKVTVEFDHVKNGLKIDDEELKKMNSDPAYNINVSGDIKHMLADLGTDKAKEIALHGGGGNKARNERAAAIAAILESRSKIKEVSKAEQPKQTYSVVDAASASVFGRSADAAKAGSSDKTAARIAMHMAGDRTPVNSKMVKSRYSSGAASRSFTSSAFTPVTKNDFELIKVEKNPKKKGYVQFQTTHGDLNIELHCDIAPRACENFITLCERGYYNGVAFHRSIRNFMIQGGDPTGTGKGGESIWGKPFKDEPNSKLLHSGRGVVSMANSGPHTNGSQFFVLYKSATHLNYKHTVFGGVVGGLATLAAMENVPVDESDRPLEEIKIIEASVFVNPYTELDEEEEKEKAEKEKNEDKDIEKIGSWYSNPGSGTTEAGAGGGGVGKYLKAMSSTATKDTKGSLDSDISTIGVSKKRKTTASASTGFKDFSSW

SEQ ID NO: 6753 - protein, 719 aa, Arabidopsis thaliana
  unsure (1)..(719): unsure at all Xaa locations
  Clone ID: ARATH-23APR03-C8515_1.p
VTLSCEKESAGCEAHARGPAQVFRWFPIGDLLLRYAVELCDPLEFXARGAVLVFDRAFLLGELQXDRWHALLYDPVVSVEAAFRMAELERTNPNFPTKFGRTGYSKENKSSSRKRNAERLRSTYHSLRKKFRTEPFNSLDLGFLVPPNDSHFMDNGDATHLGLEDSHMDIIHNAFPEILAEGGCVTTHVLPEDNLQGDIPYVEGENLTFTEHAGLSVCDVVHQDSEQKLENTAHEAKNTMASTDFLAQLSTSLFEEDMEPFMEVDGKEVDKSYYDGLSSLLVNSTNDTNREAFPNPTEQEPSIAPTHPGEATLDDHVMLELDGTIALDPHPEIVGGVICCLLNEEDPDIPCNDDIFLSNNSRPMSVSSLARRNFKDTNSPITTCVRDVSASKEKSEGYSLQAQKKKPGRLQGSTQGKPEMGQPSKGSKFRASTSTELKNTVAPGGSSSAQACSNTLLSTGTGAKDGKKETATGTLFVGSDGHGNHPEKDSENCKEKNVVPPVNESPHAKDTDDGLIEITVPELEITRAEAEAEAEAHVCESDEDLPNYSDIEAMILDMDLEPDDQDNFDLEVSKYQSQDMKRTIIRLEQAAHSYMQRAIASRGAFAVLYGRYSKHYIKKPEVLVGRSTEDLAVDIDLGREKRGSKISRRQAIIRLGDDGSFHIKNLGKYSISVNEKEVDPGQSLILKSDCLVEIRGMPFIFETNQSCMQEYLKRRGKVN

SEQ ID NO: 6754 - protein, 404 aa, Arabidopsis thaliana
  Clone ID: ARATH-23APR03-C8520_1.p
MQSLTLTRYPTPISPPRLNLYPLRQIAASVLSAPTAGINRRDMASRHQSTSFKPLAVGRNLTGDDDDGYCTLIDFAGSGGGEGKNVGEDLVVLLYHLQHACKRIASLVASPFNSSLGKLSVNSSSGSDRDAPKPLDIVSNDIVLSSLRNSGKVAVMASEENDSPTWIKDDGPYVVVVDPLDGSRNIDASIPTGTIFGIYNRLVELDHLPVEEKAELNSLQRGSRLVASGYVLYSSATIFCVTLGSGTHAFTLDHSTGEFVLTHQNIKIPTRGQIYSVNDARYFDWPEGLRKYIDTVRQGKGQNPKKYSARYICSLVADLHRTLLYGGVAMNPRDHLRLVYEGNPLAFLVEQAGGKSSDGKRGILSIQPVKLHQRLPLFLGSLEDVAELESYGDVQQTVNPGYEV

SEQ ID NO: 6755 - protein, 603 aa, Arabidopsis thaliana
  Clone ID: ARATH-23APR03-C8543_1.p
MLETESSVCDNIAGNEKWRAEAEIGGNERALQALRELIIFPFRYPLEARTLGLKWPRGLLLYGPPGTGKTSLVRAVVQECDAHLIVLSPHSVHRAHAGESEKVLREAFAEASSHAVSDKPSVIFIDEIDVLCPRRDARREQDVRIASQLFTLMDSNKPSSSAPRVVVVASTNRVDAIDPALRRAGRFDALVEVSTPNEEDRLKILQLYTKKVNLDPSVDLQAIAISCNGYVGADLEALCREATISASKRSSDSLILTSQDFKIAKSVVGPSINRGITVEIPKVTWDDVGGLKDLKKKLQQAVEWPIKHSAAFVKMGISPMRGILLHGPPGCSKTTLAKAAANAAQASFFSLSCAELFSMYVGEGEALLRNTFQRARLASPSIIFFDEADVVACKRGDESSSNSSTVGERLLSTLLTEMDGLEEAKGILVLAATNRPYAIDAALMRPGRFDLVLYVPPPDLEARFEILQVHTRNMTLGDDVDLRKIAEETDLFTGAELEGLCRESGTVSLRENIAATAVFNRHFQTAKSSLKPALTIEEVETYSSFRKAAKRSDSKPIPINKKKATSTVFGFSWQLGVLSLLLLATGNYYFNHTKHELLVASAT

SEQ ID NO: 6756 - protein, 612 aa, Arabidopsis thaliana
  Clone ID: ARATH-23APR03-C8546_1.p
MSASWADVADSEKAVSQSKPPYVPPHLRNRPSEPVAAPLPQNDHAGYGGQPAGSRWAPPSSGGGGASGGGYRNDGGRTGYGYGAGGGGGGGGGWNNRSGGWDRREREVNPFGDDAELEPVFTEQENTGINFDAYEDIPVETSGGDVPPPVNTFADIDLGDALNLNIRRCKYVRPTPVQRHAIPILLAERDLMACAQTGSGKTAAFCFPIISGIMKDQHVERPRGSRAVYPFAVILSPTRELACQIHDEAKKFSYQTGVKVVVAYGGTPIHQQLRELERGCDILVATPGRLNDLLERARVSMQMIRFLALDEADRMLDMGFEPQIRKIVEQMDMPPRGVRQTMLFSATFPSQIQRLAADFMSNYIFLAVGRVGSSTDLITQRVEFVQESDKRSHLMDLLHAQRETQDKQSLTLVFVETKRGADTLENWLCMNEFPATSIHGDRTQQEREVALRSFKTGRTPILVATDVAARGLDIPHVAHVVNFDLPNDIDDYVHRIGRTGRAGKSGIATAFFNENNAQLARSLAELMQEANQEVPEWLTRYASRASFGGGKKRSGGRFGGRDFRREGSYSRGGGGGGGGGGSDYYGGGGYGGGGYGGAPSGGYGAGVTSAWD

SEQ ID NO: 6757 - protein, 571 aa, Arabidopsis thaliana
  Clone ID: ARATH-23APR03-C8550_1.p
MQMEANDCQEEHKFTLDNYHVVEQVRRGKSSSDFVVLHDIEDKKYAMKKICLAKHTDKLKQTALQEMKLLSSLKNPYIVHYEDSWIDNDNNACIFTAYYEGGNMANAIKKARGKLFPEERIFKWLAQLLLAVNYLHSNRVVHMDLTCSNIFLPKDDHVQLGNYGLAKLINPEKPVSMVSGISNSMCPEVLEDQPHGYKSDIWSLGCCMYEITAHQPAFKAPDMAGLINKINRSLMSPLPIVYSSTLKQMIKLMLRKKPEYRPTACELLRNPSLQPYLLQCQNLSPIYLPVFPIKPVNSPKDKARRNSLPGKFGKERVSREKSEVSRSLENLYPFWTNTETGSSSSSQPASSTNGAEDKLETKRIDPSCDTLKISEFTSQKSDESLIDPDIAVYSTETPAEENALPKETENIFSEESQLRDVDVGVVSAQEVACSPPRAIEEAETQEALPKPKEQITVPISSVAHSSTEVAAAKDHLSGSLEGDKAKMVKLTASEMSSVLSKLTKLGPPQSKERADALECLLEKCAGLVKQEKYEELAGLLTPFGEDGVSARDTAIWFAKTLLSSDKLNQGT

SEQ ID NO: 6758 - protein, 230 aa, Arabidopsis thaliana
  Clone ID: ARATH-23APR03-C856_1.p
MNDGDVSRQIQQMVRFIRQEAEEKANEISVSAEEEFNIEKLQLVEAEKKKIRQDYEKKEKQADVRKKIDYSMQLNASRIKVLQAQDDIVNAMKDQAAKDLLNVSRDEYAYKQLLKDLIVQCLLRLKEPSVLLRCREEDLGLVEAVLDDAKEEYAGKAKVHAPEVAVDTKIFLPPPPKSNDPHGLHCSGGVVLASRDGKIVCENTLDARLDVAFRMKLPVIRKSLFGQVTA

SEQ ID NO: 6759 - protein, 744 aa, Arabidopsis thaliana
  Clone ID: ARATH-23APR03-C8570_1.p
MEAMLVDCVNNSLRHFVYKNAIFMCERLCAEFPSEVNLQLLATSYLQNNQAYSAYHLLKGTQMAQSRYLFALSCFQMDLLNEAESALCPVNEPGAEIPNGAAGHYLLGLIYKYTDRRKNAAQQFKQSLTIDPLLWAAYEELCILGAAEEATAVFGETAALSIQKQYMQQLSTSLGLNTYNEERNSTSTKNTSSEDYSPRQSKHTQSHGLKDISGNFHSHGVNGGVSNMSFYNTPSPVAAQLSGIAPPPLFRNFQPAVANPNSLITDSSPKSTVNSTLQAPRRKFVDEGKLRKISGRLFSDSGPRRSSRLSADSGANINSSVATVSGNVNNASKYLGGSKLSSLALRSVTLRKGHSWANENMDEGVRGEPFDDSRPNTASTTGSMASNDQEDETMSIGGIAMSSQTITIGVSEILNLLRTLGEGCRLSYMYRCQEALDTYMKLPHKHYNTGWVLSQVGKAYFELIDYLEAEKAFRLARLASPYCLEGMDIYSTVLYHLKEDMKLSYLAQELISTDRLAPQSWCAMGNCYSLQKDHETALKNFLRAVQLNPRFAYAHTLCGHEYTTLEDFENGMKSYQNALRVDTRHYNAWYGLGMIYLRQEKLEFSEHHFRMAFLINPSSSVIMSYLGTSLHALKRSEEALEIMEQAIVADRKNPLPMYQKANILVCLERLDEALEVLEELKEYAPSESSVYALMGRIYKRRNMHDKAMLHFGLALDMKPPATDVAAIKAAMEKLHVPDEIDESP

SEQ ID NO: 6760 - protein, 337 aa, Arabidopsis thaliana
  Clone ID: ARATH-23APR03-C8578_1.p
MNVDARVGVAVDGAQSALNTATTVHSSVVMTQIKPQAKLGTFQNLLAGGIAGAISKTCTAPLARLTILFQLQGMQSEGAVLSRPNLRREASRIINEEGYRAFWKGNLVTVVHRIPYTAVNFYAYEKYNLFFNSNPVVQSFIGNTSGNPIVHFVSGGLAGITAATATYPLDLVRTRLAAQRNAIYYQGIEHTFRTICREEGILGLYKGLGATLLGVGPSLAINFAAYESMKLFWHSHRPNDSDLVVSLVSGGLAGAVSSTATYPLDLVRRRMQVEGAGGRARVYNTGLFGTFKHIFKSEGFKGIYRGILPEYYKVVPGVGIVFMTYDALRRLLTSLPD

SEQ ID NO: 6761 - protein, 498 aa, Arabidopsis thaliana
  Clone ID: ARATH-23APR03-C8606_1.p
MERELRRPNPINSSRRPEIFSSGGSSTQLPESPRGPMEFLSRSWSVSALEVSRALHTAKSASATNRPPSSINTPIPEETLNPEKEECPPENSTSVSSQFSFAASATSQLVLERIMSQSEVSPLTSGRLSHSSGPLNGGGSFTETDSPPISPSDEFDDVIKYFRTHNTIHPLFSGTGGSRGTTGNGSNTPMAGTGPKTVGRWLKDRKEKKKEETRTQNAQVHAAVSVAAVASAVAAVAAATAASSPGKNEQMARIDMAMASAAALVAAQCVEAAEIMGADRDHLTSVVSSAVNVKSHDDIVTLTAAAATALRGAATLKARALKEVWNIAAVLPAEKGASSALCGQVDTKHSDSSFSGELPVAGEDFLGVCNQELLAKGTELLKRTRGGELHWKIVSVYINKAGQAVLKMKSKHVGGTFTKKKKHMVLEVRKDIPAWAGRDLFNGDKHHYFGLKTETKRVIEFECRNQREYEIWTQGVSRLLAIAAEKKQKSSMSKWMAP

SEQ ID NO: 6762 - protein, 642 aa, Arabidopsis thaliana
  Clone ID: ARATH-23APR03-C8623_1.p
MESRRNPRAVVDPKVRQVGFFTSSQPDSSTQQQQPDPIAATSASSSSSTISPSGNSLSPVMIPPPRLNSSDTFPLRVAVAGAAASAVSPSSFSYSSRRDFPDGSTTASPGRHSRGSFVKSSVPVASSLPGIGMDSMAAAKSSSVPASGLTTVSVVTMPPGLSEKASGMEVQSDQKKPLKEKTTKAERRAIQEAQRAAKAAAKADGGKVAPVSSASVASTSVKAAKPAKATSQKNDVAVATGAAEKKGGPSEKDRKKDAPHPRMQYDDESRVVKAKRRAVVKQTEAKNRVELFRHLPQYEHGTQLPDLETKFFQLDPMHPAVYKVGLQYLSGDISGGNARCIAMLQAFQEVVKDYSTPPEKSLNRDMTAKISSYVSFLIECRPLSISMGNAIRFVKNRIAKLPITLSESEAKATLQSDIERFINEKIIVADTVIVKHAVTKIRDGDVLLTYGSPTAVEMVILHAHELRKKFRVLVVDSRPKLEGQLLLRRLIKRGINCTYTHINAISYIMHEVTKVFLGASSVLSNGTVYSRVGTACVAMVANAFRVPVLVCCEAYKFHERVQLDSICSNELGDPNAISEVHGREDINYLDGLTNNANLQFLNLMYDATPSDYISMIITDYGMVPPTSVPVIVREYQKEHLLV

SEQ ID NO: 6763 - protein, 260 aa, Arabidopsis thaliana
  Clone ID: ARATH-23APR03-C865_1.p
MDDYTREMMDLKTLVTRTLEKKGVLAKIRAELRASVFEAIEEEDRVIENNEGPPPALLGSCNDRARKLHASPSGRLLSALICEYLDWAQLNHTLIVYQPESNLPKDSWKSELRDFNSNNGFELNRNGDSGPLLLDVLEGFLKFESMTQGMGSSSRRDSETESSSSLESRNPPRRSSASDSLPPQRRPVSASQASDRRVGLSTSGYRKDEFNWRQGNQDTHEEVTRASAALENLQLDRKTRNLTSSWRNVRDGTNEEEGRD

SEQ ID NO: 6764 - protein, 518 aa, Arabidopsis thaliana
  unsure (1)..(518): unsure at all Xaa locations
  Clone ID: ARATH-23APR03-C8664_1.p
MNARALLCSSNIHSLYTSNRPPEKTSSSRSLRNLKPSPKSLRVWIYPRNRSSVFRVLVRSSDKSESSNSYYVEGDKVSGNNDVVSDSPSSIVLPWWEEFPKRWVIVLLCFSAFLLCNMDRVNMSIAILPMSAEYGWNPATVGLIQSSFFWGYLLTQIAGGIWADTVGGKRVLGFGVIWWSIATILTPVAAKLGLPYLLVVRAFMGVGEGVAMPAMNNILSKWVPVQERSRSLALVYSGMYLGSVTGLAFSPFLIHQFGWPSVFYSFGSLGTVWLTLWLTKAESSPLEDPTLLPEERKLIADNCASKEPVKSIPWRLILSKPPVWALISCHFCHNWGTFILLTWMPTYYHQVLKFNLMESGLLSVFPWMTMAISANAGGWIADTLVSRGFSVTNVRKFLXEIQIMQTIGFLGPAFFLTQLKHIDSPTMAVLCMACSQGTDAFSQSGLYSNHQDIAPRYSGVLLGLSNTAGVLAGVLGTAATGHILQHGSWDDVFTISVGLYLVGTVIWNLFSTGEKIID

SEQ ID NO: 6765 - protein, 150 aa, Arabidopsis thaliana
  Clone ID: ARATH-23APR03-C8672_1.p
MENPGGRRRRDIAITDGERTTGSSVVAATVAAVAVVGPLFGLMSFSFVATVTLFLIASPLLLIFAPAFMVTVAVLVSAMVGVGVAAAMWMMGIAALVCCGREIGIETGLAGRMVESVVRELGYGRSRYLRDKSEDSYSTSSPSSRDYSSS

SEQ ID NO: 6766 - protein, 429 aa, Arabidopsis thaliana
  Clone ID: ARATH-23APR03-C8702_1.p
MGNACCVAARDKMVVPNSSAGENLQRSNIRHSPSWSFRWDNRGRVAGEETSLSWLSDGISRNDGSEIKFESAFVSSEGSPLDSFRTQTLQKSPASDLSFPRNSSMNTVFEQKENVSTESAAPSYLSPAQLSLSLASQPSSFPTSPLSSQSYLHPASSSTLKLTQHPRLSKQVSDGQIYGQNSLSRSSATEERQGTPTRYDSSQSGPSEGWSLQAFSEMMSSSRSNKALSYDNYDNDCFGLQRDKIDHHGNRMSKHQQHTCGACSRPLSEKSLWSSQKIFMTNELSVSAILACGHVYHGECLEQMTPEIDKFDPSCPICTMGEKKTAKLSEKALKVEMDLKARHNKRLRNRVLDSDFDCDDFVMFDHSHRTAAAASKSPRLVSSSSAKSYSAKPFLARHFSFGSRSNYKSPKENLPVKKKGFFWTKSSKI

SEQ ID NO: 6767 - protein, 303 aa, Arabidopsis thaliana
  Clone ID: ARATH-23APR03-C8703_1.p
MAVQAHHMNIFSQFISPNRDCVKFQENMNHGEFEFTGEVPLITGESFAVEPLAAKANFNKAESGLSYNFTVPPLSTKRQRDFQFSDSNAPVKRRSVAFDSSSPSLINVELVSQIQNQQQSEIDRFVAQQTEKLRIEIEARQQTQTRMLASAVQNVIAKKLKEKDDEIVRIRNLNWVLQERVKSLYVENQIWRDIAQTNEANANTLRTNLDQVLAQLETFPTASAVVEDDAESSCGSCCGDGGGEAVTAVGGGCKRCGEREASVLVLPCRHLCLCTVCGGSALLRTCPVCDMVMNASVHVNMSS

SEQ ID NO: 6768 - protein, 318 aa, Arabidopsis thaliana
  Clone ID: ARATH-23APR03-C8738_1.p
MDYKVSRSGEIVEGEVEDSEKIDLPPGFRFHPTDEELITHYLRPKVVNSFFSAIAIGEVDLNKVEPWDLPWKAKLGEKEWYFFCVRDRKYPTGLRTNRATKAGYWKATGKDKEIFKGKSLVGMKKTLVFYKGRAPKGVKTNWVMHEYRLEGKFAIDNLSKTAKNECVISRVFHTRTDGTKEHMSVGLPPLMDSSPYLKSRGQDSLAGTTLGGLLSHVTYFSDQTTDDKSLVADFKTTMFGSGSTNFLPNIGSLLDFDPLFLQNNSSVLKMLLDNEETQFKKNLHNSGSSESELTASSWQGHNSYGSTGPVNLDCVWKF

SEQ ID NO: 6769 - protein, 599 aa, Arabidopsis thaliana
  Clone ID: ARATH-23APR03-C8741_1.p
MVQSAVEVLLPSAWEIEVAVVASVFLIASYWLFAYRGGGVDNVVGVGFDRSRLMQNLDSGDAFDKDKIGHLRGDTQTNAAYIVKVELLAAKNLIGANLNGTSDPYAIVNCGSEKRFSSMVPGSRNPMWGEEFNFPTDELPAKINVTIHDWDIIWKSTVLGSVTINVEREGQTGPVWHSLDSPSGQVCLNINAIKLPVNAPRAVTGYAGAGRRRVTLDQQGPTIVHQKPGPLQTIFDLLPDEVVEHSYSCALERSFLYHGRMYVSAWHICFHSNVFSKQMKVVVPLGDIDEIRRSQHALINPAITIILRMGAGGHGVPPLGTPDGRVRYKFASFWNRNHTLKALQRAVNNYHAMLEVEKKERAQSVLKPDALCVLIGSVKGGGKVQVKAPEDTAAVPVKFQAFIKEEVLVNIYNDVFASTPEQVLNVTFLLAVDSILMSTSARKDKNLNIEPWHTAEEYDGQVREIKFRSICNSPMCPPDTAVTEWQHVVLSPDKKVLVFETVQQPHDVPFGSYFEVHCRWRLEAKDETSSVIDIRVGVHFKKWCLMQSKIKAGAIDEYKKEVEVMLEVALSYLKSHSSSSSHGDIDKSALSSPTPENIS

SEQ ID NO: 6770 - protein, 509 aa, Arabidopsis thaliana
  Clone ID: ARATH-23APR03-C8788_1.p
MGRDFLVLSILILLLSGIVSSAPSANSPAKILNGFISNHGSSLMKWLWSLKTTTKTTIATRSMVKFENGYSVETVFDGSKLGIEPYSIEVLPNGELLILDSENSNIYKISSSLSLYSRPRLVTGSPEGYPGHVDGRLRDAKLNHPKGLTVDDRGNIYVADTVNNAIRKISEGGVTTIAGGKTVRNGGHVDGPSEDAKFSNDFDVVYVGSSCSLLVIDRGNKAIREIQLHFDDCAYQYGSGFPLGIAVLVAAGFFGYMLALLQRRVGSIVSSHNDQEMFEADPDQKPMKHSRPSLIPAGDEQLEKQEETFVVSLGKLVSNAWESVMEILRKKQTGTSFQQYHGTTKQSAAFSTSTPWPIQESFVIRDEDGPPPVEPRNPTPRKTYAFMSKDAEKMQQLRQSRAFYSSWDAEFPNQQQQQQKQHQKHQHQQQQQQQHRRHYSSIPHTYYEQDSEKSNEIVFGAVQEQSSKRVAKPKPKPIESGDQMNNNTQQNLHYRSHSVSYPYGYYPNT

SEQ ID NO: 6771 - protein, 496 aa, Arabidopsis thaliana
  Clone ID: ARATH-23APR03-C8791_1.p
MAGFSLYCFKNPRILFTLPSESPLFVLGSDKCSPATRRPSRKTRGFVVTYAHSNPKIINPKKKSRYGQTLSPYDSDEDDDDDDDDDDDDWLLNDDFAEVTEYEKKKPKSHKQTIAKKSVKKGIVKPEESETDEDDLDLGISPNATSEKKKESWRLDGRGKMSSRKYVEKLYPRLAEEIDIDPKCVPLLDYLSTFGLKESHFVQMYERHMPSLQINVFSAQERLDYLLSVGVKHRDIKRMLLRQPQILQYTVENNLKAHISFLMGLGIPNSKIGQIVAATPSLFSYSVENSLRPTIRYLIEEVGIKETDVGKVVQLSPQILVQRLDITWNTRYMFLSKELGAPRDSVVKMVKKHPQLLHYSIDDGFLPRINFLRSIGMCNSDILKVLTSLTQVLSLSLEDNLKPKYMYLVNELNNEVHILTKYPMYLSLSLDQRIRPRHRFLVELKKVRKGPFPLSSLVPNDESFCQQWAGTSVDTYLAFRQRLLLKEFANKYDKRG

SEQ ID NO: 6772 - protein, 1108 aa, Arabidopsis thaliana
  Clone ID: ARATH-23APR03-C8793_1.p
MSLLFLRRAKPLFVSCCSATHSRSSFLSPTLTNQLVRSFHGSRTMSESEKKILTEEELERKKKKEEKAKEKELKKQKALEKERLAELKAKQAKDGTNVPKKSAKKSSKRDASEENPEDFVDPETPLGERKRLSSQMAKQYSPATVEKSWYAWWEKSDLFKADAKSSKPPFVIVLPPPNVTGALHIGHALTSAIEDTIIRWKRMSGYNALWVPGVDHAGIATQVVVEKKIMRDRGMTRHDVGREEFVKEVWKWKNQYGGTILTQLRRLGASLDWSRECFTMDEQRSKAVTEAFVRLYKEGLIYRDIRLVNWDCILRTAISDVEVEYIDIKEKTLLKVPGYEKPVEFGLLTSFAYPLEGGLGEVIVATTRVETMLGDTAIAIHPDDARYKHLHGKFAVHPFNGRKLPIICDGILVDPNFGTGCVKITPAHDPNDCEVGKRHKLEFINIFTDDGKINTNGGSDFAGMPRFAAREAVVEALQKQGLYRGAKNNEMRLGLCSRTNDVIEPMIKPQWYVNCSMIGKEALDVAITDENKKLEFVPKQYTAEWRRWLENIRDWCISRQLWWGHRIPAWYATLEEDQLKEVGAYSDHWVVARTEDDAREEAAQKFLGKKFELTRDPDVLDTWFSSGLFPLSVLGWPDVTDDFKAFYPTSVLETGHDILFFWVARMVMMGMKLGGEVPFSKVYFHPMIRDAHGRKMSKSLGNVIDPLEVINGVTLEGLHKRLEEGNLDPKEVIVAKEGQVKDFPNGIPECGTDALRFALVSYTAQSDKINLDILRVVGYRQWCNKLWNAVRFAMMKLGDGYTPPQTLSPETMPFSCQWILSVLNKAISKTVVSLDAFEFSDAANTIYAWWQYQFCDVYIEAIKPYFAGDNPTFASERAHAQHALWISLETGLRLLHPFMPFVTEELWQRLPAPKDTERKASIMICDYPSAIENWSNEKVESEMDTVLATVKCMRALRAGLLEKQKNERLPAFALCENNVTSEIVKSHELEIRTLANLSSLEVVSKGQHAAPPGSSVETVNENLKVYLEVDGAINTEAEQEKIRNKIGELQKQKEKLQKMMSVSTYEEKVPANIKEDNANKLAKILQEFDFFEKESARLAAETSNSGNQ

SEQ ID NO: 6773 - protein, 231 aa, Arabidopsis thaliana
  Clone ID: ARATH-23APR03-C8796_1.p
MGSRSRNDNFQSGDGASPGKIFIGGLHKDTTNTVFNKHFGKYGEITDSVIMRDRHTGQPRGFGFITFADPSVVDKVIEDTHVINGKQVEIKRTIPKGAGGNQSKDIKTKKIFVGGIPSTVTEDELKDFFAKYGNVVEHQVIRDHETNRSRGFGFVIFDSEEVVDELLSKGNMIDMADTQVSLYKWGLEFWFMMTYLSWFQFDIFSLFLSLYTFNLVRILPTSLPNVRSLSQ

SEQ ID NO: 6774 - protein, 532 aa, Arabidopsis thaliana
  Clone ID: ARATH-23APR03-C8819_1.p
MEEVVVVVAEPPPKITPFVEYEEELEDDDDDLSLSSDSDIAEALDWLDGKDDDELIGGGFSLHARRPNAHGGHGSRPNSSALQPISNKAQKLTSHVRASPLEGWEGRVKVGMSNSVTTAIRGSLRDTEIGRSRNTDKADRATVEQALDPRTRMVLFRMLNRGVFNDVNGCISTGKEANVYHATKSDGSELAIKVYKTSVLVFKDRDRYVQGDYRFRYGYCRHNPRKMVKTWAEKEQRNLKRLHAAGIRCPAVILLRLHVLVMEFIGRDGWAAPRLKDAALSLDKLRECYLELIIQMRVLYQKCKLVHGDLSEYNILYFEGHLYIIDVSQSVDLDHPLALNFLREDCDHVSDFFKKHGVAVMTIRELFDFIVDPTISDENVDSYLEEVQRKVIERGEISVEDEIADSVFMKSYIPKSLDAVNNPEADVAKITSGQDTGDMLYQTITGLKDALPKVDEQQIEVNAEEEEEEEEEGSGEESEEESEKELGPEDKKAARKEHKKKVKEEKRESRKTKTPKSVKKRKKKVSKPHKTR

SEQ ID NO: 6775 - protein, 1048 aa, Arabidopsis thaliana
  Clone ID: ARATH-23APR03-C8827_1.p
MAQSLELLLIQFLMPDNDARRQAEDQIKRLAKDPQVVPALVQHLRTAKTPNVRQLAAVLLRKRITGHWAKLSPQLKQHVKQSLIESITVENSPPVRRASANVVSVVAKYAVPAGEWPDLLTFLFQCSQSAQEDHREVALILFSSLTETIGNTFRPYFADLQALLLKCMQDESSSRVRVAALKAVGSFLEFTNDGDEVVKFRDFIPSILDVSRKCIASGEEDVAILAFEIFDELIESPAPLLGDSVKAIVQFSLEVSCNQNLESSTRHQAIQIVSWLAKYKYNSLKKHKLVIPILQVMCPLLAESSDQEDDDDLAPDRASAEVIDTLAMNLPKHVFLPVLEFASVHCQSTNLKFREASVTALGVISEGCFDLMKEKLDTVLNIVLGALRDPELVVRGAASFAIGQFAEHLQPEILSHYQSVLPCLLIAIEDTSEEVKEKSHYALAAFCENMGEEIVPLLDHLMGKLMAALENSPRNLQETCMSAIGSVAAAAEQAFNPYAERVLELMKFFMVLTKDEDLRARARSTELVGIVAMSVGRKGMEAILPPFIDAAISGFELEFSELREYTHGFFSNVAEILDDTFAQYLPRVMPLVFASCNLDDGSAVDIDESDDENVNDFGGVSSDDDADDEPRVRNISVRTGVLDEKAAATQALGLFALHTKSAFAPYLEESLKIMDKHSAYFHEDVRLQAVTGLKHILAAAHAIFQTHNDGTGKANEILDTVMNNYIKTMTDDDDKEVVAQACISVADIMKDYGYPAIQKYLSPLVDATLLLLTEKAACQQLEDESDIDDDDTGHDEVLMDAVSDLLPAFAKCMGSQFEPVFAQFFEPLMKFAKASRPPQDRTMVVASLAEVAQDMGLPISSYVDRLMPLVLKELGSPEATNRRNAAFCVGELCKNGGETALKYFGDVLRGISPLFGDSEPDLAVRDNAAGATARMIVVHPQLVPLNQVLPVFLRGLPLKEDQEESMAVYTCIYSLVSSSNPQIFSHVPELVKIFGQVLESPVEKVEVKAIVGRTFSHLISVYGNQLQPIISSLPPSQANVLAAFASTS

SEQ ID NO: 6776 - protein, 789 aa, Arabidopsis thaliana
  Clone ID: ARATH-23APR03-C8847_1.p
MAPAESGVSPRRNPSQLSWMNLSSNLILAYQSFGVVYGDLSTSPLYVFPSTFIGKLHKHHNEDAVFGAFSLIFWTLTLIPLLKYLLVLLSADDNGEGGTFALYSLLCRHAKLSLLPNQQAADEELSAYKFGPSTDTVTSSPFRTFLEKHKRLRTALLLVVLFGAAMVIGDGVLTPALSVLSSLSGLQATEKNVTDGELLVLACVILVGLFALQHCGTHRVAFMFAPIVIIWLISIFFIGLYNIIRWNPKIIHAVSPLYIIKFFRVTGQDGWISLGGVLLSVTGTEAMFANLGHFTSVSIRVAFAVVVYPCLVVQYMGQAAFLSKNLGSIPNSFYDSVPDPVFWPVFVIATLAAIVGSQAVITTTFSIIKQCHALGCFPRIKVVHTSKHIYGQIYIPEINWILMILTLAMAIGFRDTTLIGNAYGIACMVVMFITTFFMALVIVVVWQKSCFLAALFLGTLWIIEGVYLSAALMKVTEGGWVPFVLTFIFMIAMYVWHYGTRRKYSFDLHNKVSLKWLLGLGPSLGIVRVPGIGLVYSELATGVPAIFSHFVTNLPAFHKVVVFVCVKSVPVPHVSPEERFLIGRVCPKPYRMYRCIVRYGYKDIQREDGDFENQLVQSIAEFIQMEASDLQSSASESQSNDGRMAVLSSQKSLSNSILTVSEVEEIDYADPTIQSSKSMTLQSLRSVYEDEYPQGQVRRRHVRFQLTASSGGMGSSVREELMDLIRAKEAGVAYIMGHSYVKSRKSSSWLKKMAIDIGYSFLRKNCRGPAVALNIPHISLIEVGMIYYV

SEQ ID NO: 6777 - protein, 193 aa, Arabidopsis thaliana
  Clone ID: ARATH-23APR03-C8849_1.p
MESTELHDIDFISNPFTSFSEPTFFTPTTSSLRPDFVSDEPDSPKAKNEDEEDEYITELTRQMTNYMLQDDEKHQKSCGSGSGSPQSTLWSPFASGLSSPIGPSREPSPPLTPATVPVEKIMTKIDTKPVTIPFQSKQALIDDQIRSIQANVSSSCFLIYYFTQNLLFKKFRRLYYQRFRFNLGFVSTVVLLF

SEQ ID NO: 6778 - protein, 519 aa, Arabidopsis thaliana
  Clone ID: ARATH-23APR03-C8862_1.p
MRRLGHHRLHGKTGGVGTKGMVAKLSIGVIVLLICTLLLLFSANIGSNREPTRPSKINVEELWESAKSGGWRPSSAPRSDWPPPTKETNGYLRVRCNGGLNQQRSAICNAVLAARIMNATLVLPELDANSFWHDDSGFQGIYDVEHFIETLKYDVKIVGKIPDVHKNGKTKKIKAFQIRPPRDAPIEWYLTTALKAMREHSAIYLTPFSHRLAEEIDNPEYQRLRCRVNYHALRFKPHIMKLSESIVDKLRSQGHFMSIHLRFEMDMLAFAGCFDIFNPEEQKILRKYRKENFADKRLIYNERRAIGKCPLTPEEVGLILRAMRFDNSTRIYLAAGELFGGERFMKPFRTLFPRLDNHSSVDPSEELSASSQGLIGSAVDYMVCLLSDIFMPTYDGPSNFANNLLGHRLYYGFRTTIRPDRKALAPIFIAREKGKRAGFEEAVRRVMLKTNFGGPHKRVSPESFYTNSWPECFCQMNPKKSSDKCPPNNVIEILDSRLESIRDPDSTSQTNSTVTGLER

SEQ ID NO: 6779 - protein, 214 aa, Arabidopsis thaliana
  Clone ID: ARATH-23APR03-C8866_1.p
MATRGAVAAAASTIWKHRRNPSLRSLSRHFNPNFNHRIIPTGFKYQVRAIQGTSTDPVITPLKNREEPKPQNWKIKMLYDGDCPLCMREVNMLMERNEKHGTIKFVDISSNDYSPEDNQGLDYKTVMGQIHAIQSDGNVVKGVEAFRRLYEEVGLGWVYTITKFEPIGKLADVVYDVWAKYRLQVTGRPSIEAILEARKKDKVETCGESKNCKI

SEQ ID NO: 6780 - protein, 105 aa, Arabidopsis thaliana
  Clone ID: ARATH-23APR03-C8955_1.p
MVNIPKTKNTYCKNKECKKHTLHKVTQYKKGKDSLAAQGKRRYDRKQSGYGGQTKPVFHKKAKTTKKIVLRLQCQSCKHFSQRPIKRCKHFEIGGDKKGKGTSLF

SEQ ID NO: 6781 - protein, 382 aa, Arabidopsis thaliana
  Clone ID: ARATH-23APR03-C906_1.p
MESGSNSTSCPMAFAGDNSDGPMCPMMMMMPPIMTSHQHHGHDHQHQQQEHDGYAYQSHHQQSSSLFLQSLAPPQGTKNKVASSSSPSSCAPAYSLMEIHHNEIVAGGINPCSSSSSSASVKAKIMAHPHYHRLLAAYVNCQKVGAPPEVVARLEEACSSAAAAAASMGPTGCLGEDPGLDQFMEAYCEMLVKYEQELSKPFKEAMVFLQRVECQFKSLSLSSPSSFSGYGETAIDRNNNGSSEEEVDMNNEFVDPQAEDRELKGQLLRKYSGYLGSLKQEFMKKRKKGKLPKEARQQLLDWWSRHYKWPYPSEQQKLALAESTGLDQKQINNWFINQRKRHWKPSEDMQFVVMDATHPHHYFMDNVLGNPFPMDHISSTML

SEQ ID NO: 6782 - protein, 250 aa, Arabidopsis thaliana
  Clone ID: ARATH-23APR03-C9167_1.p
MSCNGCRVLRKGCSENCILRPCIQWIETADAQGHATVFVAKFFGRAGLMSFISAVPDSQRPALFQSLLYEACGRTVNPVNGAIGMLWTGNWNICQAAVETVLRGGSLRPIPELLTHGGGFAGFPSPTSEEASEICTEMLNLQQNDSTDRNIYHHSRFSSSRSRSTMDSSSPTKRKRLSSEDQPSSELDLSLIPNFPIKQTTPSSTRRRSVTPSMNSEDSGTTTTTTAFCDKGDVYGNGGGETTKLLNLFV

SEQ ID NO: 6783 - protein, 214 aa, Arabidopsis thaliana
  Clone ID: ARATH-23APR03-C9242_1.p
MSGLVALCRARASASSSLFNSVIRPAFRNFSTGFADTQNKSLVAQMKEEMLHMDINSMIGSSMPLGMMRIGTIIHNIEMNPGQGAKMVRAAGTNAKILKEPAKGKCLIKLPSGDTKWINAKCRATIGTVSNPSHGTKKLYKAGQSRWLGIRPKVRGVAMNPCDHPHGGGEGKSKSSGSRGRTSVSPWGKPCKGGYKSASVKKKKKRLAEAAAKM

SEQ ID NO: 6784 - protein, 182 aa, Arabidopsis thaliana
  Clone ID: ARATH-23APR03-C9259_1.p
MSNGTDQAQPPPENPATPVDSKSRKRATPGDDNWLPPDWRTEIRVRTSGTKAGTVDKFYYEPITGRKFRSKNEVLYYLEHGTPKKKSVKTAENGDSHSEHSEGRGSARRQTKSNKKVTEPPPKPLNFDFLNVPEKVTWTGINGSEEAWLPFIGDYKIQESVSQDWDRVFTLVTSQNAGKTMF

SEQ ID NO: 6785 - protein, 244 aa, Arabidopsis thaliana
  Clone ID: ARATH-23APR03-C9277_1.p
MALHGSGVFCKVSNMVEITSPFGGSMRLLHLPKSYPIHCNMVSASNTFGSAHLKLQNKEPCSRLRPCRVKREENNQTADVESISMDENTLKQDLETAVQEENYVEAAKIRDKLKELQEDNKASVLSANSRFYQSFRNGDLAAMQSLWSKSGNPCCVHPGAKGITGYDYVMESWELVWMNYEFPLLIELKDVEVHVRGEVGYVTCMEFVKTKGSSSWGAQFVSNVFERIDGQWFICIHHASPVDI

SEQ ID NO: 6786 - protein, 109 aa, Arabidopsis thaliana
  Clone ID: ARATH-23APR03-C9297_1.p
MGSTNKLWSRKPDVKTGKSEFPVTRFLRTQIDNIKTTTVGPGIGGGIGCGAGIGIGLSGGLGIGASEGLDHSNVVLGFGIGCGIGFGFGYGFGVGGGYSFDDIKERFDL

SEQ ID NO: 6787 - protein, 148 aa, Arabidopsis thaliana
  Clone ID: ARATH-23APR03-C9300_1.p
MATRRILKELKELQRDPPVSCSAGPTGEDMFHWQATIMGPNESPYSGGVFLVNIHFPPDYPFKPPKVVFRTKVFHPNINSNGNICLDILKDQWSPALTISKVLLSICSLLTDPNPDDPLVPEIAHIYKTDKTKYEAMARSWTQKYALF

SEQ ID NO: 6788 - protein, 210 aa, Arabidopsis thaliana
  Clone ID: ARATH-23APR03-C93613_1.p
MSSIVEHVVLFKLNDDDVDSGKINSMVNGINELVNLDQVLHLYCGSIHRLITTTASDFTHVLHSRYRSKEDLNAYAIHPDHVRVVKESESIREDIMAVDWIAEQAPEALAPPLGSIGKITLLKLKENVMEEAKLEIMEVMKEKFEGIDQITVGENFSPGRSKDFSIGSISYFRDLGEIEAVDDQMKLQNDKIRDYVDDTIVVEFNVPSSS

SEQ ID NO: 6789 - protein, 325 aa, Arabidopsis thaliana
  Clone ID: ARATH-23APR03-C9399_1.p
MEEERDHNASESSLPSLSKQLESSTLGGSAVDVPVVDLSVSDEDFLVREVVKASEEWGVFQVVNHGIPTELMRQLQMVGTQFFELPDAEKETVAKEEDFEGYKKNYLGGINNWDEHLFHRLSPPSIINYKYWPKNPPQYREVTEEYTKHMKRLTEKILGWLSEGLGLQRETFTQSIGGDTAEYVLRVNFYPPTQDTELVIGAAAHSDMGAIALLIPNEVPGLQAFKDEQWLDLDYIDSAVVVIIGDQLMRMTNGRLKNVLHRAKSDKDKLRISWPVFVAPRADMSVGPLPEFTGDENPPKFETLIYNDYIDQKIRGWALEDLPVY

SEQ ID NO: 6790 - protein, 825 aa, Arabidopsis thaliana
  unsure (1)..(825): unsure at all Xaa locations
  Clone ID: ARATH-23APR03-C9480_1.p
MTSNKGAIIPPELPWKPVAKGSRSSTRRGKKLVKRVAASDIESEDKSSTHTLVAGESKRPKLGVSVLGQHFVERVEHVPIKKRIFVVSSPSPSPSSSKRSSAQREGSEHKAQINHVLPVSRLNPNLVSDVRDEKPDYSVHDFSGIKILADAACSTDVSNDFAPAVDRLPAEEFAVQLQDTSTISTHVEGNDSSAGTADVSHTAVDSGDQSGQGKSNIVAPQKHPLTNLCNELADEQSVEHSRVTSGGIIAPKKTCIALSNESSTERPKDNVEASESEPLAPDSGAVTVSEKLSADEPTEKNNEGLKDVKFLWDLNIPCDVEDEASRRDEEGEITESIAPKGSEPFDGSKHSMDGVATDXTKLSTTTKRHDNRXNVRDLFGFFPIESXYVSLDLFVMFAWEENEEVEQLDYCSEPEDERFYSMGSEKGILTNENLRHVKCESGDALRIGQANEGSDMKQAVVNMSDSHPKKGSSSPSRSFGSKPYKEVPSNDAIQRRRPYTYEEVSTGPDRFVGRDDRSGMRMRNRSPQRGYISGWDSKRRFSPPNYKDGSYGSGRPWHKRMADDRGMMNGFDESGSGQGPGPEPEPEGYVRRQFSNGGYRGRFKRFPDGGDRKFRGPYTDTNQFSGRMHNRMSGNRRERGGSPVVRRLHHPQSESRSRSRSPVLWNGRNRSPPPPPGGFRADERMTERVRLPFQKRFPADQEMGYMSPPRNRMSSPRFFEGRNNGAGENYNSFRERKFRPGQRFYVGNSMRRPNSDNNNLRPFIPNRRFDNPEESTGGNRFEMTQQRRTRRSETTEDGGDVIRRFKFNEEQQSVVVANDNNNKES

SEQ ID NO: 6791 - protein, 207 aa, Arabidopsis thaliana
  Clone ID: ARATH-23APR03-C9483_1.p
MAVTKIYIVYYSLHGHVETMAREVLRGVNSVPDVEATLWQVPETLPEKILEKVKAVPRPDDVPDIRPEQLAEADGFMFGFPSRFGVMASQVMTFFDNTNDLWTTQALAGKPAGIFWSTGFHGGGQELTALTAVTKLAHHGMIFVPVGYTFGKSMYEMGEVKGGSPYGSGTYAADGSREPTELEIQQANYHGKYFAGIAKKLKKRSPV

SEQ ID NO: 6792 - protein, 297 aa, Arabidopsis thaliana
  Clone ID: ARATH-23APR03-C9486_1.p
MSETRRNLSSDEQIEKSEIQHQRVVIENSHGEKLVGVLHDTGSTETVVICHGFRSSKNRIPMLTIASFFERAMISSFRFDFAGNGESQGSFQYGNYRRELEDLRSVLQHLRGVNRVISAIIGHSKGGNVVLLYAAKYNDVQTVVNISGRFFLDRGIEFRLGKDYFKRIKDNGFIDVGNRKGKFEYRVTEESLMDRLTTNAHEACLSIRENCRVLTVHGSNDRIVHVTEASEFAKQIKNHKLYVIEGADHEFTSHQHQLASIVLSFFKLDPKKDDDSGDISTSNQDSMRSVVPITSRI

SEQ ID NO: 6793 - protein, 808 aa, Arabidopsis thaliana
  Clone ID: ARATH-23APR03-C94_1.p
MNFNGFLDDGAGASKLLSDAPYNNHFSFSAVDTMLGSAAIAPSQSLPFSSSGLSLGLQTNGEMSRNGEIMESNISRKSSRGEDVESRSESDNAEAVSGDDLDTSDRPLKKKKRYHRHTPKQIQDLESVFKECAHPDEKQRLDLSRRLNLDPRQVKFWFQNRRTQMKTQIERHENALLRQENDKLRAENMSVREAMRNPMCGNCGGPAVIGEISMEEQHLRIENSRLKDELDRVCALTGKFLGRSNGSHHIPDSALVLGVGVGSGGCNVGGGFTLSSPLLPQASPRFEISNGTGSGLVATVNRQQPVSVSDFDQRSRYLDLALAAMDELVKMAQTREPLWVRSSDSGFEVLNQEEYDTSFSRCVGPKQDGFVSEASKEAGTVIINSLALVETLMDSERWAEMFPSMVSRTSTTEIISSGMGGRNGALHLMHAELQLLSPLVPVRQVSFLRFCKQHAEGVWAVVDVSIDSIREGSSSSCRRLPSGCLVQDMANGYSKVTWIEHTEYDKNHIHRLYRPLLSCGLAFGAHRWMAALQRQCECLTILMSSTVSTSTNPSPINCNGRKSMLKLAKRMTDNFCGGVCASSLQKWSKLNVGNVDEDVRIMTRKSVNNPGEPPGIILNAATSVWMPVSPRRLFDFLGNERLRSEWDILSNGGPMKEMAHIAKGHDRSNSVSLLRASAINANQSSMLILQETSIDAAGAVVVYAPVDIPAMQAVMNGGDSAYVALLPSGFAILPNGQAGTQRCAAEERNSIGNGGCMEEGGSLLTVAFQILVNSLPTAKLTVESVETVNNLISCTVQKIKAALHCDST

SEQ ID NO: 6794 - protein, 482 aa, Arabidopsis thaliana
  Clone ID: ARATH-23APR03-C9516_1.p
MAIREIKDVERGEIVNKVEDLGKPFLTHEDDEKESENNESYLMVLFSTFVAVCGSFEFGSCVGYSAPTQSSIRQDLNLSLAEFSMFGSILTIGAMLGAVMSGKISDFSGRKGAMRTSACFCITGWLAVFFTKGALLLDVGRFFTGYGIGVFSYVVPVYIAEISPKNLRGGLTTLNQLMIVIGSSVSFLIGSLISWKTLALTGLAPCIVLLFGLCFIPESPRWLAKAGHEKEFRVALQKLRGKDADITNEADGIQVSIQALEILPKARIQDLVSKKYGRSVIIGVSLMVFQQFVGINGIGFYASETFVKAGFTSGKLGTIAIACVQVPITVLGTILIDKSGRRPLIMISAGGIFLGCILTGTSFLLKGQSLLLEWVPSLAVGGVLIYVAAFSIGMGPVPWVIMSEIFPINVKGIAGSLVVLVNWSGAWAVSYTFNFLMSWSSPGTFYLYSAFAAATIIFVAKMVPETKGKTLEEIQACIRRET

SEQ ID NO: 6795 - protein, 1303 aa, Arabidopsis thaliana
  unsure (1)..(1303): unsure at all Xaa locations
  Clone ID: ARATH-23APR03-C9521_1.p
MARFQFCCVFVLVALAVLAVNPSSSYRFTIVEPKSGSDSDLDSDSESLLFHQDYSPPAPPPPPPHGPSVSCSEDLGGVGFLDTTCKIVADLNLTHDVYIAGKGNFIILPGVRFHCPIPGCSIAINVSGNFSLGAESTIVAGTLELTAGNASFANGSAVNTTGLAGSPPPQTSGTPQGIDGAGGGHGGRGACCLTDTKKLPEDVWGGDAYSWSTLQKPWSYGSKGGSTSREIDYGGGGGGKVKMDILQLLDVNGSLLANGGYGGAKGGGGSGGSIYIKAYKILRGLHDPQFFVHGGYSIGCPDNSGAAGTLYDAVPRSLFVSNYNQTTDTYTLLLEFPFQPLWTNVYIQDKARATCPLLWSRVQVQGPRGLLCRRAFCVRFAHHGASLVVVGAVVPLLRVAAFRLVGPSRLPLXSFSLRDALLPLVGGPRGSPLPSPARVNALFSHGPRRSAGLARVYALWNFMSLVNVFVAFLCGYVHYHSESSASKKIPFQPWNINMGESEWWIFPAGLVVCKIMQSQLINRHVANLEIQDRSLYSKXIMSCFGSRDKVLSGNFSQNNXTVLPQVWSGDFSLXFCSFVSLLVILLLQVNRIRIQKRRNSDXTRMMIYLLEAVLIISAALGSCRGGSGRPGRGGGGGGGRIHFHWSNIPTGDIYQPIASVKGIIHARGGAAADDGFYGKNGTITGTACPKGLHGIFCKECPSGTFKNVTGSDPSLCRPCPVDELPTRAVYVTVRGGVSETPCPYRCISERYHMPHCYTALEELIYTFGGPWLFGLLLMGLLILLALVLSVARMKFVGVDDLPGPAPTQHGSQIDHSFPFLESLNEVLETNRAEQSQSHVHRMYFMGPNTFSEPWHLSHIXPPEEIKEIVYEAAFNTFVDEINSIAAYQWWEGAIYSILSVVAYPLAWSWQQWRRKMKLQKLREFVRSEYDHSCLRSCRSRALYEGLKVAATSDLMLAYLDFFLGGDEKRTDLPPRLHQRFPMPILFGGDGSYMAPFSLQNDNILTSLMSQLGSPTTWYRLVAGVNAQLRLVRRGRLRSTFHSVLRWLETHANPALETHGIRVDLAWFQTTACGYCQYGLLIHTVEDCEPTSPQCVSETTWTEIQPRKNYGGIIDLDSLPSLKEKRDMFFLLSFLVHNTKPVGHQDMVGLVISMLLLGDFSLVLLTLLQLYSISLLDVLLALFILPLGLLLPFPAGINALFSHGPRRSAGLARVYALWNFMSLVNVFVAFLCGYVHYHSESSASKKIPFQPWNINMGESEWWIFPAGLVVCKIMQSQLINRHVANLEIQDRSLYSKDYELFWQS

SEQ ID NO: 6796 - protein, 475 aa, Arabidopsis thaliana
  Clone ID: ARATH-23APR03-C9524_1.p
MASQSSVAVISSAAARGESFPDSKKPIGSVRFQQPLRLSFSYCKSGNMSSRICAMAKPNDAETLSSSVDMSLSPRVQSLKPSKTMVITDLAATLVQSGVPVIRLAAGEPDFDTPKVVAEAGINAIREGFTRYTLNAGITELREAICRKLKEENGLSYAPDQILVSNGAKQSLLQAVLAVCSPGDEVIIPAPYWVSYTEQARLADATPVVIPTKISNNFLLDPKDLESKLTEKSRLLILCSPSNPTGSVYPKSLLEEIARIIAKHPRLLVLSDEIYEHIIYAPATHTSFASLPDMYERTLTVNGFSKAFAMTGWRLGYLAGPKHIVAACSKLQGQVSSGASSIAQKAGVAALGLGKAGGETVAEMVKAYRERRDFLVKSLGDIKGVKISEPQGAFYLFIDFSAYYGSEAEGFGLINDSSSLALYFLDKFQVAMVPGDAFGDDSCIRISYATSLDVLQAAVEKIRKALEPLRATVSV

SEQ ID NO: 6797 - protein, 243 aa, Arabidopsis thaliana
  Clone ID: ARATH-23APR03-C954_1.p
MDCLQMVFKLFPNWKREAEVKKLGYKVHGDPFSTNTRRVLAVLHEKRLSYEPITVKLQTGEHKTEPFLSLNPFGQVPVFEDGSVKLYESRAITQYIAYVHSSRGTQLLNLRSHETMATLTMWMEIEAHQFDPPASKLTWEQVIKPIYGLETDQTIVKENEAILEKVLNIYEKRLEESRFLACNSFTLVDLHHLPNIQYLLGTPTKKLFEKRSKVRKWVDEITSREAWKMACDQEKSWFNKPRN

SEQ ID NO: 6798 - protein, 89 aa, Arabidopsis thaliana
  Clone ID: ARATH-23APR03-C956_1.p
SSFGLRVSVFFYEFRYRGTLHSLKTLCPVTILKNLSFYVYTCTDLKLFSIKTYPSLYCSLHLKFLFLSSSSLWSMCCVLLAYNISMTGR

SEQ ID NO: 6799 - protein, 792 aa, Arabidopsis thaliana
  Clone ID: ARATH-23APR03-C9573_1.p
MLSNHLQNGIESDNLLWSRVPESDDTSTDDITLLNSHRDGDGGVNSLDYEVIENYAYREEQAHRGKLYVGYYVAVKWFFSLLIGIGTGLAAVFINLSVENFAGWKFALTFAIIQKSYFAGFIVYLLINLVLVFSSAYIITQFAPAAAGSGIPEIKGYLNGIDIPGTLLFRTLIGKIFGSIGSVGGGLALGKEGPLVHTGACIASLLGQGGSTKYHLNSRWPQLFKSDRDRRDLVTCGCAAGVAAAFRAPVGGVLFALEEVTSWWRSQLMWRVFFTSAIVAVVVRTAMGWCKSGICGHFGGGGFIIWDVSDGQDDYYFKELLPMAVIGVIGGLLGALFNQLTLYMTSWRRNSLHKKGNRVKIIEACIISCITSAISFGLPLLRKCSPCPESVPDSGIECPRPPGMYGNYVNFFCKTDNEYNDLATIFFNTQDDAIRNLFSAKTMREFSAQSLLTFLAMFYTLAVVTFGTAVPAGQFVPGIMIGSTYGRLVGMFVVRFYKKLNIEEGTYALLGAASFLGGSMRMTVSLCVIMVEITNNLKLLPLIMLVLLISKAVGDAFNEGLYEVQARLKGIPLLESRPKYHMRQMIAKEACQSQKVISLPRVIRVADVASILGSNKHNGFPVIDHTRSGETLVIGLVLRSHLLVLLQSKVDFQHSPLPCDPSARNIRHSFSEFAKPVSSKGLCIEDIHLTSDDLEMYIDLAPFLNPSPYVVPEDMSLTKVYNLFRQLGLRHLFVVPRPSRVIGLITRKDLLIEENGESSAVELQQSTSVRGRYSETATRMDAARPLLDDLLG

SEQ ID NO: 6800 - protein, 398 aa, Arabidopsis thaliana
  Clone ID: ARATH-23APR03-C9593_1.p
MDSNFHYSIDLNEDQNHHEQPFFYPLGSSSSLHHHHHHHHHQVPSNSSSSSSSISSLSSYLPFLINSQEDQHVAYNNTYHADHLHLSQPLKAKMFVANGGSSACDHMVPKKETRLKLTIRKKDHEDQPHPLHQNPTKPDSDSDKWLMSPKMRLIKKTITNNKQLIDQTNNNNHKESDHYPLNHKTNFDEDHHEDLNFKNVLTRKTTAATTENRYNTINENGYSNNNGVIRVCSDCNTTKTPLWRSGPRGPKSLCNACGIRQRKARRAAMAAAAAAGDQEVAVAPRVQQLPLKKKLQNKKKRSNGGEKYNHSPPMVAKAKKCKIKEEEEKEMEAETVAGDSEISKSTTSSNSSISSNKFCFDDLTIMLSKSSAYQQVFPQDEKEAAVLLMALSYGMVHG

SEQ ID NO: 6801 - protein, 446 aa, Arabidopsis thaliana
  Clone ID: ARATH-23APR03-C9618_1.p
MELNKDQTVMSEDKKPQDPNPRFACEGCSVLLDINDGDRLVFARLSSGAILKIGNKNYSLKPLIGAPFGSLFQVETGEDGSFLSRILPIKQESNSNNVMDDSRDNREIVDNNEAQNLTGEEIEAMRREGAKGDEIIEALIANSKTFDKKFQLSQEKYKLKKQKKYAPKLLLRRPFARSICEAYFKKYPARIGFLRVDALSLLLTMANVTAYSDVLVVDMVGGLVTGAVAERLGGTGYVCNTYKGSSPYPVEMVRMFNFSDKVLKRIVQSSINELSSAKTASTEGNNQQEGVCKAENNINETATSDVMVEEISVTTEAGVVDIVVPESKIIKAAKAGAKASKETIEMWQENGFSSLIMAAQDQDPWIVAKDVLPLLSYSAPFAIYHQYLQPLATCMHKLQQGKMAINLQITEPWLREYQVLPSRSHPHMQMSSFGGYVLSGIRISTT

SEQ ID NO: 6802 - protein, 561 aa, Arabidopsis thaliana
  Clone ID: ARATH-23APR03-C9642_1.p
MAATSSISSSLSLNAKPNKLSNNNNNNKPHRFLRNPFLNPSSSSFSPLPASISSSSSSPSFPLRVSNPLTLLAADNDDYDEKPREECGVVGIYGDSEASRLCYLALHALQHRGQEGAGIVTVSKDKVLQTITGVGLVSEVFSESKLDQLPGDIAIGHVRYSTAGSSMLKNVQPFVAGYRFGSVGVAHNGNLVNYTKLRADLEENGSIFNTSSDTEVVLHLIAISKARPFFMRIVDACEKLQGAYSMVFVTEDKLVAVRDPHGFRPLVMGRRSNGAVVFASETCALDLIEATYEREVYPGEVLVVDKDGVKCQCLMPHPEPKQCIFEHIYFSLPNSIVFGRSVYESRHVFGEILATESPVDCDVVIAVPDSGVVAALGYAAKAGVAFQQGLIRAYYVGRTFIEPSQKIRDFGVKLKLSPVRGVLEGKRVVVVDDSIVRGTTSSKIVRLLREAGAKEVHMRIASPPIIASCYYGVDTPSSNELISNRMSVDEIRDYIGCDSLAFLSFETLKKHLGEDSRSFCYACFTGDYPVKPTEDKVKRGGDFIDDGLVGGIHNIEGGWVR

SEQ ID NO: 6803 - protein, 135 aa, Arabidopsis thaliana
  Clone ID: ARATH-23APR03-C96692_1.p
MLSCSNGTVVIATAMVCSSTALFLAMARQFHGNHQNPKVLDQTLRPILRSCLSSEETKKQGKKIKKVRFADNVKDTKGNGEEYRRRELNRKSVPKPVTKPGKTGSMCRISTMPANRMALYNGILRDRDHRVQYSY

SEQ ID NO: 6804 - protein, 281 aa, Arabidopsis thaliana
  Clone ID: ARATH-23APR03-C9674_1.p
MATPNEVSALFLIKKYLLDELSPLPTTATTNRWMNDFTSFDQTGFEFSEFETKPEIIDLVTPKPEIFDFEVKSEISIESNDSFTFQSNPPRVTVQSNRKPPLKIAPPNRTKWIQFATGNPKPELPEPVVAAEEKRHYRGVRMRPWGKFAAEIRDPTRRGTRVWLGTFETAIEAARAYDKEAFRLRGSKAILNFPLEVDKWNPRAEDGRGLYKRKRDSEEEEVKVVKKVLKKEESYAVSDGENVESGLTAIDDWDLTEFLSMPLLSPLSPHPPFGYPQLTVV

SEQ ID NO: 6805 - protein, 330 aa, Arabidopsis thaliana
  Clone ID: ARATH-23APR03-C9692_1.p
MRSFTNLNPCYVLLPFFLVLATNATHTNNFLPRPRTGYYGSACWNVESIVRSVVESNYLANPANAPGILRMHFHDCFVQGCDASVLLAGPNSERTAIPNLSLRGFNVIEEAKTQLEIACPRTVSCADILALAARDFVHLAGGPWWPVPLGRLDGRISLASNVILPGPTDSVAVQKLRFAEKNLNTQDLVVLAAGHTIGTAGCIVFRDRFFNYDNTGSPDPTIAPSFVPLIQAQCPLNGDPATRVVLDTGSGDQFDTSYLNNLKNGRGLLESDQVLWTNLETRPIVERLLGLRFPFLIFGLEFARSMTKMSQIEIKTGLDGEIRRVCSAVN

SEQ ID NO: 6806 - protein, 497 aa, Arabidopsis thaliana
  Clone ID: ARATH-23APR03-C9711_1.p
METKTLIFSILFVVLSLIYLIGKLKRKPNLPPSPAWSLPVIGHLRLLKPPIHRTFLSLSQSLNNAPIFSLRLGNRLVFVNSSHSIAEECFTKNDVVLANRPNFILAKHVAYDYTTMIAASYGDHWRNLRRIGSVEIFSNHRLNSFLSIRKDEIRRLVFRLSRNFSQEFVKVDMKSMLSDLTFNNILRMVAGKRYYGDGVEDDPEAKRVRQLIADVVACAGAGNAVDYLPVLRLVSDYETRVKKLAGRLDEFLQGLVDEKREAKEKGNTMIDHLLTLQESQPDYFTDRIIKGNMLALILAGTDTSAVTLEWALSNVLNHPDVLNKARDEIDRKIGLDRLMDESDISNLPYLQNIVSETLRLYPAAPMLLPHVASEDCKVAGYDMPRGTILLTNVWAIHRDPQLWDDPMSFKPERFEKEGEAQKLMPFGLGRRACPGSGLAHRLINLTLGSLIQCLEWEKIGEEVDMSEGKGVTMPKAKPLEAMCRARPSVVKIFNESV

SEQ ID NO: 6807 - protein, 197 aa, Arabidopsis thaliana
  Clone ID: ARATH-23APR03-C9722_1.p
MVFHRLSRLGSRIVKELPRERHLSMCGKRILQRSYGQYLQSSPMLQRQTRSFKEALFSNNHKFCTSFSTTSEKGGEKTEKINVTFVDKDGEEIHIKVPVGMNILEAAHENDIELEGACEGSLACSTCHVIVMDTKYYNKLEEPTDEENDMLDLAFGLTATSRLGCQVIAKPELDGVRLAIPSATRNFAVDGFVPKPH

SEQ ID NO: 6808 - protein, 633 aa, Arabidopsis thaliana
  unsure (1)..(633): unsure at all Xaa locations
  Clone ID: ARATH-23APR03-C9736_1.p
MALCGVCSTPNLPNLQVFRSVRNSSIGYKRNHSLWQLRSSSFRAKSVIFHCSSSLRQSPSNVEEIDDNPSVSLEDESAHVMQFKWSDFRILDRVSIGHGGRADELVFEAIVQVPDSPLFNQGVVLRKLNTTRAQRRGRRAIEVFKKLXRRRLLYHSYSMQVHGYITNNLSDDQYSFTLVHGCHGSFSIRHWLXLIRTLMRDILIGVNYLHSHGLAHTELRLENVHISPVDRHIKVGILGNAADFNGDVPSTSNAYSTMDRRQMMIAFDMRCVGFMMAKMVLQELMDPLIFAKLKSFLAKGNDPSSLREFFVTTLNTNSESGNTGVQILDRNWGAGWHLLSLLIATRPSERISCLDALKHPFLCGPRWRVAPSMDIIRWGLGSTAVKISEEYIYRMPQRQRLAHFIGLMEMLNPYPKPNCWLELLPGRWRLLYSTGKHIGLTLRQPSTRALIGNVHLTITRASESINNTSLSFTSDIRFTAITSKDWPHNKIGAAGKLQTLSQFRLIAGKRLYLKEEKKNIGKFSMGEPDAEEGLAEKLETEKWKKVVPFKEFPSSLPVAKLVSGEIEVTMNMNDHIDSPGSVIGEVRKQIPPEMFDLSKLVCGTYIDSRLLVLRCVNGSALLFTRSSLDHKSM

SEQ ID NO: 6809 - protein, 347 aa, Arabidopsis thaliana
  Clone ID: ARATH-23APR03-C9760_1.p
MLTSSCSSSSLLCHRPALSSSRSKFRVPCRTVFSPALTKISPLTASSPSKSAKHKWKILCFRNEDSAPENPEHFVPEELVKPDQDSPCTDKTDWKATFQKAADAVLKAIGTRWKVPWTVETIVQVMLLWVAAFWFIGSWMIPFMAHISGFHKESLTFRGQALFSLITDVTEGLAGIAILHRCLSMFRPLASDWFRFTLKGNWQLDVIIGCFMFPFVNRLSQLNLNLLPLPPTSSPVSLSSVEQSIMARDPVAMALYAVVVSICAPVWEEIVFRGFLLPSLTRYMPVWCAILVSSIAFALAHFNVQRMLPLVFLGVVLGLIFARSRNLLPSMLLHSLWNGFVFMELMR

SEQ ID NO: 6810 - protein, 380 aa, Arabidopsis thaliana
  Clone ID: ARATH-23APR03-C9761_1.p
MSLLSPLPLLHSFSSTVATKSTASRITATPSKIRFSVINATSENGNSGGSKNDRDEDPSFNPFGFVTDNPSSRSAIQLPESPAEDGNVGQMLYRTEDKGKEYGSTIKSGKLRWFVRETGSKESRRGTIVFVHGAPTQSFSYRTVMSELSDAGFHCFAPDWIGFGFSDKPQPGYGFNYTEKEYHEAFDKLLEVLEVKSPFFLVVQGFLVGSYGLTWALKNPSKVEKLAILNSPLTVSSPVPGLFKQLRIPLFGEFTCQNAILAERFIEGGSPYVLKNEKADVYRLPYLSSGGPGFALLETAKKINFGDTLSQIANGFSSGSWDKPTLLAWGIADKYLPQSIAEEFEKQNPQNVKLRLIEGAGHLPQEDWPEKVVAALRAFF

SEQ ID NO: 6811 - protein, 361 aa, Arabidopsis thaliana
  unsure (1)..(361): unsure at all Xaa locations
  Clone ID: ARATH-23APR03-C97640_1.p
MATAMEEPRKLRGHKSTATCCIASRDRPGIVLTSGEDGCICWFDLRCKDVQFIIDVGTEPVSSLCFKTGNENILYASCGNEIKSFDVHTLSATSWKPLESYNYNKDEVNQVVCNGRSSFLASADDSGDVKMIDLGQKCLYKTLRAGHTSICSSVQFIPWRPWEVXITGGLDSKLVLWDFSKGRSQKIIDFGSDTNNNSGQCLNPAFVHSIAIPEMDMVDKLDKICAVARGDGIVNLINIESELSRKGTSSKGSSSSSSNNVVKRVCLDYSVGGHNSAVSCVAFSLFQEKGRFLISGGNDKTVKIWDCFKCLDPNNNNNNSDLLHLNINLSKKVNWLCTNQSDSENLVVCDTTRVVKVYSIS

SEQ ID NO: 6812 - protein, 145 aa, Arabidopsis thaliana
  Clone ID: ARATH-23APR03-C9764_1.p
MASLSMASVNVSFCHPLRSSSPKVSLRSSVHFATSLSSSHSISGLRAVLPLKISTVASPNSQKLHSFTVFAHKGYKMKTHKASAKRFRVTGRGKIVRRRSGKQHLLAKKNNKRKLRLSKMTEVNRSDYDNVIGALPYLKVNRKAT

SEQ ID NO: 6813 - protein, 140 aa, Arabidopsis thaliana
  Clone ID: ARATH-23APR03-C97681_1.p
YFCFLLSFSKLLVTIDGHEDVPENDENALLKAVANQPVSVAIDAGSSDFQFYSEGVFTGSCGTELNHGVAAVGYGSERGKKYWIVRNSWGAEWGEGGYIKIEREIDEPEGRCGIAMEASYPIKLSSSNPTPKDGDVKDEL

SEQ ID NO: 6814 - protein, 151 aa, Arabidopsis thaliana
  Clone ID: ARATH-23APR03-C97767_1.p
KEKKKYLFFFFPPAGGKKKKSLPPICSHTGGGGRIRGGWVFFFFFFPPPLCGKRKNPPLSCFCPPHHTTKKVGEESFPPKGHPPAPKKRGILRGKKRATKKSGVFFRKKGPPKDPPGLKKEGGAPASAPPPRPPGGGPPPSGPPGPAGAPP

SEQ ID NO: 6815 - protein, 171 aa, Arabidopsis thaliana
  unsure (1)..(171): unsure at all Xaa locations
  Clone ID: ARATH-23APR03-C97802_1.p
MALREMIIDESDDIESYSDQSLCLDKAKELLALIKLPTGLLPLKDMTEVGYNKTKGFVWMRLRSKIEHTFREIGRRVLYDTEITAFVEDRRMRRLTGVKSKELMIWVPVNDIFIXKRKILRRSPLLIPPACHEHLKFQHFNVKVDKXKEKRSNQTSLMKATNKEQKLFHTQ

SEQ ID NO: 6816 - protein, 487 aa, Arabidopsis thaliana
  Clone ID: ARATH-23APR03-C9795_1.p
MMSTTVRLNRFTYLTSTAKLTRYFCSHHLVDRSETALHEVIRIVSSPVGGLDDLEENLNQVSVSPSSNLVTQVIESCKNETSPRRLLRFFSWSCKSLGSSLHDKEFNYVLRVLAEKKDHTAMQILLSDLRKENRAMDKQTFSIVAETLVKVGKEEDAIGIFKILDKFSCPQDGFTVTAIISALCSRGHVKRALGVMHHHKDVISGNELSVYRSLLFGWSVQRNVKEARRVIQDMKSAGITPDLFCFNSLLTCLCERNVNRNPSGLVPEALNIMLEMRSYKIQPTSMSYNILLSCLGRTRRVRESCQILEQMKRSGCDPDTGSYYFVVRVLYLTGRFGKGNQIVDEMIERGFRPERKFYYDLIGVLCGVERVNFALQLFEKMKRSSVGGYGQVYDLLIPKLCKGGNFEKGRELWEEALSIDVTLSCSISLLDPSVTEVFKPMKMKEEAAMVDRRALNLKIHARMNKTKPKLKLKPKRRSKTKKKNLQH

SEQ ID NO: 6817 - protein, 632 aa, Arabidopsis thaliana
  Clone ID: ARATH-23APR03-C9808_1.p
MGLTNCCSHEELMSRLVDSVKEISGFSSSRGFIGKIQGDLVRRITLLSPFFEELIDVNVELKKDQITGFEAMRIALDSSLELFRSVNGGSKLFQLFDRDSLVEKFRDMTVEIEAALSQIPYEKIEVSEEVREQVQLLHFQFKRAKERWEESDLQLSHDLAMAENVMDPDPIILKRLSQELQLTTIDELKKESHAIHEYFLSYDGDPDDCFERMSSLLKNLVDFVTMESSDPDPSTGSRIVSRHRSPVIPEYFRCPISLELMKDPVIVSTGQTYERSSIQKWLDAGHKTCPKSQETLLHAGLTPNYVLKSLIALWCESNGIELPQNQGSCRTTKIGGSSSSDCDRTFVLSLLEKLANGTTEQQRAAAGELRLLAKRNVDNRVCIAEAGAIPLLVELLSSPDPRTQEHSVTALLNLSINEGNKGAIVDAGAITDIVEVLKNGSMEARENAAATLFSLSVIDENKVAIGAAGAIQALISLLEEGTRRGKKDAATAIFNLCIYQGNKSRAVKGGIVDPLTRLLKDAGGGMVDEALAILAILSTNQEGKTAIAEAESIPVLVEIIRTGSPRNRENAAAILWYLCIGNIERLNVAREVGADVALKELTENGTDRAKRKAASLLELIQQTEGVAVTTVP

SEQ ID NO: 6818 - protein, 251 aa, Arabidopsis thaliana
  Clone ID: ARATH-23APR03-C9816_1.p
MALREDDDDVNIGEKVVDVESELQKYRINSIESTVVIRQLPTQGIAFKLWIPATTLVTLLDNYRRDPNISPLNRTFSSFQSDGSDSSSPINIVELGSGTGIVGIAAAATLGANVTVTDLPNVIENLKFNADANAQVVAKFGGKVHVASLRWGEIDGVESLGQNVDLILASDVVYHVHLYEPLLKTLRFLLLEGSSERVFLMAHLKRWKKESIFFKKARRFFDVDVIHCDDPQEGARIGVVVYRFAPKNQNL

SEQ ID NO: 6819 - protein, 115 aa, Arabidopsis thaliana
  Clone ID: ARATH-23APR03-C9822_1.p
MAFALRFFTCLVLTVCIVASVDAAISCGTVAGSLAPCATYLSKGGLVPPSCCAGVKTLNSMAKTTPDRQQACRCIQSTAKSISGLNPSLASGLPGKCGVSIPYPISMSTNCNNIK

SEQ ID NO: 6820 - protein, 362 aa, Arabidopsis thaliana
  Clone ID: ARATH-23APR03-C9832_1.p
INLLSGTEEEKGMMISERDDFSLTGPLHLTSIDWANEHHRRSVAGSLVQGIYVAERDRQLQREGPELALSPIWSEFFHFRLIRKFVDDADNSIFGGIYEYKPPQQLSQTVKSMEFSPRFVIAFRGTVTKVDSISRDIEHDIHVIRNGLHTTTRFDIAIQAVRNIVASVGGSSVWLAGHSLGASMALLTGKTIARTGFFPECFAFNPPFLSAPIEKIKDKRIKHGIRIAGSVITAGLALAKKATQHYSQNDRALPAPPDPFEALSDWFPRLYVNPGDHLCSEYVGYFEHRNKMEEIGIGFVERVATQHSLGGMLLGGQEPVHLIPSSVLTVNLSSSRDFKQAHGIHQWWREDNKFETKVYQYK

SEQ ID NO: 6821 - protein, 790 aa, Arabidopsis thaliana
  Clone ID: ARATH-23APR03-C9852_1.p
MEMGVMENLMVHTEISKVKSQSNGEVEKRGVSVLENGGVCKLDRMSGLKFKRRKVFAVRDFPPGCGSRAMEVKIACENGNVVEDVKVVESLVKEEESLGQRDASENVSDIRMAEPVEVQPLRICLPGGDVVRDLSVTAGDECSNSEQIVAGSGVSSSSGTENIVRDIVVYADESSLGMDNLDQTQPLEIEMSDVAVAKPRLVAGRKKAKKGIACHSSLKVVSREFGEGSRKKKSKKNLYWRDRESLDSPEQLRILGVGTSSGSSSGDSSRNKVKETLRLFHGVCRKILQEDEAKPEDQRRKGKGLRIDFEASTILKRNGKFLNSGVHILGEVPGVEVGDEFQYRMELNILGIHKPSQAGIDYMKYGKAKVATSIVASGGYDDHLDNSDVLTYTGQGGNVMQVKKKGEELKEPEDQKLITGNLALATSIEKQTPVRVIRGKHKSTHDKSKGGNYVYDGLYLVEKYWQQVGSHGMNVFKFQLRRIPGQPELSWVEVKKSKSKYREGLCKLDISEGKEQSPISAVNEIDDEKPPLFTYTVKLIYPDWCRPVPPKSCCCTTRCTEAEARVCACVEKNGGEIPYNFDGAIVGAKPTIYECGPLCKCPSSCYLRVTQHGIKLPLEIFKTKSRGWGVRCLKSIPIGSFICEYVGELLEDSEAERRIGNDEYLFDIGNRYDNSLAQGMSELMLGTQAGRSMAEGDESSGFTIDAASKGNVGRFINHSCSPNLYAQNVLYDHEDSRIPHVMFFAQDNIPPLQELCYDYNYALDQVRDSKGNIKQKPCFCGAAVCRRRLY

SEQ ID NO: 6822 - protein, 418 aa, Arabidopsis thaliana
  Clone ID: ARATH-23APR03-C9862_1.p
MASLISLVLLLLLTLSSAESKTFWGDVAALKDFKNSVDAKSMSPGSCLSSWDFSVDPCDNIFSDTFTCGFRCDSVVTGSGRVTELSLDQAGYSGSLSSVSFNLPYLQTLDLSGNYFSGPLPDSLSNLTRLTRLTVSGNSFSGSIPDSVGSMTVLEELVLDSNRLYGSIPASFKGLSSLKRLEIQLNNISGEFPDLSSLKNLYYLDASDNRISGRIPSFLPESIVQISMRNNLFQGTIPESFKLLNSLEVIDLSHNKLSGSIPSFIFTHQSLQQLTLSFNGFTSLESPYYSPLGLPSELISVDLSNNQILGALPLFMGLSPKLSALSLENNKFFGMIPTQYVWKTVSPGSEFAGFQRLLLGGNFLFGVVPGPLMALKPGSANVQLAGNCFSWCPATLFFCQGQEQRSPKECRKFSRVVP

SEQ ID NO: 6823 - protein, 425 aa, Arabidopsis thaliana
  Clone ID: ARATH-23APR03-C986_1.p
MFFVDVLWKLVPLYLFGSETQSLSATESILQIVPEAMAATSSNVLCNASESDLCRDDSAAFLLKFVAIASILLAGAAGVTIPLIGRNRRFLQTDGNLFVTAKAFAAGVILATGFVHMLAGGTEALKNPCLPDFPWSKFPFPGFFAMIAALITLFVDFMGTQYYERKQEREASESVEPFGREQSPGIVVPMIGEGTNDGKVFGEEDSGGIHIVGIHAHAAHHRHSHPPGHDSCEGHSKIDIGHAHAHGHGHGHGHGHVHGGLDAVNGARHIVVSQVLELGIVSHSIIIGLSLGVSQSPCTIRPLIAALSFHQFFEGFALGGCISQAQFRNKSATIMACFFALTTPIGIGIGTAVASSFNSHSVGALVTEGILDSLSAGILVYMALVDLIAADFLSTKMRCNFRLQIVSYVMLFLGAGLMSSLAIWA

SEQ ID NO: 6824 - protein, 262 aa, Arabidopsis thaliana
  Clone ID: ARATH-23APR03-C99365_1.p
MEVREKKDEKMEMTRRKSSALDHHRLPPYTYSQTANKEKPTTKRNGSDPDPDPDLDTNPISISHAPRSYARPQTTSPGKARYRECQKNHAASSGGHVVDGCGEFMSSGEEGTVESLLCAACDCHRSFHRKEIDGLFVVNFNSFGHSQRPLGSRHVSPIMMSFGGGGGCAAESSTEDLNKFHQSFSGYGVDQFHHYQPKKRFRTKFNEEQKEKMMEFAEKIGWRMTKLEDDEVNRFCREIKVKRQVFKVWMHNNKQAAKKKDL

SEQ ID NO: 6825 - protein, 203 aa, Arabidopsis thaliana
  unsure (1)..(203): unsure at all Xaa locations
  Clone ID: ARATH-23APR03-C9938_1.p
MAGREVKEYTNLSDPKDKKSGKGKIDDEDVTFQRMLQEVAGERGGYLHGRGALDSDDLLYLKEQMEAEEDAERLLRRTEKRAFAAFXQADSSPASIPLPLRVEPKPKSGIRQQDLLRKVVEVKPKRPKISTPSSPSLSPPVRSDRGPTEAKVHRDKQKEEAMPVLKKPGADRNDGKATESNGQGQNAPKGLLGLAYDSSDEED

SEQ ID NO: 6826 - protein, 220 aa, Arabidopsis thaliana
  Clone ID: ARATH-23APR03-C9948_1.p
MATLQIPSALLRSFLLMFCLFVIPSLSSDSDPLQDFCVGDLKASASINGFPCKSAVSASDFFYSGLGGPLDTSNPNGVTVAPANVLTFPGLNTLGISMNNVELAPGGVNPPHLHPRATEVGTVIEGSVFVGFLSTNNTLFSKVLNAGEAFVIPRGLVHFQWNVGQVKARMITAFNSQLPGAVVLPSTLFGSKPEIPNAVLTRAFRTDDTTVQNLKSKFAV

SEQ ID NO: 6827 - protein, 315 aa, Arabidopsis thaliana
  unsure (1)..(315): unsure at all Xaa locations
  Clone ID: ARATH-23APR03-C99570_1.p
MERRTRRVKFTENRTVTNVAATPSNGSPRLVRITVTDPFATDSSSDDDDNNNVTVVPRVKRYVKEIRFCQGESSSSTAARKGKHKEEESVVVEDDVSTSVKPKKYRGVRQRPWGKFAAEIRDPSSRTRIWLGTFVTAEEAAIAYDRAAIHLKGPKALTNFLTPPTPTPVIDLQTVSACDYGRDSRQSLHSPTSVLRFNVNEETEHEIEAIELSPXRKSTVIKEEEESSAGLVFPDPYLLPDLSLAGECFWDTEIAPDLLFLDEETKIQSTLLPNTEVSKQGENETEDFEFGLIDDFESSPWDVDHFFDHHHHSFD

SEQ ID NO: 6828 - protein, 351 aa, Arabidopsis thaliana
  Clone ID: ARATH-23APR03-C9_1.p
MELSTQMNVFEELLVPTKQETTDNNINNLSFNGGFDHHHHQFFPNGYNIDYLCFNNEEEDENTLLYPSSFMDLISQPPPLLLHQPPPLQPLSPPLSSSATAGATFDYPFLEALQEIIDSSSSSPPLILQNGQEENFNNPMSYPSPLMESDQSKSFSVGYCGGETNKKKSKKLEGQPSKNLMAERRRRKRLNDRLSMLRSIVPKISKMDRTSILGDAIDYMKELLDKINKLQDEEQELGNSNNSHHSKLFGDLKDLNANEPLVRNSPKFEIDRRDEDTRVDICCSPKPGLLLSTVNTLETLGLEIEQCVISCFSDFSLQASCSEGAEQRDFITSEDIKQALFRNAGYGGSCL

SEQ ID NO: 6829 - protein, 280 aa, Brassica napus
  unsure (1)..(280): unsure at all Xaa locations
  Clone ID: BRANA-23APR03-C10133_2.p
MTTSLLLLRHSSSPAVFFSSSSFVFAKNTNSSRSFASIKMEQNTAKKKVFVAGATGQTGKRIVEQLLSRGFAVKAGVRDVDKAKTSFRQDPSLHFVKADVTEGSEKLAEAIGDDTHAVICATGFRXFDLFAPWKIDNFGTVSLVDACKKRGVGRFVLVSSILVNGAATGQILNPAYIFLNVFGLTLIAKLQAEKYIKRSGVNYTIVRPGGLKNDPPSGNVVMEPEDTLSGGSISRDQVAEVAVEALLDEEESSYKVVEIVASADAPKRSYKDLFASVKGH

SEQ ID NO: 6830 - protein, 154 aa, Brassica napus
  Clone ID: BRANA-23APR03-C10414_1.p
MRSSASSAMKAAGVLVLLAVLTSVYAKKSGDVTELQIGVKFKPKTCDVQAHKGDKIKVHYRGKLTDGTVFDSSFERGDPIEFELGSGQVIPGWDQGLLGACVGEKRKLKIPSKLGYGDNGSPPKIPGGATLIFDTELVAVNGKPSGDAKTKNEL

SEQ ID NO: 6831 - protein, 313 aa, Brassica napus
  Clone ID: BRANA-23APR03-C10529_1.p
MAALQMSREWIGIQQFPPATQSKLIEILNKFKEEDVSSLTVLVMGKGGVGKSSTVNSVIGEKAAAVSTFQSEGLRPSLVSRSRSGFTFNIIDTPGLIEGGYVNDQAVNLIKRFLLNMTIDVLLYVDSLDVYRVDDLDKQVVTAITDAFGKEIWKKSALVLSHAQFSPPDGLNYDLFVSRRSDALLKLIRASAQLKKQDIQDSSIPVILVENSGRCHKNESDEKILPDGSSWIPNLYKTITDISFNGNKSIHVDKKLVEGPNPNARGKRLIPLIFAFQYLLVMKPLVRAIKSDVSRESKPAWEMRESGSASRRS

SEQ ID NO: 6832 - protein, 146 aa, Brassica napus
  Clone ID: BRANA-23APR03-C10530_2.p
MTLGAGGSSVVVPRNFRLLEELERGEKGIGDGTVSYGMDDGDDIYMRSWTGTIIAPHNTVHEGRIYQLKLFCDKDYPEKPPTVRFHSRINMTCVNHETGVVEPKKFGLLANWQREYTMETILTQLKKEMSTSHNRKLVQPPEGTCF

SEQ ID NO: 6833 - protein, 146 aa, Brassica napus
  unsure (1)..(146): unsure at all Xaa locations
  Clone ID: BRANA-23APR03-C10549_1.p
MALEWVVLGYAAAAEAIMVILLTMPGLDALRKGLIAVTRNLLKPFLSIIPFCLFLLMDIYWKYETRPSCDGDSCTPSEHLRHQKSIMKSQRNALLXIASALVFYWILYSVTNLVVRIEQLNXRVERLRKREESRRESDASSVSSMR

SEQ ID NO: 6834 - protein, 273 aa, Brassica napus
  unsure (1)..(273): unsure at all Xaa locations
  Clone ID: BRANA-23APR03-C10589_1.p
FYSSNRSQREKVNRRSRRQRSRGSSSGYDRRRTILPTEVRLPQGEYSFKDVEFTAIKAAGIRSIDVRGNVTVCVVTQKKVPDKLLDHSCVSHLFPVTKYXLGLLATWXMLADSGSFGHGKQGIEAPEFRFQYGYEMPADILAKWIADKSXVDTPRACWRALGVVAMVLGMDEERGPLLYKCDPAGHFYGHKATSAGMKEQEAINFLEKKMKENPAFTYDETVQTAISALQSVLQEDFKATEIEVGVVRADNPIFRSLETEEIEEHLTAISERD

SEQ ID NO: 6835 - protein, 107 aa, Brassica napus
  Clone ID: BRANA-23APR03-C105_1.p
SSIFLCQSFAGHEVRWDAVPRGHTQAPGFWKTESGILLPEKASKLNSGKVIAVGPGSRDKDGKLIPVSVKEGDTVLLPEYGGTQVKLGEKEYHLFRDEDVLGTLHED

SEQ ID NO: 6836 - protein, 171 aa, Brassica napus
  Clone ID: BRANA-23APR03-C10701_1.p
TSLCICHFYAWPLSLEHSDYPQKKQSRTFRLTTEEAELRKMSWQTYVDDHLMCDVEGNRLTAAAILGQDGSVWAQSANFPQLKPEEISGINKDFNEPGTLAPTGLFIGGTKYMVIQGEPNTVIRGKKGAGGVTIKKTTQAMVFGIYEEPMTPGQCNMVVERLGDYLIESGL

SEQ ID NO: 6837 - protein, 457 aa, Brassica napus
  Clone ID: BRANA-23APR03-C107_1.p
TSLPKISFQSSIGTLAAGGDPTTSFSSALTKSPPFYLPLPAASSSSDPRSAAAAVFAASTPRRGGEVVAAVLSPPGGREMEHVVAAELRRGEKKEVAAQLRHVVISSIVQRMLVLMRECAVLHIGVFIGLPVVHEPHVNMSLPNDVAVVDMYGTIVAVLTDIEIYKHPKEERIARTWGTTAPGLPYVDEAITNAGNWLIGGDLEVLEPVKYNDGLDRFRLSPAELRKELEKRGADAVFAFQLRNPVHNGHALLMTDTRRRLLEMGYQEPYPFASSVRGYTKADDVPLSWRMKQHEKVLEDGVLDPETTVVSIFPSPMHYAGPTEVQWHAKARINAGANFYIVGRDPAGIRHPVEKRDLYDADHGKKVLSMAPGLERLNILPFKVAAYDKTQGKMAFFDPSRPQDFLFISGTKMRTLAKNKENPPDGFMCPGGWQVLVDYYDSLTPAGNGRLPEVVSA

SEQ ID NO: 6838 - protein, 321 aa, Brassica napus
  unsure (1)..(321): unsure at all Xaa locations
  Clone ID: BRANA-23APR03-C108_1.p
IWVGGSGMDMRCKXHILPGPVRDPSLATKVKLMMAQAQAKQLVNTGSIIYPQPTLKDXVRRGNNILVMCDAYTPAGEPIPTNKRHAAAKVFSHPDVVAEVAMIWFATIKTACGRPRSLATQPVAAXKKHGKVIEPQHTMFHKLPNAAIQYXRALNRDVLPGHRDFQVGPAVGISAGDEIWVARFILERITEIAGVVVSFDPKPIPGDWNGAGAHCNYSTKSMREDGGYEIIKKAIDKLGLRHKEHIAAYGEGNERRLTGHHETADINTFLWGVANRGASIRVGRDTEKEGKGYFEDRRPASNMDPYIVTSMIAETTILWKP

SEQ ID NO: 6839 - protein, 189 aa, Brassica napus
  Clone ID: BRANA-23APR03-C10903_1.p
MGEGKGSTLVFILVIALCLVAFGFSIAAERRRSIGKSIQDPITNATYCVYSSDVATGYGVGAFLFLLSSESLLMGVTKCMCFGRPLSPGSDRAWSIIYFISSWMTFLVAEACLIAGATKNAYHTKYLSAQAFSCESLRKGIFIAGAVFTVATMILNVYYYFHFTKSVSSPPTHKANRSGSNIGMAGGYA

SEQ ID NO: 6840 - protein, 215 aa, Brassica napus
  unsure (1)..(215): unsure at all Xaa locations
  Clone ID: BRANA-23APR03-C10907_1.p
MESPAAATAKPARGAGGRKGGDRKKSVTKSVKAGLQFPVGRISRYLKKGRYAVRYGAGAPVYLAAVLEYLXAAEVLELAGNAARDNKKNRINPRHLCLAIRNDEELGKLLHGVTISSGGVLPNINPDLLSQKRLEFFLTLTRFFSPRELLVLRKQLRNLPFFFGFSDYVGCLLYVYLRLVLSMMNPVEDYVIKSHFVMKEVPSSVSKQKKKKRAA

SEQ ID NO: 6841 - protein, 302 aa, Brassica napus
  Clone ID: BRANA-23APR03-C10_1.p
MVATKSISSLLLVDSSSCFFSPIPRFLTLRIATTTALRSAATFTLRRSPSHRSLTPSLAVMFPDNSVLSDVCASGITSVVAVSCLGFWGEIGKRGFFDQKLIRKLVHINIGLVFMLCWPLFSSGRQGALLASLVPGLNIVRMLLLGLGVYQDEGTIKSMSRHGDRRELLKGPLYYALSITSACFFYWKTSPIAIAVICNLCAGDGMADIVGRRLGTEKLPYNRNKSLAGSIGMAIAGFLASVGYMYYFSSFGYMESTGWDMILRFLVISIASALIESLPISTDIDDNLTIPLTSALVGTLLF

SEQ ID NO: 6842 - protein, 162 aa, Brassica napus
  unsure (1)..(162): unsure at all Xaa locations
  Clone ID: BRANA-23APR03-C11038_1.p
MTSSSAPSRKALSKIACNRLQKELTEWQLNPPTGFRHKVTDNLQKWTIDVTGAPGTLYANETYQLQVEFPVNYPMEAPQVIFVPPAPSHPHIYSNGHICLDILYDSWSPAMTVSSVCISILSMLSSSPAKERPADSDRYVKNCKNGRSPKEXTRWWLHDDQA

SEQ ID NO: 6843 - protein, 999 aa, Brassica napus
  Clone ID: BRANA-23APR03-C112_1.p
MAPSRRDLQLTPLSGDTAAEIGAMEEVRLLDSYDDDDNDDSLSKIEEGSGGSGLRKIQVGITGMTCAACSNSVEGALISVNGVFKASVALLQNRADVLFDPNLVKEEDIKEAIEDAGFEAEILAEPVTSGTKTQATLVGQFTIGGMTCAACVNSVEGILRDLPGVKRAVVALATSLGEVEYDPNVISKDDIVTAIEDAGFESSLVQSNQQDKLLLRVDGVLNELDAQVLEGILTRLNGVRQFRLDRITGELEVVFDPEVVSSRSLVDGIEGEGYGKFKLRVMSPYERLTSKDTGEASNMFRRFISSLSLSIPLFFIQVICPHIALFDTVLVWRCGPFMVGGWLKWALVSVIQFVIGKRFYVAAWRALRNGSTNMDVLVALGTSASYFYSVGALLYGAVTGFWSPTYFDASAMLITFVLLGKYLESLAKGKTSDAMKKLVQLTPATAILIEGKGEREIDALLIHPGDSLKVLPGGKIPADGVVVWGSSYVNESMVTGESVPVSKEVDSPVIGGTINMHGVLHIKATKVGSDAVLSQIISLVETAQMSKAPIQKFADYVASIFVPVVITLALFTLVGWSIGGAVGAYPDEWLPQNGTHFVFSLMFSISVVVIACPCALGLATPTAVMVATGVGATNGVLIKGGDALEKAHKVKYVIFDKTGTLTQGKATVTTAKVFSEMDRGEFLTLVASAEASSEHPLAKAIVEYARHFHFFDESAEDGDTSNKVSQNAGWLLDTSDFSALPGKGIQCLVDNKLILVGNRKLMSENSITIPDHVEKFVEELEESAKTGVIVAYSGQLVGVMGVADPLKREAAVVVEGLLRMGVRPIMVTGDNWRTARAVAKEVGIEDVRAEVMPAGKAEVIRSLQKDGSTVAMVGDGINDSPALAAADVGMAIGAGTDVAIEAADYVLMRNNLEDVITAIDLSRKTLTRIRLNYVFAMAYNVVSIPIAAGVFFPVLRVQLPPWAAGACMALSSVSVVCSSLLLRRYKKPRLTTILEITKE

SEQ ID NO: 6844 - protein, 175 aa, Brassica napus
  unsure (1)..(175): unsure at all Xaa locations
  Clone ID: BRANA-23APR03-C11335_1.p
MESEPTRVMVAVNESTIKGYPHASISSKKAFEWTLKKIVRSNTSGFKLLLLHAQVQDEDGFDDVDSIYASPDDFRNMRERNKANGLHLLEFFVNKCHEIGVRCEAWIRKGDPTEVICHEVRRVRPDFLVVGSRGLGPFQKVFVGTVSEFCVKHAECPVIIIKRSXEESPQDPADD

SEQ ID NO: 6845 - protein, 181 aa, Brassica napus
  Clone ID: BRANA-23APR03-C11583_1.p
MALRSIKTPSVTPTAAVSSSITNKPQSFRFVSKPSASLAVHNLHQPISITRSNLLPKLKPASPPAKFRCSASAALTPQLRDTLEKLVNSEKVVLFMKGTRDFPMCGFSNTVVQILKNLNVPFEDVNILENEMLRQGLKEYSNWPTFPQLYIGGEFFGGCDITLEAFQSGELQEVVERAICS

SEQ ID NO: 6846 - protein, 226 aa, Brassica napus
  unsure (1)..(226): unsure at all Xaa locations
  Clone ID: BRANA-23APR03-C11649_2.p
MLCCLECADSIIKEMAASSAVTADYVLKPPPYSLDALEPFMSRQTLEFHWGKHHRAYVDNLKKQVLGSDLEGKTLDHIILNTYNNGDLLPAFNNAAQAWNHEFFWESMKPGGGGKPSGELLALLERDFTSYEKXYDEFNAAAATQFGAGWAWLAYADNKLKVVKTPNAVNPXVLGSFPLLTIDVWEHAYYLDFQNRRPDYIKTFMNNLVSWEAVSSRLEAAKAASS

SEQ ID NO: 6847 - protein, 180 aa, Brassica napus
  Clone ID: BRANA-23APR03-C11692_1.p
MGFGAIRSILRPLSRTLASRVASSCSSPPFPAAKPLLCSFFGGSRLPWIPVANHFHSLSLTDTRLPKRRPMTHPKKKRFKLKPPGPYAYVQYTPGEPIASNNPNEGSVKRRNAKKRIGQRRAFILSEKKKRQALVQEAKRKKRIKEVERKMAKVARERAWEERLAELQRLEEEKKKSISS

SEQ ID NO: 6848 - protein, 165 aa, Brassica napus
  Clone ID: BRANA-23APR03-C1196_3.p
MASVTSATVAIPSFTGLKSTISKTSAVVRLPTTTSRNLTVKSSLKDFGVAVVAAAASIALAGNAMAIDVLLGSGDGALAFVPNEFTIAKGEKIVFKNNAGFPHNVVFDEDEIPSGVEASKISMDEQDLLNAAGETYEVALTEPGTYSFYCAPHQGAGMVGKVTVN

SEQ ID NO: 6849 - protein, 167 aa, Brassica napus
  Clone ID: BRANA-23APR03-C1196_5.p
MASITSATVAIPSFTGLKSTSSKPSTVVKIPTVAAASTKLTVKSSLKDFGVAAVAAAASIALAGNAMAIDVLLGSGDGALAFVPNDFTIAKGEKIVFKNNAGFPHNVVFDEDEIPSGVDASKISMDEQDLLNAAGETYEVALTEPGTYSFYCAPHQGAGMVGKVTVN

SEQ ID NO: 6850 - protein, 263 aa, Brassica napus
  Clone ID: BRANA-23APR03-C1199_3.p
MAYSACFLHQSALASSAARSSSSNSSQRHLSLSKPVQIVCKAQQHHEDDNSAVSRRLALTLLVGGAAVGSKVSPADAAYGEAANVFGKPKKNTDFTAYSGDGFIVQVPAKWNPSREVEYPGQVLRYEDNFDATSNLNVMVTPTDKKSITDYGSPEEFLSQVNYLLGKQAYFGETASEGGFDNNAVATANILETNVQDVGGKPYYYLSVLTRTADGDEGGKHQLITAPVNGGKLYICKAQAGDKRWFKGANKFVEKAATSFSVA

SEQ ID NO: 6851 - protein, 270 aa, Brassica napus
  Clone ID: BRANA-23APR03-C1215_1.p
MAGLAISPPLSLTFSSRTRNAKPTSYLSHNQRNLTRRIVSALPSPYGDSLKAGLSSNVSGNKDPRSIAPRFGVIEAKKGNPPVMPAVMTPGGPLDLSSVLFRNRIIFIGQPINAQVAQRVISQLVTLASIDDKSDILIYLNCPGGSTYSVLAIYDCMSWIKPKVGPVAFGVAASQGALLLAGGEKGMRYAMPNTRVMIHQPQTGCGGHVEDVRRQVNEAIEARQKIDRMYAAFTGQTLETVQQYTERDRFLSASEALEFGLIDGLLETEY

SEQ ID NO: 6852 - protein, 666 aa, Brassica napus
  Clone ID: BRANA-23APR03-C121_1.p
MAAAADHVVIVEEGRQATAEHPSAGPVYRCKYAKDGLLDLPADLDSPWQLFSEAVKQYPNEQMLGRRVTVDSKVGPYTWITYREAHDAALRIGSAIRSRGVNPGNCCGIYGSNCPEWIIAMEACMSQGITYVPLYDSLGVNAVEFIINHAEVSLVFVQEKALSSILACRKGCSSNLKTIVSFGEVSTTQKEEAENQCVSLFSWHEFLLMGNSDETTLPRKQKTDICTIMYTSGTTGEPKGVILSNAAIMVEVLSIDKMLQVTDRSCDTSDVFFSYLPLAHCYDQVMEIYFLSRGSSVGYWRGDIRYLMDDVHALKPTVFCGVPRVYDKLYAGVMQKISAGGLIRKKLFDFAYNYKLGNMRKGLSQEEASPRLDRLMFDKIKDALGGRAHMLLSGAAPLPRHVEEFLRIIPASNLSQGYGLTESCGGSFTTLAGVFSMVGTVGVPMPTVEARLVSVPEMGYEAFSGDVARGEICLRGNSMFSGYHKRQDLTNQVVINGWFHTGDIGEWQEDGSMKIIDRKKNIFKLSQGEYVAVENLENTYSRCPLIAQIWIYGNSFESFLVAVVVPERKAIEDWAKLNNQSSPNDFESLCQNLKAQKYFLDELNSTAKQYQLKGFEMLKAVHLEPNLFDIERDLITPTFKLKRPQLLKHYKSIIDQLYTEAKASRA

SEQ ID NO: 6853 - protein, 104 aa, Brassica napus
  Clone ID: BRANA-23APR03-C1236_1.p
MASMTMTATFLPAVAKLPSTTGGRRLSVIRASKSDNTTSLQAKETQSSTTMRRDLMFTAAAAAVCSLAKVAMADEEEPKRGTDAAKKKYAQVCVTMPTAKICRY

SEQ ID NO: 6854 - protein, 677 aa, Brassica napus
  Clone ID: BRANA-23APR03-C123_1.p
MDSTSAARRRINAIHSHLVTSSRSSPLLLSSNPTAGEFYLDNGYSVVLPEKLSTGKWHVYRSARSPFKLVSRFPDHPDIATLHDNFEHAVHDFRDYKYLGTRVRVDGTVGDYKWMTYGEVGTARTALGSGLVHHGITTGSSVGIYFINRPEWLIVDQACASYSYVSVPLYDTLGPDAVKFIVNHANVQAIFCVAETLNSLLSGLSEMPSVRLVVVVGGLNESLPSLPPSAGVKVVSYSVLLNQGRSNPQPFCPPKPDDVATLCYTSGTTGTPKGVVLTHANLIANVAGSSFSVKFFSSDIYISYLPLAHIYERANQILAVYFGVAVGFYQGDNMKLLDDLAALRPTVFSSVPRLYNRIYDGITNAVKTSGGLKERLFNAAYNAKKQALLNGKSASPIWDRLVFNKIKDRLGGRVRFMTSGASPLSPEVLEFLKICFGGRVSEGYGMTETSCVISGMDEGDNLTGHVGSPNPACEVKLMDVPEMNYTSADEPHPRGEICVRGPIIFRGYYKDEVQTREVIDEDGWLHTGDIGLWLPGGRLKIIDRKKNIFKLAQGEYIAPEKIENVYAKCRFVGQCFIYGDSFNSSLVAVVSVDPDVLKSWAASEGIKGELRELCNNPRVKAAVLSDMDAVGRESQLRGFEFAKAVTLVLEPFTLENGLLTPTFKIKRPQARNTSQKQ

SEQ ID NO: 6855 - protein, 280 aa, Brassica napus
  unsure (1)..(280): unsure at all Xaa locations
  Clone ID: BRANA-23APR03-C1252_4.p
MASMGVSEMLGTPLNFXAVSRSSAPSASSPGTFKTVALFSKKKPAPAKAKTVSVANDELAKWYGPDRRIFLPDGXLDRSEIPEYLNGEVAGDYGYDPFGLGKKPENFAKYQAXELIHARWAMLGAAGFIIPEALNKYGANCGPEAVWFKTGALLLDGNTLNYFGKNIPINLVLAVVAEVVLLGGAEYYRITNGLDFEDKLHPGGPFDPLGLAKDPEQGALLKVKEIKNGRLAMFAMLGFFIQAYVTGEGPVENLSKHLSDPFGNNLLTVIAGTAERAPTL

SEQ ID NO: 6856 - protein, 956 aa, Brassica napus
  Clone ID: BRANA-23APR03-C126_1.p
MSWDDGTHAKVNRVQLTFDDVIRSIEVEYEGTNVQPQRRGTVGTNSDEFTLSSDEFITRVAGYYRTTFSGDVITALLFRTNKKTYGPYGNLTRNFFSADAPRNNQIAGFLGNSGSALNSINVHFAPIPPPGSIKPKPVGPGTGDAGSGQPASPGTGDAGGGPKPGGPGTGENGAGTKPSGPGTGENGAGTKPNDLGTGADGEGTKPGGSGTGEDGAGTKPGGLETGEDGAGTKPGGHGTGEDGAGTKPVGSGTGNDGGGPRPVIPGKMGPLGGDKGNEFDDVGFDGVKKITVGADEFSVTYIKIEYIKDGKVEIREHGTNRGQLKEFSVDYPNDNIVAVGGSYDHIFTYDTTLITSLYFTTSRGFTSPLFGEKTGTDFEFQGENKGKLLGFHGRAGHAIDAIGAYFHTGSQGGQGAGSQGGQGAGSQGGQGGDPGKGGPRPVVPGKMGPLGGAKGNEFDDVGFDGVKKVTVGADEFSVTYIKIEYIKDGKVEIREHGTNRGQLKEFSVDYPNDNIVAVGGSYDHIFTYDTTLIKSLYFTTSRGFTSPLFGEKTGTDFEFQGENRGKLLGFHGRAGYAIDAIGAYFHTGSQGGEGGDPSKGGPKPVVPVKMGPLGGDRGNEFNDVGFDGVKRVAVAADEFSVTYIKIEYVKDGKVEIREHGTSRGQVKEFSVDYPNDNFTAVGGSYDHIFTYDTTLITSLYLTTSRGFTSPLFGEMKGTEFEFKGENGEKLIGFHGRAGHAIDAIGAYFDTGSKPGGDSNSGKGTDSGSSTKDSGKGTDSGSSTKDSGKGTDSGSSTQDSGKGSDSGSSTQRLEAQGGKGGNQWDDGGDYDGVTKIHVAVGRGIEQISFEYVKNGQTKEGPARGVRGRRSTIGTFEISHPNEYLISVKGWSDSSNKIAGIQFKTNTKTSKYYGFEKLPGEESTDILLEVKDKKIVGFHGFADSHVNALGAYIAPAAN

SEQ ID NO: 6857 - protein, 223 aa, Brassica napus
  Clone ID: BRANA-23APR03-C12703_1.p
MSSGGYGDPSQKIDYVFKLVLIGDSGVGKSQILSRYARNEFSLDSKATIGVEFQTRTLVMDHKSVKAQIWDTAGQERYRAVTSAYYRGAVGAMLVYDVTRRQTFDHIPRWLEELRGHADKNIVIILVGNKSDLEDQRAISTENAKKFAETEGLFFLGTSALNPVNVETAFSPVLTEIFNIVNKKNLVAGEGNGDPGSLAGKKIDIVPGPAQVVPTKSGMCCNS

SEQ ID NO: 6858 - protein, 323 aa, Brassica napus
  unsure (1)..(323): unsure at all Xaa locations
  Clone ID: BRANA-23APR03-C1289_1.p
MAMIFCNTPLYSSSPFLSPLPSIRSKPSRFSKRVLTVQAQFQSMDQNDLLLRQKFMEFPYVSPSRRELMADLMSTLEDRLHSQLLPCSLPTDVRNFKNPNGSAEASLHIRSGEKSSPIDFVIGSWIHVKIPTGVSLNITSISAFLNSSTEAPNFVVELIQSSPTSLVLILDLPHRKDLVRHPDYLQTYYQDTXLDXHRQSLLKLPEIKPYVSPSLFVRSAFSPTASMLKIDADEGERLEEILREHVSPTAKQVLEVWLERCAKEEEGEERVVGEEEKFLLERRDKSFRKKSIEEDLDLQFPRMFGDEVSSRVIHAIKEAFGVL

SEQ ID NO: 6859 - protein, 85 aa, Brassica napus
  Clone ID: BRANA-23APR03-C12998_1.p
MASGWGITGNKGRCYDFWMDFSECMSHCREPKDCSLLREDYLECLHHSKEFQRRNRIYKEEQRKLRAASKKGQDTGGDATHTSNH

SEQ ID NO: 6860 - protein, 170 aa, Brassica napus
  Clone ID: BRANA-23APR03-C1308_1.p
MSAEVEYRCFVGGLAWATGDAELERTFSQFGEVIDSKIINDRETGRSRGFGFVTFKDEKSMRDAIDEMNGKELDGRTITVNEAQSRGSGGGGGRGGGGYGGRGGGGYGGGGGGYGDRRGGGGYGSGGGGRGGGGYGGGGGGYGGGGGRRDGGGYGGGDGGYGGGSGGGGW

SEQ ID NO: 6861 - protein, 588 aa, Brassica napus
  Clone ID: BRANA-23APR03-C130_1.p
MASTFTATSSIGSMVAPNAHKTDKKLMNKLSSSSFGRRQNVFPKLRRSSPAVVCAAKELHFNKDGTTIRKLQAGVNKLADLVGVTLGPKGRNVVLESKYGSPRIVNDGVTVAREVELEDPVENIGAKLVRQAAAKTNDLAGDGTTTSVVLAQGFIAEGVKVVAAGANPVLITRGIEKTAKALVAELKKMSKEVEDSELADVAAVSAGNNAEIGSMIAEAMSRVGRKGVVTLEEGKSAENALYVVEGMQFDRGYVSPYFVTDSEKMSVEFDNCKLLLVDKKITNARDLVGVLEDAIRGGYPILIIAEDIEQEALATLVVNKLRGTLKIAALKAPGFGERKSQYLDDIAILTGATVIREEVGLSLDKAGKEVLGHAAKVVLTKETSTIVGDGSTQDAVQKRVTQIKNLIEQAEQDYEKEKLNERIAKLSGGVAVIQVGAQTETELKEKKLRVEDALNATKAAVEEGIVVGGGCTLLRLASKVDAIKAALDNDEEKVGADIVKRALSYPLKLIAKNAGVNGSVVSEKVLSNDNVKFGYNAATGKYEDLMAAGIIDPTKVVRCCLEHAASVAKTFLMSDCVVVEIKEPEPVP

SEQ ID NO: 6862 - protein, 488 aa, Brassica napus
  Clone ID: BRANA-23APR03-C133_4.p
MARLSSLLSFSLALLIFLHGSTAQQFPNECQLDQLNALEPSHVLKAEAGRIEVWDHHAPQLRCSGVSFVRYIIESKGLYLPSFFSTAKLSFVAKGEGLMGRVVLCAETFQDSSVFQPSGGSPFGEGQGQGQQGQGQGHQGQGQGQQGQQGQQGQQSQGQGFRDMHQKVEHIRTGDTIATHPGVAQWFYNDGNQPLVIVSVLDLASHQNQLDRNPRPFYLAGNNPQGQVWIEGREQQPQKNILNGFTPEVLAKAFKIDVRTAQQLQNQQDNRGNIIRVQGPFSVIRPPLRSQRPQEEVNGLEETICSARCTDNLDDPSNADVYKPQLGYISTLNSYDLPILRFLRLSALRGSIRQNAMVLPQWNANANAVLYVTDGEAHVQVVNDNGDRVFDGQVSQGQLLSIPQGFSVVKRATSEQFRWIEFKTNANAQINTLAGRTSVLRGLPLEVISNGYQISLEEARRVKFNTIETTLTHSSGPASYGGPRKADA

SEQ ID NO: 6863 - protein, 506 aa, Brassica napus
  Clone ID: BRANA-23APR03-C134_5.p
PCETAVATFGVLLVLNGCLARQSLGVPPQLGNACNLDNLDVLQPTETIKSEAGRVEYWDHNNPQIRCAGVSVSRVIIEQGGLYLPTFFSSPKISIVVQGMGISGRVVPGCAETFMDSQPMQGQQQGQPWQGQQGQQGQQGQQGQQGQQGQQGQQGQQGQQGQQGQQQQGFRDMHQKVEHVRHGDIIAITAGSSHWIYNTGDQPLVIICLLDIANYQNQLDRNPRTFRLAGNNPQGGSQQQQQQQQNMLSGFDPQVLAQALKIDVRLAQELQNQQDSRGNIVRVKGPFQVVRPPLRQPYESEQWRHPRGPPQSPQDNGLEETICSMRTHENIDDPARADVYKPNLGRVTSANSYTLPILQYIRLSATRGILQGNAMVLPKYNMNANEILYCTQGQARIQVVNDNGQNVLDQQVQKGQLVVIPQGFAYVVQSHQNNFEWISFKTNANAMVSTLAGRTSALRALPLEVITNAFQISLEEARRIKFNTLETTLTRARGGQPQLIEEIVEA

SEQ ID NO: 6864 - protein, 363 aa, Brassica napus
  unsure (1)..(363): unsure at all Xaa locations
  Clone ID: BRANA-23APR03-C1361_2.p
MVDPANTVGLPVNPTPLLKDELDIVIPTIRNLDFLEMWRPFLQPYHLIIVQDGDPTKKIHVPEGYDYELYNRDDINRILGPKASCISFKDSACRCFGYMVSKKKYIFTIDDDCFVAKDPSGKAVNALEQHIKNLLCPSTPLFFNTLYDPYREGADFVRGYPFSLREGVTTAVSHGLWLNIPDYDAPTQLVKPKERNTRYVDAVMTIPKGTLFPMEHFSXMCGMNLAFDRDLIGPAMYFGLMGDGQPIGRYDDMWAGWCVKVICDHLGLGVKTGLPYIYHSKASNPFVNLKKEYKGIFWQEDIIPFFQSAKLSKEAVTVQQCYIELSKMVKEKLSAIDPYFDKLADAMVTWIEAWDELNPAPKA

SEQ ID NO: 6865 - protein, 185 aa, Brassica napus
  Clone ID: BRANA-23APR03-C1445_1.p
MAAAFTCTSLPPLSLRSETKAAASSSLSARRLFAVSPESGGLRIRLSQSPSSLTSIQPRVPRLRRGVVVVCEAQETTTDIVSIVNDSTWDSLVLKADGPVLVDFWAPWCGPCKMIDPLVNELAQQYTGKVKFYKLNTDDSPSTPSKYNVRSIPTIMIFVDGEKKDAIIGAVPKSTLTSSIDKFLQ

SEQ ID NO: 6866 - protein, 73 aa, Brassica napus
  Clone ID: BRANA-23APR03-C1465_1.p
IQICNLCLVGCLEVGSDMNWVQRKIYLYNVTFGLYMLDWWERYLFNGLVVVLMWFVAYNGTRYFSELFKRHLT

SEQ ID NO: 6867 - protein, 239 aa, Brassica napus
  unsure (1)..(239): unsure at all Xaa locations
  Clone ID: BRANA-23APR03-C1480_5.p
FVADGVFYAELNEVLTRELAEDGYSGVEVRVTPMRTEIIIRATRTQNVLGEKGRRIRELTSLVQKRFRFPQDSVELYAEKVANRGLCAIAQAESLRYKLLGGLAVRRXCYGVLRFVMESGAKGCEVIVSGKLRAARAKSMKFKDGYMVSSGQPTKEYIDSAVRHVLLRQGVLGIKVKVMLDWDPKGVTGPKTPLPDVVIIHSPKEEEVNSAPAQVDAPAAFVPEAPLTAVDYPEMIPVA

SEQ ID NO: 6868 - protein, 214 aa, Brassica napus
  Clone ID: BRANA-23APR03-C149_1.p
MTSFSTFSEMLGSEYESPVTLGGEYCPKLAASCPKKPAGRKKFRETRHPVYRGVRLRNSGKWVCEVREPNKKSRIWLGTFLTAEIAARAHDVAAIALRGKSACLNFADSAWRLRIPETTCPKEIQKAAAEAALAFQAEINNTTTDHGLDMEETIVEAIFTEENNDVFYMDEESMLEMPALLASMAEGMLLPPPSVHFGHNYDFDGDADVSLWSY

SEQ ID NO: 6869 - protein, 250 aa, Brassica napus
  Clone ID: BRANA-23APR03-C149_2.p
MNSVSTFSELLGSENESPVGGDYCPMLAASCPKKPAGRKKFRETRHPIYRGVRLRKSGKWVCEVREPNKKSRIWLGTFKTAEIAARAHDVAALALRGRGACLNFADSAWRLRIPETTCAKDIQKAAAEAALAFEAEKSDTTTNDHGMNMASQAEVNDTTDHGLDMEETMVEAVFTEEQREGFYMAEETTVVGVVPEEQMSKGFYMDEEWMFGMPTLLADMAAGMLLPLPSVQWGHNDDFEGVADINLWSY

SEQ ID NO: 6870 - protein, 274 aa, Brassica napus
  unsure (1)..(274): unsure at all Xaa locations
  Clone ID: BRANA-23APR03-C1513_1.p
MTMQTLCFITLFIAIFTSQPTSAYRFKFNHFGNGTDLFSFHGDAEYGHDTDGTTRSGSLSLTKDKTPFSHGRAILINPITFKPPNNASSVYPFKTSFTFSITPHNTNPTPGHGFAFLVVPSNQHAGSGLGFLSLVNRTSNGNPSNHLFAVEFDVFQDKSFKDINDNHVGIDINSVDSXTSVKSGYWVMTRNGWLFKDLKVSSGDKYAAWIEYNNNLKVISVTIGLAHLKKPNRPLIEAKYDLSNVLLENMYAGFAGSMGRGVERHEIWDWTFQN

SEQ ID NO: 6871 - protein, 100 aa, Brassica napus
  Clone ID: BRANA-23APR03-C15262_2.p
MEFTAEQLSQYNGTDSSKPIYVAIKGRVFDVTTGKSFYGAGGDYAMFAGKDASRALGKMSKNEEDVSPSLEGLTEKEMTTLSDWEKKFEAKYPVVGRVIS

SEQ ID NO: 6872 - protein, 211 aa, Brassica napus
  Clone ID: BRANA-23APR03-C1537_1.p
MKMIIHIFFILSLVSSTSFASVQDFCVADPKGPQSPSGYSCKNPDQVTENDFAFSGLAKAGNTSNIIKAAVTPAFAPAFAGINGLGVSMARLDLAGGGVIPLHTHPGASEVLVVIQGTICAGFISSANKVYLKTLQRGDSMVFPQGLLHFQLNSGKGPALAYVAFGSSSPGLQILPFALFANDLPSELVEATTFLSDAEVKKLKGVLGGTN

SEQ ID NO: 6873 - protein, 238 aa, Brassica napus
  Clone ID: BRANA-23APR03-C1538_1.p
METPLSSRRVTGSQAIFPTNNSDSLRRTEDSSFSQRKNINAQEDRSALMDITNDSPIVGLAMQTPPSGFVCKRQNSRIIKSTPGSGEALLRGQVKTLLEKVEEGTELTHSIKPLPFIHLVTSPMRLLAPTPANTPLFPNFSDDKVQIKIASPVVAGHLRTSQVSYVNRTLKKSEIFEEKEEMSMSISRSLLFDFTDKPALWDEEEEVEMTRAEFAGKHSRFVYNSEDDEIVEAKKVCY

SEQ ID NO: 6874 - protein, 179 aa, Brassica napus
  Clone ID: BRANA-23APR03-C1550_1.p
MGSGAGSFLKVLLRNFDVLAGPVVSLVYPLHASVRAIETQSHADDKQWLTYWVLYSLLTLFELTFAKLIEWVPIWSYAKLILTCWLVIPYFSGAAYVYEHFVRPVFVNPQSINIWYVPKKMDIFRKPDDVLTAAEKYIAENGPDAFQKILSRSDKSRRYEQRETMYGEEYQYQGHYKSF

SEQ ID NO: 6875 - protein, 277 aa, Brassica napus
  Clone ID: BRANA-23APR03-C1577_1.p
MQWRSLRTNIYFMYFIFLTLCEKSQSSAAMEATANEPATKSSKSSPRVTIPNFFVSLSSAFTQTPSARTNKPSSQLLAPASDSVKLIQDFHRSLLSATEKFAGFFHSLAAKNPLFQEAVRLSSGFRGVCDDIRLRNTTRVRFAMSDHGFAAVLPGDSVAGTVVANGLINFLNIYNTVLVVRLVLTWFPTAPPAIVNPLSTLCDPYLNIFRGVIPPLGGLDLSPILAFLVLNAFTSSAMALPCELPPAEGVTSPSSCETKWMRRKRLSSNQNPTPSSA

SEQ ID NO: 6876 - protein, 306 aa, Brassica napus
  Clone ID: BRANA-23APR03-C15864_1.p
MAMTTMEIREEDWKVCCGSSDFAKLMVKASPFNSLDAAIESARDIWFNQVNVAAWLEAFAAHPQIGKSPSPSSNSDFARRSVTEQSRAFATTSASALEELAEWNVLYRQKFGFIFIICASGRTHAEMLAELKGRYANRPIVELEIAAKEQMKITELRMAKLFSEKAKVVSQTESTKPQEAPKRSRPPITTHVLDVSRGAPAVGVEVHLEVWNGTTSPSFGHGGHGDWSMVGTSATDKDGRSGPLMDLVEALKPGTYRISFNTGKYCPGGFFPYVSIAFEVTESQKWEHFHVPLLLSPFSFTTYRGS

SEQ ID NO: 6877 - protein, 207 aa, Brassica napus
  Clone ID: BRANA-23APR03-C1599_2.p
MQAAIRSFVSGGNVVKASLLQHLCVINPAIQPSSVFCTRSESTQTSRMEEHGFESTTISDVMKAKGKSADGSWLWCTTDDTVYDAVKSMTQHNVGALVVVKPGERQSLAGIITETRGLRKIIVQGRSSKSTKVGDIMTEENKLITVTPETKVLVAMQLMTDNRIRHIPVIKDKGMIGMVSIGDVVRAVVTEHREELNRLNAFIQGGY

SEQ ID NO: 6878 - protein, 150 aa, Brassica napus
  Clone ID: BRANA-23APR03-C16086_1.p
MSHNPEVLWAQRSDKVYLTVALPDAKDISVKCEPQGLFTFSALGAQGKLFEFGLELYGKVVPEYRKNVGLRNIIFSIQKEERSWWPRILKSEEKPAPYIKVDWNKWCDEDEEVNSETASDDESAFVDEDCESSDDDGLLYLPDLEKARNN

SEQ ID NO: 6879 - protein, 137 aa, Brassica napus
  Clone ID: BRANA-23APR03-C16169_1.p
MEEELLAGVPCSSRAVESVIRVSTAGGLYGFCAGPHNARKLGLSGVSQASYVAKSIGKIGFQCGIVSGIFTLINCGLQRYRGKSDWVNALVGGAVAGAAVALRTRNWSHVLTTAGLVSIFSVLANSTRTDLKQQQQH

SEQ ID NO: 6880 - protein, 141 aa, Brassica napus
  Clone ID: BRANA-23APR03-C1628_1.p
MAAIYSLYIINKSGGLIFYKDCGTKGRMDTNDSLRVASLWHSMHAISQQLSPVNGCSGIELLQADTFDLHCFQSLPGTKFFVVCEPGTPHMESLLRYIYELYTDYVLKNPFYEIEMPIRCELFDINLSQAVLSDRVALLGR

SEQ ID NO: 6881 - protein, 186 aa, Brassica napus
  Clone ID: BRANA-23APR03-C16306_1.p
MAPVGPRSGDAIFSSIDRVNAELFTLTYGAIVRQLLTDLEDVDEVNKQLDQMGYNIGIRLIDEFLAKSGVSRCVDFKETAEMIAKVGFKMFLGVTASVSSWDADGTCCSIILEDNPLVDFVELPDTCQGLYYCNVLSGVIRGALEMVSMKTEVTWTRDALRGDDAYELQVKLLKQVAEEYPYKDDE

SEQ ID NO: 6882 - protein, 338 aa, Brassica napus
  unsure (1)..(338): unsure at all Xaa locations
  Clone ID: BRANA-23APR03-C16408_1.p
MDAKEASPTDLKQPSEAADNAAAAASMETENGDQTKEPDCVSSLIPGWFSEMSPMWPGEAHWLKXEKVLFQGYFDYQDFFVLRVCSTMVRVFGNCMEYSNSSSQTNSALSREMIPHLPLCSFPXPYMTVLVIRGGRVEGVXRGVGQMATSAPFCARYPNPKKVLVIGGGDGGVAIGFEDPRVNLVIGDGVAFLKNAAEGSYDAVSPDSSDPIGPAKELFEKPFFQSVARALRPGGVVCTQAESLWLHMDIIEDIVSNCREIFKGSVNYAWTSVPTYPSGVIGFMLCSTEGPDVDFKHPVNPIDDSKSSGPLKFYNAEIHSAAFCLPSFAKKVIESKTN

SEQ ID NO: 6883 - protein, 238 aa, Brassica napus
  unsure (1)..(238): unsure at all Xaa locations
  Clone ID: BRANA-23APR03-C1643_1.p
KNPNDPPSPSSPRKQITLSSPSSKNKNIFFQLKSLNKKKAVSSSRTRPSASAPRSLSSPVFASSSSSSVSSRTFSIXNITNSNPPRSASPTRINLRASSPLNHSSSPSSIDNTTFTRPKPGSFALSKPSGGNKIPDSRRRCMCSPTTHPGSFRCSLHKNVANPHGQCAATAAAYPTNSLNMRRSAMTNYLVRIGGVEGEWVRRALTTLIRPFSHQVKRRYAYQPRPSRLSSMSKADDL

SEQ ID NO: 6884 - protein, 193 aa, Brassica napus
  Clone ID: BRANA-23APR03-C16633_1.p
MNGFASLAPSGARSPSRLRLRGRLSPPGSTTVLRPPSSSGGMGLPLYAACEALVHGHRDERPESPTYWAAFRACCRVVLSSGSLLSRVQLLYHVKFAFLVWLQLPTVDGAKQIYNNHLRPFLTRHQVRLDGLVNGVYEQMVKVIRSHQGEIRFVRSMIIRILGSVNEVASPSQRQGEISNTSPEPESESDHED

SEQ ID NO: 6885 - protein, 175 aa, Brassica napus
  Clone ID: BRANA-23APR03-C1663_1.p
MASASATATLLKPTPLPPHKPIITASVSPPLPPPRRHNLLRRDLLSLSAASTLLLTQSLPFLAPSPASAAEDEEYVKDTSAVISKVRTTLSMERTDPNVADAVAELREVSNSWVAKYRKEKALLGKASFRDMYAALNAVSGHYVSFGPTAPIPAKRKARILEEMETAEKALSRGR

SEQ ID NO: 6886 - protein, 205 aa, Brassica napus
  Clone ID: BRANA-23APR03-C1665_1.p
MAPILRSTSLVALLVFQISLFLFTSTLPISSGSEDSYTITGRVRIPASTAIGHAAKFSNIKVVLNGGQNITFLRPDGYFTFHKVTAGTHLIEVYALGFFFSPVRVDVSARHHGKVQATLTETRRSLTELVLEPLRADQYYELREPFNVMAILKSPMGLMVGFMVVVVFLMPKLMENIDPEEMKRTQEELRNQGVPSLSSLLPASR

SEQ ID NO: 6887 - protein, 157 aa, Brassica napus
  Clone ID: BRANA-23APR03-C1677_1.p
MATNLLKLSSQIRRLSPLTGSLTVRTSATSTGSSGSKKVSDRIVKLSAIDADGDKKDIIGLSGQTLLRALTHTGLIDPLSHRLDDIDACSAECEVQIAEEWLEKLPPRTYDEEYVLKRNSRSRVLNKHSRLGCQVVLTQELQGMVVAVPEAKPWDIP

SEQ ID NO: 6888 - protein, 191 aa, Brassica napus
  Clone ID: BRANA-23APR03-C1679_1.p
MSYAAAAALFFPSTVSVRSPAKFLLRPSNPLRLLVPTTNGAASTKNAARRQMKRTFVVANALPVEDDGVSLGTMKLPMDTDLPRFETLLFQWANSLCQGANIPLPVPLKVDRISGGARLGFIVMEDEGKTDVPVYIDCLVYQSTESGSGSGPVFRATRNGRKKDKAPPGEERIMRSLLGALKRAVELARVS

SEQ ID NO: 6889 - protein, 148 aa, Brassica napus
  Clone ID: BRANA-23APR03-C16898_1.p
MASTALSSAIVNTSFLRRQQTPISLRSLPLANTQSLFGLKSSTARGGRVTCMATYKVKFITPEGEQEVECEDDVYVLDAADEAGIDLPYSCRAGSCSSCAGKVVSGSVDQTDQSFLDDDQMNEGYVLTCVAYPTSDVVIETHKEEAIV

SEQ ID NO: 6890 - protein, 230 aa, Brassica napus
  unsure (1)..(230): unsure at all Xaa locations
  Clone ID: BRANA-23APR03-C1716_2.p
MATAASSLTIASSFSEXATRIXSLKCSNLPYKANSRSKRLVVSSVSSPKVELRTGPDDLISSLLSKVANSDGGVTLTPEQHKEVAQVAGELQKYCVSGPVKRPLIFGDWDVVYCSRPTSPGGGYRSVIGRLFFRTKEMIQGIDSPDTVRNRVSFTALGFLDGDVSLTGKLNVLDSEWVQVIFEPPELKVGSLEFKYGFESEVKLRITYVDEKLRLGIGSRGSLFVFRRRQ

SEQ ID NO: 6891 - protein, 110 aa, Brassica napus
  Clone ID: BRANA-23APR03-C17598_1.p
MEAIRNLKIKTSTCKRIVKELHSYEKEVEREAAKTADMKDKGADPYDLKQQENVLGESRMMIPDCHKRLESALADLKSTLAGLEETTGPEVEDAKKTVADVEMQFPTEDA

SEQ ID NO: 6892 - protein, 465 aa, Brassica napus
  Clone ID: BRANA-23APR03-C175_4.p
MGPTSLLSYFFTFLTLFHGFTAQQWPNECQLDQLNALEPSQIIKSEGGRIEVWDHHAPQLRCSGFAFERFVIEPQGLYLPTFLNAGKLTFVVHGHALMGKVTPGCAETFMDSPVFGQGQGQEQGQGQGQGQGQGFRDMHQKVEHLRSGDTIATPPGVAQWFYNNGNEPLILVAAADIANNLNQLDRNLRPFLLAGNNPQGQQWLQGRQQQKQNNIFNGFAPQILAQAFKISVETAQKLQNQQVNRGNIVKVQGQFGVIRPPLRQGQGGQQPQEEGNGLEETLCTMRCTENLDDPSSADVYKPSLGYISTLNSYNLPILRFLRLSALRGSIHNNAMVLPQWNVNANAALYVTKGKAHIQMVNDNGQRVFDQEISKGQLLVVPQGFAVVKRATSQQFQWIEFKSNDNAQINTLAGRTSVMRGLPLEVISNGYQISPQEARSVKFSTLETTLTQSSGPMGYGMPRVEA

SEQ ID NO: 6893 - protein, 284 aa, Brassica napus
  Clone ID: BRANA-23APR03-C1773_1.p
MDLKGQLDRFKKQQERCQSTLSSINASRAPSGPSRPSSVPAAPSLKPTPPVKFSNDTERLQFINSIRKGPVGAQIKRVIELLFETRQAFTPEQINERCYVDMLSNKAVFDSLRNNPKVYYDGRRFSYKAKHDVKDKNQLLSLIKKYPAGIAAVDLKDAYPNVMDDLQALKASKHIWFLSNADSQEDIAYPNDFKGQIEVDDEFKSLFQDIDIPSDLLDVEKELQKIGLKPVMNTAQRRAAAQIQGVSNKPKQKKKKQEINKRTKLTNAHLPELFQNLNASSSRN

SEQ ID NO: 6894 - protein, 249 aa, Brassica napus
  Clone ID: BRANA-23APR03-C17902_2.p
MGYWNSKVVPRFKKIFEKSSVKKAAAAEACKTFDESKEAINKEIEEKSRPLLPKVVETYEATSAEVKALVRDPKEAGLKKNSAAVLKYLEALVGIEFPGSTAVKEAASSFGAGYVSGPVTFIFEKVCVFLPEEVKTREVPVEEVKAEEPAKTEEPVKTEEPAKTEEPVKTEETSGEKEKEIVEETKKEEIVATSVVEEKKPEVEKEEEKKPVVEEVKKEEAAPAPAVVETPVTAPETTTPAPVAEPPKP

SEQ ID NO: 6895 - protein, 306 aa, Brassica napus
  unsure (1)..(306): unsure at all Xaa locations
  Clone ID: BRANA-23APR03-C1798_1.p
MANASTTLFAXSSSIPTRLSLPRRSESLKLVVPVAMXASSASTAKKVAPAVIVGGGRVGRALQEMGSGDDVLVKRGEAVPVDFEGPILVCTRNDDLDAVLEATPQSRWKDLVFFQNGMMEPWFESKGLGDTDQVLAYFAVSKLGEPPVDGKTDTNPEGLTAAYGKWASAVAARLQSGGLSCKVLDKESFQKQMLEKLIWICAFGLVGARPPGASVGTVENEYRDEVSRLIQELAAAASAEKGLTFEEDMVERLCAYSRAVAHCPAAVKEFKWRNGWFYSLSEKANAEGKPEPCPPHTEWLRELKVI

SEQ ID NO: 6896 - protein, 176 aa, Brassica napus
  Clone ID: BRANA-23APR03-C18130_1.p
SNRFLSRNPTRKAMRVHPILNNNTLIHHHHHHHHNPTREPGKNLRRLPHIFNRVLELPLRSEADVSVEEKPDCFRFVAETDGLRGGGGEMTAYMVEIHPGITKIVVRTNGLSLGLSLDELELDVWRFRLPETTRPELVTVACVDGALVVTVPKMVSEEDDDGFGQGVGTGRLVLVL

SEQ ID NO: 6897 - protein, 170 aa, Brassica napus
  Clone ID: BRANA-23APR03-C18168_1.p
MDQILNKVGSYWLGQKANKEFNSVGDDFNSLSSSIEGGTKWLVNKLKGKMQKPLPELLKEFGLPVGIFPQDATNYEFNEETGKLTVFIPETCEVGYRDSSVLRFSTTVTGYLEKGKLAEVEGLKTKLMIWVKVTCISADPSKVYFTAGMKKSRSRDAYEVIRCGVSVDKF

SEQ ID NO: 6898 - protein, 313 aa, Brassica napus
  Clone ID: BRANA-23APR03-C1817_1.p
MEKGIFLLLLVILFGNLMFTGVSVRVPICAMRSVKDYALGFREQTCPFYGDELAERPHFVAVTEGDERWLQTALDMIHKNKCDYVALLFYASWCPFSRSFTPSFDLISSLYSSIPHFAIKESAVKPSTLSKYGVHGFPTLLLMNSTMRARYRGTRMLDSLVAFYRDVTGIETLDKTSLEKSLLVPHLGNENNTEPENCPFTWARSPENMLRQETYLTLATVFVLLRLLYFVFPALVVFAKFTWPRIAQNMGLESLQEHTVGFLSRLCMYLREPCKRSNLQGGAMNARAWASKSLATVSIGDSSSSNRASSASH

SEQ ID NO: 6899 - protein, 234 aa, Brassica napus
  Clone ID: BRANA-23APR03-C1827_1.p
EKHKLARSRKLSFEVPYFYLACFGSSAWLTLQLEGNVRSRGGCYQGEDSYNLCSSTTPDSDLGRDVPAMKTFPSFQGDACFRQMRSGDPSAVKGPKGRFKYQPGQFRAFGMLAGGSGITPMFQVARAILENPTDKTKVHLIYANVTYDDILLREELESLTANYPDQFKIYYVLNQPPETWDGGVGFVSKDMIQAHCPAPASDIQVLRCGPPPMNKAMAANLEALGYSPEMQFQF

SEQ ID NO: 6900 - protein, 88 aa, Brassica napus
  Clone ID: BRANA-23APR03-C18439_1.p
MGRQPCCDKLEVKKGPWTTEEDKKLINFILTNGHCCWRALPKLAGLRRCGKSCRLRWTNYLRPDLKRGLLSHDEEQLVIDLHAHLGNK

SEQ ID NO: 6901 - protein, 289 aa, Brassica napus
  Clone ID: BRANA-23APR03-C1878_1.p
MGNLLCCVLVKQSDVAIKERFGKFQKVLNPGLQFVPWVIGDYVAGHLTLRLQQLDVQCETKTKDNVFVTVVASIQYRVLVDKASDAFYRLSNPTSQIKAYVFDVIRACVPKLNLDDVFEQKNEIAKSVEEELDKAMTAYGYEILQTLIIDIEPDQQVKRAMNEINAAARRRVAASAKAGAAESAQGQRGEGGGASQPLSGAGRGRQRHANEGGQRGRDLGIAGHVPGPPSTAEMAMVKQAQEFETVGATGQYRVLVDGASAAGPGAGAAAAPQKGNGFEGAHQTAAPRA

SEQ ID NO: 6902 - protein, 181 aa, Brassica napus
  Clone ID: BRANA-23APR03-C188_15.p
MAYSMLSSAAVVTSPAQATMVAPFTGLKSSSAFPVTRKANNDITSIVSNGGRVNSMQVWPPVGKKKFETLSYLPDLTEVELGKEVDYLLRNKWIPCVEFELEHGFVYREHGSTPGYYDGRYWTMWKLPLFGCTDSAQVLKEVQECKTEYPNAFIRIIGFDNNRQVQCISFIAYKPPSFTGA

SEQ ID NO: 6903 - protein, 181 aa, Brassica napus
  Clone ID: BRANA-23APR03-C188_24.p
MAYSMLSSAAVVTSPAQATMVAPFTGLKSSSAFPVTRKANNDITSIVSNGGRVSCMQVWPPVGKKKFETLSYLPDLTEVELGKEVDYLLRNKWIPCVEFELEHGFVYREHGSTPGYYDGRYWTMWKLPLFGCTDSAQVLKEVQECKTEYPNAFIRIIGFDNNRQVQCISFIAYKPPSFTGA

SEQ ID NO: 6904 - protein, 265 aa, Brassica napus
  Clone ID: BRANA-23APR03-C188_26.p
MATSAIQQSSFAGQTALKPSNDLLRKVGVSGGGRVTMRRTVKSTPQSIWYGPDRPKYLGPFSENTPSYLTGEYPGDYGWDTAGLSADPETFAKNRELEVIHSRWAMLGALGCTFPEILSKNGVKFGEAVWFKAGSQIFSEGGLDYLGNPNLIHAQSILAIWACQVVLMGLIEGYRIGGGPLGEGLDPLYPGGAFDPLNLAEDPEAFAELKVKELKNGRLAMFSMFGFFVQAIVTGKGPIENLFDHLADPVANNAWSYATNFVPGK

SEQ ID NO: 6905 - protein, 183 aa, Brassica napus
  unsure (1)..(183): unsure at all Xaa locations
  Clone ID: BRANA-23APR03-C188_28.p
MAYSMLSSAAVVTSPAQATMVAPFTGLKSSSAFPVTRKANNDITSIVSNGGRVSCMEXNVWPPVGKKKFETLSYLPDLTEVELGKEVDYLLRNKWIPCVEFELEHGFVYREHGSTPGYYDGRYWTMWKLPLFGCTDSAQVLKEVQECKTEYPNAFIRIIGFDNNRQVQCISFIAYKPPSFTGA

SEQ ID NO: 6906 - protein, 265 aa, Brassica napus
  Clone ID: BRANA-23APR03-C188_31.p
MATSAIQQSSFAGQTALKPSNDLLRKVGVSGGGRVTMRRTVKSTPQSIWYGPDRPKYLGPFSENTPSYLTGEYPGDYGWDTAGLSADPETFAKNRELEVIHSRWAMLGALGCTFPEILSKNGVKFGEAVWFKAGSQIFSEGGLDYLGNPNLIHAQSILAIWACQVVLMGFIEGYRIGGGPLGEGLDPLYPGGAFDPLNLAEDPEAFAELKVKELKNGRLAMFSMFGFFVQAIVTGKGPIENLFDHLADPVANNAWSYATNFVPGK

SEQ ID NO: 6907 - protein, 190 aa, Brassica napus
  unsure (1)..(190): unsure at all Xaa locations
  Clone ID: BRANA-23APR03-C188_48.p
WLPLCFPAAAVVTSPAQATMVAPFTGLKSSAAFPVTRQSKXNDITSIASNGXGELAGMKVWPPVGKKKFETLSYLPDPYRKLNGGKEVDYLLRNKWIPXCLNSSWEAPGFVYPWSTESTPGILTMGRYWDNVGSFPCSGCTGLCSKWLKEVQEXKRSTPNAFIRIIGFDNNRQVQCISFIAYKPPSFTGA

SEQ ID NO: 6908 - protein, 195 aa, Brassica napus
  Clone ID: BRANA-23APR03-C1894_1.p
MLSLSIASRVTFLRGTGPANSTSSSFHGVRIQHHVSARVPAAAAISCNGKPLAVMMSKREVELKEIRAKTTEELNEEVIDLKGELFMLRLQKSARNEFKSSEFRRMKKQVARILTVRREREIEEGIGKRLSRKLDRQWKKSIVVRPPPSLKKLQGEEAAEAAAAAATSGRKRHPHCPVMGAASITLSPRDVTLCC

SEQ ID NO: 6909 - protein, 178 aa, Brassica napus
  Clone ID: BRANA-23APR03-C1898_12.p
MIMSEENRRAISKYLFQEGVLFAKKDFNLAQHPLVEGVPNLQVIKLMQSFKSKEYVRETFAWMHYYWFLTNEGIDFLRTYLNLPSEIVPATLKKQQKPLGRPMGDCPRGPPRSDGERRSGDRDGYRGGQRSGGEFGDKSGAPADYQPSFRGSGAGSRPGFGRGAGGYGAGPAAGSDLP

SEQ ID NO: 6910 - protein, 401 aa, Brassica napus
  unsure (1)..(401): unsure at all Xaa locations
  Clone ID: BRANA-23APR03-C1899_1.p
MASLQLCDGYLLSKPSVSPRFRLPQRISHRLIPKASASPPPPPSSSSSLSLTRRDLLYQSAAVSLSLSSIVGPAKADEQLSEWERVFLPIDPGVVLLDIAFVPDEPSRGFLLGTRQTLLETKDGGNTWAPRSIPSAEEEDFNYRFNSISFXGKEGWIIGKPAILLYTADAGENWDRIPLSSQLPGDMVFIEATGEKSAEMVTDEGAIYVTSNKGYNWKAAIQETVSATLNRTVSSGISGASYYTGTFSAVNRSPDGRYVAVSSRGNFFLTWEPGQPYWQPHNRAVARRIQNMGWRADGGLWLLVRGGGLYLSKGTGISEEFDEVPVQSRGFGILDVGYRSEEEAWAAGGSGILLRTRNGGKSWNRDKAADNIAANLYAVKFVDDKKGFVLGNDGVLLRYVG

SEQ ID NO: 6911 - protein, 369 aa, Brassica napus
  Clone ID: BRANA-23APR03-C18_1.p
MASSVTLGSCPWVLHHHPSTQSKTPRSRSPSLITLKPITLTPKRTVSSASHTISSSLVTKEDNNLKSTTSSSFDFMSYILRKADSVNRALDSAVPLREPLKIHEAMRYSLLAGGKRVRPVLCIAACELVGGEESLAMPAACAVEMIHTMSLIHDDLPCMDNDDLRRGKPTNHKVYGEDVAVLAGDALLSFAFEHLASATSSEVSPARVVRAVGELAKAIGTEGLVAGQVADISSEGLELNDVGLDHLEFIHLHKTAALLEASAVLGGIVGGGSDEEIERLRKFARCIGLLFQVVDDILDVTKSSQELGKTAGKDLIADKLTYPKLMGLEKSREFAEKLNREARDQLLGFDSDKVAPLLALANYIANRQN

SEQ ID NO: 6912 - protein, 149 aa, Brassica napus
  unsure (1)..(149): unsure at all Xaa locations
  Clone ID: BRANA-23APR03-C1912_3.p
MASTALSSAIVGTXFLRRQTTPISLRSLPSANTQSLFGLKSGTARGGRVTAMATYKVKFITPEGEQEVECDDDVYVLDAAEEAGIDLPYSCRAGSCSSCAGKVVSGFVDQXSDQSFLDDDQIAEGFVLTCAAYPTSDVTIETHREDDIV

SEQ ID NO: 6913 - protein, 227 aa, Brassica napus
  unsure (1)..(227): unsure at all Xaa locations
  Clone ID: BRANA-23APR03-C1984_1.p
FSRFNLIAFSSFNSSDASDIDSKLATNVDRNFDSDVAADTDSPETLAIAAPAVWIVRSPGDSAXGSVKGSILGYGSGLSKNMGFDGSFAKALKSPLNLHVLFGRLMLVFREQXICVVWLLKQLIGKVDAIMHLDVGGCFTGLALSFPGAPQALXLQSCLTFGAFSFILEGLNKSQTALAHSVSLRHQTGNFGDHQQRPLQLSLALPIHEEIKGLFSFCKSLTKPKKI

SEQ ID NO: 6914 - protein, 171 aa, Brassica napus
  Clone ID: BRANA-23APR03-C19976_2.p
MAYEKVNELNLKDTELRLGLPGTEQDKEEQEVSCVRSNKRQLQSDNEEESTLPTKTQIVGWPPVRSYRKNNNSVSYVKVSMDGAPYLRKIDLKTYKNYPELLKELENMFKFTIGEYSEREGYRGSGVVPTYEDKDGDWMLVGDVPWDMFSSSCKRLRIMKGSDALALDSAL

SEQ ID NO: 6915 - protein, 123 aa, Brassica napus
  Clone ID: BRANA-23APR03-C20011_1.p
NCCNSCLSSWCPFGPVGQVAELGANASGTAGTPGALYKLVNGFAGCASFFSCGKRGAQRDHYSSDCGDCLKHFFCELCALTQQYRELKNRGFNMDLGWAGNVQRQQNQGAAMGAPVFQGGMNR

SEQ ID NO: 6916 - protein, 126 aa, Brassica napus
  Clone ID: BRANA-23APR03-C20201_1.p
SSSPPPLRRLRCPPCPPFLRWLPRCSPCSARSGTEVAVAEFADFVDQVKLTGGRQVTGTLKGYDQLLNLVLDGALESVRDHDDPLKTTDQTRRLGLIVCRGTAVMLVSPTDGTEEIANPFNQPEAL

SEQ ID NO: 6917 - protein, 145 aa, Brassica napus
  unsure (1)..(145): unsure at all Xaa locations
  Clone ID: BRANA-23APR03-C2064_1.p
MEMATVPGQLVWEIVKRNNCFLVKQFGRGNAKVQFSKESNNLCNLNSYKHSGLANKKTVTIQPADKDQGVVLXTTKTKKQNKPKLSVNKSVLKKEFPRMAKAVANQVVDNYYRPDLKKAALARLSVISKGLRVAKSGAKQRNRQA

SEQ ID NO: 6918 - protein, 106 aa, Brassica napus
  Clone ID: BRANA-23APR03-C20855_1.p
MRIIVSILFVASLLLITSSLASATISGGGGAAALAPEIKVGPELDKWCGGKCEVRCKDAGMNDRCLKYCGICCKECKCVPSGTYGNKHECPCYRDKLSSKKTPKCP

SEQ ID NO: 6919 - protein, 120 aa, Brassica napus
  Clone ID: BRANA-23APR03-C2092_1.p
PTSIDELTAQINQLSSDNRQILTSLTVTTQLYTKIQAENSILTAQMTELSTRLESLNEIVDLVTTTNGGVDQIDGCGFDDRTVGINCDGYYDDMMSGVNPWGGSVYSNQPIMANDMMNMY

SEQ ID NO: 6920 - protein, 151 aa, Brassica napus
  Clone ID: BRANA-23APR03-C2105_1.p
MATLPLPITTTISLPKPCISNSFSFPFRNVSLSTRTRRMYLTGGVVSRSYKVVVEQDGKTTELEVEPDETILSKALESGMDVPYDCNLGVCMTCPAKLVTGTVDQSDGMLSEDVVERGYALLCASYPTSDCHIKMIPEEELLSLQLATAND

SEQ ID NO: 6921 - protein, 290 aa, Brassica napus
  Clone ID: BRANA-23APR03-C21081_1.p
MEIGFLGLGIMGKAMAMNLLKHGFKVTVWNRTLSKCDELVEHGASMGETPAQVIKKCKYTIAMLSDPCAALSVVFDDKDGVLEQICEGKGYIDMSTVDAETSLKINQAITGKGGRFVEGPVSGSKKPAEDGQLIILAAGDKSLFDETVPAFDVLGKKSFYLGQVGNGAKMKLVVNMVMGSMMNAFSEGLVLADKSGLSSDTLLDILDLGAMTNPMFKGKGPSMNKSSYPPAFPLKHQQKDMRLALALGDENAVSMPVAAAANEAFKKARSMGLGDLDFSAVIEAVKFSRE

SEQ ID NO: 6922 - protein, 347 aa, Brassica napus
  unsure (1)..(347): unsure at all Xaa locations
  Clone ID: BRANA-23APR03-C21179_1.p
TTSTINLFPSKSSTNKPPIAEEPLLTPPPXTFCMFSLXYPQLLEKYNKAEASFWDGEEVDLLQDTRHLENNLNHGERHFIKQVLAFFAASDGIVPENLATPFMSDVQVSEARAFYGFQIAIENIHSEMYSLLLDTYIKDNKERDHLFRAIETIPCVVKKAQWAMKWIDGSQTFAERIVAFACVEGIFFSGSFCSIFWLKKRGLMPGLTFSNELISRDEGLHCDFACLIYTLLRTKLSEERVKSIVCDAVEIEREFVCDALPCALVGMNRDLMSQYIEFVADRLLGALGYGKVYGVANPFDWMELISLQGKTNFFEKRVGDYQKASVMSSVNGNGAFDNHVFSLDEDF

SEQ ID NO: 6923 - protein, 261 aa, Brassica napus
  Clone ID: BRANA-23APR03-C2123_1.p
MSRRQVGSTRRGGDSGSFPFVGALHSKSRSSPLLSICLVLVGACLLIGYAFSGPGLFKSIREVSKITGDYSCTSEVQRAIPILKNAYGDSMRKVLHVGPETCSVVSTLLKEEETEAWGVEPYDVEDADSNCKSLLRKGLVRVADIKFPLPYRSKSFSLVIVSDALDYLSPKYLNKTVPELARVASDGVVLFAGNPGKPKGKVTDLSKVGRPAKMRSSSWWNRFFSQTNLEENEAGSKKFEKAASKVSYKPACQVFHLKPLH

SEQ ID NO: 6924 - protein, 234 aa, Brassica napus
  unsure (1)..(234): unsure at all Xaa locations
  Clone ID: BRANA-23APR03-C2128_2.p
MAVEDTSKPVVVAEEANPNPTDRPIDRYHEEGDDAEEGEIAGGEGDGDESSKSAVPQSHPLEHSWTFWFDNPSVKLKQATWXSSLRSVFTFSTVEEFWSLFNNMKGPSKLAGGADFYCFKHNIEPKWEDPICANGGKWTMNFPKEKSDKPWLYTLLALIGEQFDHGDEICGAVVNVRGKQERISIWTKNASNEAAQVSIGKQWKEFIDYNNSIGFIIHEDAKKLDRGAKSAYTA

SEQ ID NO: 6925 - protein, 1035 aa, Brassica napus
  unsure (1)..(1035): unsure at all Xaa locations
  Clone ID: BRANA-23APR03-C212_1.p
AAGIPGSFGFISPPRLDMEQLLSEAQHRWLRPAEICEILRNYHKFHIATESPTRPASGSLFLFDRKVLTYFRKDGHNWRKKKDGKTIKEAHEKLKVGSIDVLHCYYAHGEGYENFQRRCYWMLEIELMHIVFVHYLEVKGSRTSIGMKENNSNSLSGTASVNIDSAASPTSRLSSYCEDADSGDSHQSSSVLRASPEPQTGNRNGWTSAPGMRIASQVLGNRVGETDSQRSFDVQAWDAVENLVTRYDQPCNNLLVEERTNKFGMLPAEHLRSPLQNQLNWQIXAQDDLPLPKWPGYLVPHSGMTDDTDLALFGQSAQDNFESFSSLLDIEHLQSDGIPPSDMESEYIPVKKSLLRHEDSLKKVDSFSRWASKELGEMEDLQMQSSRGDIAWASVDCETAAAGLSFSPSLSEDQRFTIVDYWPKCAQTDADVEVLVIGTFLLNPQEVTICSWSCMFGEVEVPAEILVDGVLCCHAPPHTAGQVPFYVTCSNRFACSELREFDFLSGSTKKIDAAGIYGYSTKEASLQMRFEELLAHRAFVQEHQIFEDVVEKRRKISKIMLLNEEKENLFPGIYERDSTKQEPKERVLRKQFEDELYIWLIHKVTEEGKGPNILDEGGQGVLHFVAALGYDWAIKPILAAGVNINFRDANGWSALHWAAFSGREETVAVLVSLGADAGALTDPSPELPLGKTAADLAYGKEHRGISGXLAESSLTSYLEKLTMESKENSPANSGGPKAVQTVYEXTAAPMSYGDVPETLSLKDSLTAVRNATQAADRLHQVFRMQSFQRKQLSGFDDDDGDEIGISNELAVSFAASKAKNPGQSEVFVHSAVTHIQKKYRGWKKRKEFLLIRQRVVKIQAHVRGHQVRKQYKPIVWSVGLLEKIILRWRRKGTGLRGFKRNXVPKTVEPEPQCPMIPKEGDYDFLEKGRKQTEERLQKALTRVKSMVQYPEARDQYRRLLTVVEGFRENEASSSLSVNNREEPVNCEDDDLIDIDSLLNDDILMSTSPLNDSFVYSFSFFQLSNFLHLFSVNIIS

SEQ ID NO: 6926 - protein, 160 aa, Brassica napus
  Clone ID: BRANA-23APR03-C2176_1.p
MSGILVNSAANSLRFSPGTSLHPPKSTRSHNGSARFPTGAKSFRAYTPQTLNAEPAVTESVRRRASSLYELLKVNETASLTEIKTAYRSLAKVYHPDASESDGRDFMEIHKAYATLADPTTRAIYDSTLGARRRRVHAGATGRTSRVYPTTRRWETDQCW

SEQ ID NO: 6927 - protein, 298 aa, Brassica napus
  Clone ID: BRANA-23APR03-C2199_1.p
MALLQHCSVSATSAVRLSFSSSAPPRASLSLHPEKKSHSRRMICRTMVQEAAAQGIPSVYAREMERLSAKESLILAFNDAGGFEALVTGKITDLQKIDVNERITTLERLNPTPRPTTSPYLEGRWSFEWFGSNTPGSLAARVIFERFPSSFVSLSSMDIVIKDASTRATANVKLLNMIENKVILTSKLTVEGPLRMKEEYLEGMLESPTVIEEAVPEQLRGLLGQATTTLQQLPEPVKDTLANGLRIPLGGSYQRFFMISYLDDEILIVRDTLGVPEVLTRVETSSSSSVIENLEYNS

SEQ ID NO: 6928 - protein, 356 aa, Brassica napus
  unsure (1)..(356): unsure at all Xaa locations
  Clone ID: BRANA-23APR03-C2200_1.p
MGEVLKKEAYGLAVKDESGVISPFRFSRRETGENDVRLKVLFCGICHTDLSMAINEWGFTSYPLVPGHEIVGVVTEVGAKVTKFNAGDKVGVGYMVSSCGSCETCIDDQENYCPKMILTSGGKYYDDTITYGGYSDHMVCEEDIIRIPENLPFRXTAPLLCAXXTVYSPMKYHGLDKPGMHIGVVGLGGLGHVAVKFAKAMGTKVTVISTSDRKRDEALTRLGADLFLVSRDPEQMKDAMGTMDGIIDTVSASHPVLPILDLLKYKGKLIMVGAPDKPLELPVLPLIFGKKMVVGSMVGGIKETQEMMDLAGKHNITADIELISADYVNTAMERLQKADVRYRFVIDVANTLKPSP

SEQ ID NO: 6929 - protein, 145 aa, Brassica napus
  Clone ID: BRANA-23APR03-C2217_1.p
MASVSASLPPPLLLTQRKPNLTSVQKLPFSPIRDRRSHSMGLMVKASGKSSESSDLDVISSIQNVWDKSEDRLGLIGLSFAAIVALWASLNIITAIDKLPVISSGFELVGILFSTWFTYRYLLFKPDREELSQIVKKSVADILGQ

SEQ ID NO: 6930 - protein, 323 aa, Brassica napus
  Clone ID: BRANA-23APR03-C223_30.p
MVKATKAEKKIAYDAKLCQLIDEFTQILVVAADNVGSTQLQNIRKGLRGDSVVLMGKNTMMKRSVKIHAENTGNTGILNLMPLLQGNVGLIFTKGDLKEVSEEVAKYKVGAPARVGLVAPIDVVVQPGNTGLDPSQTSFFQVLNIPTKINKGTVEIITPVELIKQGDKVGSSEAALLAKLGIRPFSYGLVVQSVYDNGSVFSPEVLNLTEDDLVQKFAAGISMVTSLALAISFPTLAAAPHMFINAYKNALAICIATEYTFPQAEKVKEYLKDPSKFAVAVAAVSADAGGGASAGAAKVEEKKEVVEESDEEDYGGFDMFGDE

SEQ ID NO: 6931 - protein, 276 aa, Brassica napus
  unsure (1)..(276): unsure at all Xaa locations
  Clone ID: BRANA-23APR03-C22454_1.p
MDREWGSKPGGGGAASAQNEAIDRRERLRRLALETIDIAKDPYFMRNHLGSYECKLCLTLHNNEGNYLAHTQGKRHQTNLAKRAAREAQEAPTQPQPHKRTVSVRRTVKIGRPGYRVTKQYDPELKQRSLLFQIEYPEIEDNIKPKHRVMSSFEQKVQPYDKKYQYLLFAAEPYETIAFKVPSTEIDKSTPKFFSHWDPDSKMFTLQVYFKPNKPDPFKPQSTVESNGLLPPPPPPPQTQPPPPPPSGSLPPPPPPMANGGAXYPPPPPPPSGGYM

SEQ ID NO: 6932 - protein, 195 aa, Brassica napus
  unsure (1)..(195): unsure at all Xaa locations
  Clone ID: BRANA-23APR03-C2267_2.p
MAATMATSTRCMSLNPSPPKPLNQTKPISSSKHFITLPTPPKPTVSLAVTSTALAGAVFSALSYSEPALAAHQISQLAAAAVSEGSDNRGLALLLPIVPAIGWVLFNILQPALNQINKMRASKGVVVGLGGIGDGLAASGXLTPPPEAVAAAEAAERAGDNRGQLLLFVVAPALLWVLYNILQPALNQLNKMRSQ

SEQ ID NO: 6933 - protein, 244 aa, Brassica napus
  unsure (1)..(244): unsure at all Xaa locations
  Clone ID: BRANA-23APR03-C22976_1.p
RVQGIGYGRVFLNWLVERGREQVRGMERRTGMLKKIHKKITLSDTKADLITVSSKGNLFDYATDSCVESILERYDRYLYTEYYLDGRDVXKXEHLVREHDSLKAKVELDDNKNKNCVGEXLELMSLKELQSLEHQLDAAIKSIRSRKNQAMFESISALQKRDKALQDHNNTLLKKIKEREKKTGHQEGQLNHCSNNSSIVQPQYCLTSSRDGFVGRVGAENGGASSLTQPNSLLPAWMLPTTNE

SEQ ID NO: 6934 - protein, 81 aa, Brassica napus
  Clone ID: BRANA-23APR03-C23424_2.p
MLEMAAKLHIPSFFSHKANDSTTSSSSSYSSLLALPQFLCTPYSSGFTQFKLHAKLGGGDGEVKPKEKKKFITKEEEPEQL

SEQ ID NO: 6935 - protein, 648 aa, Brassica napus
  unsure (1)..(648): unsure at all Xaa locations
  Clone ID: BRANA-23APR03-C239_1.p
MSCKGKGTAIGMDLGTTYSCVGVWQHDRVEFIANEQGKRTAPVLLRLLTDSQRVIGDAPKKQVALNPIKTVSXMLRGFGRRFSDSSVXSEIKLWPFKIIARPAERPMISSSSTSEEKQFAXSEEISSMVLIKMREIAEAYLGVTIKNAVVTVPAYFNDSQRQATKDAGVIAGLNVMRIINEPTAAAIAYGLDKKATSVGEKNVLIFDLGGGTFDVSLLTIEEGIFEVKATAGDTHLGGEDFDNRMVNHFVQEFKRKSKKDITGNPRALRRLRTACERAKRTLSSTAQTTIEIDSLFEGIDFYSALTRARFEELNMDLFRKCMEPVEKCLRDAKMDKSTVHDVVLVGGSTRIPKVQQLLQDFFNGKELCKSINPDEAVAYGAAVQGAILSGEGNEKVQDLLLLDVTPLSLGLETAGGVMTTLIARNTTIPTKKEQVFSTYSDNQPGVLIQVFEGERARTKDNNLLGKFELSGIPPAPRGVPQITVCFDIDANGILNVSAEDKTTGQKNKITITTDKGRLSKDDIEKMVQEAEKYKSEDEEHKKKVEAKNALENYAYNMRNTIQDEKIGEKLPAADKKKIEDAIEQAIQWLENNQLGEADEFEDKMKELESICNPIIAKMYQGAGGEAAGMDDDAPPASGGAGPKIEEVD

SEQ ID NO: 6936 - protein, 229 aa, Brassica napus
  unsure (1)..(229): unsure at all Xaa locations
  Clone ID: BRANA-23APR03-C24093_1.p
MGVDLESISEATXGAVGSLLSTTILYPLDTCKSKFQAEISVRGQQKYRYLSDVFWEAISSGKVLSLYQGLGTKNLQSFVSSFIYFYSYSYFKRRLHRRKFGSKSIGTTANLLLAAAAGVCTSVLTQPLDTASSRMQTSEFGKAKGLWKTLTEGAWGSAFDGLGISLLLNSIPAIHYILFDQLKQYLLENXKAKANIDASPVVLSGFMASLLGAVSKSAATVITXPAIRC

SEQ ID NO: 6937 - protein, 184 aa, Brassica napus
  unsure (1)..(184): unsure at all Xaa locations
  Clone ID: BRANA-23APR03-C244_1.p
ISSQQWYKTYXGGEQRDVRVIVASLYLKDAKETVEGMPEVEAVQLDVSDSESLLKYVSEVDVVLSLLPASCHASVAKTCIELKKHLITASYVDDETSGLHEKAKHAGITILGEMGLDPGIDHMMAMKMINEAHIRKGKVKSFTSYCGGLPSPAAANNPLAYKFSWNPAGAIRAGRNPAKYISNG

SEQ ID NO: 6938 - protein, 212 aa, Brassica napus
  unsure (1)..(212): unsure at all Xaa locations
  Clone ID: BRANA-23APR03-C2466_1.p
MNFEEQEEEMEMSGVHPPGGYDSMSGEGATSSGGGGGGRRTSVGEKTKYRECLKNHAVNIAGHAVDGCCEFMPSGEDGSLDALKCAACGCHRNFHRKETEIMSGRAHMVPTYYNRPSQLPPPGYXHRQPAASADEEDTSNPSSSGGTKAKRFRTKFTAEQKEKMFAFAERLGWRMQKHDDVAVEQFCAETGVRRQVLKIWMHNNKNSLGKKP

SEQ ID NO: 6939 - protein, 725 aa, Brassica napus
  Clone ID: BRANA-23APR03-C246_1.p
MASQTKGTTTIEVGTDGVAVISLINLPFKSLQFDLLYSLRSNGEESLSRNYVKGIVLPRAKGKFSGGFDICGFGEIQKGTMKEPKVGYISIDILTDLLEAAKKPSVAAIDGLALGGGLELSMACHARISAPGAQLGLPELQLGVIPGFGGTQRLPRLVGLTKALEMILTSKPVKAEEGHTLGLIDAVVPPAELLNAARRWALDIAERRKPWVSSVLKTDKLPPLGEAREILKFAKDQTRRQAPNMKHPLMCLEAVEVGIVSGSRAGLEKEAQVGSEVINLDTTKGLIHVFFSQRGTTKVPGVTDRGLVPRKINKVAIIGGGLMGSGIATALILSNYSVILKEVNEKFLEAGIGRVKANLQSRVKKGKMSKEKFEKTMSLLKGSLDYESFRDVDMVIEAVIENISLKQQIFADLEKYCPQHCILASNTSTIDLNKIGERTKSQDRIIGAHFFSPAHVMPLLEIVRTNHTSAQVIVDLLDVGKKIRKTPVVVGNCTGFAVNRMFFPYTQAAMFLVEHGTDPYLIDKAVSKFGMPMGPFRLCDLVGFGVAIATATQFIENFPERTYKSMIIPLMQEDKRAGEATRKGFYLYDDRRKAKPDPEIKNYIDKARSVSGAKPDPKLEKLSEKEIIEMTFFPVVNEACRVFAEGIAVKAADLDIAGIFGMGFPPYRGGIMFWADSIGSKYIYSKLEEWSKAYGEFFKPCAFLAERGSKGAPLSAPLEQSRSRL

SEQ ID NO: 6940 - protein, 358 aa, Brassica napus
  Clone ID: BRANA-23APR03-C2497_1.p
MATSSLHTSISPRSFLSLSKPSRKPHRSQVFLRINKRRSCVSCALVHDETDVIPVQSGDRTDHEEGSLVVMSSETERDVNEPVVVGFGAEQLSFEGFPSSSPTADLGDEKSRESEEMEKMIDRSINATIVLAAGTYAITKLLTIGHGWTLFEILRYAPQHNWLAYEEALKRNPVLAKMVISGVVYSVGDWIAQCYEGKPLFEIDRARTLRSGLVGFTLHGSLSHFYYQFCEELFPFQDWWVVPAKVAFDQTVWSAIWNSIYFTVLGFLRLESPLSIFKELKATFLPMLTAGWKLWPFAHLITYGLVPVEQRLLWVDCVELIWVTILSTYSNEKSEARISESVIENPSSSTTPIDPSKE

SEQ ID NO: 6941 - protein, 390 aa, Brassica napus
  unsure (1)..(390): unsure at all Xaa locations
  Clone ID: BRANA-23APR03-C2521_1.p
MATSFFATLPLHGSQENRLLLPPIRLAPPPSSFLGSTRSLTIPSSRRLYHAHAARRSPVVGVQEVVKEKKVTNSLXLITKEEGLVLYEDMILGRSFEDMCAQMYYRGKMFGFVHLARAVMGELFGKVPGCCTGQGGSMHMFSKEHNMLGGFAFIGEGIPVATGAAFTSKYKREVLKQDCEDVTVAFFGDGTCNNGQFYECLNMAALYKLPIIFVVENNLWAIGMSHLRSTSDPEIWKKGPAFGMPGVHVDGMDVLKVREVAKEAVTRARRGEGPTLVECETYRFRGHSLADPDELRDAAEKAKYAARDPITALKKYLIENKLANEGELKTIEKKIDDLMEEAVEFADASPQPGRSQLLENVFADPKGFGIGPDGRYRCEDPKFTEGTAQV

SEQ ID NO: 6942 - protein, 245 aa, Brassica napus
  Clone ID: BRANA-23APR03-C2529_1.p
MARFLLLCFLFAAALTSSLTEAGDDNRVYSPCSDSTVAVGDGFTFGIAFAARASFFGTNRSVQYSPCDRRRLSLSGNSELAVFRPKVDEITLLTINTSSSSSSFRPDSSKGYMVAFAGAKYAARSVPIMVADNDHVVTSFTLVLEFQKGRLENLLWKKHGCSKCSGNAKLVCLNKEACAIKRQSCKNQGGQVDCSLGIQLALSGTDKHYPAVNSWFKVANVKQYSLYGLYSNLKGSLSNQFNNLF

SEQ ID NO: 6943 - protein, 321 aa, Brassica napus
  Clone ID: BRANA-23APR03-C2538_1.p
MALTLPLIFLLLSHFFFPGVEPTSFVMVNKCEYTVWPGLLSNAGVPPLPTTGFVLQKGEEQTIDAPASWGGRFWGRTLCSTGTDGKFSCATGDCGSGTLECSGSGATPPATLAEFTLDGSGGLDFYDVSLVDGYNVPMLVVPQGGSGQNCSSTGCVVDLNGSCPTELRVTSVDGAKQSMGCKSACEAFRTPEYCCSGAFGTPDTCKPSSYSLMFKNACPRAYSYAYDDQSSTFTCAKSPNYVITFCPSPNTSQKSSQDQSPDPKPTSTPAGGSTTWSPADTSMIYEGALDQSKASPSTSHLSLCGITVTLALAFCRMWWLF

SEQ ID NO: 6944 - protein, 282 aa, Brassica napus
  unsure (1)..(282): unsure at all Xaa locations
  Clone ID: BRANA-23APR03-C2544_1.p
MSVRSSRSIYVGKLPGDIRESEIEDLFYKYGRIVDIELKVPPLLPFYCFIEFEHPRDAKDAVDGRDGCKFDGCGLGVEXLCHGRGEDRSSGDRGGGDGGGGGEGGVGDXSRFGVSRHSEFRVIVRGLPSSASWQDLKDHMRKAGDVCFAEVTRDSEGTYGVVDYTNYDDMKYAIRKLDDTEFRNPWARGYIRVTKYESSQSRSPSRSRSRSRGRGRSPSRSVSRSRSPRKDLSKSPRRSLSRSVSKSRSPSPDRKKSPPRAMSRSRSRSLSKSPAKVREGSE

SEQ ID NO: 6945 - protein, 184 aa, Brassica napus
  unsure (1)..(184): unsure at all Xaa locations
  Clone ID: BRANA-23APR03-C2596_2.p
MSGFHGTNDSCPXVKNILLLDSEGKRVAVKYYSDDWSTHAAKLSFEKLVFSKTSKTNARTEAEITLLDSNVIVYKFAQDLHFFVTGGEDENELVLSSVLQGFFDAVALLLRNNVEKMEALENLDLIFLCLDEMVDQGXVLETDPNVIAGKVAMQSTEASGSLSEQTLTQALATAREHLARSLLT

SEQ ID NO: 6946 - protein, 109 aa, Brassica napus
  Clone ID: BRANA-23APR03-C2598_1.p
PDLGQIWRICDKVVVEASSVVKGFSSLVRFDSVCPRALHSSTCGDIRFKWSRIFVFHCCVEVCLCYVLLSKGIVGPLLVVWSLYLHFFRVLDVVVNASCLLLPVSICFR

SEQ ID NO: 6947 - protein, 417 aa, Brassica napus
  Clone ID: BRANA-23APR03-C261_1.p
MAATAATTSSSHLLLSSSRHVAASSQPQILFQRSLFSGGKRSAAGKNHHASGGVRCMAVAADASAEAKPAAARKKSGYELQTLTGWLLRQEQKGEIDTELTIVMSSIAMACKQIASLVQRAGISNLTGVQGAVNIQGEDQKKLDVVSNEVFSNCLRSSGRTGIIASEEEDVPVAVEESYSGNYIVVFDPLDGSSNIDAAVSTGSIFGIYSPNDECIVDDSDDISSLGSEEQRCIVNVCQPGNNLLAAGYCMYSSSVIFVLTLGKGVFSFTLDPMYGEFVLTQENIEIPKAGKIYSFNEGNYQMWDEKLKKYIDDLKDPGPSGKPYSARYIGSLVGDFHRTLLYGGIYGYPRDAKSKNGKLRLLYECAPMSFIVEQAGGKGSDGHQRVLDIQPTEIHQRVPLYIGSKEEVEKLEKYLA

SEQ ID NO: 6948 - protein, 156 aa, Brassica napus
  unsure (1)..(156): unsure at all Xaa locations
  Clone ID: BRANA-23APR03-C2640_1.p
MGFVAEEVRAKAEKYTGDVICREKTKVFLKEISMPNGLLPLKDIEXEVGYNRESGVVWLKQKQSITHKFETIDKLVSYGTEVXTAVVQTGKIKKLTGVKAKELLIWVSVSEIYTEEKEKITFKSPTTLSRTFPVPAFIVPEEVEPAKEEPVKEKSR

SEQ ID NO: 6949 - protein, 177 aa, Brassica napus
  Clone ID: BRANA-23APR03-C26525_1.p
KLQVSGKAILSTVRCRREMSTSSSFVFGPYKIDPREVFYATPLSYAMVNLRPLLPGHVLVCPRRLVPRFTDLTADETSDLWLTAQKVGSRIETFHNATSLTLAIQDGPQAGQSVPHVHIHVLPRKGGDFEKNDEIYDAIDEKEKELKQKLDLDKDRVDRSIEEMANEASQYRSLFDC

SEQ ID NO: 6950 - protein, 233 aa, Brassica napus
  Clone ID: BRANA-23APR03-C2665_1.p
MAGIVSPGPTALYFTSNLGARRLKAASWSGKSLPGNVLRRRNLRVAAEVKFVNAEEAKKLIAAEGYKVVDVRDKTQFERAHIKSCHHIPLFIFNEDNDLGTIVKRTVHNNFSGLFFGLPFTKLNPEFVKAVRNEFSQDSKLLLVCQEGLRSAAAASRLEEAGYDNIACVTSGLQSVKPGTFESVGSTELQNAGKAGLITIQGKISAVLGTVLVCALLFITFFPDQAEKLFPPS

SEQ ID NO: 6951 - protein, 195 aa, Brassica napus
  Clone ID: BRANA-23APR03-C2667_1.p
MAGSFSFVRRVYLTLYNWIVFAGWAQVLYFAVKTLKETGHEHVYDAVEKPLQLAQTAAVLEILHGLVGLVRSPVSATLPQIGSRLFLTWGILYSFPEVQSHFLVASLVISWSITEIIRYSFFGLKEALGFAPSWHLWLRYSSFLVLYPTGITSEVGLIYLALPHIKTFSLGTFSTAIAMYCYFVFSYATLQVVVS

SEQ ID NO: 6952 - protein, 236 aa, Brassica napus
  Clone ID: BRANA-23APR03-C2670_1.p
MASSSSYYTPLSALFDVSKPNPSLNPAAFLVPSLKFSTAISNFANLSNGFSLKSPVNPGFLFKSRNFNVQARAAAEKTVHDFTVKDIDGNDVSLNKYKGKVMLIVNVASRCGLTSSNYSELSHLYEKYKSQGFEILAFPCNQFGGQEPGSNPEIKQFACTRFKAEFPIFDKVDVNGPSTAPIYQFLKSNAGGFLGDLIKWNFEKFLIDKKGKVVERYPPTTSPFQIEKDIKKLLAA

SEQ ID NO: 6953 - protein, 283 aa, Brassica napus
  Clone ID: BRANA-23APR03-C2674_1.p
MLLRSASTPLLNSLVHVSTPKESPNEAVDQRPRSLVLSSPSSCCYSPMSIHSSDETTRRVKRTASESDLRHLTTTKPPSSKFLNSAALMEDVEEGIGFGIIRTSSYDGGLAFWTLEEETEFSGGGSGGGGIVHGGGKGGSDGEDSTDVHYRKMIEASRPTRPPTSNSTRFFTRVRKDYLRAEEYCGRAILVNPNDGNVLAMYAELVWMIHKDSSRAESYFNQAVSAAPDDCYVQASYARFLWDADEEEEGGEGEKEERHEEELVTQASRMSFFTGLSPITAMS

SEQ ID NO: 6954 - protein, 112 aa, Brassica napus
  Clone ID: BRANA-23APR03-C2712_1.p
MASTQSLTVAAKTLRNRIFSRSGSTSAGPSRWATPGHEERPKGYFMNRTPPPPGQSRKWEDWELPCYITSFLTIVILGVGLNAKPDLSIETWAHQKALERLEMERLAGASSD

SEQ ID NO: 6955 - protein, 220 aa, Brassica napus
  Clone ID: BRANA-23APR03-C2727_1.p
MLDKLIGEYGHGYGNGYGHKDHRSSGYGFEEHKKYESHMESEGGYFDRQARYDHRVRLPVNHGRPPMAHMPPCDEEDSDSDVEEFYKSSRSHHTTVLPDHGKIHRQQPPHMNFMPPPPMSQPHHNMGNGWQGRHEDAYLGGHGMQHHGEHGMQLRGEHGMQHLGEHGMQHHGEHGMKHHGAHGMKHQDRLMAPQVLPHHVYMNPNSGGGHHKAGWGNKGL

SEQ ID NO: 6956 - protein, 176 aa, Brassica napus
  Clone ID: BRANA-23APR03-C27607_1.p
MSILSGKAAGHDLFVYGSLQDPQVVNVLLNRVPDHSSAVLSGFHRFKIKNRLYPTILPDSTGKVTGKVLKGITDDERKLLDDFEDVEYDRKAVEVVLTDTSEKLQVGTYVWRNKDDPDLYAEWDFEEWKLHDREAFITATKKFMEERKLPEAKTRIDTFKTFFNQNDAEDGKPLGS

SEQ ID NO: 6957 - protein, 365 aa, Brassica napus
  Clone ID: BRANA-23APR03-C27849_1.p
MAVSKAIVIPLLLVLCAAALGAPAYEGFLRNGNFEESPKKTDMKKTVLLGKTALPEWVTTGFVEYIAGGPQPGGMYFPVAHGVHAVRLGNEAKISQKLKVKPGSLYALTFGASRTCAQDEVLRVSVPPQSGDLPLQTLYNSFGGDVYAWAFVAKTSVVTVTFHNPGVQEDPACGPLLDAVAIKELVHPMYTKGNLVKNGGFEEGPHRLVNSTQGVLLPPKQEDLTSPLPGWIIESLKAVKFIDSKYFNVPFGQAAIELVAGRESAIAQVIRTTPGQTYSLSFAVGDAKNDCHGSMMVEAFAARDTLKVPHTSVGGGHFKMASFKFKAIGARTRITFFSGYYHSKKMDMGSLCGPVIDQIVVSRVA

SEQ ID NO: 6958 - protein, 495 aa, Brassica napus
  unsure (1)..(495): unsure at all Xaa locations
  Clone ID: BRANA-23APR03-C28_1.p
EESRVSCTTNHSFSKLDKEKKRPKNSYGKSPSLTILFFFHIFEPSPSASSCLLCDSSAYYSFSVYGDYCVLVAPSRRALCRSXTGPYRGYSMPVDLVSTLSIVIWIVXTNLIPKSMMVTFGLIGSCVLDIPGGTQRAQRKLQERTAFMTLGLSPKASLRSDPVKNQWNRQGSSGLQAVADVAAANMAGFYDIGIGAGLESMTTNPMAWEGSVNPAVKKFEQAQNCLLPMGVTSENVAQRFGVSRQEQDQAAVDSHRKAAAATAAGKFKDEIIPVKTKLVDPKAGDEKPITVSVDDGIRPTTTLATLGKLKPVFKKDGTTTAGNSSQVSDGAGAVLLMRRSVATQKGLPVLGVFRTFAAVGVDPAIMGVGPAVAIPAAVKAAGLELDDIDLFEINEAFASQFVYCRNKLGLDAEKINVNGGAMAIGHPLGATGARCVATLLHEMKRRGKDCRFGVVSMCIGTGMGAAAVFERGDGVDELRNARKVESHGLLSKDAR

SEQ ID NO: 6959 - protein, 139 aa, Brassica napus
  Clone ID: BRANA-23APR03-C29207_1.p
MGRVRTKTVKKSSRQVIEKYYSRMTLDFHTNKKILEEVAIIPSKRLRNKIAGFSTHLMKRIQKGPVRGISLKLQEEERERRMDFVPDESAIKTDDVEVDKETLEMLASLGMSDVSGFSQVEAQAAVVPSNAFGRGGRRF

SEQ ID NO: 6960 - protein, 79 aa, Brassica napus
  Clone ID: BRANA-23APR03-C29249_1.p
MESPSFLDYLFFFIVRPLLAISSAVRFIALWWFLAWKLVLCHVPLVQEIFGLRKKTFKPKPESRGRISKFYKSQNSVPQ

SEQ ID NO: 6961 - protein, 575 aa, Brassica napus
  Clone ID: BRANA-23APR03-C293_1.p
MDRIIARMKKSSGRRGDKTPTRRLERRDALKHINYDAASTSTWSAEDISASLVTRSLELPDRTSFRIFGGGDVEMDQIYKSLGLSGPDDLAISFDAWEACKKRSSSDVINRFKSFELDLHNFPVPSLSEAAPSYGGMGENKPCLERTPTITVKSRGYLVPNHGDVASGGGAGEDKRGLVRTPTITVKSRGYLVPNQSDVGIKGVRPPVLKPPPAKRPPIDHQGSSWDFLTHFAPEDGIVRRPSSSSTSDNGEETLEEEVDTGDEACSFSTNEGGGDSSSTVSNTSPIYANGGSIITSWQKGGLLGRGSFGSVFEGISGDGDFFAVKEVSLLEQGSQAQECIQQLEGEIALLSQLQHQNIVRYRGTAKDGSNLYIFLELVTQGSLSKLYQRYQLMDSVVSTYTRQILDGLKYLHDKGFIHRDIKCANILVDANGAVKLADFGLAKVSKLNDIKSCKGTPFWMAPEVINPKRTDGYGSSADIWSLGCTVLEMLTGQIPYCDLENPVQALYRIGRGVLPDIPDTLSLDGRDFITECLKVDPEERPTAAELLNHPFVRRPLAYSGSGLGSASPHVHRRG

SEQ ID NO: 6962 - protein, 684 aa, Brassica napus
  Clone ID: BRANA-23APR03-C296_1.p
MDGVAGLQEAAGARFSHVELIGRGSFGDVYKAFDSELNKEVAIKVIDLEESEDEIEDIQKEISVLSQCRCPYITEYYGSYLHQTKLWIIMEYMAGGSVADLLQPGHPLDEISIACITRDLLHAVEYLHTEGKIHRDIKAANILLSENGDVKVADFGVSAQLTRTISRRKTFVGTPFWMAPEVIQNSEGYNEKADIWSLGITMIEMAKGEPPLADLHPMRVLFIIPRESPPQLDEHFSRPLKEFVSFCLKKAPAERPSAKELLKHRFIKSARKSPKLLERIRERPKYQVKEDEDSPTCDPKSPAESSGTVRVARDDRGHGTSGTSFQGRTIKNAGWDFSIGGSQSAGTVRALKPPQSRERRQEVTSDQSFQKSSRASASQLSSTSGAAVPEISEGGFLKRDSYQNDCQEEDDSSLSGSGTVVIRSPRSSQSSSVFRDLSSGSTSRYTSFDDASTSGTVVVRGQNDDSGSPRTPKSRLGLQERSSSASEDSIANLAEAKVALEAGFRRGNARERLGNGKVNKRREQAKDSSDHLRSSRDDSDKQKPLIRSQQVSDDEDESELASLSASLSLLLLPSLKEAVGGDTSKGSVGHRVSRALVKMEREKPGSSEAFIAKLIEQLGSSKEVSVKEVQDMAIRVFGKTVNNDAENKRKQASKEFASNTNVSPLGRFLFSRWLGQTSRDLNPS

SEQ ID NO: 6963 - protein, 875 aa, Brassica napus
  unsure (1)..(875): unsure at all Xaa locations
  Clone ID: BRANA-23APR03-C304_1.p
VAVGNNVLDTLGRSRQSFGGKVRQAMNVPKGKGSRGVVKAMFERFTEKAIKVIMLAQEEARRLGHNFVGTEQILLGLIGEGTGIAAKVLKSMGINLKDARVEVEKIIGRGSGFVAVEIPFTPRAKRVLELSLEEARQLGHNYIGSEHLLLGLLREGEGVAARVLENLGADPSNIRTQVIRMVGENNEVTANVGGGSGTNKMPTLEEYGTNLTKLAEEGKLDPVVGRHPQIERVVQILGRRTKNNPCLIGEPGVGKTAIAEGLAQRIASGVVRETSEGKKVITLDMGLLAAGTKYRGEFEERVKKLMEEIKQSDEIILFIDEVHTLIGAGAAEGAIDAANILKPALARGELQCIGATTLDEYRKHIEKDPALERRFQPVKVPEPTVDETIQILKGLRERYEIHHKLRYTDESLVXASQLSYQYISDRFLPDKAIDLIDEAGSRVRLRHAQVPEEARELEKELRQITKEKNEAVRGQDFEKAGTLRDREIELRAEVSAIQAKGKEMSKAESETGEEGPMVTESDIQHIVSSWTGIPVEKVSTDESDRLLKMEETLHKRVIGQDEAVKAISRAIRRARVGLKNPNRPIASFIFFGPTGVGKSELAKALAAYYFGCEEAMIRLDMSEFMERHTVSKLIGSPPGYVGYTEPPQLTEAVRRRPYTVVLFDEIEKAHPDVFNMMLQILEDGRLTNSKGRTVDFKNTLLIMTSNVGSSVIEKGGRRIGFDLDYEKDSSYNRIKSLVTQELKQYFRPEFLNRLDEMILFRQLTKLEVKEIADILLQELFERLKKKEVELQVTERFKERVVDEGYNPSYGARPLRRAIMRLLEDSMEEKMLAREIKEGDSVIVDVDSEGKVTVLNGGSGTPTTSLEEQEDSLPVA

SEQ ID NO: 6964 - protein, 268 aa, Brassica napus
  unsure (1)..(268): unsure at all Xaa locations
  Clone ID: BRANA-23APR03-C305_1.p
LIRKVLELRLVQGSLLKKVLESXKDLVNDAXTFDCSTTGFSLQAMDSSHVALVSLLLRSDGFEHYRCDRNLSMGMNLGNMSKMLKWAGSDDIITXNADGDGDTVTFKFANPNQNKIADFELKLMDIESEHLGIPDAEYHSIVRIPSNEFSRICKDLSTIGDTVVISVTKEGVKFSTAGDIGTANIVLRQNTTVDKPEDAIVIEMNEPVSLSFALRYMNSFTKATPLSDTVTISLSSELPVVVEYKVAEMGYIRYYLAPKIEEDEEDKA

SEQ ID NO: 6965 - protein, 204 aa, Brassica napus
  unsure (1)..(204): unsure at all Xaa locations
  Clone ID: BRANA-23APR03-C3063_1.p
MASRKALTNIHRISRNTKLPAERLLLTAAGARAPPLFRDGAPSPLRLYFGFTTSXVDLGSRSLCRRTSDPQNKEIDLYKEEKKRIATSSLLGRSRXRGFLELDLDLGNXWVEENVNSMDENAVKXSLIHVLDLENPDLWKWLTSQEQPPEIVSSNPVFLALHKKVMTNLNKHAAPETRAAAGQPWVKGWDDFKRGRDAPISGNQ

SEQ ID NO: 6966 - protein, 110 aa, Brassica napus
  unsure (1)..(110): unsure at all Xaa locations
  Clone ID: BRANA-23APR03-C3095_4.p
MGLLDHLWDDTVAGPLPENGLGKLRKHHTFSFRPSSANDYLVXDLDQSEVRSYGGDSPEEAVKVTRSIMIIKPPGYQSGSAPVSPAGSTTPVSPSPFSGEFLTFTPLCFH

SEQ ID NO: 6967 - protein, 190 aa, Brassica napus
  Clone ID: BRANA-23APR03-C310_15.p
MAFAGTTQKCMACDKTVYLVDKLTADNRVYHKACFRCHHCKGTLKLSNYNSFEGVLYCRPHFDQNFKRTGSLEKSFEGTPKIGKPDRPLEGERPAGTKVSNMSGGTREKCVGCDKTVYPIEKVSVNGTLYHRSCFKCTHGGCTISPSNYIAHEGKLYCKHHHIQLIKEKGNLSQLEGGGENAAKDKVVAA

SEQ ID NO: 6968 - protein, 377 aa, Brassica napus
  Clone ID: BRANA-23APR03-C310_16.p
MADGEDIQPLVCDNGTGMVKAGFAGDDAPRAVFPSIVGRPRHTGVMVGMGQKDAYVGDEAQSKRGILTLKYPIEHGIVSNWDDMENIWHHTFYNELRVAPEEHPVLLTEAPLNPKANREKMTHIMFETFNVPAMYVAIQAVLSLYASGRTTGIVLDSGDGVSHTVPIYEGYALPHAILRLDLAGRDLTDSLMKILTERGYMFTTTAEREIVRDIKEKLAYVALDYEQELETAKSSSSVEKNYELPDGQVITIGAERFRCPEVLFQPSLVGMEAPGIHETTYNSIMKCDVDIRKDLYGNIVLSGGSTMFPGIADRMSKEITALAPSSMKIKVVAPPERKYSVWIGGSILASLSTFQQMWISKGEYDESGPSIVHRKCF

SEQ ID NO: 6969 - protein, 378 aa, Brassica napus
  unsure (1)..(378): unsure at all Xaa locations
  Clone ID: BRANA-23APR03-C310_36.p
MADGEDIQPLVCDNGTGMVKAGFAGDDAPRAVFPSIVGRPRHTGVMVGMGQKDAYVGDEAQSKRGILTLKYPIEHGXIVSNWDDMEKIWHHTFYNELRVAPEEHPVLLTEAPLNPKANREKMTQIMFETFNVPAMYVAIQAVLSLYASGRTTGIVLDSGDGVSHTVPIYEGYALPHAILRLDLAGRDLTDSLMKILTERGYMFTTTAEREIVRDIKEKLAYVALDYEQELETAKSSSSVEKNYELPDGQVITIGAERFRCPEVLFQPSLVGMEAPGIHETTYNSIMKCDVDIRKDLYGNIVLSGGSTMFPGIADRMSKEITALAPSSMKIKVVAPPERKYSVWIGGSILASLSTFQQMWISKGEYDESGPSIVHRKCF

SEQ ID NO: 6970 - protein, 111 aa, Brassica napus
  Clone ID: BRANA-23APR03-C3110_1.p
MATIISCSALPSIRASSGSIRKPDPTGKKPGSWWAPLFGWSSEPDYVNSNNNSSSASLDSDLDKTTRRCLTEEKAKQLRMKIAQVSTFHEVMYHSAIASRLASDVSVRVNE

SEQ ID NO: 6971 - protein, 587 aa, Brassica napus
  Clone ID: BRANA-23APR03-C311_1.p
MYRLISSIASKARVARNCTSQIGSRLSSTRNYAAKDIRFGVEGRALMLRGVEELADAVKVTIPPKGRNVIIEQSWGAPKVTKDGVTVAKSIEFKDRVKNVGASLVKQVANRPTQLNRCLGDGTTCATVLTRAIFTEGCKSVAAGMNAMDLRRGIKLAVDTVVTKLKSRARMISTSEEIAQVGTISANGDRELVTDCKAMESVGKEGVITIQDGKTLFNELEVVEGMKIDRGYISPYFITNQKNQKCELEDPLILIHEKKISNLNSMVKVLELALKSQRSLLIVAADLESDALAVLILNKLRAGIKVCAVKAPGFGENRKANMHDLATLTGAQVITEELGMNLEKIDLSMLGNCKKITVSKDDTVFLGWGAGDKKAIGERCEQIRSMVEASESDYDKEKLQERLAKLSGGVAVLKIGGASESEVGEKKDRVTDALNATKAAVEEGIVPGGGVALLYASKELDKLSTANFDHKIGVQIIQNALKTPVYTIASNAGVEGAVIVGKLLESDNPDLGYDAAKGEYVDMVKSGIIDPVKVIRTALVDAASVSSLLTTTEAVVTEIPTKEDASPAMGGGGGGMGGMGGMGGMGF

SEQ ID NO: 6972 - protein, 112 aa, Brassica napus
  Clone ID: BRANA-23APR03-C313_4.p
MASALSFFTCLVLTVCIVASVDAAISCGTVTSNLAPCASYLTKGGPVPAPCCAGVSKLNSMAKTTPDRQQACKCLKTAAKNVNPSLASSLPGKCGVSIPYPISMSTNCDTVK

SEQ ID NO: 6973 - protein, 366 aa, Brassica napus
  Clone ID: BRANA-23APR03-C316_1.p
MLKLSCNVTNHLHTFSFFSDSSLFIPVNRRTLAVSSSQPRKPALDPLRAVISADQGSISPVNSCTPADRFRAGRLMEDGYSYKEKFIVRSYEVGINKTATVETIANLLQEVACNHVQKCGFSTDGFATTLTMRKLHLIWVTARMHIEIYKYPAWSDVVEIETWCQSEGRIGTRRDWILRDSATNEVIGRATSKWVMMNQDTRRLQRVTDEVRDEYLVFCPREPRLAFPEENNSSLKKIPKLEDPAQYSMLELKPRRADLDMNQHVNNVTYIGWVLESIPQEIIDTHELQVITLDYRRECQQDDIVDSLTTSEIPDDPISKLTGTNGSATSSIQGHNESQFLHMLRLSENGQEINRGRTQWRKKSSR

SEQ ID NO: 6974 - protein, 246 aa, Brassica napus
  Clone ID: BRANA-23APR03-C3182_1.p
NVFLAFTSCLNRVEVATSPTTGWDLTWSLVNLNRGFCVPGTVQSFREGRRKRLRVLAVLRLPPRFLTRDGQAEKQQEVKQDLLEAIEPLERGAIASPDDQLRIDQLARKVEAVNPTKEPLKSDLLNGKWELIYTTSASILQAKKPKFLRSITNYQSINVDTLKVQNMETWPFFNSVTGDIRPLNSRKVAVQLKVFKILGLIPVNAPDTARGELEITYVDEELRLSRGDKGNLFILKMFDPTYRIPL

SEQ ID NO: 6975 - protein, 139 aa, Brassica napus
  Clone ID: BRANA-23APR03-C3258_5.p
MANAASGMAVHDDCKLKFLELKAKRTYRFIVYKIEEQQKQVVVEKLGEPGQSHDDFAASLPADECRYAIFDFDFVTAENCQKSKIFFIAWSPDTARVRSKMIYASSKDRFKRELDGIQVELQATDPTEMDLDIFKSRAN

SEQ ID NO: 6976 - protein, 765 aa, Brassica napus
  Clone ID: BRANA-23APR03-C334_1.p
ARGRNSLIYHSITKKGPLHGTQINDQYKPLGYLDRQRLAARRSNTTYCYDFPLAFETALEQFGHYNNRELRNHARVLLSVLKSLYSPISEGTSLMPVERSPGLNEFGMVAWSLEMSTPEFPMGRKLLIVANDVTFKAGSFGPREDAFFLAVTELACPKKLPLIYLAPNSGARLGVAEEIKACFKVGWSDEVSPENGFQYIYLSPEDHARIGSSVIAHEIKLPSGETRWVIDTIVGKEDGIGVENLTGSGPIAGAYSRAYNETFTLTFVSGRTVGIGAYLAPLGMRCIQRLDQPIILTGFSTLNKLLGREVYSSHMQLGGPKIMGTNGVVHLTVSDDLEGVSAILDWLSYIPAYVGGPLPVLAPLDPPDRTVEYVPENSCDPRAAIAGVNDNTGKWLGGIFDKNSFIETLEGWARTVVTGRAKLGGIPVGVVAVETQTVMQIIPADPGQLDSHERVVPQAGQVWFPDSAGKTAQALMDFTRKSFHCLSLRTGEGFQVGREIFSKEYFRQVATIVENLRTYRQPVFVYIPKMGELRGGAWVVVDSQINSDYVEMYADETARGNVLEPEGTIEIKFRTKEMLECMGRLDPKLIDLKARLQDPNQSEAYTNIELLQQQIKAREKLLLPVYIQIATKFAELHDTSMRMTAKGVIKMCVEWIGSRSFFYKKLNRRIAENSLVKNVREASGDDLSYKSAMGLIQDWFSKSDIPKGKEEAWTDDQVFFTWKDNVSNYELNLSELRPQKLLNPTCRDWKFRRIYRRCHKDLPIF

SEQ ID NO: 6977 - protein, 189 aa, Brassica napus
  Clone ID: BRANA-23APR03-C34261_1.p
MALEALNSPRIASPVPTLFEEHWTKGKRSKRSRSDHPHRLTEEEYLAFCLMLLARDGDRHHVEEEKTVYKCGVCDKVFLSYQALGGHKASHRNFSSGVDPRVRTPAAVKSHVCSICHKSFTTGQALGGHKRCHYDGSSNVVSNSEGVGSTSHVSGNSRRGFDLNITPINELSPDDEVKSPLPSKKLRLT

SEQ ID NO: 6978 - protein, 154 aa, Brassica napus
  Clone ID: BRANA-23APR03-C34466_1.p
NRSTHASEYLEGDKKDEDESKVANLPPRFIERFVAKGIKVDLIEPGRIVCSMKVQPHLLNAGSFLHGGATATLVDLIGSAVIFTTGVSSSGVSVEINVSYLDSAFLDEEIEIESKALRVGKAVAVVSVELRKKKDGKLIAQGRHTKYLAPRSKL

SEQ ID NO: 6979 - protein, 911 aa, Brassica napus
  Clone ID: BRANA-23APR03-C346_1.p
MATSVDNRHYPRLSSALNGGVVHSFKPPLVPSPSLDRDQDQSVNVPTEKSVDKTTKEDRFDSSDDEDESHNRYVSYYKEMVLKSNSDLEPTALDSRDESTGDKWIHRNSSMVRLTGKHPFNAEAPLPRLMHHGFITPVPLHYVRNHGGVPKAEWSDWSVEVTGLVKRPAGLTMEQLISEFPSREFPVTLVCAGNRRKEQNMVKQTIGFNWGSAGVSTSLWRGVALSDVLRRCGVYSKRGGALNVCFEGAEDLPGGGGSKYGTSIKKEMAMDPARDIILAYMQNGELLTPDHGFPVRVIIPGFIGGRMVKWLKRIIVTPQESDNYYHYKDNRVLPSYVDAELPNEESWWYRPEYIINELNINSVITTPGHEEILPINAFTTQKPYTLKGYAYSGGGKKVTRVEVTLDGGETWSVCELDHQEKPNKYGKFWCWCFWSLDVEVLDLLSAKEVAVRAWDESLNTQPEKLIWNLMGMMNNCWFRIKTNVCKPHRGEIGIVFEHPTRPGNQSGGWMAKERQIEKSSESHPTLKKSVSTPFMNTASKMYSMSEVRKHNSAESAWIIVHGHIYDCTRFLKDHPGGSDSILINAGTDCTEEFEAIHSDKAKKLLEDYRIGELITTGYDSSPNVSVHGGSSVMSLLAPIRQLAPTKNIALVNPREKVPVKLIEKTSISHDVRRFRFALPSEDQQLGLPVGKHIFLCATINDKLCLRAYTPTSTVDAVGYIDLVIKVYFKNVHPRFPNGGLMSQHPDSLPIGAVLDIKGPLGHIEYQGRGKFMVSGKPKFANKLAMLAGGTGITPIYQVIQSILSDPEDETEMFVVYANRTEDDILVREELEGWASKFPDRLKIWYVVEIAKEGWEYSTGFITEAVLREHVPEGLEGESLALACGPPPMIQFALQPNLEKMGYDIKEDLLIF

SEQ ID NO: 6980 - protein, 135 aa, Brassica napus
  Clone ID: BRANA-23APR03-C3537_3.p
MSGKGAKGLIMGKPSGSEKDKDKKKQPITRSARAGLQFPVGRVHRLLKTRSTAHGRVGATAAVYTAAILEYLTAEVLELAGNASKDLKVKRISPRHLQLAIRGDEELDTLIKGTIAGGGVIPHIHKSLINKSAKE

SEQ ID NO: 6981 - protein, 65 aa, Brassica napus
  unsure (1)..(65): unsure at all Xaa locations
  Clone ID: BRANA-23APR03-C3555_1.p
FSVGEIRNILXCEFLDKHHXASLLVVGSHGHGAIKRGRLSGSVSDYCAHHAHCSVMIVKKPKIKL

SEQ ID NO: 6982 - protein, 149 aa, Brassica napus
  Clone ID: BRANA-23APR03-C3555_4.p
MATVEKKPLMVVGVDESEQSTYALEWTLDRFFAPYAPNFPFKLLIIHAKPNAVSAVGFAGPGIVEVVPHVDADLKHTAAKVVEKAKGICESKSVHDATMEVFEGDARNILCEVVDKHHVSSPANRRRSDLRRIGDETALCFRRGARNQI

SEQ ID NO: 6983 - protein, 174 aa, Brassica napus
  Clone ID: BRANA-23APR03-C3557_1.p
MGGEEDKEKGFFGYPPAGYPPGPGAYPPAGYPPQQAYPPPPPGAYPPQPGYPPGAYPPPPGAYPPAPGYGGYPPAPGHAGYPPAGYPPHHSGHAAGIGGMIAGAAAAYGAHHIAHSSHGPYGHAAYGHGFGHGHGYGYGYGHGKFKHGKFKHHGGKFKHGRHGMFGGGKFKKWK

SEQ ID NO: 6984 - protein, 259 aa, Brassica napus
  unsure (1)..(259): unsure at all Xaa locations
  Clone ID: BRANA-23APR03-C3560_1.p
MTDDRVYPASKPPGVAGATANPTFPATKAQLYSANRPAYRPPAPRRRTHSRGCCCRCCCWTIFVIILLILLVAAASAVVYLIYRPQRPSFTVSSLKVSSLNLTSSTHLATAISLSVVAKNPNKNVGFSYDAADVTVYRVSPGDDDVVIGKGSIASFVHGKKNTTLLRSTVGSPPGDLDQLSAGKLKGDLKXKRGVAVKIVLNTKVXVKMGAVKTPKSGIRVTCEGIRAVAPTGKKATAAVTXAAKCKVDLRFKVLKFXF

SEQ ID NO: 6985 - protein, 234 aa, Brassica napus
  Clone ID: BRANA-23APR03-C3561_1.p
MMSEGGAPSKYVKLTKEQGPVDEVNPGELNQPIQVPHLAVHKCNECGQTLPENFEAPADEPWTTGIFGCTEDMSSFWQGLFCPSVLFGRVYETLSDEETSWTKACICHSIVVEGGLTVASIAACAPGIDPHTTFLMWEGLLFVWWMCGIYTGNVRQTLQRKYHLQNSPCDPCMVHCCLHFCAVCQEHREMKNRLSDNFVMPMTVVNPPPVQEMSASNDSVPVSHHGSELEMRPL

SEQ ID NO: 6986 - protein, 164 aa, Brassica napus
  unsure (1)..(164): unsure at all Xaa locations
  Clone ID: BRANA-23APR03-C3590_1.p
MSSSSFVSSCSSILRIGDARSGNSRASSFTFQPQVSCGIQRDDNGRRIWRRRTLTKKDDMLRYKLQRVPFVEEQVRKIQEVGKVMTMDIERLLLSEDNRFEFVNSVAAEATEYVEKNRDEYGGTKKAIFHVLSNRVNDLGFDRPEAYXSDPYKPGPGYLKEYYT

SEQ ID NO: 6987 - protein, 200 aa, Brassica napus
  unsure (1)..(200): unsure at all Xaa locations
  Clone ID: BRANA-23APR03-C3652_1.p
MDTKSSEESSIETEPMETSTGVDTSLLGKRKLEETDDQEDSGEEEVDGDEEEEEGSDFYWEKDSFDGREYHPSDDSEYSDEDLQERARYYXRTVIETKGFFESSGKIPFYTWSGIVVASHRDLETKMYGGITGREFNVKFEHVLRANFDPGAKTKYYITFAARESDSPDAPLVEYQAKAVWSAGITYPIFCRPAPPSPKH

SEQ ID NO: 6988 - protein, 222 aa, Brassica napus
  unsure (1)..(222): unsure at all Xaa locations
  Clone ID: BRANA-23APR03-C3653_2.p
MPPGAKKRKAAKKKQQQQEASSPQTNLIPTTNHESREEDAVRTDKDTDERIEITDSSRDRDKKNSSSSSNSSSSSSSDDESGEVKKKESGESVSEAVTVSSVPNQPIPIAGDAPFMGSTXANXLVESIGLMDSTTPPSGTLTSDESSLASDEVKQASSSAVDPRVRETEGKTSAPVPEGSKESGATSSHEEEASVLPMHGVAQRTSWLSCCGLFDVVTGSSR

SEQ ID NO: 6989 - protein, 165 aa, Brassica napus
  Clone ID: BRANA-23APR03-C3666_1.p
MAETFSRGDAQYWPIYGSSNTTERNSPYASLIRLLRSHSPTSSQLFGFLALFISGGILLFLLGVTVTVVGIGFVVFLPLIIISSPVWIPVFIGVGGFLSVAGFLVGTLAVVSWAYRYFRGRHPVGSDQMDYARGRIYDTASHVKDYAREYGGYFHGRAKDAAPGA

SEQ ID NO: 6990 - protein, 172 aa, Brassica napus
  Clone ID: BRANA-23APR03-C3687_1.p
MALFSAALPLLLLFLSVSSPSVSGNTAQSVECSAVIMTLTKCLPFVTIGSQVEKPETACCSVLKTVLDTKAECLCEGLKSSAAAGINLNLTKAGTLPDACQLKAPPMPACALFAKPPASAPAPVPAARPLNGSGPSSNSAPAPSPSHSNHGSSISVLSLAISGALVIMFARI

SEQ ID NO: 6991 - protein, 158 aa, Brassica napus
  Clone ID: BRANA-23APR03-C3688_1.p
MGTGREASVSLDGVRDKNMMQLKKLNTVLFPVRYNDKYYADAISSGEFAKLAYYSDICVGAIACRLETKGGTMRVYIMTLGVLAPYRGIGIGSKLLNHVLDMCSKQNVSEIYLHVQTNNEDAIKFYKKFGFDITDTIPDYYINIEPRDCYVVTKSFAQ

SEQ ID NO: 6992 - protein, 629 aa, Brassica napus
  Clone ID: BRANA-23APR03-C368_1.p
MSSTYARFDTVFLLSRFAGAKYSPLWPSSSSSSHSSLLSSGIHLRAKPNSRLRSVTGASSSSSGPIIAGSESIEIKSLPTKPIEGQKTGTSGLRKKVKVFMQDNYLANWIQALFNSLPLEDYKDATLVLGGDGRYFNKEASQIIIKIAAGNGVGKILVGQEGILSTPAVSAVIRKRKANGGFIMSASHNPGGPEYDWGIKFNYSSGQPAPESITDKIYGNTLSISEIKVAEIPDIDLSHVGVTKYGNFSVEVIDPISDYLELMEDVFDFDLIRGLLSRSDFGFMFDAMHAVTGAYAKPIFVDNLEAKPDSISNGVPLEDFGHGHPDPNLTYAKDLVDVMYRDDGPDFGAASDGDGDRNMVLGNKFFVTPSDSVAIIAANAQEAIPYFRAGPKGLARSMPTSGALDRVAEKLKLPFFEVPTGWKFFGNLMDAGKLSICGEESFGTGSDHIREKDGIWAVLAWLSILAHRIKDKKPGEKLVSVADVVNEYWATYGRNFFSRYDYEECESEGANKMIEYLRDIVAKSKAGENYGNYVLQFADDFSYKDPVDGSVASKQGVRFVFTDGSRIIYRLSGNGSAGATVRIYIEQFEPDVSKHDVDAQIAIKPLIDLALSVSKLKEFTGREKPTVIT

SEQ ID NO: 6993 - protein, 187 aa, Brassica napus
  Clone ID: BRANA-23APR03-C3700_1.p
MDGGTEMYGGLETMQYVRRHHQHSCREDQCTSALVKHIKAPLHLVWSVVRRFDEPQKYKPFVSRCTVIGDPEIGSLREVNVKSGLPATTSTERLELLDEDEHILGIKIIGGDHRLKNYSSIVTVHPEIIEGRPGTMVIESFVVDVPQGNTKDETCYFVEALIRCNLKSLAHVSERLASQDNITSFST

SEQ ID NO: 6994 - protein, 258 aa, Brassica napus
  unsure (1)..(258): unsure at all Xaa locations
  Clone ID: BRANA-23APR03-C3705_1.p
MKISHVPCLEDNYSYLIIDESTGDSAVVDPVDPEKVIQSAEQHSANIKFVLTTHHHWDHAGGNEKMKQLVPGIKVYGGSLDKVKGCTDAVDNGDTLSLGHDVNILALHTPCHTKGHISYYVXGKDGETPAVFTGDTLFVAGCGKFFEGTAEQMHQSLCVTLASLPKPTQVYCGHEYXVKNLEFALTVEPNNEKIQQKLSWARQQRQANLPTIPSTLEEELETNPFMRVNNPEIQEKLGCKSPIDTIRVIRNKKDQWKG

SEQ ID NO: 6995 - protein, 226 aa, Brassica napus
  Clone ID: BRANA-23APR03-C3710_1.p
MASCAISNPIHSFKILKRSPYNSLFGWNSGEKIDNPRSAQKLVYHDDVQLPFSLSELKCCYKATIDGFSATKFHERCDFQGPCVIIAYTNDMSFKFGGFSPEGYRSTDDYYDTFDAFLFYWLDDSDEPIVLPKVGGSGAALFDYARGGPQFGADGLFIGPPLAPVMGGFAGPDTNSGIGDLRMAKSRLGLSYAKRKDGKESIFGDESKVTLDDVLVFCSPYIASLY

SEQ ID NO: 6996 - protein, 352 aa, Brassica napus
  Clone ID: BRANA-23APR03-C371_1.p
MGSNEEGKTTQSDKPAQVQAPPPPPEQSNVHVYHHDWAAMQAYYGPRVAITPQYYNSNGHAAPPPPYIWGSPSPMMAPYGTPYPPFCPPGGVYAHPALQMGSQPQGPASQATPVVATPLNLEAHPANSSGNTDQGFMTKLKEFDGLAMSISNNKSGSGEHSSEPKNSQSSENDDSSNGSDGNTTGGEQSRKKRSREGSPNNDGKPSSQIVPLLRDESEKHAVTMGTPVMPTAMDFPQPFPGAPHEVWNEKEVKREKRKQSNRESARRSRLRKQAETEELSVKVDALVAENMTLRSKLGQLNDESEKLRLENQALLDQLKAQATGKTENLISGVDKNNSVSGTVVVRMRNSNS

SEQ ID NO: 6997 - protein, 226 aa, Brassica napus
  unsure (1)..(226): unsure at all Xaa locations
  Clone ID: BRANA-23APR03-C37488_1.p
MSTPATAGRGSITHVIFDMDGLLLDTEKFYTEVQEIILARFNKTXDWSLKAKMMGRKAIEAARIFVDESGISDSLSAEDFLVEREAMLQELFPTSELMPGASRLIKHLHAKNIPICIATGTHTRHFDLKTKRHNELFSLMHHVVRGDDPVVAXRRFKDGPVDPQKVLVFEDAPSGVLAAKNARMNVVMAPDPRLDISHQDVADQIMTSLLDFKPEEWGLPPFEDSN

SEQ ID NO: 6998 - protein, 168 aa, Brassica napus
  Clone ID: BRANA-23APR03-C3751_1.p
MGALGTLIDAILFVCFALMAVIGPLIDGQTALPKSIFPAFLTDLKISYFAAFGDYLLTEKPHFLVGLVWHELVFLWPLSIANLYAILAGNSWFGTTCLLYVPSLVTSMAAILGEMIGSGKASERLLMMYVPFMGIGILAVFRGLVSSSTKSTGSVGKRYTIMPRRKLA

SEQ ID NO: 6999 - protein, 273 aa, Brassica napus
  Clone ID: BRANA-23APR03-C37569_1.p
MRHNCCHLSFASVLKILNFLQAFIGISIIIYSIWMLDQYNRHVPVDPPPSQPPTASSPDSPYLFSTSRNQINSVSDSFQKPIGLVLGDSGLNLRSLDLPAPWFIYCFMAIGILVCIVTIIGFIAAEAINGCCLCFYSILKTLVIILEAALVGFIAIDRHWEKDLPYDPTGELTSLRAFIEANIDICKWVGVGVVAVQLLSLLLAMVLRAMVSPRQSDLDDEDDYENPINRARENLLAPQANQTSSGSSNIDNWRSRIREKYGLNNGQSQSPSV

SEQ ID NO: 7000 - protein, 249 aa, Brassica napus
  Clone ID: BRANA-23APR03-C3758_1.p
MAHLPQSLYSAARPEFPYPGKSVQPKWSRFPVSVRCASTESLTSLTQNAVETELKYMVSQHGWGVRRLRRDDEEEIRRVSSVQAEAFHIPLALFNDFFFLFFQAEVLSGLLYKLKNSPPDRYACLVAEQTSETDTSSSSSVVGVVDITVQTENSVLRHFPGEEEYLYVSGLAVSKAQRRKKMASTLLKACDVICYLWGFKLLALRAYEDDAAARNLYSNAGYSVVESDPPWTSTWIGRKRRVLMTKRIS

SEQ ID NO: 7001 - protein, 197 aa, Brassica napus
  unsure (1)..(197): unsure at all Xaa locations
  Clone ID: BRANA-23APR03-C3766_1.p
MEREGEEEKKKEGSXRYWVREATADAAPPHTHPQKLTNNDVVAPNAPALGSLWNQAGTWEEKNLTKWATDRLKELLRSVGSLQFSSGKAEIVDVNRCVGDAFLVTVRNKKRVGYTYELSLKVQGEWSFEEETKKVKGSLDVPEFSFGELDDLEVDVKVSDDKELSQQLKQRIRLDLKQFLEPIRLKLGQFEQELKDR

SEQ ID NO: 7002 - protein, 126 aa, Brassica napus
  unsure (1)..(126): unsure at all Xaa locations
  Clone ID: BRANA-23APR03-C377_7.p
MAPKAGKKPAEKKPAAAAAAEKPAEEVAEKAPLENKPKAGKKLPKEAIGATXKNAPXVPTACCSGVTSLNNMARTTPDRQQACRCLVGAANALPTINVARAAGLPKACGVNIPYKISKTTNCNSVK

SEQ ID NO: 7003 - protein, 239 aa, Brassica napus
  unsure (1)..(239): unsure at all Xaa locations
  Clone ID: BRANA-23APR03-C3787_1.p
MPKQVSFCISSFFLKANSYPTNRGTVKTSLPTIYSEMAKPSSSSSGGGTNLASCAVAAVFIVFAIIAAVTVYLTVFRPRDPEISVTNVKVPSFSVANSSVSFSYSQLSSVRNPNRAAFSHYNNRIELFYYGNRIGFIFIPAGEIEPGQTKRMDASFSVDSFPLASSSASRISAADFQRPGSGLVVGEESRAGSTVEIESKLEMAGRVRVLGLFTHQIAAKCNCRIAISTVDGSIVXVRC

SEQ ID NO: 7004 - protein, 315 aa, Brassica napus
  unsure (1)..(315): unsure at all Xaa locations
  Clone ID: BRANA-23APR03-C3806_1.p
WPNALRYFELNTGAKIPSVGLGTWQASPGLVGDAVAAAVKIGYRHIDCAQIYGNEKEIGTVLKKLFEDNVVKREELFITSKLWCTDHDPQDVPEALKRTLQDLQLDYVDLYLMHXPVRMKKGSVGAKPENLLPVDIPSTWKAMEALHDSGKARAIGVSNFSTKKLADLMELARVPPAVVQVECHPSWRQTKLREFCKSKGLHLTAYSPLGSPGTTWLKSDVLKNPILNTVAKKLGKSAAQVALRWGLQMGNSVLPKSTNEGRIRENFEVFDWSIPDDLFSKFPEIEQARLLTAPFFVHETLSPYKSLEELWDGEI

SEQ ID NO: 7005 - protein, 212 aa, Brassica napus
  unsure (1)..(212): unsure at all Xaa locations
  Clone ID: BRANA-23APR03-C3807_2.p
MADSEPIREEQQETLHHQMIPSELTHDEFAESTERXSITEFHTYQLGPGRCSSLLVQRIKSPPETVWSVVRRFDRPQTYKHFIKSCSVDEGFEMRVGCTRYVDVISGLPANTSRERLDLLDDDRRVTGFSITGGEHRLRNYKSVTTVHGFEREGRISSVVLESYVVDVPAGNTEEDTRLFADTVVKLNLQKLASVAEGMDRNSGDGRNSPVM

SEQ ID NO: 7006 - protein, 189 aa, Brassica napus
  unsure (1)..(189): unsure at all Xaa locations
  Clone ID: BRANA-23APR03-C3824_1.p
MDPAGASVANDIGGEGEKFAVGNIYSVKVITGDEFRGIVMAYDPIPNFVVFEEGSKPRAGHSKNTRMVNASFITGLSYLGKTEDPLLTDNCCVNLDSLRAKEALAIRQAEAEAERLGVGVTAXEAQSIFDSLSKTLPVQWENSDILVMKEVRVRSPYLSDCVFGGTDAANNRVKKVLELVRRRLQLVGT

SEQ ID NO: 7007 - protein, 167 aa, Brassica napus
  Clone ID: BRANA-23APR03-C3839_1.p
MQSDVTTNPRASDDSSSSDVEAEISDGDGFLPIDRPPTVSEEDEVSLLMRAEAYQGYMKELPLPTSRGSLIPFTRWVGLGMSIKELYGQPLHYLTNVLLQRWDQARLGGDSEDQSLDLIIHPLKAEATIWLVEEIHRLTSSHLQIAELWGSDPMYHMLIDPIIPKLQ

SEQ ID NO: 7008 - protein, 238 aa, Brassica napus
  Clone ID: BRANA-23APR03-C3857_1.p
MLAIFDKKVAKAPEALTSQEGGSVCALKDGFLPNHFASIYPGAVTTNLGSSGLIACSLHKQNPLLPRLFAVNDDMFCIFQGHIENIPFLKQQYGLTKTATEVTVVIEAYRALRDRGPYPADQVVRDFQGRFAFMLFDCTTKNVFLAADADGSVPLFWGTDGEGHLVLSDELETVKKGCFFTSSGGLRSFEFPLNELKPVPRVDSSGQVCGVLFKVDSEAKKEGAMPRVGSVQNWSQQI

SEQ ID NO: 7009 - protein, 167 aa, Brassica napus
  Clone ID: BRANA-23APR03-C3890_1.p
MVNYVLKITADLENLTNLQPSGGCDDPNFPYLFKLKCEQCGEVTQKETCVTLNETFTPPGGRGTCHLVQKCKFCGREGNVTMIPGKGRPLTQEDSEAGEHAPLMVFDCRGYEPIDFGFGGYWKAEAESGTKFDEIDLSSGEEFTEYDEKGECPVMISNFRASFTVTK

SEQ ID NO: 7010 - protein, 243 aa, Brassica napus
  unsure (1)..(243): unsure at all Xaa locations
  Clone ID: BRANA-23APR03-C3902_1.p
MAILCSVTAVIRPSSSPLLKSSGCDSRSSFSRVGIYANTKRALRVTSEADPETGASLVREAQQTNVRPLGSERPRRMXDEEEAKGPKICDTTWYPKTSYQVNTDYPLDLVHPSEKTFRRLAPASDNHILGKNLSLFTPSVDMGAFVIVVNAEKVAVSGKKRNQKLYRRHSGRPGGMTVETFDQLQQRIPERIIEHAVRGMLPKGRLGRALFNHLKVYKGPDHPHEAQKPLDLPIRDKRIQLQK

SEQ ID NO: 7011 - protein, 224 aa, Brassica napus
  unsure (1)..(224): unsure at all Xaa locations
  Clone ID: BRANA-23APR03-C3911_1.p
IHLFSPSSLRDRSSEETYSYCRITMSTQASSFNGNLKKSWASKKRIKLGGLRWRVFESQGQVLGRLASQISTVLQAKDKPTYCPNRDDGDICIVLNAKDIGITGRKLTDKFYRWHTGYVGHLKERSLKDQMAKDPTEVIRKAVWRMLPTNNLRDDRDRKLRIFEGSEHPFGDKPLEPFVMPPRTVREMRPRARRAMIRAQKKAEQAENGGAEVKKGKKRAPXQV

SEQ ID NO: 7012 - protein, 108 aa, Brassica napus
  Clone ID: BRANA-23APR03-C3915_1.p
LGFDSGKRRLLQRRLGRLFFRQAMASSVLLGWICLRHAMASKAPFMAGLSFNFHRSSPMSVLVQIRFFWFHFLVFSFSLEHFKDLLPLTFILILSFLFRWNARLDIRR

SEQ ID NO: 7013 - protein, 180 aa, Brassica napus
  Clone ID: BRANA-23APR03-C3940_2.p
MSNELCPERPLFGGAISSAFPQRFQDASNIRQVPDHQEVFVDPSRDESLIFELLDFKPDVGDIGSASWFLHDLAREQDAQGFKLIEQSHVIDVPGLSYRNIPAIATTAIGEMAISKGRQGREAQNLLKVYVANIRLKGVETDVLVTAYEPILINPLSESANAVGSGLAVPASQSGIMPIP

SEQ ID NO: 7014 - protein, 165 aa, Brassica napus
  Clone ID: BRANA-23APR03-C3997_1.p
MEELAGLLRIRVKKGINLARRDSLSSDPFVVITMGTQKLKGRTVENNCNPEWNEELTLALKHPNEPVTLIVYDKDTFTSHDKMGDAKIDIKPFLEVHKLGLQELPDGTVIKRVLPTKENCLSEESRIVYHNGKIVQDMILVLRNVECGEVEIQLEWIEIPGGRGL

SEQ ID NO: 7015 - protein, 291 aa, Brassica napus
  unsure (1)..(291): unsure at all Xaa locations
  Clone ID: BRANA-23APR03-C39_1.p
MAMAAAVIVPLGILFFISGLVVNXLLQAICYVLIRPLSKNTYRKINRVXVAETLWLELVWIVDWWAGVKIQVFADNETFNRNGQRXALVVCNHRSDIDWLVGWILAQISGCLGRSIAVXTKYVFPVSTRQTSAPPTMLRLFKGQPSVVHVHIKCHSMKDLPEPEDEIAQWCRDQFVAKDALLDKHIAADTFAGQKEQNIGRPIKSLAVVLSWACLLTLGAMKFLHWSNLFSSWKGIALSAFGLGIITLCMQILIRSSQSERSTPAKVAPAKPKDNHQSGPSSQTEVEEKQK

SEQ ID NO: 7016 - protein, 180 aa, Brassica napus
  Clone ID: BRANA-23APR03-C4002_1.p
MGSRLGRRVVHFANLPIKLLMPTKLTNIHEFALRTIPSATKIEIKRVLESLYGFEVEKVNTLNMDGKKKKRGGLLIAKADYKKAYVTLKNPLSISRDLFPVKFIEEDRKSKVKGSSFVEEEDDKKSHWLDQKERREVGGYGNGKGRRGGGGERSASPAKGVASAAAVAKFPWSSMRFGGK

SEQ ID NO: 7017 - protein, 139 aa, Brassica napus
  Clone ID: BRANA-23APR03-C4031_1.p
MSDPYERAKGGRLAFKGGDLATIKKKKPKKKKKNKDKLDDGAAPNVEKMTPDDGPATSSAAADGKDNDIYSIDAAKKRKYDELFPVEAKKFGYVPKSNFDSVAEALDDRVKKKADRYCKIESSLFVESTQLLFGFPTLL

SEQ ID NO: 7018 - protein, 207 aa, Brassica napus
  unsure (1)..(207): unsure at all Xaa locations
  Clone ID: BRANA-23APR03-C4044_1.p
MAAFEESSDLDAIQEHLLEDFLVADGFMGDFDFNASFVSXGLWCIEPVMNQVPKQEPDSPVLDPDSFVREFLQVEAESSSEQNSSPHETDQSVSPRKEAKRLEEEEEPRHYRGVRRRPWGKFAAEIRDPAKKGSRIWLGTFESNVDAARAYDCAAFKLRGRKAVLNFPLDAGKYEAPVNLGRKRKRSDVQEELQRSQSNSSSSSSDL

SEQ ID NO: 7019 - protein, 204 aa, Brassica napus
  Clone ID: BRANA-23APR03-C4071_1.p
MANEKLHEMSRLSSQICNQISSVFSNPTDPYPPPLDLLVTELTGVSRRGARVFLHGVGREGLMLKAFAMRLFHLGLSSHLVSDMTTPPISSPDLLIASAGPGGFSTVDAICSVAKSAGAKVVLITAQPETGSCVKHATDVWYVPAQTMASDGGGATEKGERPLLPMGSVYEGALFVLFEMVVYKLGEVLGESPESIRCRHTNLE

SEQ ID NO: 7020 - protein, 225 aa, Brassica napus
  Clone ID: BRANA-23APR03-C4097_1.p
MPSTSLANGNAGDRPPDVVADDKPGVSMMEQLVPEITTHALSYLDYPSLCRLSMTNSLMRKAANDDNAWKALYHKDFTLEQDGITPVNGWKAYYATTRAIISVNTGFFDIIRERSLPEMAQLWLNSDYVKCIHASGELFSGYSEVMQSWQLCFNWEQGFDFQVHNVRTRILTDMAWVTMKAYLNVDAGPFLITNVFEHHNGRWHMVHHHSSVMLIDGVNQQVVVH

SEQ ID NO: 7021 - protein, 221 aa, Brassica napus
  Clone ID: BRANA-23APR03-C4146_1.p
MVTLSFPSPSLSFVESGTCSKSTHVSRVLFSGPHGESSEPSKILRDVHISERLMEDFTELARENTDKDLETCGTLAAFLERGVFYVTTLIIPKQESTANSCQAMNEVDVFSIQNERELYPVGWIHTHPSQGCFMSSVDLHTHYSYQVMVPEAFAIVVAPTDSSRSYGIFKLTDPGGMEVLRGCSETGFHPHKEPEDGKPVYEQCSNVYKNSNLRFEIFDLR

SEQ ID NO: 7022 - protein, 201 aa, Brassica napus
  Clone ID: BRANA-23APR03-C4169_1.p
MATLISGAVLSGLGSTFLIGRRSGAGRGEVRFGWKNVIIAPQRKKSWVMAAVKGDDGNSKLDPKWLDDASEKASEYVKEKGSEVGHLTAHEGQEGLDHIQRAKHYFMEKAGVAMDMLTENAHIASDFVAEKANVMEEEAVSITEKARDFVVEKTGEAKDFIVEKAGDAKELATDMSKRTAIYVGEKAAEAKEAILPPKTEE

SEQ ID NO: 7023 - protein, 161 aa, Brassica napus
  Clone ID: BRANA-23APR03-C4181_1.p
MASDIQHRPVYGSTTVPRSTNINNPVASFLRQLQSKAPNHSGQLFGLLAFFISGGILLLLTGITVTAFVLGFIAFLPIIIISSPIWIPLFLLVTGFLSLAGMVFGTAALISWTYRYFKGMHPVGSDQVDYARSRIFDTAAHVKDYAGVYFHGKQKDAAPGA

SEQ ID NO: 7024 - protein, 256 aa, Brassica napus
  unsure (1)..(256): unsure at all Xaa locations
  Clone ID: BRANA-23APR03-C4195_1.p
MEMMQQEEAAAAAANKAGSEVTQNQTIYINNLNEKVKLDEVKKSLKEVFSAYGKIVEVLAFKTLKHKGQAWVVFDNPESASNAISKMNGYPFYNKPMRIQFAKTKSDVIAKADGTFVPREKRKRHEEKGGKKKKEQHHDSTRVAMPAYPGVYGSAPPLSQVPYSGGGGGVKSNLPEAPAPPNNILFVQHLPHDTTPEIXQNLFDKYHGFKEVRMVAAKPGIAFVEFADEMQXTVAMHGLEGFTIQQTPMRITYAKK

SEQ ID NO: 7025 - protein, 229 aa, Brassica napus
  Clone ID: BRANA-23APR03-C4196_1.p
MASLKLSPSSPISIPKSSGSVGRRGVSFLVRAEQSPSSNSDLQDKCQRRRVVVTLGVVAPWISLLSKAPSSFAAESKKGFMTVSDNKDAYAFVYPFGWQEVVIEGQDKVYKDVIEPLESVSVNLIPTSKQNIKDFGPPKEIAETLVKKVLAPPNQKTTLIDASEQEVDGKTYYQFEFTAQARNYTRHALGVITVFNGKFYTLTTGANERRWEKMKDRLHTVVDSFKITV

SEQ ID NO: 7026 - protein, 331 aa, Brassica napus
  Clone ID: BRANA-23APR03-C419_6.p
MDKTTTLLLFFFLFTFLTTSFSKNLCNQDDKTTLLKIKKALNNPYHLASWDPQTDCCSWYCLECGDATVNHRVTALTIFSGQISGQIPPEVGDLSYLQTLVFRKLTNLTGQIPRTIAKLKYLRSLRLSWTNLTGPVPGFLSELKNLQWVDLSFNDLSGSIPSSLSLLPNLVSLDLSRNKLTGSIPESFGSFPAKVPDLYLSHNQLSGYIPKTLGNLDFSKIDFSRNKLGGDASMLFRANKTTWYIDLSRNMLQFDLSRVVIPKTLGILDLNHNGITGNIPVQWTEAPLQFFNVSYNRLCGHIPTGGTLQEFDTYSYFHNKCLCGAPLDSCK

SEQ ID NO: 7027 - protein, 159 aa, Brassica napus
  Clone ID: BRANA-23APR03-C4206_1.p
MQSMKETASNIAASAKSGMDKTKATLEEKAEKMTTRDPLQKEMATQKKEGRINEAEMQKREVREHNAVMKEASGAGTGTGLGMGTATHSTTGHVGHGTGTHQMSALPGHGTGQPAGHVVDGTAVTEPIGTNTGTGRTTAHNTRVGGGTTGYGTGGGFTG

SEQ ID NO: 7028 - protein, 195 aa, Brassica napus
  unsure (1)..(195): unsure at all Xaa locations
  Clone ID: BRANA-23APR03-C4211_2.p
KCPDSCRRVRLSKTLIPHGRFFLRRFNEPASKKTAAPSLVCFNRRPYSSKPHLIEIDLDSSSSATSKAEAEAAVLKKLNEFVRRIVVQNSTPDWLPFSPGSSFWVPPHQNTAAKIANLVDQVTHPLTEEEVLSLSSPSGSPCSSFFTPPXDDSSSKQEVEGSTELNVPGNEMLEVKLAHFPDPFYSFKHGGDDDE

SEQ ID NO: 7029 - protein, 188 aa, Brassica napus
  unsure (1)..(188): unsure at all Xaa locations
  Clone ID: BRANA-23APR03-C4211_3.p
MSRFLSKTLIPYGRFFLRRFNEPALRTTSQSLVCFSRRPYSSKPHVIEIDLDSSSSATSKAEAEAAVLKKLNEFVRRIVVQNSTPDWLPFAPGSSFWVPPHQSTAAKIANLVDRVTNPLTEEEAFSLFSLSGSPRSSFFIPLAXDGSSSTQKVEGSVELNIPGNEMLEVKLAQFPDPIYLLEHGDDDE

SEQ ID NO: 7030 - protein, 137 aa, Brassica napus
  Clone ID: BRANA-23APR03-C4220_1.p
MDENTKSVSGNGRTELVKFIADSHAKLMKPAARYYYTLKDAIGCGKRRYTAVKVAEDMETGVYDKPLPCFGCGIGWFSFLLGFVFPPLWYYATFLYFGNYYRRDPRERAGLAASAITAMGFSFVLLVVFAFRWFYYL

SEQ ID NO: 7031 - protein, 892 aa, Brassica napus
  Clone ID: BRANA-23APR03-C422_1.p
MFCKEASSSLQTLNIAKSLSSEFTKPSALVNPLSAGHRYKLFPRPNLRGRCTVTTSKSDIDWIAKDNAKKIKVKGIITAKQGLLPSVGVTDLLGVSLLVELISAETDPRTLMEKDPVKDNARRVLLDAHGEDQYECVFDMPEDFGPVGAIRVLNQDLKEIFLKEMKLELPDGSVTFTFNSWVAPKSEDPTKRTFFSTKSYLPLKTPEPLKQLRKQELETLQGKNRERAGEFEKFERVYDYDVYNDLGSPDKDPELARPILGGLSHPYPRRCKTGRKPCDKDPSAETRKALEFYVPRDEEFTTVKGAQFTGTAVLAALPAVFPQIEAALLDPNTPFPHFKSIEDLFEVGIDLPKDAGLFPVIPKLAKAAAEADDLLQFDPPSLLDKDRFSWIRDDEFVRQTLAGLNPYCIQLVTEWPLQSKLDPAVYGDPNSLITCEIVEKEIRGVMSFDEALENKRLFMLDYHDLLLPYVNKVRELDDSTLYASRALFFLSDDSTLRPVAIELTRPQDVNSPQSRQVFTPGYDATSCWLWKLAKTHVISHDAGYHQLISHWLRTHCCMEPYIIAANRQLSAMHPIFRLLHPHFRYTMEINARARQVLINEGGIIESRFWPGKYSLELSSDVYDKLWRFDREGLPADLIGRGLAVEDETAEHGVRLTIPDFPFANDGLMLWDALKEWITDYVNHYYPDAEQVTSDEELQAWWSEVKNIGHGDKKDEPWWPELKTQDDLIEVVTTIAWVASGHHAAVNFGQYGYGGYFPNRPTTSRIRMPVEEPTEEELKEFYEDPEKTMLKTFPSKKQATQVMVTLDLLSTHSPDEEYLGEEPEASWVDEPVIFAAYERFKGRLQYLEGVIDERNVNVSLKNRTGAGVVKYELLKPISEPGVTGMGVPYSVSI

SEQ ID NO: 7032 - protein, 160 aa, Brassica napus
  Clone ID: BRANA-23APR03-C4238_2.p
MATGKSYNARPSHRFLGTDQPYYAANDSGFEFDESDLYSASDSPDFRRKISKPVRSVKKASNRPSTCGASSAAAASSLPVNVPDWSKILREEHRDNRRRSIVDDDGDWLDASGGRLPPHEFLAKTRMASFSVHEGVGRTLKGRDLSRVRNAIFEKIGFQD

SEQ ID NO: 7033 - protein, 126 aa, Brassica napus
  Clone ID: BRANA-23APR03-C4266_1.p
MKHLIRRLSRVADSANYSLLRSDSQRPSRRPPPPRRSKKHTSSVPEGHVPVYVGDEMERFVVSAELLNHPVFIGLLNRSAQEYGYEQKGVLQIPCHVLVFERIMESLRLGLAVPSDLQDLIGDETI

SEQ ID NO: 7034 - protein, 234 aa, Brassica napus
  Clone ID: BRANA-23APR03-C4276_1.p
MASPSVLEHRPASLDASADPPALFDGTTRLYTSYGCPYAQRVWITRNFKGLQEKIKLVPLDLGNRPAWYKEKVYPENKVPALEHNGKIIGESLDLIKYLDNTFEGPSLFPEDNAKREFGEELLKYTDTFTKTMWASLKGDPFTETAPVLDYLENSLYKFDDGPFFLGQFSLVDIAYIPFIERFQIALNELFKCDITVERPKLSAWIEEMNKIDAYVQTKTDSKEIVEIFKRKLM

SEQ ID NO: 7035 - protein, 267 aa, Brassica napus
  unsure (1)..(267): unsure at all Xaa locations
  Clone ID: BRANA-23APR03-C4278_1.p
MVQTKKNKKKKVHHSDDEEEDDTFYYRYSSVAAPPSHPTKPSSSSSKSSAPPSGSGGLAPSKSTLYVSNLDFSLTNSDIHTLFSTFGKVARVTVLKDRQTRRSRGVAFVLYVSRDDAGKAAKSMEGKILNGRKLTVSIAADNGRASEFIKKRVYKDKSRCYECGDEGHLSYECPRNQLGPRERPXPPKKRGRRREEEGEGEESRDWSGTDVTEEGVGEDNWASVVDNEAGERLRMREAEEEEERRRKRKEAAGKKVSYFSDESDDED

SEQ ID NO: 7036 - protein, 207 aa, Brassica napus
  Clone ID: BRANA-23APR03-C42_1.p
MKEEIQNETAQTLSQREGRMFSFLFPVLEVIKVVMASVASVVFLGFGGVTLACSAVALAVSTPLFIIFSPILVPATIATTLLATGLGAGTTLGVTGMGLLMRLIKHPGKEGAASAPAAQPSFLSLLEMPNFIKSKMLERLIHIPGVGKKSEGRGESKGKKGKSEHGRGKHEGDGKSKGRKGKSRGKDKDKKKGKGSRKGSSDDDESS

SEQ ID NO: 7037 - protein, 177 aa, Brassica napus
  Clone ID: BRANA-23APR03-C4301_1.p
MSRRVDASSWGAALVMVSPYTLSAIGIAISIGVSVLGAAWGIYITGSSLIGAAIEAPRITSKNLISVIFCEAVAIYGVIVAIILQTKLESVPTSKMYDAESLRAGYAIFASGIIVGFANLVCGLCVGIIGSSCALSDAQNSTLFVKILVIEIFGSALGLFGVIVGIIMSAQATWPTK

SEQ ID NO: 7038 - protein, 137 aa, Brassica napus
  Clone ID: BRANA-23APR03-C4309_1.p
MGCVDLINLTSTNIYRPVLTRTSNKPYITRGPSMAAIRAESVATEKLGIFIEKNPPESKLTQLGVRSWPKWGCPPSKFPWTYDAKETCFLLEGKVKVYPDGSDEGVEIEAGDFVIFPKGMSCTWDVSVAVDKHYQFE

SEQ ID NO: 7039 - protein, 226 aa, Brassica napus
  unsure (1)..(226): unsure at all Xaa locations
  Clone ID: BRANA-23APR03-C4342_1.p
MAASSTTTNILSLGSSSVHRFPPIHHHPRNHPPLRPSFPYKPSFNLSLKNPKTIAAAASASASASPTLSSAKPSPPFPFSESTKSITTLAVLAGIVTKSLIQKFSAAVVTLSPHIQASIRVSGPLFFAAARDRPAGYLNTPLTVVAAGLSKWLDIYSGVLMVRVLLSWFPNIPWDRQPLCAIRDXCDPYXNLFRNIIPPVFDTLDVSPLLAFAVLGTLGSIVNNSR

SEQ ID NO: 7040 - protein, 239 aa, Brassica napus
  unsure (1)..(239): unsure at all Xaa locations
  Clone ID: BRANA-23APR03-C4344_1.p
GDSFLRRGRENRNRGMGEASAAAELERLQIDILRRISVLESSILPESSSPSLPDDESQTVSRLSAILRSGGVKDISFKRVAPDYYDWPLESRRDVLGASSVDHLCKSIVLVNTQASSDIVDCSDRNNSKYYVVVVQYTARFNAEAVKNFLYSLNEGKIPKKRFNLRLAPEETSIELTGFEHNAVTCVGMKTSIPVILDEAXAKLRPDFXWLGGGXIDXKLGXRTFEFLDFVKPFVVPCS

SEQ ID NO: 7041 - protein, 169 aa, Brassica napus
  Clone ID: BRANA-23APR03-C4361_1.p
MKEDDVFPTNQKKDSSDSVLFGRGRYKFFAFAALMLLAFWSMFTGTVTLRLSTEDLNRLSEDIGIPTNHESLDVLEMEERERVVKHMWDVYTNSRRIKLPQFWQQAFVAAYEELTSDVPGVRDAAIGEIAKMSVARSISLDPTTPSRSMSARVLGRSFNKILHKPAASS

SEQ ID NO: 7042 - protein, 192 aa, Brassica napus
  Clone ID: BRANA-23APR03-C4362_1.p
EATMAESPVQVNLVPIEATSESFADYGQVIEASSDGDLFDHNDAQLDLSRGTPRFYIMRLEGRSFGFSTITHHANVTQCLGSVGGHVWYLGVAKPSLIEDADGERGTRVVESGSDGHLYAPPTVEEVRVFRFSGPKFVKLNRGTWHAGPLFSDSSMDFYNLELSNTNEVDHTTHSFKKKNGVIFRFEDNTTS

SEQ ID NO: 7043 - protein, 131 aa, Brassica napus
  Clone ID: BRANA-23APR03-C4381_1.p
MKEMQTSSVPPGRSLYLNLIVVVLALFASITMAESTGEASSEAKVHIIYTEKPTDEEPKDYHLRTLSSALGSEEAAKDALIYSYKEAASGFSAKLTPEQVTEISKQPGVIQVVPSQTYQLHKPVGAGFKLT

SEQ ID NO: 7044 - protein, 135 aa, Brassica napus
  Clone ID: BRANA-23APR03-C43976_2.p
MARPSRGRRSPSVSGSSSRSTSRSRSSLSRSVSRSRSRSRSLSSSSSSSPSRSVSSGSRSPPPPRGKSSAGPASRRGRSPPPSPSRKAAAPVQESLVLHVDSLSRNVNEGHLKEIFGNFGEVVHVELAMDRAVNL

SEQ ID NO: 7045 - protein, 245 aa, Brassica napus
  Clone ID: BRANA-23APR03-C4405_1.p
MAASSLQSLNPTFSQTLASPNTSPPFRSPFLRFNSSFNLKPLSTRSSSFIARSAAEPQERKTFHGLCYVVGDNIDTDQIIPAEFLTLVPSNPDEYEKLGSYALIGLPASYKDRFVQPGEMKTKYSIIIGGENFGCGSSREHAPVCLGAAGAKAVVAQSYARIFFRNSVATGEVYPLDSEVRVCDECKTGDVATVELREGDSVLINHTTGKEYKLKPIGDAGPVIDAGGIFAYARKAGMIPSAAAA

SEQ ID NO: 7046 - protein, 191 aa, Brassica napus
  Clone ID: BRANA-23APR03-C4415_3.p
MAATTLSIATTIRSSSHLTPASPHVFPSRPNTTAFPFRLGSSSPTLTHRATHLRPISAVEAPEKIEKIGSEISSLTLEEACILVDYLQDKFGVSPLSLAPAAAAVAAPGDGGGAAAAVEEQTEFDVVINEVPSNARIAVIKAVRALTSLALKEAKELIEGLPKKFKEGVTKDEAEEAKKQLEEAGAKVSIA

SEQ ID NO: 7047 - protein, 182 aa, Brassica napus
  unsure (1)..(182): unsure at all Xaa locations
  Clone ID: BRANA-23APR03-C4418_1.p
MNHWAVQPNAFAAGGDLRNSVSVVERDQTVVVCPKPRRIGLRNPSLHHHPXSLRCYISHQQVEVCESKAETDILDIILTKDGYGTEQVHQTQVLDSPSPFLCGSPPSRVANPLTQDARFRDEISSSPISTLLGQPPSSPSSSSSGRKGGCVRGNFGNSPAVRIEGFDCLDRDSRNCSIPALA

SEQ ID NO: 7048 - protein, 151 aa, Brassica napus
  Clone ID: BRANA-23APR03-C4450_2.p
MASSSARGELEKMGIDQLKALKEQADLEVNLLQDSLNNIRTANARLESAAGALNDLSLRPQGKKMLVPLTASLYVPGTLDEADKVLVDIGTGYFIEKTMEDGKDYCQRKINLLKSNYEQLFEVLAKKKSVADISGMILQGKVRQLQAATTS

SEQ ID NO: 7049 - protein, 231 aa, Brassica napus
  Clone ID: BRANA-23APR03-C4506_1.p
LSVCFWFARDPVYSFFAVQEMLGSSLASPLATLGPAKCFRHSAGDSVTCTSSVLPLRLNLSYHGVAGGVRTSRGPRNKWIVVCSPTQVETSGDEPKTWEECKEALSRFDFSVEEQDKILGKAFGHIHSPYWTEERVKENPKVEALNHVLEFLRGLGLSDEDVHKVLKKFPEVLGCSLEEEMKPNIGILENQWGITGKSLRSLLLRNPKVLGYNVDCKGDCIAQCTRCWVRF

SEQ ID NO: 7050 - protein, 230 aa, Brassica napus
  Clone ID: BRANA-23APR03-C4507_1.p
MPVTSSSQSFSSFVNGWLIRHRYFVEQLTCASSLDETNEEQQQSLVTQFLSHCLQYYQEKSSAVSLAGDNVFTFFCPPWFTSYARLILWVGDFKPSLVFKLTDSTVDDLTRHQRDRISSLRSETRRRERDVMRDFALVQQSVADPPVMLAARRVGARGMVDGEESDLEEAMEVLKRGMARAMNSADELRCSTVGKVVEILTPSQAVKVLRTIGELHLRLRELVGLERHHQ

SEQ ID NO: 7051 - protein, 134 aa, Brassica napus
  Clone ID: BRANA-23APR03-C4508_1.p
MDMGEEKEVVSLGTLSKKMDDFAKARDWEKYHSPRNLLLAMVGEVGELSEIFQWRGEVERGLPDWKEEDKVHLGEELSDVLLYLVRLSDVCGVDLGKAALRKLELNAIKYPAPKQTDHCVGEHSSDNTKLTEDN

SEQ ID NO: 7052 - protein, 116 aa, Brassica napus
  Clone ID: BRANA-23APR03-C4525_1.p
MATSLLTSTPLSSSFLPVPRNLSVHGHCPSQRTLWFGLKQSSLCVRAAKLPQGVIVPKVEPKFVPAFLGFTFTAEIWNSRACMIGLIGTFIVELILNKGILQIIGVDVGKGLDLPL

SEQ ID NO: 7053 - protein, 214 aa, Brassica napus
  Clone ID: BRANA-23APR03-C4538_1.p
MASSQDQSALDLITQHLLTDFPSLETFVSSIHQSTTSTLSQRKPSLATISVPTTAPVVQEDDHRHYRGVRRRPWGKYAAEIRDPNKKGVRVWLGTFDTAVEAARGYDRAAFKLRGSKAILNFPLEAGKHEDNNTVALKSKRKRPETQDENHGRNLISHKAVIREETEAQGEACPLTPSSWMGFWDGVDGIGTGLFSVPPLSPYPSLGHSQLGVK

SEQ ID NO: 7054 - protein, 210 aa, Brassica napus
  unsure (1)..(210): unsure at all Xaa locations
  Clone ID: BRANA-23APR03-C4553_1.p
MDNPIQEILEKQLLTVAKAMEDKLDEEIASLEKPDEDDLEVLRERRLQQMKKMAEKRKRWMSHGHGEYTEIPSEKDFFAAVKASERVVCHFYRENWPCKVMDKHLGILAKQHIETRFVKIQAEKSPFLAERLKIVVLPTLALIKNTKVDDYVVGFNELGGKDDFSTEDLEERLARAQVIHYEGESXHKPKXTTQTKRSVRQSARSDSDSE

SEQ ID NO: 7055 - protein, 114 aa, Brassica napus
  Clone ID: BRANA-23APR03-C45589_1.p
MGCSSSTAKAEGRKEKIRRPKSWKHPQPISRAELTQMREEFWDTAPHYGGKKEIWDALRAAAEEEDLSLAQTIIESAGVIVHNADLTIYYDEKGSKYELPKYVLRDPSNLIRTK

SEQ ID NO: 7056 - protein, 144 aa, Brassica napus
  unsure (1)..(144): unsure at all Xaa locations
  Clone ID: BRANA-23APR03-C4558_2.p
MKLGARLIALVLLLSFTIVLTKAEXITLTPETFSDKVKEKDTAWFVKFCVPWCKHCKKLGNLWEELGNAMEGDDEIEIGEVDCGKSRDVCTKVEIHSYPTFKLFYNGEEVSKYQGKRDVESLKTFVVEETEKAAEKAQLEDKEL

SEQ ID NO: 7057 - protein, 219 aa, Brassica napus
  Clone ID: BRANA-23APR03-C4579_1.p
MAKSLLCPSALNSFISSNLSSSTSSKNNQIACSGNIKNQTPSLSWNRRELSLGFMSTFLAVGLVGNNDRRSRDANAAILEADDDEELLEKVKQDRKKRIERQAVLNSAVKEKGYLQDLVYNLSKVGQAIENNDLPAAGLVLGNGSDTEWVKTANLAFTKLSASPEENTEVETFNSSLASLVTSVNKNDLESSKLAFVSSASAFEKWSSLTGLLGQLKGI

SEQ ID NO: 7058 - protein, 185 aa, Brassica napus
  Clone ID: BRANA-23APR03-C4599_1.p
MALSLGSRIGSSVLIRRRIPFVGAFCVLSLGFSSLSSSFSSSSYKPGCAQSLSFAPLLRSRFSSKASSSSSIKMEEGSNTVPSVVVYVTVPNREAGKKLANSIVQEKLAACVNIVPGVESVYEWEGKVQSDSEELLIIKTRQSLLESLTAHVNANHEYDVPEVIALPITGGSDKYLEWLKNSTRN

SEQ ID NO: 7059 - protein, 107 aa, Brassica napus
  unsure (1)..(107): unsure at all Xaa locations
  Clone ID: BRANA-23APR03-C4603_1.p
MALLFFNPLAPLSSQSLQSXRRSLSSLFSLKPHSVLSKNRVSLSAYNLSSCXKRAVIVKAAASGVDGAEPESNEEPPKTVVAAVPVDNLPSGNRKSQKETSSRGTEG

SEQ ID NO: 7060 - protein, 223 aa, Brassica napus
  Clone ID: BRANA-23APR03-C4630_1.p
MALMYRRSLLLQHLPCPSVTPFLRNYPLKPLKFSSQPFSHRCRQSPASSSSSSARCCSSSSSMESPPEGYRRNVGVCLMNPSKKIFAASRLDIPSAWQMPQGGIDEGEDPRVAVMRELKEETGVHSAEIIAEAPHWITYDFPPDVREKLKVRWGSDWKGQAQKWFLLKFTGKDEEINLLGDGTEQPEFGEWSWVSPDQLVELAVDFKKPVYKEVMSAFASHLQ

SEQ ID NO: 7061 - protein, 215 aa, Brassica napus
  unsure (1)..(215): unsure at all Xaa locations
  Clone ID: BRANA-23APR03-C46361_1.p
MIMASKREYGIPYTPLPSSQPSQTVIVLTPYRRHPRPSFLRSLRCSILFTAAILLLSAAVYFLYPSDPEINVSRIQLNHIRVLDSFKPTLDLSFSLTIKVRNRDFFSLDYDSLVVSIGYRGRELGLVKSRGGHLRARDSSYINATLELDGLEVVHDVIYLIGDLAKGVIPFDTIAQVKGDLGLLLFQIPIQGKVSCEVFVNINNQKISXQDCHXK

SEQ ID NO: 7062 - protein, 119 aa, Brassica napus
  Clone ID: BRANA-23APR03-C46428_1.p
MEKGKGRKEEIVTREYTINLHRRLHSCTFKKKAPNAIKEIRKFALKAMGTKDVRVDVKLNKQIWSRGIRGPPRRVRVRVARKRNDDEDAKEEFYSLVTVAEIPAEGLSGLGTKVIDEDE

SEQ ID NO: 7063 - protein, 197 aa, Brassica napus
  unsure (1)..(197): unsure at all Xaa locations
  Clone ID: BRANA-23APR03-C4662_1.p
MSLCNQLSRLVKQSPLTKHSLRSFSAEAATHHRHHQETHSFLEPESYIGSWEAPKDPKDXARMLAQLRRDYAKKVSMKVRLYRKEYENEMVMLRGEKQGKDEARLVAERAANEERRRLKAEAAKVRAEERKVFEEEFRRTLMKERDEKLEFWRMTGLKREEKKKDKQKLLHEQSSLWIEPKELEKKITEALVESTTL

SEQ ID NO: 7064 - protein, 159 aa, Brassica napus
  unsure (1)..(159): unsure at all Xaa locations
  Clone ID: BRANA-23APR03-C4679_2.p
MVAISEIKSTVETTAANCLMLLSRVDQENVXGSAKRVFTCKTCLKEFHSFQALGGHRASHKKPNNESLSGLIKKSKAASSHPCPICGVEFPMGQALGGHMRRHRNESGGAGALVTRELLSEAALTTLKKSSSGRLACLDLSLGMVENLNLKLELGRPVC

SEQ ID NO: 7065 - protein, 81 aa, Brassica napus
  Clone ID: BRANA-23APR03-C4697_4.p
MSDKGRPLPNFGEWDVNYPASAEGFTVIFNKARDEKKTGGKPGSPGKSTEGHAKSGGGGGDPSKPQPKKWLCCMQSPAVDS

SEQ ID NO: 7066 - protein, 225 aa, Brassica napus
  unsure (1)..(225): unsure at all Xaa locations
  Clone ID: BRANA-23APR03-C4734_1.p
MDTFTAEDLSTIGGIATVSLLHSFIPTHWLPFSIVGRAQKWTLSRTLFVTAFGAVLHVISTSLLGITAITMANTIAGEETVHKLASLLLVILGGSYVLLFLAGKGGHTHSHNKPMEKMAVAGLVLVPALSPCATTLPVFLAVGNSKPMMVLAIIVLLISTILVMTSLVALSFYGASQLKFHWVERYDKLLVGSVLCXVGILTLXFHDHDXHGHEAHQLPRKIITL

SEQ ID NO: 7067 - protein, 262 aa, Brassica napus
  Clone ID: BRANA-23APR03-C4754_1.p
MGPHGDGDIENVESESRRRPISTVVFVIAMQAEAQPLVNKFGLSETSDSPLGKGLPWVLYHGLHKDLRIYVVCPGKDAASGIDSVGTVPASLITFASIQALQPDILINAGTCGAFKVKGANIGDVFLVSDVVFHDRRIPIPMFDLYGVGLRQAFSTPNLLKELNLKIGRLSTGDSLDMSTQDESLIIANDATLKDMEGAAVAYVAELLKVPVIFLKAVTDLIDGDKPTAEEFLQNLAVVTSALEETATKVINFIHGKTLSDL

SEQ ID NO: 7068 - protein, 247 aa, Brassica napus
  unsure (1)..(247): unsure at all Xaa locations
  Clone ID: BRANA-23APR03-C4786_1.p
MVILSASSTVRAALDTQPRLPYNPNAPRKVKKTPNGNSFLPLPLPPPPSPRISISVDDLLKRPESKELSVEVVDSYMGYETWSPSPPKLEKPRSVFNAASLAFIGDSIYELYARRHFLFPPLSIEDYNDRVRAVVRCEAQYALLKKLIDDDFLTKEEKDVLRWGKNLGSARTRTRRRAGVAVYNKASSLETLIGYLYLTNGKRLEKIMEKLGXSSDXSTEIMIEMAKPKPSEPNLPSFILNEQVSVV

SEQ ID NO: 7069 - protein, 169 aa, Brassica napus
  unsure (1)..(169): unsure at all Xaa locations
  Clone ID: BRANA-23APR03-C4822_1.p
MSGNTNCTVYIGNLDERVSDRVLYDILIQAGRVIDLHIPRDKETEKPKGFAFAEYETEEIADYAVKLFSGLVSLYNRTLKFAISGQDKAQSGSGHRTRPQSLSFDHSDRTHHHSERFSSQLMSSPSPMPLGYTQEPPPPGVSNGAGLEYSSRRVLSSXLDINHSRPSXY

SEQ ID NO: 7070 - protein, 192 aa, Brassica napus
  unsure (1)..(192): unsure at all Xaa locations
  Clone ID: BRANA-23APR03-C4830_1.p
MAEETKKVHEVPKVATEESSAETGEVTDRGMFDFLKKKNEETKSEETINSEFEQKVQVSEPVPEVKHEEEEKKPSLLEKLHRNDSSSSSSSEEEGEDGEKRKKKKKDKKKIATEGEVQTEEEKKGFMDKLKEKLPGHGKKPEDDSTAVAAPVVAPPVEEAHPAEKKGILEKIKEKLPXYHSKTVDEEKKDDH

SEQ ID NO: 7071 - protein, 251 aa, Brassica napus
  Clone ID: BRANA-23APR03-C4831_1.p
MATFLTPLVSIKPTVFSFPSQSVTSPHRQTNVLSLKPFPSPAGAQSSRVRFIPHAVETEEKPASDPNAESSRRVYIGNIPRTVDNEQLSKLVEEHGAAENVQVMYDKYSGRSRRFGFATMKSVEDANAVIDKLNGTTIEGREVKVNITEKPIASSSSPDLSLLQSEDSAFVDSPYKVYVGNLAKTVTKQMLENLFSEKGKVVSAKVSRVPGTSKSSGFGFVTFSTQEDVEAAILALNNSLLEGQKIRVNKA

SEQ ID NO: 7072 - protein, 159 aa, Brassica napus
  unsure (1)..(159): unsure at all Xaa locations
  Clone ID: BRANA-23APR03-C4938_2.p
MSIIPINDRRSISPGDRIWEPFELMNTFLXDFPSPSLLLPRHFPSXFPHSSPSTVETQLYWTETPTAHVFKAYLPGTTQDEAIVFVDDEGYLQICAGDNKFMSRFKLPDNALKDQVTAWMEEDGFLVVFVAKDGTFSQTPPEIEDNRNVRVVEITGDDD

SEQ ID NO: 7073 - protein, 171 aa, Brassica napus
  unsure (1)..(171): unsure at all Xaa locations
  Clone ID: BRANA-23APR03-C4959_1.p
MASCVAHLPLSSGSQSRYVKANGLSTTKLSSICKTSALTIQKKSNRSRKFSVSAGYXEANESRRASGGGGGDFIAGCSXLGGAVFGAVAYIFAPQIRRSIMSEEDEYGLQNPEQPTYYEESLEKTRETRNKKIEQLNSAIDNVSSRLRGRENNTSSPNVPVETGPEVEATT

SEQ ID NO: 7074 - protein, 480 aa, Brassica napus
  Clone ID: BRANA-23APR03-C4983_1.p
KHNKQISLKPVVFVCYTFSSPTHFLALPNFCNCEAVLSEKEQNKVSKLPGQNFNVNFAHYSGFVTTNEKLGRALFYWLIEAAEDPASKPLVLGVHWRPGFFTSWFSSNTITHHLMTLYMKIYSWNQTRYHLFCYALRDAGFTYYYKLTNFHKKKKKRTAQDSLKFLLKWVERYPEYKGREFYSRPTRPAGHYIPQLSQAIVRHNKASGDNTINLKGYMVGNGLMDDFHDRLGLFQYIWSLGFISDQTYSLLKLQCGFESFIHSSKACDKIQEIADKEIGNIDQYSVFTPACIANASQTKMLLKKRPRTSRVSEQYDPCTEKHSKVYFNLPEVQEALHVPPGLAPSKWDTCSDVVNEHWKDCSSSVLNIYHELIAAGLRIWVFSGDADAVVPVTATRYSIDALNLRPLSPYGPWYIDGQVGGWTQQYAGLNFVTVRGAGHEVPLHRPKEALALFKAFISGTPLSTPESNISKDMSDLVSDS

SEQ ID NO: 7075 - protein, 273 aa, Brassica napus
  Clone ID: BRANA-23APR03-C5023_1.p
TIKGRKGKHSSFGEMEIEEIEAVLEKIWDLHDKLSDEIHFISRSHFLDSLKPAPNRSETKRKKSQELGEEKKRQGYVFIKGFDNNDENATIQEAKSLYAIRTALEHLEDQLEFFHTIHTQQRTERDLAVARLEQSRILLAMRLAQHHGKSYRVLDEALAFVGSFKSDTRFVSPHQLYNSSPNPTGENSAPCDGTKPNFVINAFASAFGFAKRAFGFNHLGGVLGNAAIFSISLVAMLHLHQVATSEHHHLQKREDRREMSSSDISLDVMMARG

SEQ ID NO: 7076 - protein, 220 aa, Brassica napus
  Clone ID: BRANA-23APR03-C5054_1.p
MDSEKAVVDELPLAIVRRVVKDKLSECSPDYDVSIHKEALLAFSESARIFIHYLSATANDICKDSRRQTMKAEDVFKALEDMEFSEFLEPLKASLDDFKKKNAGKKAASVSGAAVASKPKETKKRKHVESSTQKGVGKSKRDEGDLKNDENDNTKENEDDNTEENGNDEEEEEDANGNEENSMEEIGNEDNSMEEAGSGSGEDDENEGSGEEEEGDDEDE

SEQ ID NO: 7077 - protein, 262 aa, Brassica napus
  unsure (1)..(262): unsure at all Xaa locations
  Clone ID: BRANA-23APR03-C5071_1.p
TLRLSFRSFHQFXMAAYANYLRLARLGTGSAVNFSTFRSIGSPNPTFDRTLFDHHHEIRSSSPLYRQSNSRFISQLVKTNGKRLYLVDTLALVRSLEAQGLPSKQAEAITGAITEVLNDSLGVVSQLVVSKGEMQKAEMTQESNLSKFKSEINSSLDHHFSLLQHENEKLRNDIERIRTDIRHEIDKVTAGQRLDLNLEKGRIRDELTNQNAETSNLTNKLDREIHTLRAQLEAAKYEVIKYCIGTLVSISAVGLAVLRIVM

SEQ ID NO: 7078 - protein, 382 aa, Brassica napus
  unsure (1)..(382): unsure at all Xaa locations
  Clone ID: BRANA-23APR03-C508_15.p
MVEQTQNPTILQKASGQLMRTGVVSHDIHGYTSSFQRRATYGNYSNAAFQYPLAATSRIVATTTTSPVFVQAPSEKGFSSFAIDFLMGGVSAAVSKTAAAPIERVKLLIQNQDEMLKAGRLSEPYKGYWVTGFGRTIKXMEGFGSLWRGNTANVIRYFPTQALNFAFKDYFKRLFNFKKDRDGYWKWFAGNLGSGGAAGASSLLFVYSLDYARTRLANDSKAAKKGGERQFNGLVDVYKKTLKSDGIAGLYRGFNISCVGIIVYRGLYFGLYDSLKPLLPADLQDSFFASFALGWLITNGAGLASYPIDTVRRRMMMTSGEAVKYKSSMDAFQQILKKEGPKSLFKGAGANILRAIAGAGVLSGYDKLQLLLLGKKYGSGSG

SEQ ID NO: 7079 - protein, 221 aa, Brassica napus
  Clone ID: BRANA-23APR03-C5091_1.p
MQHLLFAVVLAEVAVILALSFKTPIRKLLIMSLDRAKRGRGPVVVQTVSATVCVVLVASVYSMMKIQKRWVEEGAMNPTDEVIMSKHLLESTLMGGFLFLGLMIDRLHHYMRELRMRRKTMEAIKKEGSVLEGEKARASDEVKSLKQEITALQERQKQLAAEIEAKSKEIRTEETSGIALQKQSEGFLIEFNRLSEENQDLRNQLHTVDSRISRSSIKKNT

SEQ ID NO: 7080 - protein, 290 aa, Brassica napus
  unsure (1)..(290): unsure at all Xaa locations
  Clone ID: BRANA-23APR03-C5112_1.p
MAEKDAMARSDGAIRVSGMQFSYDVQDPIFFDFSLDLPAGSRXCLLVGXANGFGQTTLLKILEGRFLLERGWLEGRKFLNRSAFHDTDLDXVIGGTCLTLGRILGAQTAGFPGGRDLPSRXTAEHMIFGVEGIDPVRREKLIDLLDINLKWRMHKGSDGQRRRVQICMGLLQPFKVLLLDEVTVDLDVVARMDLLEFFKEECEQRGATIVYATHIFDGLETWASHLAYIHGGELKLSAKLKEIKDLETSPNLLSVVENWLRSETKVEKKTKKKPVATSPFMSSRQMAYYR

SEQ ID NO: 7081 - protein, 161 aa, Brassica napus
  Clone ID: BRANA-23APR03-C5132_1.p
MSKKIILESSEGKSFEVDEAVALECQTIKNMIEDDCTDGGIPLANVNSATLAKVIEYCKKHVEAAAEANAGDKDTYGANEDIELKTWDADFVKVDQPLLVDLMLAANFLIIPGLLDLTCKTVADMMRGKTVLQIREIFHIKNDYTDAEEAEVRKENAWAFE

SEQ ID NO: 7082 - protein, 128 aa, Brassica napus
  unsure (1)..(128): unsure at all Xaa locations
  Clone ID: BRANA-23APR03-C5143_1.p
MAAAASLSAHQGLLGTSFYGAWGNSISGDDYHTMLAKTTAPRQQAKVSRKLIRVQPMMKNVNEGKGLFAPLVVVTRDIVGKKRFNQLRGKAIALHSQXFCKSIGADAKQRQGLIRLAKKNGERLGFLA

SEQ ID NO: 7083 - protein, 184 aa, Brassica napus
  Clone ID: BRANA-23APR03-C5165_1.p
MAITPLRITTPFPSQPFLPAAKPHASKLFTVRATDVESTEETPQPDSDTENSEDFESRLSNIRLRYRSGTGKKAEVRKSKKGSSAAGGQSSKSSGLYLPPVSLKEPVSGGLKVELGFTPYTERLNGRMAGLGLVALLLVELATGKSLLSYHTPSVVWLQIYFMAAVSAMFVKIEKEKVSVWPKD

SEQ ID NO: 7084 - protein, 159 aa, Brassica napus
  Clone ID: BRANA-23APR03-C5204_1.p
MVEEKSGKKQVMVAIDDSDCSKHALRWTLSYLKDSLADSDIILFTAQPQLDLSSVYASSYGAAPIELINSMQQNYKNAALNRIEEGTKICAESGVTPKKVMEFGNPKEAICDAVEKLGVDLLIVGSHGKGALERTFLGSVSNYCVNKAKCPVLVVRTKA

SEQ ID NO: 7085 - protein, 204 aa, Brassica napus
  Clone ID: BRANA-23APR03-C5231_2.p
MAKLNQTFFLILSICYFLSPALTAATAASRAGASNKAVNFIQSSCKTTTYPAVCFHSLSAYANAIQTSPKRLAETALAVTLSRAQSTKLFVSRLTRFKGLKKREVEAIKDCVEEINDTIDRLTKSVQEMKLCGSAKNQEQFAFHMSNAQTWTSAALTDENTCSDGFSGRVTDGRIKNSVRARIVNVGHETSNALSLINAFAKKY

SEQ ID NO: 7086 - protein, 147 aa, Brassica napus
  unsure (1)..(147): unsure at all Xaa locations
  Clone ID: BRANA-23APR03-C523_37.p
MAPKAGKKPAEKKPAAAAAPAAEKPAEEKKPKAGKKLPKEAIGATDKKKKRSKKSIETYKIYIFKVLKQVHPDIGISSKAMGIMNSFINDIFEKLAQEASKLARYNKKPTITSREIQTAVRLVLPGELAKHAVXSEGTKAVTKFTSS

SEQ ID NO: 7087 - protein, 135 aa, Brassica napus
  unsure (1)..(135): unsure at all Xaa locations
  Clone ID: BRANA-23APR03-C5278_1.p
SLKMEEEGGEGGXRSREKATEEEEKEGERRDGNGMNLDETEKMELCDSKELDIFQILNHIESYTLTVSNPMVSEKRKLMEQSIKIEEHELMIKKQQDEKEQGEIEDLRLRDASNEDNTSLLHNARFLIQNPNIEA

SEQ ID NO: 7088 - protein, 83 aa, Brassica napus
  Clone ID: BRANA-23APR03-C5301_1.p
MASGWGITGNKGRCYDFWMDFSQCMSHCREPKDCSLLREDYLECLHHSKEFQRRNRIYKEEQRKLRAASRKGEQVVDATHTHH

SEQ ID NO: 7089 - protein, 161 aa, Brassica napus
  Clone ID: BRANA-23APR03-C53261_1.p
MCEEKRARGNKNGFFASYVVCSGHREGLRHNRKRSIRRRQEGYADPHTESSKGEITRMVSSLLMSFAPATVRVYATTKGTSGGAKEEKNPLDFVLGYLTKQDQFYETDPILKKVEEKGGTRSGTTGGRGTVRGGKSTAPVPVAPKKNDGGFAGLGGFFNKK

SEQ ID NO: 7090 - protein, 313 aa, Brassica napus
  Clone ID: BRANA-23APR03-C5346_1.p
MAATERPSFELAKGINGLDKIVLRQSRYRSAEVYLYGGHVTSWKNENGEELLYLSSKAIFKPPKPIRGGIPLCFPQFSNLGTLESHGFARNRIWEVDASPPPLPTYSSPNAFVDLILRPTEDDLKTWPHNFEFRMRVDLGSEGELTLTSRISNTNADGKPFTFTFAYHTYFSVSDISEVRVEGLETLDYLDNLKNRERFTEQGDAITFESETDKIYLSTPTKIAILDHEKKRTFVVRKDGLADAVVWNPWDKRSKTISDLGDEDYKHMLCVEAAAIERPITLKPGEEWKGRLELSAVPSSYSSGQLDPKKVLE

SEQ ID NO: 7091 - protein, 241 aa, Brassica napus
  unsure (1)..(241): unsure at all Xaa locations
  Clone ID: BRANA-23APR03-C53644_1.p
MKIQCDVCEKAPATLICCSDEAALCASCDVEVHAANKLASKHQRLFLDSLSTKFPPCDICLEKAAFIFCVEDRALLCRDCDEATHAPNTRSANHQRFLATGIRVALSXTSCSQEVEMNHFDPPNQQILSKPTIQQSAAPSPPWAGDEFFRYSDLECSNKKEPLDLGELDWLAEMGFFGDQPDQEALPAAEVPELSVSHLPHVHSYNRPMKSNVSNKKPRLEIRYDDDDDDDEQHFLVPDIG

SEQ ID NO: 7092 - protein, 433 aa, Brassica napus
  Clone ID: BRANA-23APR03-C53_1.p
MARCHGSLAIFLCVLLMLACCQALSSNVDDGYGHEDGSFETDSLIKLNNDDDVLTLKSSDRPTTESSTVSVSNFGAKGDGKTDDTQAFKKAWKKACSTNGVTTFLIPKGKTYLLKSIRFRGPCKSLRSFQILGTLSASTKRSDYSNDKNHWLILEDVNNLSIDGGSAGIVDGNGKIWWQNSCKIDKSKPCTKAPTALTLYNLNNLNVKNLRVRNAQQIQISIEKCNSVDVKNVKITAPGDSPNTDGIHIVATKNIRISNSDIGTGDDCISIEDGSQNVQINDLTCGPGHGISIGSLGDDNSKAYVSGINVDGATLSETDNGVRIKTYQGGSGTAKNIKFQNIRMDNVKNPIIIDQNYCDKDKCEQQESAVQVNNVVYRNIQGTSATDVAIMFNCSVKYPCQGIVLENVNIKGGKASCKNVNVKDKGTVSPKCP

SEQ ID NO: 7093 - protein, 297 aa, Brassica napus
  Clone ID: BRANA-23APR03-C5403_2.p
MAHTHRLAVLLILLSATIGFSSAALVEEQPLVLKYHNGILLKGNVTLNLVWYGKFTSIQRSIIVDFIRSLSSSAVPSKGPSVASWWKTTEKYKGGSSKIVVGKQLLLENYPLGKSLKSPYLRALSGKLNGGGVRSITVVLTAKDVAVEGFCMNRCGTHGAKARSVNSGAYVWVGNSETQCAGYCAWPFHQPMYGPQSPPLIAPNGDVGVDGMIINLATLLVNTVTNPFKSGYFNGGNQEAVSVCTGMFGSGSYPGYAGRVLVDKTTGASYNALGLAGRKYLLPAMWDPQTSKCKTLV

SEQ ID NO: 7094 - protein, 238 aa, Brassica napus
  unsure (1)..(238): unsure at all Xaa locations
  Clone ID: BRANA-23APR03-C5425_1.p
MVAERFTVDLDKPLVFQVGHLGEEYQEWIHQPIVCVXEGPRFFQSDFWEFLTRTVWWAIPTIWLPVVCYVLSISARKGLTFPQIGLIVAFGVLTWTLLEYTLHRFLFHIDTKSYWANTAHYLLHGCHHKHPQDGLRLVFPPTATAILLVPLWKLLHLIATPATAPAMLGGILFGYVMYDVTHYYLHHGQPKEPTFKHLKKYHLNHHFRIQDKGYGITSSLWDRVFGTLPGTKAAQKKL

SEQ ID NO: 7095 - protein, 174 aa, Brassica napus
  Clone ID: BRANA-23APR03-C5435_3.p
MAAVNGYQGNTPAASKQSAPLTKTVDSQSVLKRLQSELMGLMMGGDPGISAFPEEDNIFCWKGTITGSKDTVFEGTEYRLSLSFSNDYPFKPPKIKFHTGCFHPNVDVYGNICLDILQDKWSSAYDVRTILLSIQSLLGEPNISSPLNTQAAQLWSNQEEYRKMVEKLYKPPSA

SEQ ID NO: 7096 - protein, 195 aa, Brassica napus
  unsure (1)..(195): unsure at all Xaa locations
  Clone ID: BRANA-23APR03-C5437_1.p
CVFWAKSRKCRGSGKKGAKGALKAWRTIDWQGMGKVLVTDEGRIGFSNLPRAFDEVNTXLPPKSSQEPDPSHREFNRKGIGTGIVDLXMEAYDSVEMPKXVENVTPEYKPNFDALSVEQKEAXKKSLKECERLEKEISEIQEISKKLSTMTADGFIKKLSTMTADEYFEKHQNSEAYPGLHTKFDDEIRNDYWGY

SEQ ID NO: 7097 - protein, 263 aa, Brassica napus
  unsure (1)..(263): unsure at all Xaa locations
  Clone ID: BRANA-23APR03-C54515_1.p
MGSSPAPFPDIGRKAKDLLNKDYIFDQKFTLTMLSATGTEFVGXVCTLYKGQNTIVDLKIDSHSSVSTKVTVKNLMPSAKAVISFKLPDHKSGKLDVQYVNPHATLNSSIGLNPTPLLDLSATIGSQTVSLGGEVGFDTASSSLTKYNAGISFNKPDFSAALMLEDKGESLRATYVHTVNPTTSVGAELIRRFTNHANSFTIGSSYSVDPFTTVKTRLSNNGKAGMVVQREWRPKSLITLSAEYDSKAVNSSPKVGLALALKP

SEQ ID NO: 7098 - protein, 365 aa, Brassica napus
  Clone ID: BRANA-23APR03-C5468_1.p
MKLNVFVLLLLLLVSTATCCPPSDRRALLAFRAALHEPYLGIFNSWTGQDCCHNWYGVSCDSLTHRVADINLRGESEDPIFERAHRTGYMTGHIAPAICDLARLSAITIADWKGISGEIPTCITRLPFLRTLDLIGNQISGGIPNDIGRLHRLAVLNVADNRISGSIPKSLTNLSSLMHLDLRNNLISGVIPPDFGRLTMLSRALLSGNRITGRIPESLTRIYRLADVDLSGNQLYGPIPASLGRMAVLATLNLDGNKFSGEIPQTLMTSSVMNLNLSRNMLQGKIPEGFGPRSYFTVLDLSYNNLKGPIPRSISGASFIGHLDLSHNHLCGRIPVGSPFSHLEAASFMYNDCLCGKPLRACLKN

SEQ ID NO: 7099 - protein, 215 aa, Brassica napus
  Clone ID: BRANA-23APR03-C55140_1.p
YGFFFVLLSLAVISLAYDPDTLQDLCVADRTSGIKVNGFICKPESNITASDFFFAGISKPAVVNNTVGSAVTGANVEKIAGLNTLGVSLARIDYAPGGLNPPHTHPRATEVIFVLEGELDVGFITTANKLFAKTVKKGEVFVFPRGLIHYQKNNDKAKPASVISAFNSQLPGTQSMAATLFTASPAIPDHVLTTAFQIGTKEIEKIKSKLAPKKG

SEQ ID NO: 7100 - protein, 358 aa, Brassica napus
  unsure (1)..(358): unsure at all Xaa locations
  Clone ID: BRANA-23APR03-C56689_1.p
CLTPRILSPNGFLSLATKFTTRGYRLLCAIAMARSAVDETSDSGAFQRTASTFRNFVSRDSNSQFPAXESGRYHLYISYACPWASRCISYLKIIGLDDAISFSSAVPPCGGAKESDEHMGWVFPDSDNEVEGAEPDHLNGAKSVRDLYEIASPNYTGKYTVPVLWDKKLKTVVNNESAEIIRMFNTEFNHIARNPDLDLYPSHLQAKIDEANEWIYSGINNGVYRCGFAKKQEPYEEAVQQVYEALDRCEEILGKHRYIXCGNTLTETDIRLFVTLIRFDEVYAVHFKCNKKLLREYPNLFNYPKYIFQVPGMSSPVTMNHIKQHYYGSPPSINPFGIIPHGPNIDYSSPHDRHRFSK

SEQ ID NO: 7101 - protein, 230 aa, Brassica napus
  unsure (1)..(230): unsure at all Xaa locations
  Clone ID: BRANA-23APR03-C56868_1.p
KKYTQRIQTPTLLRFCHRRLISNSTDLYRRSIYSGLEAHGPLGCQLKCRSVDRFCGPAVDQFRQELLTNDVREYRESAGEKKSXILPPPSLPSVSTPPMYAALLTPQGRFLYDFFLYRPTRPDEKLDRTGSVELFADVDVSVLDELLETLKKYRLRSKVDIENVAEEFSCWQRYGRNLSESSSVGWGGGVDRAGESTASGNKYGWQWYEDPRLDCLGYRSIFPSDATPPL

SEQ ID NO: 7102 - protein, 366 aa, Brassica napus
  Clone ID: BRANA-23APR03-C57435_1.p
MSSPDRSAVFPLLIDIALSFDGAILGVTLALGAVRAAFKYASTSAALKKIKDAPEVSVSDLRSLIRASDDQSETSDDQERIVVVRGTVKAKVTGGEGSNKKKNNVLTSQETGDKALIIHRSQTYVYSGWKTLFQLTNGHRFLLERSLPKQGADFMRMVPFVIVDNTQPSQSSFLVVNMDGARQPLPLTTVGLIDVEKISTTWRDLTAVGICSFNNGVPEIKSCQHLPYFLSEMTKDKMILDLAETTSVIFWGGIIMGCLSAGILGFAAARAWNRWKQRHREREQQQRPDEQRPEQPMVADETEDEDEIPDGALCVICVTRRRVPAFIPCGHVVCCRQCASTVEREVNPKCPVCLQSIRGSMRVYYS

SEQ ID NO: 7103 - protein, 347 aa, Brassica napus
  Clone ID: BRANA-23APR03-C57948_1.p
MDGQGRHPPPHHLRHPIPIPIPVMPPPPPSAQPPFPSFNNMLPPPQLMEQKLVTQHGEMQRLAIENQRLAATHGNLRQELAAAQHELQMLHSQIGSIKSEGEQRMSGLADKVAKMEAELRKSEALKMEMQEARGEARGLVVAREELMSKVHQLTQELQKSRGEVQQVPALMSELDGLRQEYQQCRATYDYEKKFYNDHIESLQAMEKNYMTMAMEVQKLQAQLMNGRAGGAYGNNTNAENDASGHQNGVGYYDEAYGHQGYVPQPAAGTATAPNPALPTAQYPYQGGSQPGYFPPRPGYYFPRGPPPGSYDPTRLPAGPQGGPFPPGSSKPYGSAAATGPRGNPSRR

SEQ ID NO: 7104 - protein, 79 aa, Brassica napus
  Clone ID: BRANA-23APR03-C59558_1.p
MSCCGGNCGCGSSCKCGNGCGGCKMYPDLSYTESTTTETLVMGVAPVKAQFEGAEMGVPAENDGCKCGPNCSCNPCTCK

SEQ ID NO: 7105 - protein, 311 aa, Brassica napus
  unsure (1)..(311): unsure at all Xaa locations
  Clone ID: BRANA-23APR03-C60374_1.p
MTRRCSHCNQNGHNSRTCPNRGVKLFGVRLTEGSIRKSASMGNLSHHSGSGLSGLVSGSPGDGPDHDGYASEDFVPGSSSSRERKKGNPWREEEHRMFLLGLQKLGKGDWRGISRNYVKTRTPTQVASHAQKYFIRQSNVSRRKRRSSLFDIIPDEATDSVPAAPLILETEECESMKSTNSVGVEAPEDSIQTQLQPPPPGSFPVLYPAYFSPFYSFPFPVWPAXYDTEQVKEETHEILRPTAVHSKAAPINVDQLLGMSKLSLKESSLNGVSEQSLSLKLIGGSVSRQSAFHPNPASGGGSDMNTVIHAV

SEQ ID NO: 7106 - protein, 155 aa, Brassica napus
  unsure (1)..(155): unsure at all Xaa locations
  Clone ID: BRANA-23APR03-C60489_1.p
MHYMDLFXXAGXIFSRPRPRAMQAANAMLQGNLSLTPSKLFVGGLSPTTDVDILKEVFGKFGKIVDVVVVSDRETGVSKGFGFVTYDSIDAANKAMQQMNDQELDGRIIGVNPADSGGGGGGFARRGGYGGGRGGFGRGGFGRGGFGRGGYNFVR

SEQ ID NO: 7107 - protein, 727 aa, Brassica napus
  Clone ID: BRANA-23APR03-C60_1.p
MEDEIDRSRAFAKDVKRIVVKVGTAVVTGKGGRLALGRLGAICEQLAELNSDGFEVILVSSGAVGLGRQRLRYRQLVNSSFADLQKPQTELDGKACAGVGQSSLMAYYETMFDQMDVTVAQMLVTDSSFRDKDFRKQLSETVKAMMKMRVIPVFNENDAISTRKAPYKDSTGIFWDNDSLAALLALELKADLLILLSDVEGLYTGPPSDPKSKLIHTYVKEKHQEEITFGEKSRLGRGGMTAKVKAAVNAAYGGIPVIITSGYAAENIAKVLKGLRVGTLFHQDAHLWARVVDTTSRDMAVAARESSRKLQALSSEDRKNILLDIANALEANEKIIKAENDLDVAAAQEAGYEESLVARLVMKPGKISSLAASIRQLAEMEDPIGRVLKKTEVADGLILEKTSSPLGVLLIVFESRPDALVQIASLAIRSGNGLLLKGGKEARRSNAILHKVITDAIPKTVGGKLIGLVTSRDEIPDLLKLDDVIDLVIPRGSNKLVSQIKNSTKIPVLGHADGICHVYVDKSCKVDMAKRVVSDAKLDYPAACNAMETLLVHKDLEQNGVLNELIYALQANGVTLYGGPKASGKLNIPEVKSFHHEYSSKACTVEIVEDVHGAIDHIHQHGSAHTDCIVTEDSEVAEIFLRQVDSAAVIHNASTRFCDGFRFGLGAEVGISTSRIHARGPVGVEGLLTTRWIMRGKGQVVDGDNGVAYTHKDLPVLERTKAVQNGH

SEQ ID NO: 7108 - protein, 81 aa, Brassica napus
  Clone ID: BRANA-23APR03-C67487_2.p
MNRVINQLSGKLMKDKCVTGSGGGAVKESASPQSPVATSSAVRRLNGDLETRRFGGAASERLRQAEESLRTVMFLSCWGAC

SEQ ID NO: 7109 - protein, 452 aa, Brassica napus
  unsure (1)..(452): unsure at all Xaa locations
  Clone ID: BRANA-23APR03-C675_1.p
ERLASELINRTRXEADQPASDAYYPKPIKPWFSVARPMRYMLREQRLLFVLVGIAIATVVFTIFPRSTQSTPYSDPFSGYGMRSEEESHVPGLPAFQAQRKPSLEYLNRMGATGGKIPLGLKRKGLRVVVTGGAGFVGSHLVDRLMAKGDTVIVVDNFFTGSKENVMHHFGNPNFELIRHDVVEPILLEVDQIYHLACPASPVHYKFNPVKTIKTNVVGTLNMLGLAKRVGARFLLTSTSEVYGDPPCAXLMTDCGCNXSETGVRSCYDEGKRTAETLAMDYHRGANVEVRIARIFNTYGPRMCIDDGRVVSNFVAQALRKEPLTVYGDGKQTRSFQFVSDLVEGLMRLMEGEHVGPFNLGNPGEFTMLELAKVVQETIDPNASIEFRPNTAGGGPTSQGGVPPATEQTGGAPREALRQGLPAKGGASRHRVFGDQKEGSSMATTTTKTTSA

SEQ ID NO: 7110 - protein, 220 aa, Brassica napus
  unsure (1)..(220): unsure at all Xaa locations
  Clone ID: BRANA-23APR03-C692_1.p
MSRSAECWEFSGERKRLLEKKPSFSQTCSRLSRYLKEKGSFGDLSLGMTCNVAGVFGVTRQQPTMMNLFPVEDSSDVKQKNDVFPRQSSFSSSSSSGAKEEVEKITENESVKVESQSSAPLTIFYGGQVMVFDDFPAEKAKQVIDLAHKXPVPSPVKTAAPEPIQTHKSSLACELPIARRASLHRFLEKRKDRISSKAPYQIDGSTEASSKPNTAWLGSQ

SEQ ID NO: 7111 - protein, 126 aa, Brassica napus
  Clone ID: BRANA-23APR03-C70445_1.p
MGKCILVSSVVIVSLFSIAYATSGIGTFYTTYTPSACYKDTPEGVMIAAASDTLWDNGRVCGKMFHVTCTGPRNPVPHPCTGKTVTVKIVDHCPAGCASTIDLSFEAFSQIANPVAGIINIDYTPA

SEQ ID NO: 7112 - protein, 130 aa, Brassica napus
  unsure (1)..(130): unsure at all Xaa locations
  Clone ID: BRANA-23APR03-C7081_1.p
AVYRATSPSLPSLSTSSLXFNAPSIQSTRTSQVLRKPLSFQPISFGCFQSSKNLRLQISCAAKPETVQKVSDIVREQLALSADTALTAESKFSALGADSLDTVEIVMALEEKFNISVEEADAXNITTIQE

SEQ ID NO: 7113 - protein, 325 aa, Brassica napus
  Clone ID: BRANA-23APR03-C7131_1.p
MKLLLHLSIFFTILFISLPSSHSSSSNDKNALLQIKKALNNPPLLSSWNPQTDFCTTWTGVECTNGRVTALTISSGEISGQIPAQVGDLLELRTLDFSYLTHLTGNIPHTITKLKYLDLLRLKQTNLSDYIPDFISELKSVTFLDLSFNQFTGPIPGSLSQMPKLDAIQINDNKLTGSIPNSFGSFVGKVPNLYLFNNKLSGKVPESLSKYDFNAVDLSGNSFTGDGSMFFGRNKTTIRVDLSRNMFEFDLSKVKFARSIVSLDLSHNKIFGKFPRELNKLRLEHFNVSYNHLCGKIPSGGLLQTFEPSAFSHNLCLCGTPLKAC

SEQ ID NO: 7114 - protein, 176 aa, Brassica napus
  Clone ID: BRANA-23APR03-C717_1.p
MAATQLTASPVTVSARSLASLRASSAKFGTLKPGTLKQSQFRSLVVRAASVVAPKYTSIKPLGDRVLVKIKEAEEKTMGGILLPSTAQSKPQGGEVVAVGEGRTIGKNKIDINVPTGAQIIYSKYAGTEVEFNDVKHLILKEDDIVGPSCGESHWVRSIVIESQQKWRRLNLQHHQ

SEQ ID NO: 7115 - protein, 243 aa, Brassica napus
  unsure (1)..(243): unsure at all Xaa locations
  Clone ID: BRANA-23APR03-C7272_1.p
MSAVYCGSKRSYFDDTPSPPPSSKRFRCYSPSNSPSWSSSPPSSLDQLRAAFPHLELTVLVEALEEHGSDLNAAMKSLYALVSAAEEEKRAQELAANKEADAFTASGDDWVALLVREVTQSSGQDDAKFRAERVLEALEKTLRARAHEEAGKKFQEESVAVQQQVEALMKDNTVLKRAVAIQHERQKALEDANXQLEFFKQLIPQYQEKVRNLEVNNYALKLQLEQMEHGSSMMPQRFNPDVF

SEQ ID NO: 7116 - protein, 349 aa, Brassica napus
  Clone ID: BRANA-23APR03-C7298_1.p
KTFDSVGTFQKKPHSSSPSSISHLTVNSSSSFFILQSFNQKMADHDQGAVTLYSGTAITDAAKKNHPFSVKVGLAQVLRGGAVVEVSSVNQAKIAESAGACAVLISDPPRSPATAGVQRMPDPALVKEVKRAVSVPVMARARVGHFVEAQILEHLAVDYIDESEIISVADEGNFINKHNFRSPFICGCRDTGEALRRIREGAAMIRIQGDVTRTGNVAETVRNVRRVMGDVRVLNNMDDDEVFAFAKKLSAPYDLVAQTKQMGRVPVVQFASGGITTPADAALMMQLGCDGVFVGSEVFDGADPFKRVRSIVQAVQHYNDPHVLAEMSSGLESAMESLSVSGDRIQGSV

SEQ ID NO: 7117 - protein, 352 aa, Brassica napus
  unsure (1)..(352): unsure at all Xaa locations
  Clone ID: BRANA-23APR03-C72997_1.p
MAAENEQQRKSSSVSDMGAWAMNVISSVGIIMANKQLMSSSGFSFSFATTLTGFHFALTALVGFVSNATGLSASKHVPLWELSPLSPMSLVSTAISNFSLMPSSVGFSRISKLSMIPVVCVMEWILHSKRYSREVKVAVVVVVVGVGICTVTDVKVNAKGFICACVAIFSSSLQQILIGSLQKKYSIGSFELLSKTAPIQALSLLVAGPFVDYLLSGKFILNYNMSSGCFVFILLSCALAVFCNISQYLCIRRFSAVSFQVIGHMKTVCILTLGWLLFDSAMTSKNVXGMFVAIVGMVIYSWAMSWRNGLIXAAKALNSVKHSLTEEEFQLLKEGVETTQPKDVELGGYTKA

SEQ ID NO: 7118 - protein, 354 aa, Brassica napus
  Clone ID: BRANA-23APR03-C72_1.p
QDQTNVHVYPDWAAMQAYYGPRVAIPPYYNSAMAAASGHPPPPYMWNPQHMMSPYGTPYAAVYPHGGGVYAHPGFPMPQSQKGAALSTPGTPLNIDTPSKSTGNTENGLMKKLKEFDGLAMSLGNGNNGDEGKRSRNSSETDGSSDGSDGNTTGADEPKLKRRREGTPTKDEEKHLVQSSSFRSVSQSSGDNVVKHSVQGGGGAIVSAAGVSANSNPTFMSQSLAMVPPETWLQNERELKRERRKQSNRESARRSRLRKQAETEELARKVEALTAENMALRSELNQLNEKSNNLRGANATLLDKLKSSEPEKRVKSSGNGDDKNKKQGDNETNSTSKLHQLLDTKPRADGVAAR

SEQ ID NO: 7119 - protein, 461 aa, Brassica napus
  unsure (1)..(461): unsure at all Xaa locations
  Clone ID: BRANA-23APR03-C7305_1.p
MASSSFAVLPLLNYNSSTTNRSSSSIRFFNLPKSKHRSTKHLLNPRSPQVLVSLSLNQPTDDESSDAALFLESNSIADYMRFKRRSDDGDNGSSELQTAIVSYKKRFPWILLNPFLQVDLVSTIHIADKEYFTALPKELEPYDXYEMVTCKESLENRRNPIAAKRLKTSRSRGFSILGLIQRQMARVLALDFQLDCLNYEAKNWYHADLDFETFTLLQKEKGESFYSFARDMTIRSTKAMIQPALVTEGLDTWRSKLLWVSRVFPMPLVGLFLIVAFCADFENQTEDYPELEALSRLDIGAAMKVFLAKRLTSELTQGTSEIEEKSVIIGERNRAATEALKRAIEQGSKRVXILYGGGXMPDLGRRLREEFDLVPXEVRWVTAWSISNPGDMETTXFPFXRXMADALRWPXNRYQTLALLLFSSVLALDLCFWELFLDSTIDWGSQIAAELYKFVDNTKLV

SEQ ID NO: 7120 - protein, 215 aa, Brassica napus
  unsure (1)..(215): unsure at all Xaa locations
  Clone ID: BRANA-23APR03-C734_6.p
MGRRPARCYRQIKGKPYPKSRYCXGVPDPKIRIYDVGMKKKGVDEFPFCVHLVSWEKENVSSEALEAARIACNKYMVKSAGXRIRVHPFHVLRINKMLSCAGADRLQTGMRGAFGKALGTCARVAIGQVLLSVRCKDNHGAHAQEALRRAKFKFPGRQKIIVSRKWGFTKFNRADYTRMRQSKRIVPDGVNAKFLSNHGPLAKRQPGSAFISATE

SEQ ID NO: 7121 - protein, 231 aa, Brassica napus
  unsure (1)..(231): unsure at all Xaa locations
  Clone ID: BRANA-23APR03-C73853_1.p
PDLSFEAGAVYRKSSYGVHGSSISSRSPSRTSXQQLHFYLAVDRPQFKMETVVELLGVLGRRPWLPIVVCCSSRDELDAVCSSLSTLPSISFAALYSDLGERERASVLDKFRQATISWNQHLNSAVLVEEGLEESETGEEEDEKKSHLVVVTDVCLPMLSSGESPLSSRVLINYELPTKKETYTRRLTSCLASGGIVINMVVGGEVTTLKSLEESSGIIIAEMPINISEIL

SEQ ID NO: 7122 - protein, 179 aa, Brassica napus
  Clone ID: BRANA-23APR03-C73874_1.p
MDGKKTQGQGYLKKKASVSYLVEEELENDTDGEEEEKRKGVTDRFKGSSGSNDRGSSRLCQVDRCTADLKEAKQYHRRHKVCEVHAKASSVYLTGVKQRFCQQCSRFHELLEFDEAKKSCRKRLAGHNERRRKSSGESIGEGSGGRRGITAQMIQNQERSRVEMTLPMSNTSFKRPQIK

SEQ ID NO: 7123 - protein, 176 aa, Brassica napus
  Clone ID: BRANA-23APR03-C7411_1.p
MGNCQAVDAAALVLQHPDGKIDRYYGPVSVAEIMRMHPGHYVSLIIPLPEADIPAKTTAKEEDGKSQKRVVKFTRVKLLRPTENLVLGHAYRLITSQEVMKVIRAKKYAKTKKHQNETTTREKKKPSLEKKVDGVSDKHQNLETNDEKQRAVLTSSGSSKSKTWRPSLQSISEAKS

SEQ ID NO: 7124 - protein, 234 aa, Brassica napus
  Clone ID: BRANA-23APR03-C7441_2.p
MAKEDNHEAQRCECEDHEESSPLLQVNESKICSKGDTKTAEEYGWTADGLPVSQGSVIGEPIGRNQWSSGLFSCLGRNDEFCSSDLEVCLLGSVAPCVLYGSNAERLGSAPATFSNHCLTYLGLYFVGNSLFGWNCLAPWFSYSSRSAIRRRFNLEGSFEAMNRSCGCCGSCIEDEMQREHMETTCDFVTHVLCHTCALCQEGREIRRKVLHPGFNAQSTVVVLPPSEQTMGRK

SEQ ID NO: 7125 - protein, 124 aa, Brassica napus
  Clone ID: BRANA-23APR03-C7482_1.p
MSEGRIKKSVNGGAPAQTNPDDRRSSVEASSQGAGAGKQRAVIKSADMKEDMQKEAIDIAITAFEKNSVEKDIAENIKKEFDKKHGATWHCIVGRNFGSYVTHETNHFVYFYLDQKAVLLFKSG

SEQ ID NO: 7126 - protein, 301 aa, Brassica napus
  unsure (1)..(301): unsure at all Xaa locations
  Clone ID: BRANA-23APR03-C7509_1.p
MAILNFTPSSMFPVTIDSARGTRVRGSVIKMPMSLNTTDPHPPASPGFSLCTCXRKHCLGVATTPFPPISPIYAAPSTAPSTAQNSTEVLNXFHPHNHYWYVEIYGYYRGAGMEKYEKDADLYRKEDPFLVGGKEPDPNIKYYNNIPNVSVLGVDPNPKMESHALKSAIEAGVKSENFKFIHAVAESMPLEDASVDAVVGSLVMCSVSDIPQTLKEIKRILKPGGLYLFVEHVAAEDGTFLRMVQNVLDPLQQVVADGCHLTRNTEDYLLEAGFKGGVDINKVSLSAFYHLSPHLYGVAYN

SEQ ID NO: 7127 - protein, 255 aa, Brassica napus
  Clone ID: BRANA-23APR03-C75115_1.p
MYADTGLGFRFMQGCSPEIHQFEDLFKPYKLSDQTISLVEACEYGFGEESDLLKAPEPIIEEPMLAVDPLSQEIVELSDLGSLQSDQQLIEKAFYECEQELLVKSAMESPLLSEVLDRKNVSQAAEMDSSSVVVSDVPVPKSVSSGSLTSMDIAQHEEAVIQRFFPPVDNGMRRAFSESDIQTLGTRNAGQVQSQLDRIIVSCTSEDRREKLSRYRDKKSRRNFGRKIKYACRKTLADSQPRIRGRFAKTEEMQK

SEQ ID NO: 7128 - protein, 243 aa, Brassica napus
  unsure (1)..(243): unsure at all Xaa locations
  Clone ID: BRANA-23APR03-C7512_1.p
MKLRRILGSVSSLAAXKLSSSSSSYSSGCPSRQIFTASQRNAGGNHSEALPGKHIEWASLGSVRNSRFASGFSPLKPKPLDSIMDLERAKTKSPEELTSIWDDYHLGRGRLGLICKVFLFCCLVNSLANCRWDEGIFNEQPSVEAPHMIFTGLEDYKARGTQAAPYLTSTFYTELSETKDLVFIRGDVVFTSKLTDEEAKWIMETSQSFXLNDTLYKLLERFNKHTHXVEFKDVLQALDMPIL

SEQ ID NO: 7129 - protein, 268 aa, Brassica napus
  Clone ID: BRANA-23APR03-C7524_1.p
MEPSLKPNPFLSFSSFLHTHCNRFASDLSARFEDTKRFAESLTTRRFSPPPFASVSQYPKPSAGTSTATLNPSHVAKALAGTSVFTVSNTNNEFVLISDPTGDKSIGLLCFRQEDAEAFLAQARLRRRELKANAKVVPINLDQVYLLKVEGISFRFLPDPIQIKNAMELKSSSSKNGFDGVPVFQSELLVVRKKNKRYCPVYFSKEDIEKELSKYTRASRADQQIMVGSLEDVLRKMERSEKNSGWEDVIFIPPGRSYAQHMQEVIKE

SEQ ID NO: 7130 - protein, 316 aa, Brassica napus
  unsure (1)..(316): unsure at all Xaa locations
  Clone ID: BRANA-23APR03-C7550_1.p
ARRTLPPQPSSLVAADRSHPASATSPNLQLPHYTTSHHPPRSVPHPNRPSNLESYYGQETPFSVIPAKAVVARTPANNTQTSASITVNPQIPSSAIHSLHLHGVQKLLFLGSSCIYPKFAPQPIPESALLTGPLEPTNEWYAIAKIAGIKTCQAYRIQYKWDASSGMPTNLYGPNDNFHPQNSHVLPALMRRFHEAKVSGAEEVVVWGSGSPLREFLHVDDLADACVFLLERYSGLEHVNIGSGQEVTIKELAELVKEVVGFEGKLGWDSTKPDGTPRKLMDSSKLASLGWTPKVXLXXGXRQTYEWYLENVCADK

SEQ ID NO: 7131 - protein, 183 aa, Brassica napus
  Clone ID: BRANA-23APR03-C7554_2.p
MEANQLNGLSTLVVILLLSLTSTVTSKDEVVSCTMCSSCDNPCNPVQSYPPPPPPSRPPPSPSTTTACPPPPSPPSSGGGGGSSYYYPPPSQSGGGKYPPPSSGGGGGSSYYYPPPSQSGGQGYYYPPPYSGNYPTPPPPNPIVPYFPFYYHTPPPGFGSDRFMGSSSIMFALFPMFLCLVYR

SEQ ID NO: 7132 - protein, 383 aa, Brassica napus
  unsure (1)..(383): unsure at all Xaa locations
  Clone ID: BRANA-23APR03-C7559_1.p
RTDFISLSPRKALSPSTSPAILSLSVKHNRERNSFKVKSVASPAETASEFDEMVSGTKRKYYMMGGKGGVGKTSCAASLAGRFANNGHPTLVVSTDPAHSLSDSFAQDLTGGILVRNDXSXAPLFALEINPEKAREEFRSASQANGGTGVKDFMDGMGLGMLVEQLGELKLGELLDTPPPGLDEAIAISKVIQFLESPEYNMFTRIVFDTAPTGHTLRLLSLPDFLDASIGKILKLRQKITSATSAIKSVFGKEDNKPDAADKLERLRERMVKVRELFRDTESTEFVIVTIPTVMAVSESSRLSASLKKESVPVKRLVVNQILPPSSSDCKFCSIKRKDQMRALDMIREDSELSGLTLMQAPLVDMEIRGVPALRFLGDIIWK

SEQ ID NO: 7133 - protein, 435 aa, Brassica napus
  unsure (1)..(435): unsure at all Xaa locations
  Clone ID: BRANA-23APR03-C7620_2.p
MAALPTWILAMMCLLFFVGAMENSTHDKISSLSSSDENEWNTHAVTNPDEVADEVITLAEMSVRNHTERRKLGYFACGTGNPIDDCWRCDXPNGHKNRKRLADCXIQAFSEDAIGGRDEPGRFYVGTKPNHHGPVNPRQGTLRHAVIQDRPLWIVFKRDMVIQLKQELIVNSFKTIDGRGANVHIANGGCITIQYVTNVIVHGLHIHDCRPTGNAMVRSSETHFGWRTMADGDAISIFGSSHVWIDHNSLSHCADGLVDAVMGSTAITISNNHMTHHNEVMLLGHSDSYTRDKAMQVTIAYNHFGVGLIQRMPRCRHGYFHVVNNDYTHWEMYAIGGSADPTINSQGNRYAAPKNPFAKEVTKRVDTPASHWKGWNWRTEGDLLQNGAYFTASGAASSGSYARASSLAAKSSSLVATITNDAGALPCRRGRQCTS

SEQ ID NO: 7134 - protein, 181 aa, Brassica napus
  unsure (1)..(181): unsure at all Xaa locations
  Clone ID: BRANA-23APR03-C763_17.p
MGLSFGKLFSKXFAKKEMRILMVGLDAAGKTTILYKLKLGEIVTTIPTIGFNVETVEYKNISFTVWDVGGQDKIRPLWRHYFQNTQGLIFVVDSNDRDRVVEARDELHRMLNEDELRDAVLLVFANKQDLPNAMNAAEITDKLGLHSLRQRHWYIQSTCATTGEGLYEGLDWLSNNIANIA

SEQ ID NO: 7135 - protein, 391 aa, Brassica napus
  Clone ID: BRANA-23APR03-C76447_1.p
MFPVTSRRHFTSSLYILRSSSPHNHLRPLLSLLFLPSVRSSKSKSKSSSSTNKHNQQPPPPMAACIDTCRTGKPQISRDSNRSHDDESGFRYSNYYRPSGYHHPTTQTKTIHTRPLIEDLPNDDVWAKIRQEARSDIEREPIVSGYYHASIVSQRSLEAALANTLSVKLSNLNLPSNTLFDLFNGVLEQNPKIVESVKQDLLAVKERDPACISYVHCFLHFKGFLACQAHRIAHELWAQNRKVLALLIQNRVSEAFAVDFHPGAKIGTGILLDHATAIVIGETAVVGDNVSILHNVTLGGTGKQCGDRHPKIGDGVLIGAGTCILGNITIGEGAKIGAGSVVLKDVPPRTTAVGNPARLLGGKDNPKKHDKDPGLTMDQTSHISEWSDYVI

SEQ ID NO: 7136 - protein, 356 aa, Brassica napus
  unsure (1)..(356): unsure at all Xaa locations
  Clone ID: BRANA-23APR03-C7670_1.p
MDDSSTIARKTWELENNILTVEQPDSSSSDGIFYYDEASQTKVQQEKPWATDPNYFKRVQISALALLKMVVHARSGGTIEIMGLMQGKTEGDTIIVMDAFALPVEGTETRVNAQADAYEYMVEYSQTNKLAGRLENVVGWYHSHPGYGCWLSGIDVSTQMLNQQYQEPFLAVVIDPTRTVSAGKVEIGAFRTYPEGHKISDDHVSEYQTIPLNKIEDFGVHCKQYYSLDITYFKSSLDSHLLDLLWNKYWVNTLSSSPLLGNGDYVAGQISDLAEKLEQAESQLAHSRFGGIPASLHRKKEDEPPLAKITRDSAKITVEQVHGLMSQVIKDILFNSARQSDKTPSDPSDPXPMITX

SEQ ID NO: 7137 - protein, 267 aa, Brassica napus
  unsure (1)..(267): unsure at all Xaa locations
  Clone ID: BRANA-23APR03-C7705_1.p
MCSLSASLLLPTKLKPAYSDNRSNSNSSLFLANRRRPKRKNQSIVPMARLFGPAIFESSKLKVLFLGVDEKKPPRTLPRTYTLTHSDITAKLTLAISHSVNNSQLQGWANRLYRDEVVAEWKKVKGDMSLHVHCHISGGHFLLDLFPKLRYYIFSKELPVVLKAIVHGDGNLLNNYPDLQESLVWVYFHSNVDEFNRVECWGPLWEATSPDGHRTQTLPETRCKDECSCCFPQVSSIPWSHSLSNEGCXGYSGTQTEGMPTPNPEKL

SEQ ID NO: 7138 - protein, 129 aa, Brassica napus
  Clone ID: BRANA-23APR03-C7755_1.p
MVDLERKVCCMCGDVGFFDKLFHCSKCLNRFQHSYCSSYYKEQGGPIKICDWCQFEAKSRTGAKHGVSVGSSKRSYRSEYSSANQIKNQEINQITASSSIPPVADKGKTSVPSPRTATRRYKLDPRVRC

SEQ ID NO: 7139 - protein, 263 aa, Brassica napus
  Clone ID: BRANA-23APR03-C7763_1.p
MSTMSGIQGQILEVTVVGCQKLKDTEWFSRQDPYVVLEYSGTRHRTRTCTDGGKNAVFQEKFMFTLLEGLRDLKVAVWNSNTLSTDDFIGNATIQLQKVLSQGYDDCTWTLQTKTGRFAGEVRLILHYAGAKKQNYGSAPSAPPYAPQVPQYSAPPAPSPYSSPPYAGPSPYPQGQYSQPQSAYPPVSAYPPQPSAYPPPPSTAYPPAPSAYPPGPSAYPPGPSAFPPPPPSSAAYPPPPYPPQPSPYYPQGPYPGQYPPPPY

SEQ ID NO: 7140 - protein, 345 aa, Brassica napus
  unsure (1)..(345): unsure at all Xaa locations
  Clone ID: BRANA-23APR03-C7800_1.p
MKGGTVSFLFVLLISTFTSIFCFRDGMLPNGDFELGPKPADMKGTQVIKKNAIPSWELTGFVEYIKSGQKQGDMLLVVPAGKFAVRLGNEASIKQRLNVTKGMYYSLTFSAARTCAQDERLNISVAPDSGVIPIQTVYSSSXGWDLYAWAVSXLIDGVHRRALYPPRPTNKNILKNGGFEEGPLVLPGSTTGVLIPPFIEDDHSPLPGWMVESLKAVKYVDTEHFSIPQGRRAIELVAGKESAIAQVARTIIGKTYVLSFAVGDANNACKGSMVVEAFAGRDTLKVPYESRGTGGFKRASIRFVAVSTRTRVMFYSTFYAMRSDDFSSLCGPVIDDVKLLSVRKR

SEQ ID NO: 7141 - protein, 251 aa, Brassica napus
  unsure (1)..(251): unsure at all Xaa locations
  Clone ID: BRANA-23APR03-C7811_1.p
MAEAQKLVELIMKKRAERIHCQDKSSSSVSDKEKKASSIKTKIYRLFGREEPVHNVLGGGERADFLLWWNKKLSGGVLGASTLSWILFXLLYYNLLILFGHVSILALAVLFLWSSATTFIHKTPPHIPEVHIPEDVVLQLASGLRIEINRGFTLLRNIALGRDLKKFLMVVAGLWVLSKVGSSCNFLTLIYIATVLLFTVPVLYEKYEDKVDHFGEKAMKEIKKQYAVLDEKVLSKVMSKIPRGAFNKKKD

SEQ ID NO: 7142 - protein, 199 aa, Brassica napus
  unsure (1)..(199): unsure at all Xaa locations
  Clone ID: BRANA-23APR03-C7866_2.p
MLKSEPSLSIYCESGXXXEDTATGTDENLDRXVSIGDSVEADFSFAKHGSSSIDALSIKEEDEIERPPSPPMHLAAGLGIDKFDLYGGEIKFDLPSLDDERCGDYYKRMLEEYPLHPLLLRNYANFLEYKGDFSGAEEYYHKCTVVEPSDGLALANYGRLVMKLHQDEAKALSYFERAVQASPEDRFCCNIHNWLFTQP

SEQ ID NO: 7143 - protein, 237 aa, Brassica napus
  Clone ID: BRANA-23APR03-C7877_2.p
MASTTLDVSRAELALVVMYLNKAEARDKLCRAIQYGSKFLSGGQPGTAQTVDKSTSLARKVFRLFKFVNDLHGLISPVPKGTPLPLVLLGKSKNALLSTFLFLDQIVWLGRSGIYKNKERAELLGRISLFCWMGSSVCTTLVEIGEIGRLSSSMKKIEKGLKNGNKYQDEEYRAKIKQSNERSLALIKAAMDIVVAAGLLQLYPKKITPRVTGAFGFITSLISCYQLLPSRPKIKAP

SEQ ID NO: 7144 - protein, 436 aa, Brassica napus
  Clone ID: BRANA-23APR03-C7893_1.p
MASLLGTSSIRASPSLSSSSSSTPSISPICFRPGRICGRASNAGIQIRPKKNRSRHHVSVMNVATEINSTEQQVGKFDSKKSARPVYPFAAIVGQDEMKLCFSLNVIDPKIGVVMMMGDIGTENAGMMIIGVRGTGKSTTVRSFVDLSDPLDVEFVGVDNSDPLDPEFMGVEVRERVERGEQVPVVATKINMVDLPLGATEDRVCGTIDIEKALTEGVKAFEPGLLAKANRGILYVDEVNLLDDHLVDVLLDSAASGWNTVEREGISISHPARFILIGSGNPEEGELRPQLLDRFGMHAQVGTVRDADLRVKIVEERARFDSNPQDFRETYKTEQDKLQDQISNARSNLSSVQIDRELKVKISKVCSELNVDGLRGDIVTNRAAKALAALKGKDRVTADDVATVIPNCLRHRLRKDPLESIDSGVLVSEKFAEVFS

SEQ ID NO: 7145 - protein, 294 aa, Brassica napus
  Clone ID: BRANA-23APR03-C7919_2.p
MRGMKSLTIWALFAALLSQQLFASVTSIRFEDEKTYYTPPSGGHGGYTPTPNCGSPPYDPTPSTPSHTPTPSTPSHTPTPHTPTHHTPPCNCGTPPHDPSTPSHPSTPSHPSTPSHPSTPPSGGYYTSPPPSTPVVTPPTPIVDPGTPIIGGTPPTPFIDPGTPGTPFLPAPFPPITGTCDYWRNHPTLIWGLLGWWGTVGGAFGAVSIPSSIPGFDPHMNLLQALSNTRTDAIGSLYREGTASWLNSMVNNQFPFTTSQVRDQFLAGLSSTKAATKQAQTFKLANEGRLKPRI

SEQ ID NO: 7146 - protein, 209 aa, Brassica napus
  unsure (1)..(209): unsure at all Xaa locations
  Clone ID: BRANA-23APR03-C79315_1.p
MVSIEMSGHGEPGPPXFDRRASGSASFLPSLRPPSIHGPDATPGRFFVTPSAPMHVFLSSASLSANPQLDSSSASGDFDFYSSSRFSCCSGPLGGVPAAAXSGRLSDGQLEPMKLPSPLQDPWGSAPILDRETDEEDDGKRDGRRGRDLKLRXRSVHRRDRSLSPLRNAAFQWNEEEEEEEKGLAGECIRKLQEDYEEDEAKINENVTS

SEQ ID NO: 7147 - protein, 99 aa, Brassica napus
  Clone ID: BRANA-23APR03-C7957_2.p
MDLDLLQDLPMLNFPSPIKILSNNRDADGGGGGCTTPTSSDHKIPPSSATTPPPPPQKRRALPPPLVYRSCKRKCTAFLWRRRIWRRSRPTRPSWWWIW

SEQ ID NO: 7148 - protein, 347 aa, Brassica napus
  unsure (1)..(347): unsure at all Xaa locations
  Clone ID: BRANA-23APR03-C7977_1.p
MAPSLATPPDSRTPQPHIHNTRLRIMSEPSPVSDPYAHIGIVKNPDGSITRDPTRFPYASATPDPSPVNTVVSKDITVSHSNSTWMRLYVPVTALNDGVSSKKLPLVVYYHGGGFVICSVDFKPFHDFCNRMARELNAVVASPSYRLAPEHRLPAAYDDGVDALRFIRTSDDEWIKSHADLSNVFLMGTSAGGNLAYNVGLRSALADLSPVRIRGLVLHHPFFGGEERCESEIRLEHDQVFPPTAGDVCWELCLPVGANRDHEYSNLTVGDGPVNMEMIGRLGWKVVVSGGGGDPMIDRQRDVAKLMKEKGVDVVERFTDGVVHGAELGDPTKSTTLFASIRNXIYS

SEQ ID NO: 7149 - protein, 94 aa, Brassica napus
  Clone ID: BRANA-23APR03-C8004_1.p
PHRSLPPRRWTSLEVKKWGVVALRAGAYRCLIIAAICRNHIMEFDVLECQANQACATRGGMHCCFCGCLQPRLPLSLSSADGLRLSQVCPLDNQ

SEQ ID NO: 7150 - protein, 243 aa, Brassica napus
  Clone ID: BRANA-23APR03-C8039_1.p
MAINGEDRISGERPIIMVTNDDGIDAPGLRSLVRVLVSTNLYDVRVCAPDSEKSAVSHSIIWSRPLTAHRVEIEGAEAYAVSGTPADCTGLGLSEALFPSLPDLVLSGINVGSNCGYNIVYSGTVAGAREAFIYDVPSASISYDWKRGDINVNDFGLSAQACLPIINSMLSAIKNKTHPTNCFLNIDLPTGIANHKGYKLTTQGKSLCKMGWRQVEEEAQGAKMLATMLMETESGVGLDNNDT

SEQ ID NO: 7151 - protein, 354 aa, Brassica napus
  unsure (1)..(354): unsure at all Xaa locations
  Clone ID: BRANA-23APR03-C8082_1.p
KSRNALLLNINDRKQNQQHRQEENVSELQRKKVHPSYCXRXEELVLNVASECEHNTLXQSRHRSCLPNGSINLLEELSYWIIKNAYQFRAPYVAPPVSFSCLPVISWHLPLFDLPPXWFSLSFPLALSLVRTCFPTGSFERMEEEGDVATAFTMARIVSNIPISRGGPTSVVIYDIHALQERFYFADQVLPLFETGIPLLTKRLQVDPRVRKIIVAFPDDGAWKRFHKLLDQYPTVVCTKVREGDKRIVRLKEGNPAGCHVVIVDDLVQSGGTLIECQKVLAAHGAAKVSAYVTHGVFPKSSWERFTHKNNGSEEAFAYFWITDSCPQTVKSIGNKAPFEVLSLAGSIAGALQI

SEQ ID NO: 7152 - protein, 255 aa, Brassica napus
  Clone ID: BRANA-23APR03-C8146_1.p
MTSSQGDMDLEEWELLPKSYFKDLDLDHDEDHQEAMILDCFLSPSTQDPLHKIESPPISIVVLTKPLQVPMAWEPVLDHENKNIPDLDPDPTQTLLMESVLSPSVSFKKTKETEFADMKIDPPAWITSPVPSIDAASCEGSVDLRVKKENDDVTSGHGGEKLNLWKIGLNGIGAVCSFGVAAAAATVCVLFLGHNNIKVCKNKNHKLRFQIYSDDHKRMNEAVNHATKVNEAIFAMKCVPVVRAQISFGGYYDGL

SEQ ID NO: 7153 - protein, 241 aa, Brassica napus
  Clone ID: BRANA-23APR03-C8169_1.p
ISFSKSLSLTPPHLPFFHLSAAASSPNRAVPCMADDPPLPQPPNRSGDGSVSAPPPPSPASSAIDFLSLCSRLKTTPRAGWVKRDVKNPESIADHMYRMGLMALVSSDIPGVNRDKCMKMAIVHDIAEAIVGDITPSCGVSKEEKNRRESEALEHMCKLLGGGERAEEIAELWREYEANASPEAKLVKDFDKLEMILQALEYEQEQGKDLEEFFQSTAGKFQTDIGKAWALEIASRKRKRQ

SEQ ID NO: 7154 - protein, 152 aa, Brassica napus
  unsure (1)..(152): unsure at all Xaa locations
  Clone ID: BRANA-23APR03-C82451_1.p
GSVDFCVFFLKILFSKSNHETVSNSYLLDSPPVKMPLKRSKTEPNSSVLESLHQDILFLXIRVLCHVDHDDLERLKRVSKTIRNAVLEAKKSHFDYSTPRKTLPFRDPTSILEQDSSLSDQDDAMDPPNAPVRRRKINREADLSKISMVLFK

SEQ ID NO: 7155 - protein, 400 aa, Brassica napus
  unsure (1)..(400): unsure at all Xaa locations
  Clone ID: BRANA-23APR03-C826_1.p
MASASSLLRWNPPFTHTRLRQNRTTLFFSSSTTTRIKYVPYANRLGNIYNPLRDLNXNPFDQSANQIDKTKESLKNPAKAAVVLVLLLFHYLNXPFAASGGRGGGISFXSRSTSSSSSSSYSVPRTLDPSSSSRYSSSYSGPCTLSGSSSTRYSAPYYGPSPFSGGLYVGPAVGFGFGGGFSSFSPILVGLAAFIVVSGFLSDRRSQGSTLTATQKTSVIKLQVXGLLGLGRTLQQDFNRLAENADTSTSEGLAYVLTDATLALLRHPDYCISCYSSVDVRRSIEDGEKRFNQLSIEERGKFDEETLVNVNSIKRQSSKIRTASGFSNEYIVVTILVAAEGTHKLQPINGTADMKEALQKIGSIPRNKIMAVEVLWTPQNEKDTLSERKLLEDYPLLRPL

SEQ ID NO: 7156 - protein, 153 aa, Brassica napus
  Clone ID: BRANA-23APR03-C82784_1.p
MRATKSPIHAVSTWVRRQPPKVKVFLAVASGITALVLLKFIVHDHDNLFVAAESVHSIGISLLIYKLTKEKTCAGLSLKSQELTATFLAVRLYCSLVMEYDIHTILDLATLAATLWVIFMIRYKLKASYMEDKDTLPLYYVVSVSIWYSFQHR

SEQ ID NO: 7157 - protein, 360 aa, Brassica napus
  unsure (1)..(360): unsure at all Xaa locations
  Clone ID: BRANA-23APR03-C8302_1.p
MATLFTTTTSRPFSANPSKTFSPSLSLKPNALSFSLTHHRPPRPLRFSKIRSSLPSESDSEPEGGYSXTDEWGEQPAEPESQPDNAASAVSDEWGXEKSEPVPEESVFGLAEPPTQTNEGEEKERXGGGWLMKGVQLRMCICNTVYGTELGFQAGSEIRAEVLEIVNQLEALNPTQAPVENPELLDGNWVLLYTAFSELLPLLAAGSTPLLKVKSISQSIDTKSLSIDNSTTLSSPFADFSFSATASFEVRTPSRIEVSFKEGTLKPPEIKSSVDLPESVGVFGQEVNLSFLKQSLNPLQDVAANISRAISGQPPLKLPFPGNRGSSWLLTTYLDKDLRISRGDGGLFVLAREGSSLLEL

SEQ ID NO: 7158 - protein, 165 aa, Brassica napus
  unsure (1)..(165): unsure at all Xaa locations
  Clone ID: BRANA-23APR03-C8361_1.p
VRISLLRIVVKIPPAVESSWKDVSSGGCGFVMATSESGKLITCGSTDDLGQSYRHIVXETPEPFPLPPEVCVQKAEAGWDHCVAVTXSHEVYTWGWTECIPTGRVFGQVEGDSCEMNTSFSAEQGKSLLHVKISHVMTGLISHVPSASRSFNAGSHLPHVHHVMM

SEQ ID NO: 7159 - protein, 204 aa, Brassica napus
  unsure (1)..(204): unsure at all Xaa locations
  Clone ID: BRANA-23APR03-C8441_1.p
MECVFGLVGNGFAIVAADTSAVHSILVHKNNEDKIMPLDSHKLIAASGEPGDRVQFTEYVQKNVSLYQFRNGIPLTTAAAANFTRGELATALRKNPYSVNILMAGYDKEAGASLYYIDYIATLHKVDKGAFGYGSYFSLSTMDRHFRSDMSVEEAIELVDKCILEIRSRLVIAPPNFVIKIVDXDGAREHAWRQSVQDVTTAAG

SEQ ID NO: 7160 - protein, 334 aa, Brassica napus
  Clone ID: BRANA-23APR03-C84471_1.p
MDTMRDKPIKFSSSVFCLIILLSVYNSTAELRRLVQPPKSDGTLSFLVVGDWGRRGSYNQSQVARQMGKTGMNLNIDFVISTGDNFYDDGITSPYDCQFQDSFTNIYTAPSLQKPWYNVLGNHDYRGNVDAQISPILKDLDCRWVCLRSYVVNADIVDIFFIDTTPFVDKYFDEPKDHVYDWSGVLPRNKYLNNLLADLDVSFQESVAKWKVVVGHHTIKSAGHHGITKELEKQLLPILEANEVDIYINGHDHCLEHISSINSGIQFMTSGGGSKAWKGDVNEWNPQEMRFYYDGQGFVSVYLSEAELRVDFYDGYGRVLHRWNTYKKGIYTDI

SEQ ID NO: 7161 - protein, 214 aa, Brassica napus
  Clone ID: BRANA-23APR03-C85009_1.p
MVSSDSNVLPVSTTQPPTLTESQPPAVRAFVNRFTETVRDGLSRSRPWSELLDRSAFAKPDSLSEAASRLRKNSSYFRANYVCIVSLILAFSLLAHPFSLVLLVCLAASWLFLYLFRPVDRPLILFGRSFSDLETLGALILSTIAVIFFTSVGSVLISALLVGIATVCVHGAFRAPNDLFLDEQDPAAAGFLSFIGVPTTYSSLSSTSSAPSAV

SEQ ID NO: 7162 - protein, 226 aa, Brassica napus
  Clone ID: BRANA-23APR03-C85663_1.p
MRTFLINHAKTLADQTRRQPHASRRLLSLLPSSSASSPLLTLSRFLYATLDMSASDSTSSLLVSINPKGIKGLHRTIAAEIESRDGFNLPQKAAEPSKTTPDAFHCKSPRFGQVPGTWHFRHTILPQQENKVPAAVNRHREMHSSSGKSPAAAKQPAAKSAKKVSSKSSKKKPAKSAGGGKGSSGTLFPKRSKFPKHHRGRLRGISSGDNRICFGRYALRTLASAW

SEQ ID NO: 7163 - protein, 168 aa, Brassica napus
  Clone ID: BRANA-23APR03-C8589_1.p
MENILGLLRIHVKRGVNLAIRDTSSSDPYIVFYSGKQKLKTRVIKHSINPAWNDELTLSVTDPNLTVKLTVYDKDLFSADDKMGEAEFSIAPYLEAIKLRHKLEGQLPNGTIIMKVQPTRQNCLSEESHILLNQGKLVQNMFLRLQHVECGEVEVQLEWIDVPGSKGF

SEQ ID NO: 7164 - protein, 229 aa, Brassica napus
  unsure (1)..(229): unsure at all Xaa locations
  Clone ID: BRANA-23APR03-C8608_1.p
SHTLLLLLPLTTGPAKVHGVSMXSTSKHVLSGRSEKEVAFELVPVDMXAGGHKQAPFLSLNPFXRSLALQDGDLTLXFESRSHSQEYVAEXEYSEKGEKLMCPGCNKXKALTKVWLNVEGQQFDPIASKIAFERVFKGMFGMTTDPAAVQDLEGKLVRVLDIYEARLSKSEFLACDCFTLADLHHLPVIHYLMGTDSKALFESRPKVCEWVKKITARPAWAKVVDLQKQ

SEQ ID NO: 7165 - protein, 511 aa, Brassica napus
  unsure (1)..(511): unsure at all Xaa locations
  Clone ID: BRANA-23APR03-C86_1.p
LLSLSMGRSGGSSKSFPCQVNIGRTGRFAGRKSLXMCGGRALGATCSGDKILVANRGEIAVRVIRTAHEMGIPCVAVYSTIDKDALHVKLADEAVCIGEAPSNQSYLLIPNVLSAAISRGCTMLHPGYGFLSENALFVEMCREHRINFIGPNPDSIRVMGDKSTARETMKNAGVPTVPGSDGLLKSTEEGVKLANEIGFPVMIKATAGGGGRGMRLANEPSEFVKLLQAAKSEAAAAFGNDGVYLEKYVQNPRHIEFQILADKFGNVVHFGERDCSIQRRNQKLLEEAPSPALTPELRKAMGDAAVAAAASIGYVGVGTVEFLLDERGSFYFMEMNTRIQVEHPVTEMIYSVDLIEEQIRVAMGEKLRYTQDEIVLRGHSIECRINAEDPFKGFRPGPGRITSYLPSGGPFVRMDSHVYPDYVVPPSYDSLLGKLIVWAPTRERAIERMKRALNDTIITGVPTTIEYHKLILEVEDFKNGKVDTAFIPKHEEELAEPHEIVLVKDLTNAAA

SEQ ID NO: 7166 - protein, 171 aa, Brassica napus
  Clone ID: BRANA-23APR03-C8705_1.p
MAKFVIFFLASALCFTTLLHFAAADADDFDRFHIKGSVYCDTCRVQFMTRLSKVLEGAKVKLECKGRENQTVTLTKEAMTDKDGNYEMEVMGDHEEEVCEIILVQSPDADCGDVNNQEFLRNAARISLTANDGIVSNETRTINPLGFMRKTPLADCPQAFQVLGLSLTVFF

SEQ ID NO: 7167 - protein, 300 aa, Brassica napus
  unsure (1)..(300): unsure at all Xaa locations
  Clone ID: BRANA-23APR03-C88022_1.p
MVSDNGEPMMVITNESQRSVPTPFLIKTFNLVEDPSIDDVISWNEDGSSFVVWNPTDFARDLLPKHFKHNNFSSFVRQLNTYGFKKVVPDRWEFSNDFFRRGEKRLLKEIQRRKLTPQAAAVPPPEVVAAAAAQRVQTTKTVVSPSSSAEDQAVSPSWYCQTGNGGGLSVELLEENEKLRSQNIQLNRELTQMKSLCDNIFSLMSNFSGSPPERSSSPGASTSHDAMKTVEFLPAKRFSVETEGEEEASHRLFGVSIGLKRTRSEGVQVKAVGERPGGGGEKEETPWLRHXYRTNQRVCN

SEQ ID NO: 7168 - protein, 243 aa, Brassica napus
  Clone ID: BRANA-23APR03-C8841_1.p
MEITTTFTVLFTLMIFLGISINGGLSQGHQHLVKKTRSSAVVVGTVYCDTCFNGAFSKSHNHLIPGAVVAVECIDENSKPSFRQEVKTDEHGQFKAKLPFTVSKHVKKIKRCSVKLLSSSQPYCSIAASATSTSLKRLKSSKHGENTRVFSAGFFTFKPENQPEICSQKPINLRGSKPLLPDPAFPQPIQDPVPNNPSPLPNLPIVPPLPNLPIPQLPPLLPPGPPQKQPSLHNKKESSLDDK

SEQ ID NO: 7169 - protein, 350 aa, Brassica napus
  Clone ID: BRANA-23APR03-C8844_1.p
MDSHKRSLGFISLAFLFITCSSAEFLIQQVTEGKGTENNSSYNVEANLGETRAFREERPSSKIVTIAGYSVIKGRFEPYESSVFEAAGYRWRLVLYVIGNKNDGGAGHISLYVRMEETESLPYGWEVNVDLKLFVHNPKTHKYLTVTDGTVKRYNAAKKEWGFGKLISLSIFENTNNGYIVQDTCSFGAEILIVKPAEIQEKVTFISNPPNNVFTWKILRFSSLEDKFYYSADFLVGDRYWRLGFNPKGDGDGRPHALPLFLFAQGFKENAVATNTWGAVNLRLKNQRNSNHRQLYSAAWYPIRSDYGVGVNNIILLSDLKDPSKGYLVNDAIIFEAEMVKVSVTNIVSV

SEQ ID NO: 7170 - protein, 113 aa, Brassica napus
  Clone ID: BRANA-23APR03-C8873_4.p
MSELDSQVPTAFDPFADANAEDSGAGTKEYVHIRVQQRNGRKSLTTVQGLKKEYSYSKILKDLKKEFCCNGTVVQDSELGQVIQLQGDQRKNVSTFLVQAGLVKKDNIKIHGF

SEQ ID NO: 7171 - protein, 136 aa, Brassica napus
  Clone ID: BRANA-23APR03-C900_1.p
MARTKQTARKSTGGKAPRKQLATKAARKSAPTTGGVKKPHRYRPGTVALREIRKYQKSTELLIRKLPFQRLVREIAQDFKTDLRFQSHAVLALQEAAEAYLVGLFEDTNLCAIHAKRVTIMPKDIQLARRIRGERA

SEQ ID NO: 7172 - protein, 136 aa, Brassica napus
  Clone ID: BRANA-23APR03-C900_3.p
MARTKQTARKSTGGKAPRKQLATKAARKSAPTTGGVKKPHRYRPGTVALREIRKYQKSTELLIRKLPFQRLVRKIAQDFKTDLRFQSHAVLALQEAAEAYLVGLFEDTNLCAIHAKRVTIMPKDIQLARRIRGERA

SEQ ID NO: 7173 - protein, 165 aa, Brassica napus
  Clone ID: BRANA-23APR03-C9033_4.p
MASGFSGDETAPFFGFLGAAAALVFSCMGAAYGTAKSGVGVASMGVMRPELVMKSIVPVVMAGVLGIYGLIIAVIISTGINPKAKSYYLFDGYAHLSSGLACGLAGLSAGMAIGIVGDAGVRANGQQPSGFVGMILILIFAEALALYGLIVGIILSSRAGQSRAE

SEQ ID NO: 7174 - protein, 266 aa, Brassica napus
  Clone ID: BRANA-23APR03-C910_15.p
MAASTMALSSPAFAGKAVKLSPGASEVFGTGRVTMRKTVKPTGPSGSPWYGSDRVKYLGPFSGEPPSYLTGEFPGDYGWDTAGLSADPETFARNRELEVIHCRWAMLGALGCVFPELLARNGVKFGEAVWFKAGSQIFSEGGLDYLGNPSLVHAQSILAIWATQVILMGAVEGYRVAGEGPLGEAEDLLYPGGSFDPLGLATDPEAFAELKVKEIKNGRLAMFSMFGFFVQAIVTGKGPLENLADHLADPVNNNAWAFATNFVPGK

SEQ ID NO: 7175 - protein, 204 aa, Brassica napus
  Clone ID: BRANA-23APR03-C9251_1.p
MATKVYIVYYSMYGHVEKLAEEIRKGAASVEGVEAKLWQVPETLPEEALSKMSAPPKSESPIITPNDLTEADGFVFGFPTRFGMMAAQFKAFLDATGGLWRTQSLAGKPAGIFYSTGSQGGGQETPALTAITQLVPPGMIFVPIGYTFGAGMFEMEKVKGGSPYGAGTFPGDGSRQPPALELGQAFPQGKYIAPLPKKLKGFSA

SEQ ID NO: 7176 - protein, 113 aa, Brassica napus
  Clone ID: BRANA-23APR03-C9291_1.p
NVQRKPGTTGHTLTVKVVDAKPVVPAARKARPGVCMGRPSQPSRISECLIGEETGCILFTARNDQVDLMKPGETVIVRNSRIDMFKGTMRLGVDKWGRIEATEPASFTDISKK

SEQ ID NO: 7177 - protein, 183 aa, Brassica napus
  Clone ID: BRANA-23APR03-C929_2.p
MGGGGKVYTLAEVSQHTTAQDCWIVIDGKVYDVTKFLDDHPGGDEVILTSTGKDATDDFEDVGHSSTAKAMLDEYYVGDIDTAAVPAKTKFVPPPSPKQTESDQSKSSDFLVKILQFLVPLLILGLALGIRSYTKTPFFFLRTLLGWVFESGYTLCPPLYLSVCLVKTSKYCILFLKIKWISY

SEQ ID NO: 7178 - protein, 194 aa, Brassica napus
  unsure (1)..(194): unsure at all Xaa locations
  Clone ID: BRANA-23APR03-C9310_1.p
MSEETKQNQTLQRPAPRLNERILSSFSRRSXVAAHPWHDHDIGPRAPQIFNVVVXEIIKGSKVKYELYNKTGLIKDDRILYSSVVFPHNYGFVPRTLCEDNDPIDVLVIMQEPVLPGCFLRARAIGLMPMIDQGEXKELPPRSLSEIRRFFEDYKKNENKEVAVNDFLPNGPAVEAIQYSMDLYAEYILHTLRR

SEQ ID NO: 7179 - protein, 209 aa, Brassica napus
  Clone ID: BRANA-23APR03-C9310_2.p
MTEETKENQRPAPRLNERILSSLSRRSVAAHPWHDLEIGPGAPQIFNVVVEITKGSKVKYELDKKTGLIKVDRILYSSVVYPHNYGFVPRTLCEDNDPIDVLVIMQEPVLPGCFLRARAIGLMPMIDQGEKDDKIIAVRVDDPEYKHYTDIKELPPHRLSEIRRFFEDYKKNENKEVAVNDFLPSENAIEAIQYSMDLYAEYILHTLRR

SEQ ID NO: 7180 - protein, 218 aa, Brassica napus
  Clone ID: BRANA-23APR03-C9326_1.p
TRPFRSSPSTMAPIIRSSPSLAFLVLQISLIFFASTLPYSSGSEDSYTITGRVKIPPSNVIGHLSKFSNVKVILNGGQSVTFLRPDGYFSFHKVPAGTHLIEVSAMGYFFSPVRVDVSARHHGKVHATLTETRRSLTELVLEPLREEHYYEIREPFSILSIVKSPMGLMVGFMVVVVFLMPKLMENIDPEEMKQAQEEMRRQGVPSLSSLLPGAGASR

SEQ ID NO: 7181 - protein, 179 aa, Brassica napus
  Clone ID: BRANA-23APR03-C9539_1.p
MESSPAAAAKPARGAGGRKGGDRKKSVSKSVKAGLQFPVGRISRYLKKGRYAIRYGAGAPVYLAAVLEYLAAEVLELAGNAARDNKKNRINPRHLCLAIRNDEELGKLLHGVTIASGGVLPNINPVLLPKRSASQTEKPEKAAKAAKSPIKRRTCFFRDCVVYFLCLLSVWFVLWISNG

SEQ ID NO: 7182 - protein, 203 aa, Brassica napus
  unsure (1)..(203): unsure at all Xaa locations
  Clone ID: BRANA-23APR03-C959_2.p
MAIPLAKLLISAVAVFMLVSASFATSEMPFMVVHKKATLNRLKSGAERVLVSFDIYNQGSATAYDVTLVDNTWIKKTFEVVNGNTSRSWERLDAGGILSHSFELEAKVKGPFYGAPAVVTVDPRVXFRIPTKAALQQAYSTPLLPLDILADVPPTDLLALAKRMLAKYGSLVSVISMVVLFVHLVATPSSKSNAAKGSSKKKR

SEQ ID NO: 7183 - protein, 382 aa, Brassica napus
  unsure (1)..(382): unsure at all Xaa locations
  Clone ID: BRANA-23APR03-C96343_1.p
MGLCFQPILASLFLILLSSLPELLAQSQQHFLGQNNTSLLGEERSCNWFRGKWVYDSSYPLYSPFSCPFINPEFNCQKTGRPDTNYQHFRWQPFSCSLPRFDGVNFMRRMRGKKIMMVGDSLSLNMFESLACLIHASLPNAKYSLSRSQPLTSLTFQDYGVTILLYRTQFLVDVVQEKAGRVLVLDSIKQANAWLGMDVLIFNSWHWWTHTDGIQPWDYMREGNTLYKDMNRLVAFYKGLNTWARWINGNINPSRTQVFFQGVSPVHYDXMTFKAXIQNTNCVQNSGRQWNEPSQSCKGQTQPFMGERYPGGLPLGWVVVNKVLSRIKKPVRLLDLTTLSEYRKDAHPSLYNGIAKGLDCSHWCLPGLPDTWNLLLYASLTS

SEQ ID NO: 7184 - protein, 114 aa, Brassica napus
  unsure (1)..(114): unsure at all Xaa locations
  Clone ID: BRANA-23APR03-C9772_1.p
MASLASSLQSSKVSFSPFXHGSTPPPSLSXKPISFPNTRKPGLVPAIRAMKTMQGRVVCATNDKRGRGVGMRRPAHPKYKRRVRMKKKYQEAHEAEKVLKXADVGRLEKSRLIR

SEQ ID NO: 7185 - protein, 185 aa, Brassica napus
  Clone ID: BRANA-23APR03-C9812_1.p
MESSAAATKPARGGRRGGDRKKSVSKSVKAGLQFPVGRIARYLKKGRYAVRYGSGAPVYLAAVLEYLAAEVLELAGNAARDNKKNRINPRHLCLAIRNDEELGKLLHGVTIASGGVLPNINPVLLPKRTAGSSQGEKVKAEKVKASSPAKFNVWFVKPIEDLCFYTFVMKELISLVMFLSFCLIE

SEQ ID NO: 7186 - protein, 387 aa, Brassica napus
  unsure (1)..(387): unsure at all Xaa locations
  Clone ID: BRANA-23APR03-C98933_1.p
MSDGYYSCKKTDDICEDVCGQDGSRAAKAFSRVRCVLRGLDFKTYIIFLTIVPIFILGVYLHGQKLTYFLRPLWESPPKPFQTLPHYYHHNASMETLCSLHGWTHRESPRRVFDAVLFSNEVDMLTIRWKELYPYVTQFVILESNSTFTGLPKPLVFAANRENFKFVEPRLTYGNIGGRFKRGENPFVEEAYQRIALDQLIGLAGIQEDDLLIMSDVDEIPSAHTINLLRWCDGYPPVLHLQLKNYLYSFEYFVDXKSWRASVHLYKPGKTRYAHFRRGDTLLADSGWHCSFCFRRISEFVFKMKAYSHNDRVRFSHYLNPKRIQDVVCRGTDLFDMLPEEHTFREIIGKLGPIPRSYSAVHLPGHLIEKAESYKYLLPGNCVRDSG

SEQ ID NO: 7187 - protein, 201 aa, Brassica napus
  unsure (1)..(201): unsure at all Xaa locations
  Clone ID: BRANA-23APR03-C9926_2.p
MARSVKLLLWSLLLLGTLTAIQAKKSKEKITNKVYFDVEINGKEAGRIVMGLFGKTVPKTAENFRALCTGEKGMGKKGKALHYKGSSXHRIIPSFMLQGGDFTDGNGMGGESIYGRPTRPENFKLKHTGPGYLSMANAGEDTNGSQFFITTVTTSWLDGRHVVFGKVVTGMDVVYKIEAEGSQSGTPKSKVVIVDSGELPL

SEQ ID NO: 7188 - protein, 75 aa, Brassica napus
  unsure (1)..(75): unsure at all Xaa locations
  Clone ID: BRANA-23APR03-C9953_1.p
MALSAAMVGAFLGPGTQMYSTAPRKLPYLREPWEGVGARGRGGVFASQLXRWDVELKEXDLEVMLDNARAANERR

SEQ ID NO: 7189 - protein, 317 aa, Zea mays
  Clone ID: ZEAMA-23APR03-C0_1.p
MPTLGISPLLDAYFRRRFAAAGLVEASVPLDGGATTVHCWRFPPGSADGEDDARPVLVLLHGFGPPATWQWRRQVGPLSRRFRLVVPDLLFFGGSSTSAAAPGAGRVSEARQAEAVAKLVAALVAPPARVSVAGTSYGGFVAYHLARLLGPGAVDRVVIASSDLLKADADDRALLRRGAAERVEDVMLPRSPERMRRLMQLAYHRPRRFTPGFVLRDLAQYLYSDKVEEKKELIKGITLGNKDKFQLTPLPQEVLVLWGEHDQIFPVEKAFQVARKLGANARLEVLKDTGHMPQEEDPKRFNEAILNFLLPAPKSSL

SEQ ID NO: 7190 - protein, 121 aa, Zea mays
  Clone ID: ZEAMA-23APR03-C10034_5.p
MASTGRSMLLSLLLFAVTLSLLEMYRAKFASSELMTIAGGFVCSLLFLLLLTFIGNYQEASGDRTGWGAVVVAQLVALIVAGTVHRVCITTCFLFSAGLLYEVDKLSGMILARSESKVRRH

SEQ ID NO: 7191 - protein, 504 aa, Zea mays
  unsure (1)..(504): unsure at all Xaa locations
  Clone ID: ZEAMA-23APR03-C10068_1.p
MVEESASASEASVIQTLTEPATEIAQTLEPNLASIEATVESVIPXCTRSAYYPENVQSTCNNDANNNNAADSAATEVCDEEREKTLEFAEELTEKGSVFLKENDFAEAVDCFSRALEIRVAHYGELDAECINAYYRYGFALLAKAQAEADPLGNMPKKEGEVQQESSNGESLAPSVVSGDPERQGSSSGQEGXSGGKDQGEDGEDCQDDDLSDADGDADRXDNEYNLDMAWKMLDIARVITDKQSTETMEKVDILCSLAEVSXEREDTESFLSAYKKALSILERLVEPDSRRTAELNFRICICLETGCQHKEAIPYCQKALLICKARMERLSNEIKGASGSATSSTVSEIDEGIQQSSNVPYIDKSASDKEVEIGDLAGLAEDLEKKLEDLKQQAENPKQVLAELMGMVSAKPNASDKVVPAAAEMSSSRMGTVNTNFGKDLESPTVSTAHTGAAGGGAASGVTHLGVVGRGVKRVLMNTTSIESSASKKPALEFSDKADGNSS

SEQ ID NO: 7192 - protein, 327 aa, Zea mays
  unsure (1)..(327): unsure at all Xaa locations
  Clone ID: ZEAMA-23APR03-C10069_1.p
SRSGSYITRERCCRYGSGRPRWRSGRPARYPRGRGSRLKVTGASSFVPIARAYSGFGRSAARWWRRRYCAFEYSVGTLSGEDRRFVAKEALVYVERNKKVDIIHEXDGLCYEDVFRVQNGNHVIQKCIECVPTEHIGFVVSAFQGQVPSLSMHPYGCRVIQRVLEHCGGTSQSQCIVDEILQXACVLAQDQYGNYVTQHVLERGNAHERSQIIXKLAGQVVTMSQNKYASNVIEKCFQHGDIAERDLLIRQIVEQTEGNNNLLAMMKDQYANYVVQKILETCNENQRELLVSRVKGHMQALRKYTYGKHIVSRVEQLCGDGTAEPDS

SEQ ID NO: 7193 - protein, 135 aa, Zea mays
  Clone ID: ZEAMA-23APR03-C1009_10.p
MRKHRIVSLVAALLVLLALAAVSSTRSTQKESVADNAGMLAGGIKDVPANENDLQLQELARFAVNEHNQKANALLGFEKLVKAKTQVVAGTMYYLTIEVKDGEVKKLYEAKVWEKPWENFKQLQEFKPVEEGASA

SEQ ID NO: 7194 - protein, 358 aa, Zea mays
  Clone ID: ZEAMA-23APR03-C1013_6.p
MVGGGGGGPLRRVGKYEVGRTIVEGTFAKVKFAQNTETGESVAMKVLDRSSILKNKMAEQIKREISIMKLVRHPNVVRLHEVLASRKKIFIILEFITGGELFDKIIRHGRLSEADARRYFQQLIDGVDFCHKKGVYHRDLKPENLLLDSQGNLKISDFGLSAWPAQGSFLLRTTCGTPNYVAPEVLSHKGYNGALADTWSCGVILYVLLAGYLPFDEVDLTTLYGKDDNEDAFEDETGPLTLNAFDLIILSQGLNLAALFDRRQDCDKLQNRFLSRNPAKVILSSMEVVAQSMGFKTHIRNYKMRVEGLNADKTSHLSVMVEVFEVAPSIFMVELQRAAGDTSEYNTIHPKGQIYIGQ

SEQ ID NO: 7195 - protein, 186 aa, Zea mays
  unsure (1)..(186): unsure at all Xaa locations
  Clone ID: ZEAMA-23APR03-C10151_2.p
MATSSSAGARKKAPSPPKHRHDGTSPLPLGMDWSPPPKRWEGRNTIWPHNPQTGWSYCVMIPSWITQTPETGVTADSFLKSVVDXFYRIHVGIQSPEGFSSSHGILRRFSDFLNLFSDLKSAFPRKDAPSAPPKHAFLRINSSRLLLEERRHALEEWMQKLLSDIDLSRSAPVAAFFELEAAARSC

SEQ ID NO: 7196 - protein, 107 aa, Zea mays
  Clone ID: ZEAMA-23APR03-C10170_5.p
QSVWIATPLHPEISSFVRRKTAIQKSVRSSWDGAMLSNDFWTCESAKVPDQAIERPGVYHVIGADEGVVHSDELVIIALQGHLGHQPSDLAKSGTNKKRRSKPTRSA

SEQ ID NO: 7197 - protein, 549 aa, Zea mays
  unsure (1)..(549): unsure at all Xaa locations
  Clone ID: ZEAMA-23APR03-C1024_1.p
MSAAAAARILRLAPRRIQVPKTSPLAALSFPLPRTAPLAAALGRRQRFCAAAQAPAPASAATGAAGEAVGEFRKRLRVADVKGGEDEGAAWVGKELAVRGWVRTCRAQRTVTFVEVNDGSCLSNMQCVLTPETEGYDQIDSVTTGASVLVEGVVASSQGGKKKGVQKVSKITVIGKSDRAXSFIQKKRASREFLRTVALRPRTNTFGAVARXVRNTLAYATHKFFQDNGFVWVSSPIITASDCEGAGEQFYVTTLLSNSTEGGSLLKDIPATKDGRVDWSQDFFCKPAFLTVSGQLNGETYASALSDIYTFGPTFRAENSNTSRHLAEFWMIEPELAFADLNDDMACATAYLQYVVKYILENCKEDMDFFNTWVEKGIIDRLNDVVEKNFVHLSYTDAVELLLGSKKEFEFPVKWGLDLQSEHERYITEVAFGGRPVIIRDYPKEIKAFYMRENDDGKTVAAMDLLVPRVGELIGGSQREERLDYLEARLDEQNLNKESYWWYLDLRRYGSVPHAGFGLGFERLVQFATGMDNIRDTIPFPRVPGSAEF

SEQ ID NO: 7198 - protein, 244 aa, Zea mays
  Clone ID: ZEAMA-23APR03-C1027_14.p
MDSTGPMRVSIKAHRPDWKSELRTNCLRRVRKDRNDLLWKIRKQGLPGNVMEKVRSAVRSVISDEVEKLKQSNTENEDQEMDVIWEYQGLHAAKPAEIESEDILLEMERLVCEDIREEVIRKRVVPITSALDEEDAYLAQSVLDHMQLNDIEAAETAKLWCPVCKQGDLRETRNLIYCTLCNLRLDLGEDKMTLEFLRERLANAHMDHFDRGCKSAPKFCLQTMFGLTALYIQCAECSTFDIVV

SEQ ID NO: 7199 - protein, 357 aa, Zea mays
  unsure (1)..(357): unsure at all Xaa locations
  Clone ID: ZEAMA-23APR03-C1027_19.p
MSDGAGSRTGVAGALGLSVTSSVAIVICNKYLISTLGFFFXTTTLTSWHLMVTFFTLYVXAQRLRFFEPKPIDARTVISFGLLNGISIGLLNLCLGFNSVGFYQMTKLAIIPFTIVLETLFLSKKFRXIKASLMVLLLGVGIASVTDLQLNLLGSIIAVLTIAATCVGQILTNQIQRRLKVSSTQLLYQSSPYQSAVLLVTGPFVDKLLTKRDVFAFSYTTQVVVFILLSCSIAVCVNFSTFLVIGTTSPVTYQVLGHLKTCLVLSFGYIILKDPFSARNVVGILIAIFGMGLYSYYSVVESRKKTEDASSLPVAAQMSEKDSAPLLGAKSSPRTENKAEETFDYMPRTAKSAFTGR

SEQ ID NO: 7200 - protein, 627 aa, Zea mays
  unsure (1)..(627): unsure at all Xaa locations
  Clone ID: ZEAMA-23APR03-C10287_4.p
MGSLEARYRPAGAAEDTAKRRTQKSKSFKEVEKFDVFVLEKSSGCKFRSMQLLLFAIMSAAFLTILYTPSVYEHQLQSSSRLVNGWIWDKRSSDPRYVSSASIQWEDVYKSIQNLNVGEQKLSVGLLNFNRTEFDAWTHMLPESDFSIIRLEHANESITWQTLYPEWIDEEEETEIPSCPSLPDPSVPRATHFDVIAVKLPCSRVAGWSRDVARLHLQLSAAKLAATTARGNSGIHVLFVTDCFPIPNLFSCKDLVKREGNAWMYKPDVKALKEKLRLPVGSCELAVPLNAKARLYTVDRRREAYATILHSASEYVCGAITAAQSIRQAGSTRDLVILVDDTISDHHRKGLESAGWKVRIIQRIRNPKAERDAYNEWNYSKFRLWQLTDYDKVIFIDADLLILRNIDFLFALPEITATGNNATLFNSGVMVIEPSNCTFRLLMEHIDEITSYNGGDQGYLNEIFTWWHRIPKHMNFLNFFFFFCTMQRMQHDTSIIGGGLHRXGSGRTAWNVEILREFASDVAHARWWKVHNRMPRKLHSYCLLRSSLKAGLEWERRQAEKANFTDGHWKRNVTDPRLKTCFEKFCFWESMLWHWGEKSKSNSTTTRNSAVPATTTTTPAAASLSSS

SEQ ID NO: 7201 - protein, 633 aa, Zea mays
  Clone ID: ZEAMA-23APR03-C10287_8.p
MGPLEPRYRPGGAPEDTTKRRASKSKSFKDAENFEVLVLEKSCGCKFKSLRILLIAIISATVLTLVTPTLYERQLQSASRYVDVGWMWDRASSDPRYASSADVRWEDVYKALGNLRSGNRQSHLRVGLLNFNSTEYGSWTQLLPADSHVISTVRLEHAKDSVTWQTLYPEWIDEEEETEIPSCPSLPEPNVPRGARFDVVAVKLPCTRVAGWSRDVARLHLQLSAAKLAVASSKRNHDDVHVLFVTDCFPIPNLFPCKNLVTREGSAWLYSPDSKALREKLRLPVGSCELAVPLKAKSRLFSVDRRREAYATILHSASEYVCGAISAAQSIRQAGSTRDLVILVDETISDHHRRGLEAAGWKVRVIQRIRNPKAERDAYNEWNYSKFRLWQLTDYDKVIFIDADLLILRNVDFLFAMPEIAATGNNATLFNSGVMVVEPSNCTFRLLMDHIDEITSYNGGDQGYLNEIFTWWHRVPRHMNFLKHFWEGDSEAMKAKKTQLFGADPPVLYVLHYLGLKPWLCFRDYDCNWNNAGMREFASDVAHARWWKVHDRMPRKLQSYCLLRSRQKARLEWDRRQAEKANSQDGHWRLNVTDTRLKTCFEKFCFWESMLWHWGENSNRTKSVPMAATTARS

SEQ ID NO: 7202 - protein, 298 aa, Zea mays
  Clone ID: ZEAMA-23APR03-C10330_4.p
MNPLTQVKRTQIINQKEALLGIGEDASWHAKFKDSAYVYVGGVPFDLTEGDLLAIFAQYGEVVDVNLVRDKGTGKSKGFAFLAYEDQRSTILAVDNLNGAKVLGRIIKVDHVSKYKKKEEEDEEELQKKREARGVCYAFQKGECNRGASCRYSHDEQRNANTGWGSKEDSGARWEHDKHSDVPKSRGMCYAFQKGECNRGASCKFSHDEQRNANSRRDSRDGGPSRSERYGDRESRSRHDDRRAEDRDRFRRDNSPERSRGERQRDDDRSDRGRETKSERRRYDVEHEDRKRSRHGRE

SEQ ID NO: 7203 - protein, 289 aa, Zea mays
  unsure (1)..(289): unsure at all Xaa locations
  Clone ID: ZEAMA-23APR03-C10330_6.p
MASAAVLRNAGSRRLFSYPTLRAAAISGPAVLPDAPVAASVAAQPPPLAWTLWAMSMATFTRTKPHVNVGTIGHVEHGKTSLTAAITKGISTTRNXLLADDAMVPISSPLTPPLGDSEETDKKGAVVKRLKVQAIKKDIKQSPKKVNLVAKLVRGMRVEDALLQLQVTVKRAAKTVYQVIHSARANASHNHGLDPDKLIVEEAFVGKGLFLKRVSYHARGRSGIMVRPRCRLTVVVREATAEEEAKIAKLRVSNYKKLTRKEQQLMPHRLIEVSPRWIRKRKAEAGATA

SEQ ID NO: 7204 - protein, 530 aa, Zea mays
  Clone ID: ZEAMA-23APR03-C103814_1.p
MGWGWTALAAAAMAYVAVKLMEVLWWRPRRLEQHFARQGIRGPRYRFFVGCVREMVALMVAASAKPMPRPYRSHNVLPRVLAFYHHWKKIYGSTFLIWFGPTPRLAVADPDLIREILLSRADQFDRYESHPMVRQLEGEGLVSLRGDKWAHRRKVLTPAFHMENLKLLLPFVGRTVVDVVDKWHDMAAAASGEVEIDVSEWFQVVTEDAITRTAFGRSYEDGKAVFKLQTQLMAFASEAFRKVFIPGYRFLPTKKNTTSWKLDKEIRKNLATLIGRRQEAADDEKLSGCAKDLLGLLINAGSNGGKVSPITVNDIVEECKTFFFAGKQTTSNLLTWTTVLLAMHPEWQELARQEVLQVCGARDIPSREQLTKLKTLGMILNETLRLYPPAVATVRRAKADVELGGCLIPRGTELLIPIMAMHHDARLWGPDATQFNPARFARGAAQAARHPTAFIPFGLGARMCIGQNLALLESKLTLAIVLQRFDFRLSPSYLHAPTVLMLLHPQYGAPVVFRPRPSEPSDSDCDSRDV

SEQ ID NO: 7205 - protein, 420 aa, Zea mays
  Clone ID: ZEAMA-23APR03-C104126_1.p
MAMALRRLLLPLLLLVLLGLRPQSCVASGGGGGEPAEFEIPRDGSVLELDESNFEAAVRAAEFLFVDFYAPWCGHCKRLAPQLDEAAAVLAGLSTPVLVAKVNADKYKKLGSKYGVDGFPTLMFFDHGVPSEYTGSRKADVLVENLKKLVAPDVSVLESDSSINGFVQAAGINFPLFIGFGMDESLIVEYGAKYKKKAWFSTAKDFSEDVMVVYDFDKVPALVSVNPKYNEQSVFYGPFEGTFLEDFIRQSLLPATVPINRETVKLLKDDGRKVVLTILEDESDESSLQLIKVLRSAANANHDLVFGYVGVKQWEEFTETFDVKVSQLPKIVVWDTKEEYEVVEGSESFIEGDYGSQVSRFLEGYREGRTTKKKVGRGSPTLLGLNAVYILVLLVAVLVVLMYFSAQGEEDHQPRRAHED

SEQ ID NO: 7206 - protein, 197 aa, Zea mays
  unsure (1)..(197): unsure at all Xaa locations
  Clone ID: ZEAMA-23APR03-C10415_3.p
LDDQAYEEQKKVHLISLDPRITGNPKVVPDFLKKSSKIPFAAIEKYAWTEATCPVCMEFPHNAVLLLCSSHGNGYCPYICASSYQHSNCLDQPVESCRKEASEDPDAIELACPLCRGEVKCYTLVDPARKQLNHKKRSSMEDGCSYMVTYIELXKHVQKKHPSANPRAVDPLHAYRWKRLLFRLLQKQFGWLQLYNY

SEQ ID NO: 7207 - protein, 348 aa, Zea mays
  Clone ID: ZEAMA-23APR03-C104319_1.p
MSSSSVQQTAFPEQEADAEGETNPELYQHFANLVSSLPSSKGLSNNKFYRHDQGWHCSVVGIVGAMVADACFSARPSDVIVATLPKSGTTWMKSLLYATVHRRERPVVGAAADQHPLNSWGPHELIKFFEYQLYTRDRVPDLDRLPDPRLFATHVPFVSLPSSVVATPGCKIVYVCRDPKDHLVSLWDFVNKYFRVKDGLEPLSVEAAAELFCAGLTPFGPYWDHVLGYWRAHRADPDKVLFFRYEEMQRDPAAHVRRLAEFVGLPFSSEEEDGGVVDAVVGLCSFERMRGMAPTKGGRTEFPIGVVPNSSFFRQGVVGDWVNHLSPEMARRIDAITADKFRGSSLVV

SEQ ID NO: 7208 - protein, 374 aa, Zea mays
  Clone ID: ZEAMA-23APR03-C10447_2.p
MAIPLVLVVLPLGLLFLLSGLIVNAIQAVLFVTIRPFSKSFYRRINRFLAELLWLQLVWVVDWWAGVKVQLHADEETYRSMGKEHALIISNHRSDIDWLIGWILAQRSGCLGSTLAVMKKSSKFLPVIGWSMWFAEYLFLERSWAKDEKTLKWGLQRLKDFPRPFWLALFVEGTRFTPAKLLAAQEYAASQGLPAPRNVLIPRTKGFVSAVSIMRDFVPAIYDTTVIVPKDSPQPTMLRILKGQSSVIHVRMKRHAMSEMPKSDEDVSKWCKDIFVAKDALLDKHLATGTFDEEIRPIGRPVKSLLVTLFWSCLLLFGAIEFFKWTQLLSTWRGVAFTAAGMALVTGVMHVFIMFSQAERSSSARAARNRVKKE

SEQ ID NO: 7209 - protein, 499 aa, Zea mays
  Clone ID: ZEAMA-23APR03-C10464_1.p
MGKEATLAFTPTWVVAIVCLVIVSISLAAERSLHYLGKYLECKKQKALFSALQRLKEELMLLGFISFVLSLSQGFIVSICIPETSTDFMLPCNRGNSRVAEEGAKICNKKGDVPLLSLEALHQLHIFIFVLGLVHVVFCATTISFSGAKMRKWKHWETEIHREVHEKLQQEKNEGQGSSLSIVVLHREHQDEFVHKRTKGFWMKLAVASWITAFLKQFQDSVSKSDYEALRSAFVVEHYPEKPDIDFHKYMTRAVEYEFKRVVGISWYLWLFVILFLLLNINGWHTYFWLAFLPLFLLLIVGAKLEHIITRLAQEAAISLSNNTEEVPKIKPCKDHFWFHKPELVLHLIHFILFQNSFEISFFFWILVSEGFGSCMMERKPYVISRLVIGVIIEVICSYITLPLYAIVTHMTGQIKLHGFGSRVHESVHGWIGLRKKPFSFWKIPGGDPNADSGREADVTRRVAKERSGSSRSMPMAPADEIVTVDDVAVAAAAVGQGP

SEQ ID NO: 7210 - protein, 295 aa, Zea mays
  Clone ID: ZEAMA-23APR03-C10472_2.p
WEPLANYAAEHFGLPLPPPSQAKGKDFKKGANFAITGATALEYSFFKAHGIDQRIWNTGSINTQIGWLQDMKPSLCKSEQDCKDYFSKSLFVVGEFGGNDYNAPLFSGVPFSDVKTYVPLVAKAIANGVEKLIELGATDLLVPGVLPIGCFPLYLTLYNTSSKADYNARTGCLRRYNRLAFHHNRELKQQLDELQKKYPKTKIMYGDYFKAALQFVVNPGKFGFSTALQACCGAGGQGNYNFNLKKKCGEQGASVCSNPSSYVSWDGIHMTEAAYRKVANGWLNGPYAQPPILKS

SEQ ID NO: 7211 - protein, 238 aa, Zea mays
  Clone ID: ZEAMA-23APR03-C10497_5.p
MAAALRCPASVRVSGPAAAGLAKVRQASRVVAVSGARQSRGGGVAVRASLFSPKPAAAKDARPTKVQELYVYEINERDRESPAYLRLSAKQTENALGDLVPFTNKVYNGSLDKRLGVTAGICVLIQHVPDRNGDRYEAIYSFYFGDYGHISVQGPYLTYEESYLAVTGGSGVFEGVYGQVKLNQIVFPFKIFYTFYLRGIPDLPRDLLCTPVPPSPTVEPTPAARAAEPHASLDNYTN

SEQ ID NO: 7212 - protein, 393 aa, Zea mays
  Clone ID: ZEAMA-23APR03-C104_121.p
MLPEDAGWAAVAGLGFRGAVLGAIFAARYFGRRRWLLQFPVVQRPLFYGLKMGVLPSGERALKLSMQAFFLSLFMIFFLPWQFRTGGSIGSQILTEISIFIVTTGVSLCLEINHHFVQVVHTRRCSFAPPQSTAAADTNPTEFILESLEQSDPQSLIQYLAYQDLCVVSECNLEPWRRAAFFEESGETYKRIVTTCLKPLEEFTSKIAESLEDFSSDKPELMLQQSKLFSAFDDSQICAWCARTLTGLTACSRQEDRYGVAQLTGCNAAVMTTLLSALVAIETCLGKKTNPQPVHSLGPENIRWVNFSTGRKGTGVAIACTQKGGLHKKAYTMADVLRTSVYQIVSAFIDDLRANAKPSSLEKNWISEGRKPVYGSQAVLVQKLILFIEYRAV

SEQ ID NO: 7213 - protein, 407 aa, Zea mays
  Clone ID: ZEAMA-23APR03-C10520_2.p
MAAALQATPLKTLSISRRRVGGAGARPRPMAASFRCSAAARSYNITLLPGDGIGPEVVAVAKDVLSLAGALEGVELRFQEKLVGGSALDATGVPLPDETLDAAKGSDAVLLGAIGGYKWDNNEKHLKPETGLLQLRAGLGVFANLRPAAVLPQLVDASTLKKEVAEGVDIMVVRELTGGIYFGKPRGFGTNDNGDDIGFNTEVYPASEIDRIARVAFEVARKRRGRLCSVDKANVLEASMLWRKRVTALASEFPDIELSHMYVDNAAMQLVRNPKQFDTIVTNNIFGDILSDEASMITGSIGMLPSASVGESGPGLFEPIHGSAPDIAGQDKANPLATILSAAMLLRYGLGEENAANRIEAAVTETLNHGFRTGDIYSPGTTLVGCKRMGEEVLKTVNSLKEVAAVN

SEQ ID NO: 7214 - protein, 157 aa, Zea mays
  Clone ID: ZEAMA-23APR03-C10573_12.p
PHRHTGTQTAYHRTAPAHRQDGATAHLTGVLGVSSPPLAPSHCSCSGAKKQSCSLRQGRQQRRRLRVARAVEVDAPSAGAPEPEEAEEPSVDFAFVSSRLLPDGTPDVHYRTARGGQKLRDIMLDGYIDLYGPYDKVAAWVDDGGSGTARGMTVERG

SEQ ID NO: 7215 - protein, 326 aa, Zea mays
  unsure (1)..(326): unsure at all Xaa locations
  Clone ID: ZEAMA-23APR03-C10583_3.p
MSWAAIENDPGVFTELLQQMQLKGLQVDELYSLDLDALNDLQPIYGLILLYKWRPPEKDEGPVIKDAIPNLFFANQIINKACATQAIVSVLLNSPGITLSDELKKLKEFAKDLPPELKGLAIVNCASIRMLNNSFARSEASEEQKPPSGDDDVYHFINYVPVDGVLYELDGLKEGPISLGKCPGGVGDAGWWLRLAQPVIKEHIDLFSQNEIRFSVMAILKNRKEMFTVEIKELQRKREGLLQQMGDPNASRHVEQSLAEVAAQIESXEKIIMEEEKVKKWKAENLRRKHNYVPFLFNFLKILEEKQQLKPLIEKAKAKQKSHGPS

SEQ ID NO: 7216 - protein, 242 aa, Zea mays
  Clone ID: ZEAMA-23APR03-C106110_1.p
MASSESPNTAPAAAAVASQPARDFLAHLEAYLARRDGVDKLLKISRYATRLALAAGPPLPPGASARLKSFESSVGLSRKAFRLGKFVQSLNALLAHPHPPPSLALLAYGGEGVYYFVEQFVWIAKAGLLPAHLLPRLQRLSAWAELLGYVGSILIKLEEVAKIESSIKKRLVKDCDKESEAVKTMQGKLLLKRMSVVQDVADAVMALGDVTDGKGLLGSSTLMAAAGLLSALISTHKNWNSC

SEQ ID NO: 7217 - protein, 264 aa, Zea mays
  Clone ID: ZEAMA-23APR03-C10623_1.p
MRSLLTRLFTSTHIVMASSSFSSSPSRRLVHLTRHLVSSSSGELSSVGAPAAAASDADPVKSPRSTASRVHAAVLVCLFEDPSSGPRVLLTKRASSLSSHSGEVSLPGGKVDDGDADPKATALREAKEEIGLDPALVSVVTVLEPFLSKNGLTVVPVIGMVPDKALYKPVLNKAEVEDIFDAPLEMFLKDDHRRTRQMNWMGIDIPVQFFDYEADGKKFVIWGLTAHILTRAAAVIFGRKPSFVELPRPKYAGAPVAGTGKSNL

SEQ ID NO: 7218 - protein, 369 aa, Zea mays
  Clone ID: ZEAMA-23APR03-C10724_1.p
MGRVKLQIKRIENNTNRQVTFSKRRNGLIKKAYELSVLCDIDIALIMFSPSNRLSHFSGRRRIEDVITRYINLPENERGGGGGGVVRNREYLMNMLTQLKREGDIAEQLTPPNKGPANSNIEDLQHEIRNYRHQVEELEKQIRMFEPDPAVLVLTNEAETCEKFLMDTLTRVEERKKYLSCNQLGPFEPSPTDIHDVFGVSQQQQQQGDLSAFGAGDVVSYFAGGIAASDIFSGVGPMSSFSEQTIFDSMRPDPAVMAGLDPGIATICTVDQQPPSLNWEDAYASAGLLSALIPSTPFPLDEDQQDAMMAPVLTSPMVPPPPPPPPHHVHEEVEAPESCSNVSTDGDRAATTAPAAVGQENGLPSAVVD

SEQ ID NO: 7219 - protein, 142 aa, Zea mays
  Clone ID: ZEAMA-23APR03-C10742_1.p
MARALGACVLLAVLLGALAPAAAARAHDDQGSGAGIRQPSGEYRGRKVGARTEVRDVEGDGEVQELGRFSVAEYNRQLREGGGGGGRLEFGRVVAAQRQVVSGLKYYLRVVAVEEGGAGNGGERVFDAVVVVKPWLDGHVRR

SEQ ID NO: 7220 - protein, 251 aa, Zea mays
  Clone ID: ZEAMA-23APR03-C107566_1.p
MEPSSQPQPMMGVGSQPYPAAAPYVPVPGSLAVPPGSQPAAAFPNPTQLSAQHQMVYQQAQQFHQQLQQQQEQQLREFWTTQMDEIKQANDFKIHTLPLARIKKIMKADEDVRMISAEAPVVFAKACEVFILELTLRSWMHTEENKRRTLQKNDIAAAITRTDIYDFLVDIIPRDEMKEEGLGHNPIVGLPPAMGAPADHGSHPYYYVPAQQVQGAGMMYGGQQGHPVTYMWQTPQGQAAEPPEEEQQQSA

SEQ ID NO: 7221 - protein, 401 aa, Zea mays
  unsure (1)..(401): unsure at all Xaa locations
  Clone ID: ZEAMA-23APR03-C1075_3.p
VFSPEVHQGRNKREGCLPPDMGSSFKYRAGLCLIVAVVLIWVISAEVTQGIFTKYKHPFAVTYLGASLMVIYLPLSFLKDSGNTSASXIASKTSFGGGAPLKNDEFRKTLVLNCTDVSIPVVKETKPLIYGITEMNDGVLKDKQLSTKEIATYGLYLCPLWFVTEYLSNAALARTSVASTTVLSSTSGLFTLFIGVLLGQDSISASKVIAVFISMAGVVMTTMGQTWASDESEVGKSGATQRTLLGDMFGFMSAIAYGLFTVLLKKFCGEEGEKVDVQKLFGYLGLFTLVALWWIVWPLTALGIEPKFSMPHSAKVDEVVVANSLIGSVLSDYFWALSVVWTTPLVATLGMSLTIPLAMVADMIIHGRHYSAVYILCSVQVFSGFVIASLADRLSRSLGLL

SEQ ID NO: 7222 - protein, 229 aa, Zea mays
  Clone ID: ZEAMA-23APR03-C10768_5.p
SHLLSGCGFPLQIDPLDPDIGPLVEKIDDPSMANDKDLLQVVRLLDDACKEAGFFYVKGHGIDESLMREVRNVTREFFQLPYEEKLKIKMTPQSGYRGYQRIGENITKGKPDMHEAIDCYTPIRPGKYGDLAKPMEGSNLWPKYPSNFEDISRKIMRGIALALGGAIDAFEGDTAGDPFWVLRLIGYPVDIPEEQRTDTGCGAHTDYGLLTLVNQDDDICALEGGTTLR

SEQ ID NO: 7223 - protein, 691 aa, Zea mays
  unsure (1)..(691): unsure at all Xaa locations
  Clone ID: ZEAMA-23APR03-C10770_1.p
MTGPNEKAAAGGGGGERRKYPIHVEDYELYEEIGQGVSAIVYRALCKPLDEIVAVKVVDFERTNSDLNNIVREAQTMILIDHPNVVKAHCSFAKDQTLWVVMPYMAGGSCLHIMKSVHPTGFEEPIIATILREVLKGLEYLHHHGSIHRDVKAGNILVDSRGGIKLGDFGVSACLFDSGDRQRARNTFVGTPCWMAPEVMEQLHGYDFRADIWSFGITALEXLAHGHAPFSKYPPMKVLLMTLQNAPPGLDYERDKKFTRNFKQMVAMCLVKDPSKRPSAKKLLKQPFFKQARSTDFIARKLLEGLPGLGVRYQALKEKDQHLMAQKKMSDGKKEEISQDEYKRGISSWTFDMDDLRSQASLGTECEDSTLCKDSDISFYDLDSLQDQAPEGPHLLRDFSTKYDADIENDMTTKDKSAVSSPDQPASLVRNASMRGMPINGSFRKDNSTESFDLECQEKHLDIVPTSSSPERKFSFSSCSSNGLLLSKESSKQQTSIHNLDKCNGGHLHVSDETSSEAAPKTHKSAEDHDDRSKPPLIRGRFRVIPGHVDSKAQPPGLQKCHSMQTISRLPSLSIPSSAEVASTIIGGSFYMQLYSILQTNMLQRDQILNAMKQVSGCAMASPGVPSMASPCIPSTSRSTSPSGVPSVDRSMLEAAQEREKELLNEVLELQWRLLCTQDEVQKLKAKAAQI

SEQ ID NO: 7224 - protein, 159 aa, Zea mays
  Clone ID: ZEAMA-23APR03-C10777_5.p
QSSHRRMRTDLLGKNTSRSSRTELLLIFSSTGELRQRSCASFHDLRTISSHGVGAVQRAWTREPAQRPQVPPDQRLSSSRWAPVGRPGAGRSRSRSPPPAPAAPGRCPPPPLLARRVVLCCCAGGGDAATSRATAQSLSDPEVRCKEEEREDRAARRRW

SEQ ID NO: 7225 - protein, 488 aa, Zea mays
  Clone ID: ZEAMA-23APR03-C10782_1.p
SSLQAVTHTGGTEPANVFFVAGLGEAREQPRAGATLLQLQLRQEVSQAGGHLQDAALMATAVSCPYSSSRAGAPALLLVALLLAAASWTTTAAAKNDTQRFRPGDELRRYRRVQALLKRLNKPALRSIQASPDGDLIDCVPAHLQPAFDHPRLRGQRPLVAGPPPARPKGNRLRDPIRNDTAEAAGVQQLWAASGESCPEGSVPIRRVTESDVLRASSVRRFGRAPAGRVRRDSVSGGHEHAVGYVAGDEYYGAKASINVWAPQVSTASEFSLSQIWVIAGSFGNDLNTIEAGWQVSPELYGDNAPRFFTYWTTDAYQTTGCYNLLCSGFIQTNSRIAMGAAISPTSAYNAGQFDISLLVWKDPNHGNWWLEFGSGELVGYWPSLLFSHLASHASMVQFGGEVVNTRASGSHTATQMGSGHFAGEGFGRASYFRNLEVVDWDNSLVPLAAGFHVTADHPSCYDIQGGVNAVWGNYFYYGGPGRNVRCT

SEQ ID NO: 7226 - protein, 204 aa, Zea mays
  Clone ID: ZEAMA-23APR03-C10786_1.p
MAESAPRLLVLVLLSLVAALAMATGPAAAAHAGGRSRLIHLHLYMHDITGGPGQTAVQVVKGPGPAHPAMPGYHFGDTTVIDDALTDGPSASSSRLVGRAQGTYMLASLTEPVLAVSMTVALTAGAYNGSAVVVVGRDDVSAGVRELAVVGGTGAFRRATGHVLWRTARMESRDHMVLELDVYATVPAASPAPPPRAGLARQVA

SEQ ID NO: 7227 - protein, 342 aa, Zea mays
  Clone ID: ZEAMA-23APR03-C10788_1.p
MAVVPAAPVVLGVAMVLVVLAASAGAAGQLRMGFYAESCPGVERVVGDFVRQHVRRVPTVAAALLRLHFHDCFVRGCDASVLLNSTAGSVAEKDAPPNLTLRGFDLVDRVKALVEDACPGVVSCADVLALAARDAVVAIGGPSWRVATRRRDGTVWVRHARLDDIPKHTMTFPHLASLFASRGFGVRDLVWLSGAHTIGIAHCSSFADRLYGYPGGGVGAAGNDTADPALDATYAANLRRRKCRAAGGGYAEDGVVEMDPGSHLTFDLGYYRALLKRRGLLRSDAALLTDAAARADVEGVAAGPEEVFFQLFARSMARLAALQVKTGAEGEVRRNCAVVNGG

SEQ ID NO: 7228 - protein, 356 aa, Zea mays
  Clone ID: ZEAMA-23APR03-C10822_1.p
MEMTGSLPVPSVQAMVAAGRHAPVPPRYLRPDLAADVVVADDATTIPIIDFQRLLLVDPEESARLHAACQDWGFFQLINHGVPDDVMEAMKASTQSFFALPAEAKQQYRQQAGQLEGYGQLFVVSEDQKLDWADVLYLNTQPPEHRNLSFWPAGESFRQTLDTYSAAVKHVADRLLGAMYMNLGLLSSMDMDPERGAGIQSVRMNYYPPCAEAADKVLGFSPHSDSDLLTLVLQVNQLQGLQIKRPPDGGGAWAWLPVTPLQGAFVVNVGDVLEIFTNGRYRSVEHRALVNAHTERLSIAAFHSPSIHATIGPLPELLGDQEVPKYKTLDHQSFITLFFSAKLQGKSFLERMKKLS

SEQ ID NO: 7229 - protein, 200 aa, Zea mays
  Clone ID: ZEAMA-23APR03-C10871_3.p
MEPKSTTPPPPPVMGAPIAYPPPPGAAYPAGPYVHAPAAALYPPPPLPPAPPSSQQGAAAAHQQQLFWAEQYREIEATTDFKNHNLPLARIKKIMKADEDVRMIAAEAPVVFSRACEMFILELTHRGWAHAEENKRRTLQKSDIAAAVARTEVFDFLVDIVPRDEAKDADSAAMGAAGIPHPAAGLPAADPMGYYYVQPQ

SEQ ID NO: 7230 - protein, 318 aa, Zea mays
  unsure (1)..(318): unsure at all Xaa locations
  Clone ID: ZEAMA-23APR03-C1089_5.p
MASSAFLNALVLRSPSPSLSSSSNLRSTGAFAFPKPPRFPCLRSARRLVLARAAAAPAPGRWXEDEWGPEPEGGSAVTGAAVAEAPEAREVAELKAQLKDALYGTERGLRASSESRAKVLELITQLETRNPTPAPTEALTLLNGKWILAYTSFSQLFPLLGFGNLPQLVKVEEISQTIDSENFTVQNCIKFSGPLATTSVATNAKFEIRSPKRVQIKFDEGIVGTPQLTDSIVLPEKFELFGQNIDLSPLKGIFSSIENAASXVAKTISEQPPLKIPIRTNNAESWLLTTYLDEELRISRGDGSSIFVLFKEGSTLLY

SEQ ID NO: 7231 - protein, 368 aa, Zea mays
  Clone ID: ZEAMA-23APR03-C10928_1.p
MGKGGGEEDGAAAAARAAEQARELQDAAAALLTQTRAEEEALRRRAAALQGELRRLREAAAAHAGSDKVEEDLDRAACLIAEGDVASLLPSKTQGAFLKMFLGPVNLRATRKEVQLKVKEEYNSYRDRTALLFLCFPVILLFLRQWLWNGCFPVLPVQLYQAWLLFLYTSLALRENILRVNGSDIRPWWILHHYCAMLMSLVSLTWEIKGQPNCARKQRGVELFLCWAIMQGFVMMLQNRYQRQRLYTRIALGKAKRMDVVWGETAGVEGQLLLLCPLLFLLQGFEGYVGFLLLRTAHTGVVPEWQVVVCGILLIAMAIGNFANTVDTLVTKSRFKAKMKKSKGRRDLDTCPSPTGSSSPIDSATTKA

SEQ ID NO: 7232 - protein, 271 aa, Zea mays
  unsure (1)..(271): unsure at all Xaa locations
  Clone ID: ZEAMA-23APR03-C109386_1.p
TTHQTQWRRKGRPPASRTTATTTTTWTELTNTSWRDDDYRRMVMAYLIEAVYLLELERQERRDAAAVAQQWWEPFQFRLAHELVDDRDGSVFGAVFERDHQASPTPSPSGAPSAVVAFRGALLRAPTIRRDVEDRLRLLARYSLRGSARLARAAQALSATVDRFGSENVCVCGHSLGAGFARQVVRMLVASSPRHQQPQQQQAAASLESHLFNAPYLSLXPMGVRGVVRTADCLLKALRSGVAKWRGKALRNVAYANCILGYTRLESTRKL

SEQ ID NO: 7233 - protein, 171 aa, Zea mays
  Clone ID: ZEAMA-23APR03-C10955_2.p
MASGELACTYAALILSDDGIAITAEKIATIVKAANIKVESYWPELFPKIFPEQYKSIETVEGDGKSAGTVRLLKYTEAVPMLTFAKEKLETADDENKVVSYSVVDGELADFYKNFKITLKVTPAKAEGEGGAVVSWAMEFDKANDQVPDPDVIKETATKTFHDLDDYLLKN

SEQ ID NO: 7234 - protein, 330 aa, Zea mays
  Clone ID: ZEAMA-23APR03-C10960_1.p
MAAADPDTEVQAEFPPLVRQYKSGRVERFFNLAPLPAGTDPATGVVSKDVVVDPATGLWARLFLPAGSHGKKLPVVVYYHGGAYVIGSAADPMTHGYLNALVAKAGVLAVALEYRLAPEHPLPAAYEDSWEGLKWVATHASASAAAGGGPAAEPWLTEHGDFSRVFLAGASAGATIAHFVAVRAGEQHKSGGLGMRIRGLLIVHPYFSGAADIGDEGTTGKARKARADAFWRFLCPGTPGLDDPLSNPFSEAAGGSAARVAAERVLVCVAEKDDLRDRGVWYYESLKASGYPGEVELLESMGEGHVFYCMNPRCDRAREMEERVLGFLRK

SEQ ID NO: 7235 - protein, 407 aa, Zea mays
  Clone ID: ZEAMA-23APR03-C10961_25.p
MKIAVEGCMHGELDIVYDTLRRLEEAEGVKIDLLLCCGDFQAVRNENDLQCVSVPQKYRTMNTFWKYYSGEAVAPYPTIFIGGNHEASNYLWELYYGGWAAPNIYFLGFAGVVKFGNIRIGGLSGIHNKHHYHLGHYERPPYNKDTIRSVYHVRHYDVLKLMHLKEPLDVFLSHDWPLGITEYGNWQKLISVKKNFEDEVNNRTLGSKPAAELLNKLKPPYWFSAHLHCKFPAVIQHGKNGPTTKFLALDKCIPGRNFLQVIDIPSNPGPYEIQYDEEWLAITRKFNSVFPLARTQFTMRDEQLDTQEDRQWVRSKLNTRGAKPFDFVQTAPSFNPSSTTSKQSITVCCRNPQTESFLQLLELPYLLDSSKSEMFGRNESTSQTGNTLDNEDIELPDEDEDALEDDE

SEQ ID NO: 7236 - protein, 517 aa, Zea mays
  Clone ID: ZEAMA-23APR03-C109740_1.p
RCYCARRGRPRCCTARWAPTGSPTSHARGPLSSSSPPNNHVKVAVVADPQLMDSTSLGLPSSSVALQAAEFYTDLNMRRSFQSTILPFKPDVVLFLGDHFDGGPYMPDEEWQESLFRFKHIFGLNDQRTKQQIPIYYLPGNHDIGYSAFHSVHPEVLSRYEKEFGSRNYQFSAGKVDFVVVDAQTLDGAKQSKERSSSWEFIKTLSPGNTSNPKVLLTHIPLYRPDNSPCGPHRSSPVINQRVSYAALDQGITYQNYLTKETSDLLLSLLKPILVLSGHDHDQCTVVHSTPFGPVTEHTLGTISWQQGNLYPSFMLLSAGPKLSQNSTDLEHEVAMNLCFLPKQTHIYIWYICQFVVTILLLVFWPTNGLGSLPCMNTFMSFMRSVGAELLSRTKEKDDEDDGDYDMVFDAEGSMHLVKKAVAKTPSASSDSRPTGRGSVVARATAGRHRLEPDSSIRVDMGSEMTSEDGGKLARAGKSGARKVLQRLFRVIQSVLVIAALNAPLYMMLLFKDWIDR

SEQ ID NO: 7237 - protein, 365 aa, Zea mays
  Clone ID: ZEAMA-23APR03-C10976_1.p
MSLLAVASSTRAAAVRPLCASAASDEAVPAPAVADTAGRRPVKVILPKKKPQKWSTGMAPGEYGGGPATIKPRKYWWGKEDRDPVGNTDDFIWNKDFLPHMERVIANGGADAEPTITRLAPVDEEGESGFLSINRAMSLDSVEVDLSQELQAPTRPILQTQVEAAWRGRAIGAEAVNGASAPRWRLVPTRREQAKWDRAAKAATGGSDVILRESKSRVQQGDPKVLAARSREDYLQLKQRLQWFTLGIGGVGVISAYISYTPEIAVSFGAGLIGSLVYLRMLGTSIDSLAGGTGETVKSAAAQPRLLIPVVLVMMYNRWNQILVPDYGFMQLELIPMLVGFFTYKIATFAQAIQDSIPPVGNREG

SEQ ID NO: 7238 - protein, 267 aa, Zea mays
  Clone ID: ZEAMA-23APR03-C1097_3.p
MSPPLEPHDYIGLSAAAAAAPPTPTSSSSSSSSPAPRLTLRLGLPGSESPDRDRDCCEDVAATLSLGPLPAAAAVSAKRAFPDPAQRPGASKASDAKQQASPAAPPAAKAQVVGWPPVRNYRKNTLAAATASRSKAPAEEAASGAGPMYVKVSMDGAPYLRKVDIKMYSSYEDLSLALEKMFSCFIAGQSGLHKSSSKDRLTNGSKVDALKDQEYVLTYEDKDADWMLVGDLPWDYFTSICRKLKIMRGSDAVGIAPRTVEQTGQNK

SEQ ID NO: 7239 - protein, 299 aa, Zea mays
  unsure (1)..(299): unsure at all Xaa locations
  Clone ID: ZEAMA-23APR03-C1103_1.p
MSFHYHDHGLSMDAAAARGRRXPSSPNPSGFSPGIGGEREKAAIAAHPLYERLLEAHVACLRVATPVDQLPRIDAQIAARPPPLAAAAGAAAAGGPSGGEELDLFMTHYVLLLCSFKEQLQQHVRVHAMEAVMGCWELEQSLQSLTGASPGEGTGATMSDDEDNQVDSEANMFDGNDGSDGMGFGPLMLTEGERSLVERVRKELKNELKQGYKEKLVDIREEIMRKRRAGKLPGDTASVLKAWWQAHSKWPYPTEDDKARLVQETGLQLKQINNWFINQRKRNWHSNPTSSAEKTKKKR

SEQ ID NO: 7240 - protein, 537 aa, Zea mays
  Clone ID: ZEAMA-23APR03-C1107_2.p
MYRVKSQGEGEMMSQDQMHSPVDNDVSSSRRSPHRGVGAPLKKGPWTDAEDAILMDYVKKHGVGNWNAVRKNTELFRCGKSCRLRWANHLRPNLKKEAFTPEEERLIIQLHAKLGNKWSRMAIHLPGRTDNEIKNYWNTRKKRCERASLPIYPAGVRNQSSNEDQQLSGDLNGGENMSNDLLSGNSLCLPDFNNDSFLAKLQALPPQLPAVSISNLLGQSFASKGCSFMDQVDQAGMLKQSGSALPTLSDAIDDVISSVDQFSNDSEKLMQTLGFGYLNEANATSKSIVPFGVALTGSHAPLNGIFSASRLTNGPSKMEPPSVQNSRLKYTVDPAMQPTELVDPYMQSLSATPSVKSECASPRNSGLFEELLHEPHALRSGKSQQPSVRSSSSSAGTPYGTMVSSEFDMGQEYWEEQPGSLLSEYAHFSGNYLAECAPPVSAASTDIFPLPKISPAESPSMGSGEQALEPKHESAASRHLGNLRHDALFSGNTAHSSSFNDTITMLIGDVPVLGDGIVLDSSSWDNMPHAFQMAEFK

SEQ ID NO: 7241 - protein, 175 aa, Zea mays
  unsure (1)..(175): unsure at all Xaa locations
  Clone ID: ZEAMA-23APR03-C1109_27.p
MFGFGHHGHHGQNPPAHGGVHQPTFKIFCKADEGYCLTVRDGNVVLAPANPRDEHQHWYKDMRFSTQVKDEEGNPAFALVNKATGXLAIKHSLGQSHPVKLVPFNPEYQDESVLWTESGDVGKGFRCIRMVNNIRLNFDAFHGXDKGHGGVRDGTNIVLWKWCEGDNQRWKIVPW

SEQ ID NO: 7242 - protein, 175 aa, Zea mays
  unsure (1)..(175): unsure at all Xaa locations
  Clone ID: ZEAMA-23APR03-C1109_28.p
MFGFGHHGHHGQNPPAHGGVHQPTFKIFCKADEGYCLTVRDGNVVLAPANPRDEHQHWYKDMRFSTQVKDEEGNPAFALVNKATGXLAIKHSLGQSHPVKLVPFNPEYQDESVLWTESGDVGKGFRCIRMVNNIRLNFDAFHGXDKGHGGVHDGTTVVLWEWAKGDNQRWKIVPW

SEQ ID NO: 7243 - protein, 367 aa, Zea mays
  Clone ID: ZEAMA-23APR03-C11188_1.p
MAGKKTTPAKPAPSSTQRNGSAVPGSKSRPKQASEEAAAASAKAQSPSKPRKITKEKPAAAKKKREKTEPQEGGKRRKQQVLADAATPSKKRKKGGEGPEPKEATPAKKHKPAGTPPKKQKAPSKPATPAKKQQSPGKAEKLTPKKKQQSPGKAEKPTPKKKQQSPGKAEKPTPKKKQQSPGKAEKAAPKKQQQQPAGKARKPAAAATSPTKKKQAKREKATPTKRKRGDDEQAKEAKSPKRAPADGAARASTPVKKKLKDQKVAAANMGVCSFSMARVRQLMRAEDPTIRPSSEAVFLINKASEFFLGKFAEDAYHNAAKDRKKSIIYDNLSTAVSSQKTLKFLSDFVPQRVAAEDALKTMTSNNS

SEQ ID NO: 7244 - protein, 249 aa, Zea mays
  unsure (1)..(249): unsure at all Xaa locations
  Clone ID: ZEAMA-23APR03-C111_26.p
MASVTARAPVAALRPSSASLKSSSAFLGHSSRLGRTASPTRRXKAEAKGEWLPGLPSPSYLDGSLAGDNGFDPLGLAEDPENLRWFVQAELVNGRWAMLGVAGMLIPEVLTKAGLINAPQWYDAGKSEYFASSSTLFVVEFILFHYVEIRRWQDIKNPGSVNQDPIFKSYSLPPHECGYPGSVFNPLNFAPTLEAKEKELANGEXGRLAMLAFLGFLIQHNVTGKGPFDNLLQHLSDPWHNTIIQTFSG

SEQ ID NO: 7245 - protein, 108 aa, Zea mays
  Clone ID: ZEAMA-23APR03-C11209_3.p
LARTSCQRRQLAMAIRGVASTREEDMTLEEFKEWLKQFDADGDGRISRNDLRRALRRRRRGRRWLTASRSDRALRHADKDSSGFLDDSEIENLIAFAQKDLGMKISTW

SEQ ID NO: 7246 - protein, 290 aa, Zea mays
  unsure (1)..(290): unsure at all Xaa locations
  Clone ID: ZEAMA-23APR03-C11220_2.p
MASATATAPAFALASSLSRRGFLPLSRRAGRPVPQSLRFVASAVRRRRSAVVVAADAAAAAGSAEFGDEENPYELLGIRPLDSFDHMKMAYKKKRKDAEETGDDEFLAKLDRAHDTVMMQQLQYRKKGVTYGSVQVSKDIKYADNQPIVLWGPRFSRSTVKDMXNMAISAAFVVWIAIMGNADWKPLQFLCFAFFCRILQKLRATEPLITPIYNEYGEVEGRGIRMAKRVVRALGLIFGCVFTASLAYTAASNMVELSLQYTPRMFYYYQELIVTAAASVLLYITASCYR

SEQ ID NO: 7247 - protein, 152 aa, Zea mays
  Clone ID: ZEAMA-23APR03-C11327_4.p
ISIDACICYGKSRNVEQRQTYVQQHAAAQHTTRIQFGITTQTAHTLDIHAWSHGVVATRSTETPGGRWESESVAVRGAKTAAAEAAAPAAGEPLGPAHVGTFAPAEAGAPEPVALRVARARLRHRHRPDLCSSTQQHLRQIIISRLPPAASG

SEQ ID NO: 7248 - protein, 233 aa, Zea mays
  Clone ID: ZEAMA-23APR03-C11327_5.p
TGRCWFKLVFPHSVAASPVAAEILARKKWSSLASSSRPSSSSCCCCCPQVRWCGRLAVFHVFCAVDSSSRRRQHTELLMMICLRCCCVLQRSGRWRWRRRGRASRRATGSGAPASAGPTAPTSAGPRGSPAAGAAASAAAASAPRTATDSLAQRPAGVAVDRARRDQSMAPCMNNKGVRFVMPNCILSSCVEAFDRRSSSVPVSSGVLLYVRLPLLFHVSRFSIANACVEIYI

SEQ ID NO: 7249 - protein, 135 aa, Zea mays
  Clone ID: ZEAMA-23APR03-C1132_3.p
MSSSRRSSSPDSNDTTDERKRKRMLSNRESARRSRARKQQRLEELVAEVARLQAENAATQARTAALERDLGRVDGDNAVVRARHAELAGRLQSLGGVLEVLQMAGAAVDIPEMVTDDPMLRPWQPSFPPMQPIGF

SEQ ID NO: 7250 - protein, 135 aa, Zea mays
  Clone ID: ZEAMA-23APR03-C1132_4.p
MSSSRRSSSPDSNDTTDERKRKRMLSNRESARRSRARKQQRLEELVAEVARLQAENAATQARKAALERDLGRVDGDNAVLRARHAELAGRLQSLGGVLEVLQMAGAAVDIPEMVTDDPMLRPWQPSFPPMQPIGF

SEQ ID NO: 7251 - protein, 135 aa, Zea mays
  Clone ID: ZEAMA-23APR03-C1132_5.p
MSSSRRCSSPDSNDTTDERKRKRMLSNRESARRSRARKQQRLEELVAEVARLQAENAATQARTAALERDLGRVDGDNAVLRARHAELAGRLQSLGGVLEVLQMAGAAVDIPEMVTDDPMLRPWQPSFPPMQPIGF

SEQ ID NO: 7252 - protein, 221 aa, Zea mays
  Clone ID: ZEAMA-23APR03-C11372_1.p
MAAAVACRRAALLHGHQQWPQRWAAAPCPRSISQLVKTNGRRAFLVDTLALVRKLESQGVPTKQAEAITSAITEVLNDSLESISESFVSKAEMQKSEMLQESNISKFKSQVQSSQENHFSLLQRETEKLRGDIDKMRSELKYEIDKVTAGQRLDLNLERGRIRDELAKQNEETTELTTKLDKEIHSLKAQLEAAKYDVIKYCIGTIVSISAVGLAVLRIVM

SEQ ID NO: 7253 - protein, 151 aa, Zea mays
  Clone ID: ZEAMA-23APR03-C113771_1.p
MSCVNMYNPEQHQAAPPFMAPRMSFSSDFAVEPPPPAAARGGAAGPGDADFEFSVGSHPMMAADQLFSKGRLLPLREAPQQAGGGARPVTLREELRADERHGRVPRAPNIRWKELLGLKKAPKKQAAADAAAGTSADAHMDLGGQQGSTRD

SEQ ID NO: 7254 - protein, 485 aa, Zea mays
  unsure (1)..(485): unsure at all Xaa locations
  Clone ID: ZEAMA-23APR03-C11381_2.p
MAGGSSAEQLLSRIASGDGHGENSSYFDGWKAYDMDPFDLRHNRDGVIQMGLAENQLSLDLIEQWSTEHPEASICTAQGASQFRRIANFQDYHGLPEFREAMAKFMGQVRAGKVTFDPDRVVMCGGATGAQDTLAFCLADPGDAYLVPTPYYPAFDRDCCWRSGVKLLPIECHSSNNFTLTREALVSAYDGARRQGVRVKGVLITNPSNPLGTTMDRATLAMLARFATEHRVHLICDEIYAGSVFAKPDFVSIAEVIERDVPGCNRDLIHIAYSLSKDFGLPGFRVGIVYSYNDDVVACARKMSSFGLVSSQTQHFLAKMLSDAEFMARFLAESARRLAARHDRFVAGLREVGIACLPGNAGLFSWMDLRGMLRDKTHDAELELWRVIVHKVKLNVSPGTSFHCNEPGWFRVCHANMDDETMEVALDRIRRFVRQHQHKAKAERWAAXRPMRLSLPRRGGATASHLPISSPLALLSPQSPMVHAS

SEQ ID NO: 7255 - protein, 402 aa, Zea mays
  Clone ID: ZEAMA-23APR03-C113839_1.p
MATVPNPKTTRARREPALRPRSNNVAAAPAPAPAVASVRRGPAASAEKENQPPKSLGHGKAAAAATAAEPPKPAEPAPVVAPPPPPLRPSSLQLRMKDEAAAAALPAFVVGPRGRELLPPPSSNYEAWDLSDSESAPASSWATLPNRALLCRPLPQDVGRCTCVIAREAATGARGVALYSLYTNEGQGRQDRKLAVARHRRRRGRSEFVVAQNQDGIFCTADTSFLGAVRANLVGSKYRIWGQGDELKNQSKRLLAVVAFAPTITTLTGSFRSLRAWIPKNQSMQLKANSSAQIQHVSGLPKDWQEKKSRADQLCSRAPFYNHMTKRYELDFRERAGRMGYKVQTSVKNFQMTLEENGRQTVLQLGRVGKSKYIMDFRYPLTGYQAFCICLASIDAKLCCTL

SEQ ID NO: 7256 - protein, 196 aa, Zea mays
  Clone ID: ZEAMA-23APR03-C114052_1.p
MGRAAEEEGDVEFADYDLDDEDAMEEDGRAARALPVPRIVSPAVVRTRGRFVGRSPSVLTSSRYRFDFTTNNGDHGPIPLPQRSIEGWAILVSGVKDDAEEDDLYNAFSDFGHVKDLHLNLERRTGYAKGYALIEYENFEEAQAAIRAMNGSQLFTKTINVDWAFSRGPIQNFKSARPSRPRSRTPPRRLAALTPY

SEQ ID NO: 7257 - protein, 230 aa, Zea mays
  Clone ID: ZEAMA-23APR03-C114219_1.p
MMSSAPEETLFNLDQQQPPPAEQEQICYVHCSYCDTILAVGVPCSSLFQTVTVRCGHCSNLLYVNLRALLLPAAAANNNQLPPFGQPLLSPTSPHGLLDAEAMSFQAPSLPGAEPPSACVSGVTSINNTCGGNTTTSSAMSSMAPPPAKHALQEAQQLPRTAASVNRTSEKRQRVPSAYNRFIKDEIQRIKASNPDITHREAFSAAAKNEGAECMLFMDGLYASMGFSPF

SEQ ID NO: 7258 - protein, 268 aa, Zea mays
  Clone ID: ZEAMA-23APR03-C114219_2.p
MTSPVPETFSLQDQQPPPPPPAEQEQICYVHCSYCDTILAVGVPCSSLFQTVTVRCGHCANLLYVNLRALLLPPATAPAAANHLPPFGQALLSPTSPHGLLDAETMSSSSFQAPSLPSAEPPSAACVSGITSINNTACGGNNAASAMAPPPAKPALHEPPQLPRSAASANKTSEKRQRVPSAYNRFIKDEIQRIKASNPDITHREAFSAAAKNWAHFPHIHFGLMPDQGLKKHPMQTQEGAECMLFKDGLYAAAAAATAASSMGISPF

SEQ ID NO: 7259 - protein, 343 aa, Zea mays
  unsure (1)..(343): unsure at all Xaa locations
  Clone ID: ZEAMA-23APR03-C11424_2.p
MSSSGSLPATGTHNTRSTPFHVIHILGNFMRIWSVYSLYSSLSNSGDSIVGFIFSCLVPSSIIFLVLQKPWRGRPLPNSQVVPTVVNGGIMAFYFVLWXALLAEYAGAVLGVLSAALYGRKVNIWKKIGGLAAMLVAYYLLSIGWSTRTHSPLYSFGSEPIEKARQTFGVKEMVVPITAGILSALRRVLARRVSLKNQLKRRLHAITIASATCFLFPFAMWDTILGSASDSIVKFQLPNWAYLSTVLFGMVLIFYVDNVTEEKLHLVFSSPRHLMVSTGCIIVLEIVYQMDFSLFGFLVCSVILGLGIFETTSLERSKKSPLETHELSNGVFHNQLPITELPS

SEQ ID NO: 7260 - protein, 373 aa, Zea mays
  Clone ID: ZEAMA-23APR03-C11439_3.p
LLSFWANIFSIKINPSLFSLLGAILILKVDCRDKLKEEETEECCHGHYTYGDLGDRCFGTIGRCLTETLVLVSQAGGSVAYLIFIGQNLHSTFSQLMSPAGFIFAILLPLQIALSFIRSLSSLSPFSIFADVCNVLAMAIVIKEDLQLFDHPFSNRSAFNGLWAVPFTFGVAVFCFEGFSMTLALEASMADRRKFRSVLSQAVAAIIAVYVCFGVCGYLAYGEATKDIITLNLPNNWSSAAVKVGLCIALAFTFPVMMHPIHEIVETRFRSNRCFRKLSHNDGGAEWIGLHASRVLVVAVLTVVASFIPFFGSFISFVGSTMCALLSFVLPALFHLSIVGSSIPLWRRVLDYGILLFGLAFAGYGLVTALSSH

SEQ ID NO: 7261 - protein, 425 aa, Zea mays
  Clone ID: ZEAMA-23APR03-C11459_2.p
MAAKESSRTMKAARSAGRIGVVASVAMNLAWLAMYIRQRYGEITTVEASRGKPPVTQDSVVILDHGDPVMYEEFWRREGDSASILIPAWQTMSYFSNLGGICCFLEPGLEREVRRLHRLVGNAVVDGYHVIVGTGSTQLFQAVLYAISPASDGTPIDVVSPAPYYSCYPVASSFLNSGLYRWGGDANTFAGDDTSCVEVVCSPNNPDGGIRHAVVKSKSSKAIYDFAYYWPQYTPITEAAAHDVMLFTFSKCSGHAGTRLGWALVKDTEVAKKMTKFMELTTIGVSKDSQLRAAKILGAICNGYEQLPSPAGQTRSHLFHFAREKMAARWTRLRAALAASDIFTLPDELSEYCGFFKKTVTANPAFAWLRCKKDGIEDLESFLRENKIVTRGGTKFGVDGRVVRVSMVDTDQAFNVFLDRLATMK

SEQ ID NO: 7262 - protein, 240 aa, Zea mays
  unsure (1)..(240): unsure at all Xaa locations
  Clone ID: ZEAMA-23APR03-C1148_78.p
MEKAIDRQRVLLAHLLPSPSATSSQPQLAASACAAGDSAAYQRSSSFGDDVITAYRTPICKAKRGGFKDTYLEDLLTVVLKVPFXKVNRQCSSRLQAVADVVAAIKVGYYDIGIGAGLESMSINSIAREGQVNPKISTFXKAQDCLLXPMGITSENVAHRYGVTRQEQDQATSESHRRAAAATTSGKFKDEIVPVPTXGNSSQVSDGAGAVLLMKRSVALKKGLPILGVFRCPARGYSSK

SEQ ID NO: 7263 - protein, 268 aa, Zea mays
  unsure (1)..(268): unsure at all Xaa locations
  Clone ID: ZEAMA-23APR03-C11584_2.p
MTKKLISISTMAGKQGCKEQSNDRRIQASIQGDAKSVVVGFGGRLVTREQEQEDAIIVAALRHVVSGYSTPPPEVVVTVAGGEACGTCGIDGCLGCDFFGAPELAQEAVACGTWQVATTASVXGVGXGGGAEAXXXRRXRNMYXGVRQRPWGKWAAEIRDXXXRAARVWLGTFXTAEEAARAYDCAAVEFRGPRAKLNFPGHEALFQGHGDTAAANTETQTPSPSPSPGEWQLGGGAGDELWEGLQDLMKQDEVDRWLAPVFGAASSF

SEQ ID NO: 7264 - protein, 419 aa, Zea mays
  Clone ID: ZEAMA-23APR03-C115900_1.p
MEYKRSSHAEEEEEDEEEEEDDENEEEEEDEDEARGLRYTTAAVAPVGAPQQQRQQVHAQALGLGSHPSQLMDSAAFSRPLLPPNSSLVMQPPLPPPGFPPAHRQQPPHAQLHPRKAERERDRAAGAQPHVRRHHQEPAKNGVLGGGAAPTSAPSTLGLVPVVEAAQLWRYRECLRNHAARLGAHVLDGCCEFMPSGGEGAAALACAACGCHRSFHRREAVPGGGVAVSPSAAVTPTAGAGANSSRAIPLLLAPPHMHTRPPHHVPASPASAPAALAESSSEELRGPAPPTHAHAHPPHAQVAVVGGSASAPPAPSKKRFRTKFTAEQKDLMREFAHRVGWRVHKPDADAVDAFCAQVGVSRRVLKVWMHNNKHLAKVPPSPPSSSYPQPLPRHHPPPPPLHIHHHPPPQQQQQQQHDA

SEQ ID NO: 7265 - protein, 110 aa, Zea mays
  Clone ID: ZEAMA-23APR03-C11593_14.p
MSGSKVYTLEEVAKHNTKDDCWLVIGGKVYNVTKFLEDHPGGDDVLLSSTAKDATDDFEDVGHSTTARAMMDDTHPILATAGGGGGGGAGEKKKGKRREEIEWPGCAVGE

SEQ ID NO: 7266 - protein, 316 aa, Zea mays
  unsure (1)..(316): unsure at all Xaa locations
  Clone ID: ZEAMA-23APR03-C115_3.p
MGSMRRSSVRLLIGFLLIRLNWCSAVGDKGAEKVGVAFPVVVSTWPFREAVRAAWKVVSTGEGWGSAVDAVVAGCSACEDLRCDGTXVGPGGSPDENGETTLDALVMNGETVXATMEIGAVAAMRYVKDGIKAAKLVMEHSEHTLLVGEKATAFAISMGLPGPTNLSSPESIEKWEKWKQNHCQPNFWKNVDPVGKCGPYHPINLASVEVEGSVKNEVVGSQGGLCQGYFESDNLLEPIKSNLKVVNRHNHDTISMAVIDKMGHIAVGTSTNGATFKIPGRVGDGPIPGSSSYGDDEVGACGATGDGDIMMRFLPW

SEQ ID NO: 7267 - protein, 296 aa, Zea mays
  Clone ID: ZEAMA-23APR03-C11625_1.p
MGNASGRDEDAAAVDGDGADVEDGGGDSSERDFPSYGSGGANHVRRACSVGVVGGGAAAGSPPGSPGHSLSPRMFVPQTPVPPLQRAADVTPVFNQILMDEQEEYDGPPQKEIPALIVWTLGGKNVYVEGSWDNWKSRKAMQKSGKDHSLLLVLPAGVYRYRFVVDGERRCLPDLPCEIDAMGNAVNLLDVNDYVPESVESVAEFEPPPSPDSSYSFQAPEDKDFAKEPPVLPSQLHLGVLNSQNSEESCARPQHIVLNHLFIEKGWGAHPLVSLGLTHRFESKYVTVVLYKPIER

SEQ ID NO: 7268 - protein, 324 aa, Zea mays
  Clone ID: ZEAMA-23APR03-C11628_3.p
MDPSSEIILDTPYFRIYSDRRIDRLMGTETVPAGFDPSTGVTSKDVVIDSDAGLYVRLYLPLPDTVAAAASPPPSVNDSKTKLPVLVYFHGGGFVTQSAASPIYQRLLNALAARAGLLIVSVNYRLAPEHPLPAGYEDSFRALEWVAASGGDPWLSRHGDLRRVFLAGDSAGGNIVHNVAMMAAASGPRVEGAVLLHAGFGGKEPVDGEAPASVALMERLWGVVCPGATDGVDDPRVNPLAAAAPPRPSLRDMPCERVLVCGAELDSLLPRDRAYYEALAASGWSGTVEWFESQGQDHVFFLFKPDCGESVALMDRLVAFFAAN

SEQ ID NO: 7269 - protein, 166 aa, Zea mays
  Clone ID: ZEAMA-23APR03-C11769_9.p
MSNTLLRVYPSDLKMPFELRKQNSACLELVNKTDRWVAFKVKTTNPRKYSVRSASGVVPPRGSCGITITMQAPKEMPPDYHCKDKFLVQSIAVEEGTTQKDIVPDMDDSTSKLELERRYAQENKKIQKELDLLRKTKASPRGFSAFVLLVFLLSSLLGYLMFGSRA

SEQ ID NO: 7270 - protein, 494 aa, Zea mays
  Clone ID: ZEAMA-23APR03-C11782_2.p
MAIPTAPALLFPSVLPNSFPRRTPWRHLVRRQPRHLRAGRPRLQAPAPAPPPVAEVAAERDDTPPLRLLEPPQEDDPFPPEMEPADPDFYRIGYARMMRAYGIEFLEGPDGMGVYASRDVEPLRRARVIMEIPLELMLTITQKKPWMFFPDIIPLGHPIFDVIESTDPETDWDLRLACLLLYAFDIEDNFWQLYSDFLPSVDECTSLLLAPKEDLMELEDEDLASQMLKHQERAIDFWQKHWDKPIPLKLKRLARDHERFLWALSIVQSRSVNLKLRMGAFIQDANVLAPYADMLNHSPNANCFLHWRFKDRMLEVMIKAGQAIKKGDEMTIDYMSGVNSKFMERYGFSSPTNPWELINFSSPATIHMDSFLSVFNIAGLHDELYHNSALTSVVETDFVDGAVVAAARALPTWSDGDVPAIPSVERKSAQALQEECRQMLDSFPTTIEQDQQILDSDAHISKTREIAIKYRLHRKMLLQKIMDALDIYQDRILF

SEQ ID NO: 7271 - protein, 209 aa, Zea mays
  Clone ID: ZEAMA-23APR03-C11783_3.p
RLLHPAAGRRAPQRACDDNATTSSTSKIRKKTKKRYSEEEDDDDEDDEDDDELDGQEGDASGKSKQSRSEKKSRKAMLKLGMKPITGVSRVTVKKSKNILFVISKPDVFKSPNSDTYVIFGEAKIEDLSSQLQTQAAEQFKAPDLSQITSPETSGPGQEDNDEEVDETGVEAKDIELVMTQASVSRPKAVRALKASNGDIVTAIMDLTT

SEQ ID NO: 7272 - protein, 409 aa, Zea mays
  unsure (1)..(409): unsure at all Xaa locations
  Clone ID: ZEAMA-23APR03-C117973_1.p
MAAAAAVFFPSTPNPRHRLAAAARRPPPSFTGATDAVPLPEDEDSSDDDADDDGAPRRSGRRDRRRAVRVAWEKLVRWSRSWRRRNRSDVLETTRKVVVLGGGSFGTAMAAHVAAKKADLEVAMXLRDDHICRSINNAHVNCKYLSEHRLPENIVATTSAADALAGADFCFHAVPVQFXSFLESISTHVDPKLPFISLSKGXELNTLRTMSTIIPRALGNRRQPFVVLSGPSFAVELMNKLPTAMVVASKDNKLASSVQQLLASPNLRISTSXAAGIVEGMSLGNNCMAALVAQGCSEIRWLATKMGAKPTTLSGLSGSGDIMLTCFVNLSRNRTVGLRLGSGEKLDRIMGSMNQVAEGVSTAGAVIALAQKYKVKMPVLTAVARIIDNELTPTKAVLELMNLPQVEEV

SEQ ID NO: 7273 - protein, 220 aa, Zea mays
  unsure (1)..(220): unsure at all Xaa locations
  Clone ID: ZEAMA-23APR03-C117_8.p
MAAKMFALFALLALCATATSATHIPGHLSPLLMPLATMNPWMQXCMKQQGVANLLAWPTLMLQQLLASPLXPCQMPMMMPXGMMPPMTMMPMPNMMPSMMVPXTMMSPITIXAXMMPPMMMXPNMVSPMIDGPSMXGPSTMTARSMMPPXIMMAKYDTHPMMMPSMVSSMIMPNMMTVPQCYSDSISHIIQQQQFPFMFSPTAVAISPMFLQQXFVGAAF

SEQ ID NO: 7274 - protein, 400 aa, Zea mays
  Clone ID: ZEAMA-23APR03-C118431_1.p
MATAVSTPADLSPTPAPRRRGRPPKNPAPAEAPGSPADQAEVIGDYERERDARIRENMERMQKLGILDLAHTLSHCAAASGRGTGSGRWRRKPVEPGSAGGARVKPASPAPSRRSLRLKDVEPVTYCEIEPKKEKRSEGGKTVLMEVGAKEEIYTEEHDKLLGTCNTPWTLFVDGYGKDGKRIYDQVRGQTCHQCRQKTLGHHTSCCKCQIVQGQFCGDCLYMRYGENVLEVKKNPNWICPVCRGICNCSLCRTKKGWFPTGSAYRKAIGLGYKSVAHFLIATHRASSVNSSSVDNNKLPFAKSETSCISDHANESPEDGETTSKAKQNKATRRRVRKSSDGDNDSRSGSVVTSDCQDDQANKDAGCVTPSSKPASTKRKYVERSPDCIASRLRSRLNMP

SEQ ID NO: 7275 - protein, 522 aa, Zea mays
  Clone ID: ZEAMA-23APR03-C1186_2.p
MPVATFLLVALLSCGARAIRTHGGYVSAVGDPGMRRDGLRVAWEAWNFCNEVGQEAPGMGSPRGADCFDLLGPVDLCSVPQRRAPTRRGRPVYSVAHLVSDADNRLGAGDPFPGSPPGAARVTDADLYAPAKELYLGDRCQVADTPAPWQFWMVMLKNGNLDTTAAACPENGRPARPFPQTSRFPCPAGAGCMNQPLLFHNRTALDDAGRRLRGGLFGTYDLDAAAGLGAGDVSFYSGTWEKEVAASGRGGGWAFHHKLRTSTKYPWLMLYLRSDATRGFSGGYHYDSRGMTKTVPESPDFKVRLTLDVKQGGGRNSQFYLMDMVSCWKNDGRACDGDTATDVTRYSEMIINPATPAWCSPSRIDQCPPWHTFRNGSRVHRRDGARFPYGAYHVYCSPGNAARAEQPTTYCDAYSNPQAQEILQLLPHPVWGEFGYPTARGQGWVGDPRAWDLDVGAMSQALYFYQDPGTPPARRRWTSLDVGTEIYVSDRAEEAEWTLSGFDILVPDKCIKSQQRASNSCW

SEQ ID NO: 7276 - protein, 261 aa, Zea mays
  Clone ID: ZEAMA-23APR03-C11886_2.p
MLLVSQAANGSLSARRLPSKPPGPSTTNPYPLFANPRLLRRRLALSGAGADQAPRRAAPTPAAAGEGPSASSTEDPVLVRVADDGVPLEGVIQIEKPGDAAAESKLVSYAKLGLLAGGDVFCLLLFSAIGRFSHGLPVLDAETFKTADPFIAGWLLSAYLLGGFGDDAKGRNGVGSAVITAAKSWAVGIPLGLAIRAVTSGHLPPTPFILVTMGSTGVLLTAWRALVSQLFSNQQKQQDDVYRRGSPFELFELLTSLVRRW

SEQ ID NO: 7277 - protein, 403 aa, Zea mays
  Clone ID: ZEAMA-23APR03-C118930_1.p
MSLVAAPMAIVDVANAQLQQAAAAAAKKDEDGHEQQESSYDYGALMKGVRHLSDSGITRLPDRYVLPASDRPGVLAVSSSVAGSGRVKLPVVNLAGLRDPCQRAAVLATLDAACREYGFFQVVNHGFGSDVSGGMLDVAQRFFELPLAERARHMSADVRAPVRYGTSFNQAKDDVLCWRDFLKLVCQPLQAVLPYWPQQPADLRDVATRYATASHRLFMEVMEAALEALGIPTAGGVLGELAASSSHMMTVNCYPACPQPELTLGMPSHSDYGLFTFVLQDHVEGLQVMHDGRWLTIDPIPGSFVVNVGDHLEIYSNGRYKSALHRVHVNSTRPRISVASFHSLPAERVIGPAPELVDDEAGNPRRYMDTDFATFLAYLASADGKNKTFLQSRKLPAAAPPCL

SEQ ID NO: 7278 - protein, 353 aa, Zea mays
  Clone ID: ZEAMA-23APR03-C11944_1.p
MADEAAPRLLPVAADRDKDDRRRWAARCGFAVLGIMSTLLVYGVLQEKIMRVPYGVEKEFFRYSLFLVFCNRITTSMVSAMVLLASKKSLDPVAPLHKYGVVSISNILTTTCQYEALKYVSFPVQTLAKCAKMIPVMIWGTIIMRKKYVAKDYFFAVVVTMGCALFILYPASMDVSPFNKGRESTIWGVSLMLGYLGFDGFTSTFQDKLFKGYDMEIHNQIFYTTVCSCLLSLSGLILQNHLIPAVDFMFRHPDCFSDVVILSSVATASQFFISYTIRTFGALTFATIMTTRQLVSILLSCIWFVHPLSWMQWVGAAIVFVALYTKSFLRSKPQKLAGSSPPRGSSPNPVSNS

SEQ ID NO: 7279 - protein, 357 aa, Zea mays
  Clone ID: ZEAMA-23APR03-C11944_2.p
ALRILVISFLANFAFRIKRLDTFWFLLHTACADDSSLLTTSCSRVDDAVQEKIMRVPYGADKEFFRYSLFLVFCNRITTSMVSAMVLLASKKSLDPVAPLHKYGVVSISNILTTTCQYEALKYVSFPVQTLAKCAKMIPVMIWGTIIMRKKYGGKDYFFAVIVTLGCALFILYPAMMDVSPFNRGRESTIWGVSLMFGYLGFDGFTSTFQDKLFKGYDMEIHNQIFYTTVCSCLLSLSGLILQNHLIPAVDFMFHHPDCFSDVLILSSVATASQFFISYTIRTFGALTFATIMTTRQLVSILLSCIWFAHPLSWMQWVGAAIVFGAIYAKSFLRTKPQKTAVASPSHGSSPNPANSS

SEQ ID NO: 7280 - protein, 408 aa, Zea mays
  Clone ID: ZEAMA-23APR03-C11995_1.p
YAPRVIIVGTGGVCSCLRFSVRVQGSKQAKNRTTGSKKFSQSKQVPGLNQEEPFACRWREGRVLQLAANPATAACSEQQTWPWRRRKKQQRKATSPLHPCCRRPPRCRRQRLRLGTPGRRRRLRLPGAWAARRRVGAVLLHNGTQTAGQSEHASLSSGRRRGRPRGSGRRQILATLGEWYALSAGGSFTPHVIIVGTGEDVAARIMSFSQKGPRSVCILSANGSISNVTLRQPDASGSTFTYEGRFEILQLMGSFTMAEEGRRRTGGLSVSLAGPDGRVVGGVVAGMLRAASPIQVIVGSFLPNSLKQHQRRRMSMQQPSPVPALPAPVAPPPPVLTAATPISQAGPGNGFHAPPPPHSAAPPQPHANAMNLNATTTGFTMVGWPASSPQPMAYRASPDINVSLTPQE

SEQ ID NO: 7281 - protein, 164 aa, Zea mays
  unsure (1)..(164): unsure at all Xaa locations
  Clone ID: ZEAMA-23APR03-C119_1149.p
MDASGAGSKAKKGAAGRKAGGPRKKSVSRSVKAGLQFPVGRIGRYLKKGRYAQRVGTGAPVYLAAVLEYLAAEVLELAGNAAKDNXKTRIVPRHLXLAIRNDVEXGKLXXXXTIAHGGVLPNINPVLLPKKVAEKASSGGSKESKSPKKAAKSPKKAAKSPKKA

SEQ ID NO: 7282 - protein, 107 aa, Zea mays
  Clone ID: ZEAMA-23APR03-C119_1174.p
TRASPLGTLNTRSLAHRMGLEIHTHIPDQSAGDVAVVGGAGDAPQGAAVPRSLLALSLTWGMVAGGCRRWAGTTVWGVVVWVMVVACQPPNQKELSRRGDKGFRGRE

SEQ ID NO: 7283 - protein, 85 aa, Zea mays
  Clone ID: ZEAMA-23APR03-C119_1205.p
GILMLGAGRGRPERGHLASAYSFGSGRLDTGIVPKALPCSLDYKLVTVGVPYADDHFQHLRNEDSREKPRSETLAIRLGSEYGSS

SEQ ID NO: 7284 - protein, 268 aa, Zea mays
  unsure (1)..(268): unsure at all Xaa locations
  Clone ID: ZEAMA-23APR03-C119_1221.p
MDETKVLTVLNVCHGSLSGSVSISQVSNLISCLFFGEDLKILGVEKIASQQEIKKVYHKLALRLHPDKNPRDEEAKEKFQQLQKVISILGDAXKRALYDDTGITDDALVGEAANNLQEYFRTMHKKVTEADIEEFEAKYRGSNSEKTDLKELYTKHXGNMNRLFCTMICSKPKLDSHRFKDIIDEAIGEGELKSTKVYEKWAKKISGMEPPTNPLERRAKXERKKQFNSILSNIMSKCDSKASSSEPTEEELEQAQQRLESRRAKRRK

SEQ ID NO: 7285 - protein, 125 aa, Zea mays
  Clone ID: ZEAMA-23APR03-C119_1351.p
NSCAMAFYPIPSPFLSRRFPEREKGCPSARNLAAPPRAHDCVLLGEIKGARVCRRGSLSTSVVCGGRKSTRLLGISRRRSFPSRRRGQPCAHRLLWLEEIQVTEAILAFGLLQQRCEDEVLEVAY

SEQ ID NO: 7286 - protein, 49 aa, Zea mays
  Clone ID: ZEAMA-23APR03-C119_1371.p
FTRMGECRMLFQILFLGSSNLFDLNASFCSNVAKNDCLTNCQHNCLQQS

SEQ ID NO: 7287 - protein, 166 aa, Zea mays
  Clone ID: ZEAMA-23APR03-C119_1509.p
FLVRKRNPLSPLTVAAPLCSFHFSPELELNRGTTCRRLGEASAHSKLYSGDDSLVMLVIDTNHFFWAATALPFTDSFARSNSLLLLDHVNRVVISWRESTRVLAPLDSSDASPPVVWPSWTPSPGQAARRSSLLWMRAPVEVPTTEVAAVAATDSVAVRFTLAATI

SEQ ID NO: 7288 - protein, 102 aa, Zea mays
  unsure (1)..(102): unsure at all Xaa locations
  Clone ID: ZEAMA-23APR03-C119_1545.p
TLGGGPVLXXNSXXRRXRXXXXXATHRLLLFSCSYVWCDVNFAYTMYVCITTTSGLGGESDDHPGTWNLKSQASCALDHFFLPTHVLINHNDLHRFNFDGIQ

SEQ ID NO: 7289 - protein, 251 aa, Zea mays
  Clone ID: ZEAMA-23APR03-C119_1633.p
MASAGHRRHFADPHVLLKTQYNSSSRHVCDICRSKLAGLTGYRCSACDFDIHEACANYFKETISFFAHPWHTLTLSRMPSSCDGWSCDLCWEGCPPGDLVYRCTDCLFDVHPLCTMLPQTIRSPLHPRHDLRLVPSIGTCMCGCEELSVWNYVCSCPLKVNIACVSGAPSSGRQSTDYCGRSNTGSAHHASAATAQQPEAWHRRCSMFYRRPSVDCYYTMSSDPSRGAHLHLPFDSPPAAPLPSTIQFETR

SEQ ID NO: 7290 - protein, 251 aa, Zea mays
  Clone ID: ZEAMA-23APR03-C119_1652.p
APQPRSDLSAAVSSCLQLEFLPSLSSQFFFSLISPGRPSACGIFLAAQLAPARCQAAGKILPPSRRSVVFIPQPVVFFAVPMPQLHRGAAPAAPLFQLLWWRSISSRAVISCSDYAQLCPAPRLPSSPWVAPPSPCCSSRPALLLVSSRVELPLLSPDLCSRPAMARWLPAAPSSSTRCPSHGVLAELAQPKPPSWFPARGTLSGVQFSPRRSSLRALPSTSSSVAARTNPCSPACSGFSHGASPASLSIR

SEQ ID NO: 7291 - protein, 180 aa, Zea mays
  Clone ID: ZEAMA-23APR03-C119_1695.p
MSTEKKQLNTMREIKVQKLVLNISVGESGDRLTRAAKVLEQLSGQSPVFSKARYTVRSFGIRRNEKIACYVTIRGEKAMQLLESGLKVKEYELLRRNFSDTGCFGFGIQEHIDLGMKYDPSTGIYGMDFFVVLERAGYRVSRRRRCKARVGIHQRVTKEDAMKWFQVKYEGVILNKSHAS

SEQ ID NO: 7292 - protein, 344 aa, Zea mays
  Clone ID: ZEAMA-23APR03-C119_1699.p
SSSSARVSGAQPRLLHRRVPSALHLLPVRALCFSFLSSRGITCSLSDACLFQLGAQGPSTPRPGAPMRRRPGSSSARRPPSARSSHGRAPTARRCLPRALRLPGARRPVAQPSRSSLPARLPRSAGCQPLLLSRAAFLCSAMAARRRSSFLPRPASCVPATDRSPSHGELAGPPCSPSQAPWLAAVLSLAKVGRALSSSSASSPRAAVPSARIPVGGTPSSSSPARRAAAPWLGSAQRRGSRVRPCAPVFPAPGRRLLPAMEFAGSRPVVLVSDARSGHGPCRVRHFPYPVLTRLPAHQRALPARSALIPVVSLTSPVVVIRRRVVCAHPRQDLALRAPRAASP

SEQ ID NO: 7293 - protein, 246 aa, Zea mays
  unsure (1)..(246): unsure at all Xaa locations
  Clone ID: ZEAMA-23APR03-C119_1782.p
RTPFSRLSRSDCSHFAAPLTSLTRRQCRPRRSDCCATRQSEADXRPSPASGAIRSSASPDPRARTRARPRKTTNTASPDPRARTQARPRKTTNSASPDPRARTRARPRKTTNTASPDPRSRTRARPRKTTNSASPDPRARTRAQPRKTTNSASPDPRARTRPRPQPTXLRLARPKGSDSTSTSEDRFDLDLGGASASPYPGLGPTTSHEAPSLPYPKLTQATGNKTGRPIWLVPVTGNDGLPHVRL

SEQ ID NO: 7294 - protein, 232 aa, Zea mays
  unsure (1)..(232): unsure at all Xaa locations
  Clone ID: ZEAMA-23APR03-C119_1836.p
GGIWRRKIGMNDDERTEARRGKSACRGRQVQRSSWRGAGRPSGGQRCRITQAEQEARRVDEVEGHAQGRASREEHRAELWTEEREPGTRRGGHGRAEEVPAGRGEQREAAARRHRRRASSKQRGRGAPLGAPQEIDGRAESHGRESRAGAGRSSGHGEYXGAGASSGRKTVAHRKTGRRARTRQGGARPGAMGRARGSSTAGFAAQDAGARAQREMRTAGERREHGQGTAEQ

SEQ ID NO: 7295 - protein, 246 aa, Zea mays
  Clone ID: ZEAMA-23APR03-C119_1857.p
MQILGRKVLEASRRLPLFYAAHSGRAHAIATLAGAAARWAPPATSGSLATAPWAATQRRGAKMLGSDVKLGNVIQRRGHIYQVIKAQHSHQGRGGATIQVELRDVDTGNKITERFRTDEALERVFVEEKSFTYLYQEGDTVTLMEPETFEQLEVSKELFGKAAAYLKDEMKVNLQYFDGRPMSGTVPQRVTCTVVEAQPNTKGLTAQPQYKRVLLDNGLTVLAPPFIEAGENIVISTADDSYMTRA

SEQ ID NO: 7296 - protein, 99 aa, Zea mays
  Clone ID: ZEAMA-23APR03-C119_1892.p
MTRPYMYPWLLTSPSILRSPFILLRDPLLALLSLKKVPPSIFCVDNICVLPRGTPRPPPRAAGSAPRPAPPPPPPPSPTPPADRTAPPTRPPPRLSPAP

SEQ ID NO: 7297 - protein, 168 aa, Zea mays
  unsure (1)..(168): unsure at all Xaa locations
  Clone ID: ZEAMA-23APR03-C119_1899.p
NQRKVKWKRLGSXSQDSXXSGCTGXSGGSRTVSGXPRWRWSTGSSRELDDGVRLKFTGLSVCTGLSGEPTVXRAIPRVTRGRANGLECSRTVSGAPTAPNRQRSAAPKQERNLHRTVSVGAPDCPVHQSTEGKNCLPGLLSTAPSYLGAIKGTPRRMKKQTKHSLIIS

SEQ ID NO: 7298 - protein, 228 aa, Zea mays
  unsure (1)..(228): unsure at all Xaa locations
  Clone ID: ZEAMA-23APR03-C119_923.p
PPWCRAPCSSRPWLFAARLLQPPQPSSASCSLCGAQARSSLSWRQEFPCSDSALCASPLLAQARAQPSPSVTCAGRAPLCPSRRFSSSPLDPLGFNSQSCRALSNETKIRARQARVPNLFXARRDLVRRVVCTALYMXPSYIVVEAIIPCSTPTSLARSKHDPVVVSCVVKKSQASDEDVANSAIFPKRSTNLLDRKITTDLADSCQLWKRYADKLFKIVRSSKKKKK

SEQ ID NO: 7299 - protein, 359 aa, Zea mays
  Clone ID: ZEAMA-23APR03-C12011_1.p
MDDAANPTPPPSTSAASAAAAAAQHQQLQRQLFLMQQAQSHPQQLSQQAMSRFPSNIDAHLRPLGPLRFQQPQPQPQPSHSQGPSQSPSQATQQASPQQQQQQAAAAAAAAQAQAQAQAQAARVRSPEMEMALQDAMRVCNPDVKTPFQSIEDAVNRLLPYHVVADYEAEEDDRILDSDTTGQIPSRLQQWDHNILVKIAEFTTTFDKQVLAYNIMTKKRAIGEFRSEERLMLEQALLQEEKQAMLGLRAEMESREKAGREAAEVKMRLAMEHARAEAQAHSEMMNHGPIRASAVASQGEDGPSHDMVQEHGEDGWGNSQRDDEDPSEDFLNDENEPENGNSDGQEDWRRSGEFDLNSR

SEQ ID NO: 7300 - protein, 253 aa, Zea mays
  unsure (1)..(253): unsure at all Xaa locations
  Clone ID: ZEAMA-23APR03-C120490_1.p
MTRPAPRPRSRAPRRRRLRAARGAGAGSGGGGGGGVSCQDCGNQAKKDCVHQRCRTCCKSRGFTCSTHVKSTWVPAAKRRERQQQLAVLAASAAATTAGAGPSRDPTKRPRARLSVATPATSSDGHGRGXFPREVSSEAVFRCVRLGPVDQAEAEVAYQTTVSIGGHVFKGILHDVGPHSLPAAGVGGGAIEYHFRHAGDGLPPSTAATGEAGGGGVGSVVVSSAVVMDPYPTPGPYAAFPAGAPFFHGHPRQ

SEQ ID NO: 7301 - protein, 676 aa, Zea mays
  Clone ID: ZEAMA-23APR03-C1205_2.p
MAEAGVARGSGSAGDALFRELWHACAGPLVTVPRQGELVYYFPQGHMEQLEASTDQQLDQHLPLFNLPHKILCKVVNVELRAETDSDEVYAQIMLQPQTEQSEPTSPDPEPPEPERCNIHSFCKTLTASDTSTHGLSVLRRHAEECLPQLDMTQNPPWQELVAKDLHGNEWHFRHIFRGQPRRHLLTTGWSVFVSSKRLVAGDAFIFLRGENGELRVGVRRLMRQLNNMPSSVISSHSMHLGVLATASHAISTGTLFSVFYKPRTSRSEFVVSVNKYLEAKNHKMSVGMRFKMRFEGDESPERRFSGTIIGMGCMPANSTSPWANSEWRSLKVQWDEPSAILRPDRVSPWEVEPLDRTNPQPPQPPLRNKRARPPASPSIAPELAPVFGFWKSPAEPAQAFSFSGLQRTQELYHSSPSSMFSSSLNVGFNPKYEGPTPNTNHLYWTMRETRTESYSASINKAPTEKKQESTTSGCRLFGIEIGSSAVSPVVTVASVGHDPPPPALSVDAESDQLSQPSHANKATDAPAASSDRSPNETESRQARSCTKVIMQGVAVGRAVDLTRLDGYDDLRRKLEEMFDIPGELSASLNKWKVIYTDDEDDMMLVGDDPWSEFCRMVKRIYIYSYEEAKSLTPKAKLPAIGGDTGVKPDPSKLSAESDVPQSDSDNSAPVAADKD

SEQ ID NO: 7302 - protein, 277 aa, Zea mays
  unsure (1)..(277): unsure at all Xaa locations
  Clone ID: ZEAMA-23APR03-C120_25.p
MATLNPFELLGADDNDDPTQLIAAAAAAAQKAEAKKSAVAPAGKAAQPAATTKFPTKPAPPSQTVRDARGGGSSARGGFGRGERGRGRGGRGYGQNRGFSGDNGNEFQGGYGGGGYGDGAVTGWICKDATANEEEEKEEDKEMTLEEFEKIREEKRKALLALKAEERKVEVDKDLQSLQPLSNKKENDEVFIKLGSDKDKKKENAXERDERAKKSVSINEFLKPAEGERYYGGRGRGRGRGDRGGFRGGYRGGYSRGPAAAAPSIEDQAQFPSLGGK

SEQ ID NO: 7303 - protein, 529 aa, Zea mays
  Clone ID: ZEAMA-23APR03-C120_33.p
MAAGGGGSIADEKAPVAEAFGGHLEAAEMTEAEEEHSGGGGVKSRLSGLLWHGGSAYDAWFSCASNQVAQVLLTLPYSFAQLGMLSGVLFQLFYGLLGSWTAYLISILYLEYRTRREREKAADFRNHVIQWFEVLDGLLGRHWRNAGLAFNCTFLLFGSVIQLIGCASNIYYVNDRLDKRTWTYVFGACCATTVFIPSFHNYRVWSFLGLVMTTYTAWYMAVASLVHGQVEGVQHSGPTRIVLYFTGATNILYTFGGHAVTVEIMHAMWRPQKFKAIYLLATLYVLTLTLPSAAASYWAFGDELLTHSNALALLPRTPFRDAAVVLMLIHQFITFGFACTPLYFVWEKLIGLHDCRSLCKRAAARLPVVVPIWFLAIIFPFFGPINSAVGSLLVSFTVYIIPALAHMVTFRSPQSRENAVERPPRFAGGWTGAYVINSFVVAWVLVVGFGFGGWASITNFVQQVNTFGLFAKCYQCPPHLTAAPPAAFMPPPHQWPRRPPCHRRRRRSMPPASSSLRCQPRFRLRLRRR

SEQ ID NO: 7304 - protein, 378 aa, Zea mays
  unsure (1)..(378): unsure at all Xaa locations
  Clone ID: ZEAMA-23APR03-C120_57.p
MATLNPFELLGADDNDDPSLLIAAAAAAAQKAEAKKSAVAPAGKAAQPAATTKFPTKPAPPSQTVRDARGGGSSARGGFGRGERGRGRGGRGYGQNRGFSGDNGNEFQGGYGGGGYGDGAVTGGSEGERERDTRPPYRGGGRRGGYRNVEFGDDSXRPPRRNYERHSGTGHGYEMKRDGAGRGNWGTATDELIAQDAEDSPKMEEAAPVAEKQGEQIDAPAADENKDNKDATANEEEEKEEDKEMTLEEFEKIREEKRKALLALKAEERKVEVDKDLRSLQPLSNKKENDEVFIKLGSDKDKKKENAERDERAKKSVSINEFLKPAEGERYYGGRGRGRGRGDRGGFRGGYGGGYSRGPAAAAPSIEDQAQFPSLGGK

SEQ ID NO: 7305 - protein, 215 aa, Zea mays
  unsure (1)..(215): unsure at all Xaa locations
  Clone ID: ZEAMA-23APR03-C12139_16.p
FLLFVGDHIPSSYDPIILRRPRGEELRFENEKEKGPAAXPSSPPRSGPPPTTRTGALSVPLLAPARDTLQAASGVVTTTLHWLPSSMEESESTAPPLLLALRMTPTPTRKLPRLSAVVARPLTLPAREAAPHCSCRLAFGNGGAVATLMELPVLHGTTPKTTALGALTLPGIMAASAPRGGGVVCTNMVATTTTMRAARTTCCWLFMFWWISLFV

SEQ ID NO: 7306 - protein, 177 aa, Zea mays
  Clone ID: ZEAMA-23APR03-C12185_3.p
MASRARWVEEAGAAEVVENRGKLWLTTGVTRGGKLYYNVEETGFLAEMGALILLNDKDETIGIEDIYGKLAGGNYGCSWDTFQAYKHLKSLGYIVGRFGVPWTMKHGGTHHTIAPQMNILETDQSLNRVDGASNDITKLLKEIQIDGICPSFEVYLPNSKFKKSSPGCPSFLLCLLR

SEQ ID NO: 7307 - protein, 146 aa, Zea mays
  unsure (1)..(146): unsure at all Xaa locations
  Clone ID: ZEAMA-23APR03-C12187_2.p
MDASAATARRKRKRPDADITGDAAAAAAAAPVAVDEASDAEVEEFYAILRRIRDASRRLCGAGARPAPRAPAWRPSFSWEDFATPPPGAPAXRPRPPPQQEPAQPRPDEPVAVVRATAPSPRAGLDLNAEPEPEAPATPRSARVQA

SEQ ID NO: 7308 - protein, 438 aa, Zea mays
  Clone ID: ZEAMA-23APR03-C12215_2.p
MADPDDLGRRLAAVAVSESPTAAAAALESSNNNLFQVMRAVEDAEATIRQQLEENSRLKDELMLKTRELHRIRSEATDQASSHGIRIHQDRALGAHTDTSSTAPIRTTATAAEAFEWGAGDAGINHKYLEANQANGIPRKSPSAPDSAFPSQLSTPSSRSLSPTRHHKETDYDSRLNLSGQGALPVSDLNSNVVIWKQDLLVKVKEQGEEIAQLRRHLSDYSVKEAQILNEKHVLEKRIAYMRMAFDQQQQDLVDAASKALSYRQDIIEENIRLTYALQAAHQERSTFVSSLLPLLSEYNLQPPVLDAQSIVSNLKVLFKHLQEKLIITEEKLKESQYQITPWHAESSNNTSAAAQSPSHPPGNALIKANLDIVPQQAYSHVHSPVSSPVQTRRDWDLLGNENRQVIRSEVATTSAEHDNVGRTSPSTRLLVVTSKIQ

SEQ ID NO: 7309 - protein, 211 aa, Zea mays
  Clone ID: ZEAMA-23APR03-C12229_2.p
MAMRSLALLVLLSLLVVGVAQAVELEMELVPADAIAMTMDHEPPQECATPVSVEEACRGASETHAGVAYDHCMASLGADPRSKEAGNKNMHALAVLATRMAIDHAASTESKIDDLAELEAASSDPQARARFNHCLEQYGGAADLLRDALDNLKAKIYGKAMEQLTAAMGASESCEDAWKGEEDVPVAAHDREYGRMAHIAFGFTHHAAAAA

SEQ ID NO: 7310 - protein, 222 aa, Zea mays
  unsure (1)..(222): unsure at all Xaa locations
  Clone ID: ZEAMA-23APR03-C122309_1.p
MAAEDKETDSPQPPAKLPRLSCADTSAGVAASSPLVLGLGLGLGGGGERDADASPATATPKRPSALTFMQQQELEHQVLIYRYFAAGAPVPAHLVLPIWKSVAASSFGPQRFPSLMGLGSLCFDYRSSMEPEPGRCRRTDGKXKWRCSRDVVPGHKYCERHVHRGRGRSRKPVEAAAPAPSAAAATSLGGGPVHHTGGAPPPHGLGLSPTSVLLAHSAARAT

SEQ ID NO: 7311 - protein, 624 aa, Zea mays
  Clone ID: ZEAMA-23APR03-C1224_4.p
MKFMKLGSNPDTFQGDGNEVSIAASELVSDITVRIGTTKFYLHKFPLLSKCARFQKLIPTTGDENIEIHIHDIPGGAKAFEICAKFCYGMIVTLNAYNVIAARCAAEYLEMNETVDKGNLIYKIDIFLSSSIHRSWKDSIIVLGTTKAHLPWAEDLKLVSHCIDSVASKASIDVSKVEWSYTYNRKKLTVENGHDSPWNGVKQQQFVPKDWWVEDLTDLDIDAYKQVITAVKTKGTVPKDVIGAAIKAYTYKKLPSLSKVSMIHGDAKVRAMLVTITCLLPSEKGSVSCSFLLKLLKATNLLKCGEMCRKELMKRIARQLEEASVSDLLIPTVDGDTTVYDIDLILSIVEEFVRQDSKNAQRHNGGEVNDHVSAPSASMVAVAKTVDGYLTEVARDPNIPVYKFFSLAETVSTGSRPVHDGLYRAIDMYLKEHPSLGKSDKKRLCALMDCKKLSPDACAHAVQNERLPLRIVVQVLYHEQTRACAAATAIRADSIGIGSYESSRSGATTNTEDEWDGVMAVEDLSLSKTTKLVDKCDTAASTVVVGKDKDHGGNKGATGRVAKGGAGAATPKKALGKTVSGKGQTGERSSSDSSDSAVAVAVLTSQEHPKRTTRARNAAKSAAA

SEQ ID NO: 7312 - protein, 396 aa, Zea mays
  Clone ID: ZEAMA-23APR03-C122562_1.p
MAASKKSKKKTSAMAGRDKRRRAAPLEGDEQQLRRRLEEAALLLRRIKGLVRWIVEEVAAGRSPSIVLHRYRNYCSSADSASPSPCACSYDIPVGTDVLSLLHKDYHTSRLNVLLRVLFVVQHLLQQNKHCSKRDIYYMYPSIFVEVAVVDRAINDICILFKCSRHNLNVVPVVKGLVMGWIRFMEGEKKVYCITSVNAAFSIPVDIEAIKDVVSVAHYILVVEKETVFQRLANDKFCERNRCIVITGRGYPDIPTRRFLRYLVELLHLPAYCLVDSDPYGFDILATYKFGSLQLAHDANLLRVPDIRWLGVFTSDFEEYCLPDCCLLRLSPEDRRKAEGILARCYLHREAPEWRSELEAMLQKGVKFEIEALSANSISFLSHEYIPQKIKQGMHL

SEQ ID NO: 7313 - protein, 187 aa, Zea mays
  Clone ID: ZEAMA-23APR03-C12262_3.p
MRRVALLLVAAVCALAAPAAAVVTDGLLPNGNIEDDHSPLPAWMIVSSKAVKYVDAAHFAVPQGARAVELVGGRESALVQEVRTVPGWTYRLAFAVGDSGDGCAGSMAAEAYAARATVKVPYQSRGTGGYKRAVLDFTAIANRTRVVFQSTFYHMKPDGTLCGPLVDDASLVGLRKKKPARRLMQLL

SEQ ID NO: 7314 - protein, 123 aa, Zea mays
  unsure (1)..(123): unsure at all Xaa locations
  Clone ID: ZEAMA-23APR03-C12267_7.p
TTSPIFAAPSDLAVLVSFRWIRALHLFAALRQSPICFLSSIFIQHSIYVRLIKKADEEVTDPKALLEDCSXQSRGVSQWYEYQKCVKRIENDETGHKHRTGQYFDYWKCVDKNVAEKLFEMLK

SEQ ID NO: 7315 - protein, 339 aa, Zea mays
  Clone ID: ZEAMA-23APR03-C123122_1.p
MNSDYTTNKGANGRPHGKKNQALARPKATPSKWDDAQKWLVGMSNGHADGTHGARVKPRSSNADDRRLLGSASQNGRVSCSSVDGALEYSMVVAAPSTPPQAAEGGGDMEETKKIDCMVQLHDSPQAVMRSVCLRDMGTEMTPIASKEPSRTPTPRRACTPVALSPMASRSSTPVRRRQEGPVGVTTAIVAGTLTEQVAAADEVACVGDERPVAGHVPSVNSLESRAAAWDEAERAKFMARYKREEVKIQAWENHEKRKAETKMKKMQMKADQMKARGQEELSNRLATTRRMAEEKRASAEAKLNERAARTSEKANYIRRTGHLPSSFKISCLCGSSFE

SEQ ID NO: 7316 - protein, 479 aa, Zea mays
  unsure (1)..(479): unsure at all Xaa locations
  Clone ID: ZEAMA-23APR03-C12322_1.p
MAPPAAQAQLLLSNHPSPLLSPPQRRRILSGPPPRSHTCAIRHHHGHDKCASSSSTRLRHALRPPAATAVAIAPGDHWGNWAFLLSAAAFGTWAEENTSWGAALSGALVSIMAGLAATAVGLVTPGAPAHDAVMEYLLPAAVPLLLLGADLRRVVRTTGDLLKAFLLGSVASVIGTTVAYLLIPMRSLGQDSWKIAAALMGSYIGGAVNYVXAVSEALGLTPSVLAAGVAADNLISALYFMGLFSLASNIPAEPKTATASPQKDGERLSVLNGGAAVALSFIICKAGSVMAARLGLQGGTLPCVTALAVFLATAFPAPLGRLAPAGETLALILMQLFFAVFGANGTVVADVTRETRVSGFAAAKVSMHLVMVPGAGMESGIDRKPSPIEPSTKRGGPTTGAVMATGXGWTFLVTPGSLVGMLGGSIGKVVGASSIDTHAKSDEEFDGSGGVAEHASPWLRRHGGNVEKSALSRAGRRRR

SEQ ID NO: 7317 - protein, 105 aa, Zea mays
  Clone ID: ZEAMA-23APR03-C12323_5.p
CTTVSMAAGGVRRALVALRSGSPSTISATLSRQAAARSSELAGAPLPRASRRRLGISRVPVVALGGVQGSLMPMHSATASALLTSMLGLKPDSWGWLSEGFATPL

SEQ ID NO: 7318 - protein, 139 aa, Zea mays
  unsure (1)..(139): unsure at all Xaa locations
  Clone ID: ZEAMA-23APR03-C12347_10.p
MCKSMIRKRYMHLTRGVPVGEPEXALEDAFEPLGISDWNSIFWVAHPGGPAILDQVEAKVGLDKARMRATRHVLSEYGNMSSACVLFILDEMRKRSAEDGQATTGEGLDWGVLFGFGPGLTVETVVLHSVPITTGAATA

SEQ ID NO: 7319 - protein, 412 aa, Zea mays
  unsure (1)..(412): unsure at all Xaa locations
  Clone ID: ZEAMA-23APR03-C1238_1.p
MAAAEAASSAPAPEHLLEVEDDEVLIDFKPNAKCRADLRLRSLHPSLPVAFKVQTSSPLKFLVSPPRGAVPPLSSASLRVVLRPQPHAPPSFPRSRADRFLVLSSLSAARLDSVGSSNDGGGGGGVRAVRLRVFFGGPYLLRLAADAGDAXAVRLILRRQPHLLPFLEHQQAAAAPDAGEHDWAPLHAAAARGDCGXLRRLGPEALAARDREGRTVLHAVAAAGEAETVAVLVDMGADTSAVDARGRTPLDVARDKGYQEVVDVLERWQLVMTAARRGDLGSLESLLSKRAGVRGRDQYGLTALHLAAIKGHGDAIALLAGPGCMDVECEDVEGHRPLHLAVEGGHAEAVELLLDMGADANARTRRGATPLQMAEAMGYEAIAQLLCARGAEVAAASALCAASSSSSSISCA

SEQ ID NO: 7320 - protein, 238 aa, Zea mays
  Clone ID: ZEAMA-23APR03-C12403_1.p
MVSDLLLLLFLSLSLSFSHSRAYLLGKKSTYYSLATVLINYTHMDSSQQQQKQDDVDVDVMEVPEVHGDLLMELLDASLAAENAAHHHHHHHHHQQLGLAPDGDGDGDCWIDDNQENYDNMHAHQGCEDCRGLLDGILSDFDDYDGGPSRPRSPPAPYRVVFGHDDDTLLELEWAEEAAMDPFATSESAGGWYMDGLVMAMAWDEQQDGGGFPFEPCYGYEGEAGAAGQLYDASPLWE

SEQ ID NO: 7321 - protein, 359 aa, Zea mays
  Clone ID: ZEAMA-23APR03-C12459_2.p
MARATNAHHHRLRLLLCLSLAAAAWAHGGGGDSDADADADGGAAARPDLRARSLVEAKLWCLAVVFVGTLLGGVSPYFMRWNEAFLALGTQFAGGVFLGTALMHFLSDANETFGDLLPDSGYPWAFMLACAGYVVTMLADVAISYVVSRSQGRSTGTAATGGSDAGLEEGKMRTTNGTRSEPTPADAHGSDHSAASILRNASTIGDSVLLIVALCFHSVFEGIAIGIAETKADAWKALWTISLHKIFAAIAMGIALLRMLPNRPLLSCFAYAFAFAISSPVGVGIGIIIDATTQGRVADWIFAVSMGLATGIFVYVSINHLLSKGYRPQRPVAVDTPVGRWLAVVFGVAVIAVVMIWDT

SEQ ID NO: 7322 - protein, 275 aa, Zea mays
  Clone ID: ZEAMA-23APR03-C124794_1.p
LGLSARLGHPTGKTTRVFAAAMAIPRARLTRLLLHFGSRGSRFLAQPFSTSSSAHGLFPSLWPTPSTAGAWRRAFHDGRPRGPLWRSKKLIGKESLFAIQGLKRFKGDEEKLADFVRRYVARLLKADKLAVLGELERQEEVDLAVKMFRIIQKEDWYKPDIYMYKDLIIALAKCKKMEEAMVIWGNMRDENLFPDSQTYAEVIRGFLRYGSPSDAMNIYEDMKKSPDPPEELPFRVLLKGLLPHPLLRNRVKQDFEEFFPERHIYDPPEEIFGMH

SEQ ID NO: 7323 - protein, 345 aa, Zea mays
  Clone ID: ZEAMA-23APR03-C12479_2.p
MGAATAPTKRRRGPSKTQEEAMARASPEARRRPRPRLVGYEELPEYLKDNEYIRGHYRAEWPVRDALLSAFAWHNETLNVWTHLGGFLFFLALAVAGGRKEAADGAAPGIMRFVVRLDSWGSDHPGQPRHDDAGASLPSVPRWPRTVFLVGAMSCLAISAAAHLLACHSRRASAVFWQLDYAGISVMIVASFVPPVYYAFLCHPPARAAYLCAIAALGALVVAALLSPSCSSPRYRRLRAALFLAMGLSGVVPALHALWLNWGHAACYLALGIEVVMGLTYATGAWFYVSRVPEKWRPGVFDVVGHSHQIFHVLVLVGAVTHYVAVAVLIHWREKVAVACGAASA

SEQ ID NO: 7324 - protein, 380 aa, Zea mays
  unsure (1)..(380): unsure at all Xaa locations
  Clone ID: ZEAMA-23APR03-C12479_3.p
MATTTVTTTAEAASAPGKRRGGGCCALAAAAASVVPVKAAGEQGQQPLPLPRLVRFEELPDYLRDNEFIHAHYRCEWSVRDALRSAFAWHNETLNVWSHLGGFFLFLYLAVAEPTGTVAGGAGAGAAPGIVTFVLASANTSWSSWEASSNSSLTASKGLMAVFGSSDGDAHAVPRWPRTVFLAGAMXCLAVSAAAHLLACHSRRFTRLFWQLDYAGIAVMIVASFFPPVYYAFLGRARTQLVYLSAVTLLGLLVVALLLAPARSSPRLRHLRAGLFVSMAFSGVLPALHALWLNWVHRECHLALALELLMGLVYAAGAGFYVTRVPERWSPGRFDCVGHSHQIFHVLVLVGALTHYAATAILIDWREAMAVAAGGASVLS

SEQ ID NO: 7325 - protein, 244 aa, Zea mays
  unsure (1)..(244): unsure at all Xaa locations
  Clone ID: ZEAMA-23APR03-C12486_2.p
PSPSPSHYTSGCPFGEGCHFIHYFLSGYQAVXKNDQPPGSMMMDGSPTPVVKTRLCNKYNTAKGCKWXDKCYFAHGERELGKSMMDNYMPPXIEPRPTGYFAPPPMAYPGLATLTRFGASATTKIGVDTSFAGSIIGRXGGANTKQISFVIGAKLAIXDHESYTSLXNIELEGTFDQIRNASAMVSELIVSVSGIAPPQVKNPTDRTHHGGGIGSNFKTKMCENLSXKCHFAHSESELRMPTAA

SEQ ID NO: 7326 - protein, 480 aa, Zea mays
  Clone ID: ZEAMA-23APR03-C12502_2.p
MAERWRSRARRDSDLDEDGSPPSRQPRHSGGDEEDDELGNEDLSLEIVARAQRKRRGESCGGVPVFADLLSVSSADEEGAVVELDEADEPRRKQKKRQRRKQRKKHRKEATAAAAGAAVDEEEKEVGTTQEEQIGTAESVLTEDGVDAPTSHSMFLRKLLRIPRYFDPGETLLDTCFNCSEEGHVAANCPMGKRKKPCFVCGLFGHNAKQCKQVDCFICKKGGHMAKDCPDKHKRNDHQSTLCIRCGETGHDMFGCANDYPPDDIEQIRCYACNQKGHLCCSDFFDNSLEQGCAKQRREASAVTTPTLCFKCGEEGHFARGCTKNAKSDGPKGWSSPHSQRKGRWKNDGKSPSHIRRKEKWKKDSSARSAPHDACTTSKSNSPSFEERMGASNHKSKWRGGWTGDDDLPSKKYKPNGWGSPATPKRSYTNHQYLSGGGDYFTPQSSRRHNHGTASPGARKHRFSSSIFAASNTHVRFKRS

SEQ ID NO: 7327 - protein, 766 aa, Zea mays
  Clone ID: ZEAMA-23APR03-C1252_24.p
MASHIVGYPRMGPKRELKFALESFWDGKSTAEDLEKVATDLRASIWKQMADAGIKYIPSNTFSYYDQVLDTTAMLGAVPERYSWTGGEIGFDTYFSMARGNATVPAMEMTKWFDTNYHFIVPELGPNTKFSYASHKAVNEYKEAKALGVDTVPVLVGPVSYLLLSKPAKGVEKGFPLLSLLSSILPVYKEVIAELKAAGASWIQFDEPTLVLDLDSDKLAAFSAAYAELESVLSGLNVLVETYFADVPAESYKTLTSLSSVTAYGFDLVRGTQTLGLVTSAGFPAGKYLFAGVVDGRNIWADDLATSLSTLQSLEAVVGKDKLVVSTSCSLMHTAVDLVNETKLDSEIKSWLAFAAQKVVEVDALAKALAGQKDEAYFAANAAAQASRKSSPRVTNEEVQKAAAALKGSDHRRGTNVSARLDAQQKKLNLPILPTTTIGSFPQTVELRRVRREYKAKKISEEEYVTAIKEEINKVVKLQEELDIDVLVHGEPERNDMVEYFGEQLSGFAFTANGWVQSYGSRCVKPPIIYGDVSRPNPMTVFWSKTAQSMTSRPMKGMLTGPVTILNWSFVRNDQPRFETCYQIALAIKKEVEDLEAGGIQVIQIDEAALREGLPLRKAEHAFYLDWAVHSFRITNCEIQDTTQIHTHMCYSNFNDIIHSIIDMDADVITIENSRSDEKLLSVFREGVKYGAGIGPGVYDIHSPRIPSAEEIADRIDKMLAVLDTNILWVNPDCGLKTRKYTEVKPALTNMVSAAKLIRTQLASAK

SEQ ID NO: 7328 - protein, 371 aa, Zea mays
  Clone ID: ZEAMA-23APR03-C1254_3.p
MGSGGANTAPLLTPYKMGKFDVTHRVVLAPLTRQRSYGNVPQPHAILYYQQRATKGGLLIAEATGVSDTAQGYKDTPGIWTHEQVEAWKPIVDGVHQKGGIFFCQIWHVGRVSNSTFQPNGQAPISSTDKPLKPQVRANGIDVATFAVPRRLETDEIPLVVNDFRVAARNAIEAGFDGVEIHGAHGYLIDQFLKDGVNDRTDKYGGSLENRCRFALEVTQAVVDEIGADKVGIRLSPFASYSEAPDSDPEALGLYMANALNEFGILYCHIVEPRMVKLGEKFETPYSLRPIRDAFRGTFIVAGGYGREDGNRAISTGYADLVAFGRLFLANPDLPRRFEVDAPLNKYNRDTFYIPDPVVGYTDYPFLSSDV

SEQ ID NO: 7329 - protein, 199 aa, Zea mays
  Clone ID: ZEAMA-23APR03-C12572_1.p
MASANNDNREAAGILRLLMGMAAAAPASALPRGGGGGGGGGLMVVQHVILDVDGELFSGGVGGGGVPPASKAAIAALKEVKAGEGEGEGEDALGECAICLDAVEGTGKEMPCGHRFHGRCLERWLGVHGNCPVCRRELPAPAKEEEEDSAASAEGGEEERRRPRAAVVVSYLVFGGGRAEAQQEPEREEPWNIRIEDVD

SEQ ID NO: 7330 - protein, 215 aa, Zea mays
  unsure (1)..(215): unsure at all Xaa locations
  Clone ID: ZEAMA-23APR03-C125908_1.p
MEPDADEDYMGDLSRFLPPSPSYPRGRRRRRRRSPRAKRGKGVPWQERRRQERERKQREEDARTMAGLAEAIPESNVGFRMLRQMGYDPDSRAGAGXEKPREVSERERRQQEEMAVELRARKSTQWKGRRVVWDYRKAERALAQLENREVEPQAPEGEDKEKGAEEEEDVITEEDLQQILSKLRDQYQYCLYCGCKYESPEVLSKECPGPDEDDH

SEQ ID NO: 7331 - protein, 322 aa, Zea mays
  unsure (1)..(322): unsure at all Xaa locations
  Clone ID: ZEAMA-23APR03-C12624_1.p
MSLSPADSAAYWLRWQVLVYGALIAFPAAAAAALLPRLRSAAPPLRAADLWVPCWARLHPGWLLAYRAFAFAAAVALLARLLVGHGLTVFYFYTQWTFLLVTIYFAFATAISAHGCWVYSRKSLRKSDESHGFLNADVENRDVSNSVSGERKTDETNMMMSYYEQIVNERRAGFWGRCMQIIYQTSAGATMLTDVTFWGLLVPFFYRDKFGLALVTDGMHSLNAVXLLIDTVLNNMPFPWYRMAFFVFWSCAYVTFQWVLHACGSLSWWPYPFLDLSSSGAPLWYLGMAIAHIPCFFLYWLVVKAKHTYFPRMFPHAYVRTV

SEQ ID NO: 7332 - protein, 282 aa, Zea mays
  Clone ID: ZEAMA-23APR03-C12642_3.p
SNRNTLQQYAQGPSDRHMDQMYHGSNFQQDTGGTTPSNYFEGDRRVDGDSQLYQPDGDALPGIEGFQIAGEPRPGFQLTACGFPTNGTTLCNFQWVRHLENGTRQSIEGATMYDYVVTADDVGTFLAVDCTPMDDNGRQGDLVTEFANNGNKITCDPEMQSHIDAYISNGRAEFEVFVLAYSPEEWELATLVLTRPNYQIKFKKTGEAIIDEKYSQSLQMKIPNGRTTQFVLVTAGATLPFNTQGISEPNNEDYDVRLRDLIVLVMRTFQKKALDAKRKVNT

SEQ ID NO: 7333 - protein, 536 aa, Zea mays
  unsure (1)..(536): unsure at all Xaa locations
  Clone ID: ZEAMA-23APR03-C1264_1.p
MAATLPSPAAGASPLLLHCNAAPSVSFRHRRRWQRPAATRHDARVAQLLLPVARRWLPEAAPPGVNGARGGIAASGSGAGAAAGEAPYRGNEGQGSLWMVSLATAVVVCGSFEFGTCVGYSAPTQAGIVSDIGLSNSEYGVFGSVLTIGAMIGAVTSGSLADILGRKMTMRFAAVVGIFGWLTVYFAKDAMMLYAGRVLLGYCTGVLSYVVPVYISEIAPKGIRGGLATSNQLFICSGCSAAYIIGALVSWRCLVVVGLIPCAVLLVGLFLIPESPRWLAKIGKEREFQASLHEFRGEDTDISEEATXTKIYIESVRRLPKARIQDLFQRKNMYAVTVGVGLMIFQQLGGINALGFYTSYIFSSAGFSGKLGTTLIGVIQIPITFFGALLMDRSGRRALLLVSSSGTFLGCFLTGLSFYFKAQGLCTQXVPTLALCGILVYYAAYSVGMGPVPWVIMSEIFSIDMKAIAGGFVTLASWIGSFAISYSFNFLMDWNPAGTFFLFSAASLVTVLFVAKLVPETKGRTLEEIQTLLKAT

SEQ ID NO: 7334 - protein, 443 aa, Zea mays
  Clone ID: ZEAMA-23APR03-C12719_1.p
MAAAEGQVRRDMWGQEYRTSSADPTCALAAAHAAQSVAPRDPAGAAAFLNAAADNLGKATEYERAVFGTLSVLVGEKRDEEVAIERHFELLEQFPRDLLSLKRAQLICFYMGKPDLSLKFVQQVLPKNQDQNFIYGMLAFPLLELGRMDEAERAARRGLAINKNDFWSQHNLCHVFQQECRFREATEFMESCSPSWEACTSFLLTHNWWHVAVCYLEAESPLCKVLEIYDHNIMKELEKSDCETAEVYLNGLGLLLRLFIRGHIDSAKERLTTLLDALKNESTWHVEWLLDLLILWALSSMGELKSAHNMLESLKSRVRLMDRNRQQAMQKAIKLAEAAYEYGKGDHMKVYDTLGPDFDALGYKMIGASDEQVDVFNEVWYTVLINAGETSKAIEILGKQIRKREGAPFLWRLLEKSYSLAGRSADASVASKKANALQSSYFH

SEQ ID NO: 7335 - protein, 239 aa, Zea mays
  Clone ID: ZEAMA-23APR03-C12744_2.p
MAPQRRRERAVGEARPSSSAPTPAGPGWVEVQRRRVGGGWTSRRISIYASRVYFLLLMLQIPLFRVPCRAGTCTTPIQVTSSQLVSNEIFPPAVVKAMLYPGAIVSSLTKSKAFPSWSDLFDMYNLTEAKNASAVVDLQRLEILAGSYFCVAGGLLGIINPGRMTLFGTLLVIWGLVKEALFGKPVNSDPTESSYVYPTILIALICAFMSITYNVKKTAASSPVSLAKPLKSSAKSKLK

SEQ ID NO: 7336 - protein, 235 aa, Zea mays
  unsure (1)..(235): unsure at all Xaa locations
  Clone ID: ZEAMA-23APR03-C12749_2.p
MAVNWELRGCCDHDQRIFIAAVGVSTVVILLLWRTFLLTPFKLITVFLHETSHALACKLTCGDVEGMQVHANEGGVTQTRGGIYWIILPAGYLGSSFWGMVFILASTNLLTTRIAAGCFILALFIVLFVAENWFLRWLCLGFIXVFIAVVWVIQEFTSFHILKYVILFIGVMNSLFSVYDIYDDLISRRVNTSDAEKFAEICPCPCNGFAWGVIWGFISFIFLCASIYLGLVILS

SEQ ID NO: 7337 - protein, 322 aa, Zea mays
  Clone ID: ZEAMA-23APR03-C12767_7.p
MASTVVAGMVFCDQCKDGARGLFDYPLYGARVAIQCGGGDTPLTVRESNTNWFGGFSVRMEGSPDMNRCTARVVQGTGHCGAASSSGGGAVPRELTLAFRMLGLSLYTVPPLLSQPEEAMDFCPGHDHDRFRRGRPSSQAQAPAPASPSSSPLPPPFFWRRRSRFLPPVWRKPLPQTLQPPPPPPTTAASQGSSACTYDMWSSPEHRCHWKVVTPNTTVAMAFGPLAAQRYGSELTLGEALEGRGDMYRTLLREATAALLNAYYNAPGGPFLYPTTASVMDHMNGALLSSGQRVLLEGARFRRANAGGGGRTRLMCDFTTCS

SEQ ID NO: 7338 - protein, 582 aa, Zea mays
  Clone ID: ZEAMA-23APR03-C12770_2.p
MRRSSHAMGAQAFRLLLLLLLAAAAAEARFVVEKNSLMVTSPTSLRGRHDSAIGNFGIPQYGGSMAGAVVYPKDNAKACDDFDGRHPFRAKPGAMPTFLLIDRGECLFAKKVWNAQNAGASAVLVVDDKDEPLITMDLPREDDEASKYIQNITIPSALIDEKFGDQLKKAVKDGEMVNVNLDWREAVPHPDDRVEYELWTNSNDECGPKCDMLMNFLKEFKGAAQLLEKGGYSQFTPHYITWYCPQAFVISKQCKSQCINHGRYCAPDPEQDFSTGYEGKDVVVENLRQLCVFKVANENKKPWVWWDYVTDFHIRCPMKEKKYNKKCAETVIKSLGLDVKKVDKCMGDPNADSDHPLLKMEQDAQIGKGSRGDVTILPTLVVNNRQYRGKLERKAVLKAICAGFEETTEPNVCLSDDIETNECLNDNGGCWQDKSANVTACRDTFRGRVCECPTFNGVQFKGDGYSNCEHIDECKEKKACQCPECNCKDTWGGYDCTCSGDLLYIREHDTCISKTAVQAKAAWAAVWGILIVVAVVAAGSYVVYKYRLRSYMDSEIRAIMAQYMPLDNQGEVPNHTHDEDRS

SEQ ID NO: 7339 - protein, 524 aa, Zea mays
  unsure (1)..(524): unsure at all Xaa locations
  Clone ID: ZEAMA-23APR03-C12785_2.p
MSKPWGSVGAGAWALDAERAEEEEREQALTFPAPEPPLPAASFPSLREAAAAGGGGKSKKKNKGTTLSLSEFTTYGAAAAQRRAAPVEPKGLTHDEMLLLPTGPRERSAEELDRSRGFRSYGGGSGFGGPGGERRSGFDDEDRRGPGRSSDLDMPSRADEADDWGXHQKFTPAPTDSGRRDRFGGPSPLGRADDIDDWSRGKKPLPARYPSLGSGGGFRDSPAFRDSPAASDSDRWVRGATPLPHNGEGAGERPRIVLNPPKRDPLVASTPPAEVARNRPSPFGAARPREDVLAEKGVDWRKFENEIEHKTSRPTSSHSSRPNSAHSSRPGSPGSQVSAVGSEGAPRARPKVNPFGEAKPREVVLQEKGKDWRKIDIELEHRAINRPESDEERNLKEEINLLKVDLKEIERNMSNGSDQTSVDAKGLSEKISQLESQLEQLSRELDDKIRFGQRPRSGAGRVTALAPTSLGEEPHATVVDRPRSRGGMEPPPRQEERWGFQGSRERGSFGASRNSDRPMARQRW

SEQ ID NO: 7340 - protein, 931 aa, Zea mays
  Clone ID: ZEAMA-23APR03-C12873_2.p
MEAEAAAAVVASSASASASAGRSRPSSSAAQVTSNSAVRAGEENAASLYVLSVIDSLKKRITADRLTYIKNRIGENKTNISSYTQRTYNLSKNRQISTSKGTDSASNLLTKRQDDALCTLHSLDIIPVDKDGGTFQDESPFSSSNVMFGGNLGPKNAIIRPIKLPEVPKLPPYTTWIFLDRNQRMTEDQSVLGRRRIYYDTSCGEALICSDSEDEAIEDEEEKKEFKHSEDHIIRMTVQECGMSDAVLQTLARHMERAADDIKARYEILHGEKTKDSCKKGTEHNVKVEDLYCDKDLDAALDSFDNLFCRRCLVFDCKLHGCSQDLVFPTEKQPAWSGVDDSVPCGIHCHKLASEPDAAAGADHMLFDVEEPTHSSDNVMNQPGSNRKKNGSSGRKTKSQQSESSSTARVISESSDSEVHPISNKSPQHSPSPSKVKIGPKGGIRKITNRRIAERILMSVKKGQREMASSDSNFVSGYLLARDMKLRSDTRNGNKELIVSSQQSSPSTRSSKKKSTPQIGNSSAFAEAHNDSTEEANNRHSATDGYDSSRKEEFVNENLCKQEVYLRSWKAIEQGLLVKGLEIFGRNSCLIARNLLGGMKTCKDVFQYMNYIENNSASGALSGVDSLVKGYIKGTELRTRSRYFRRRGKVRRLKYTWKSAGYNFKRITERKDQPCRQYNPCGCQSTCGKQCPCLSNGTCCEKYCGCPKICKNRFRGCHCAKSQCRSRQCPCFAADRECDPDVCRNCWVGCGDGTLGVPNQRGDNYECRNMKLLLKQQQRVLLGRSDVSGWGAFLKNSVSKHEYLGEYTGELISHKEADKRGKIYDRENSSFLFNLNNEYVLDAYRMGDKLKFANHAPDPNCYAKVIMVTGDHRVGIFAKERILAGEELFYDYRYEPDRAPAWARKPEASGAKDDGQPFNGRAKKLAQNNRG

SEQ ID NO: 7341 - protein, 411 aa, Zea mays
  Clone ID: ZEAMA-23APR03-C12900_11.p
MSSKEKPTLGGTRIKTRKRNIAAPLDPASFSDAIVQIYLDNGGDLELVAKSIESSDLNFSRYGDTFFEVVFVGGRTQPGTVKPEEGDRHPYSVLDCASQREAILPFVLYIQKTLRRRPFLIKNLENVMRKFLQSLEFFEENERKKLAIFTALAFSQKLSGLPPETVFQPLLKDNLVAKGIVLSFITEFFKEYLEENSLDDLIALLKKGKMEDNLLDFFPSAKRSSEALSEHFTKEGLTSLVEYNEKKMFEVKLKEIKSTLTAMINDEAAISEVIETVKQQVKDAKFPDLEVIRMLWDVLMEAVQWSGKNQQQNSNAALRQVKAWTELLNAFCTSGRLELELIHKVQTQCYEDAKLMKLFPEIIRTLYDQDVLAEDTIVLWFRKGSNPKGRQSFVKALEPFVKWLEEAEEEE

SEQ ID NO: 7342 - protein, 348 aa, Zea mays
  Clone ID: ZEAMA-23APR03-C12931_1.p
MGGYENGESTAAAALADGGVILGVDGGTTNTVCVCLPAAMTPPESPATVPVLARAVAGCSNRNSVGENAALETLEQVMTQALALANTDRSAVRAVCLAVSGVNHPSDQLRMLEWIRDLFPDNAKNYVENDAVAALASGTMGKLHGCVLIAGTGCIAYGVTEDGKVARAAGAGPVLGDWGSGYGIAAQALTAVIKAYDGRGPQTRLTRDILEKLDLSSPDEIIGWTYADPSWARIAALVPVVVSSAEDGDEVANKILHDSVQELADTVIAVVQRLRLCGEDGKDMFPLVLVGGVLEGNKKWDISGEVIKCISKVFPGTDPIWPEVEPAIGAALLAWSHHHKGLKLENGS

SEQ ID NO: 7343 - protein, 738 aa, Zea mays
  unsure (1)..(738): unsure at all Xaa locations
  Clone ID: ZEAMA-23APR03-C1293_2.p
MIGAKANAAGPCPEYAEVDPTGRYGXRFSDVLGKGASKIVYRAFDEYQGMEVAWNQVKLHDFLQSPEDLERLYCEIHLLKTLKHRNIMKFYTSWVDVSRRNINFITEMFTSGTLRQYRQRHRRVNIWAVKHWCRQILSGLLYLHSHNPPIIHRDLKCDNIFVNGNQGEVKIGDLGLAAILRKSHAVHCVGTPEFMAPEVYEEEYNELVDIYSFGMCVLEMVTFEYPYSECTHPVQIYKKVISVRRPPGGLDPMSNCDSGVQFEMIFLTSASCLIWXGTKPESLYKVKDPMVRHFVEKCLATASQRLSARELLEDPFLQSDDVVVSLDGGNYHVPANYIPQPSYLGHTYSNGSMMSNGFSESIDEDVLSEDCEDDDMKGQDGIDLFNENEGELLGNVDITIKGRKSEDGGIFLRLRISDDDGRVRNIYFPFDIEADTALSVATEMVAELDITDHEVTRIADMIDGEVSALVPDWRPGPGIEEAPDTSYCHDCGSIVSSCGSLYAYMSSGRRGCQCAEVHGRFEEITFEADGERCDLQESAGSSDDGGGQTEHYVKSKESTHVNGLLQMGRRDLSNQLCFSSFQEQSCSSNHYENDTNHHTNGFDMKHDVKIAKYKARKMAQLKRAIHPSLDFDNANGVNRMKPSLNKLQSFHIGKNHSFRVPTGDRSPCKVSTDYHSDLNSQLSHSRHPDPGAQRAWHCEVNAAGSSDCMFTARRYYAGAQLPPNLPRTKSVPLHAVDV

SEQ ID NO: 7344 - protein, 251 aa, Zea mays
  unsure (1)..(251): unsure at all Xaa locations
  Clone ID: ZEAMA-23APR03-C13058_2.p
MDGDAGPEQHGCVHYRRGCKIRAPCCGEVFGCRHCHNEAKDSLEVSVHDRHVLPRHDIKLVICSLCNKEQDVQQDCANCGACLGKYFCAKCNLFDDDXTGGAENFYHCGRCGCCYATPLKDSHRCVDGAMHHNCPVCMEYLFDSMKAISVLHCGHTIHLECLYEMRAHQQFSCPVCLRSACNMSDIWQKLDQQVAASPMPAIYQKKMVWILCNDCGVTSNVQFHILAHKCPGCSSYNTRQTRGDPAACSRV

SEQ ID NO: 7345 - protein, 540 aa, Zea mays
  unsure (1)..(540): unsure at all Xaa locations
  Clone ID: ZEAMA-23APR03-C1306_42.p
SCSKPPTLAPPLPTFLRPGLMAEIEVVSEGGRREEDEERRRQQQQGAGEPDPVVDVYSAAAYGDLERLRGFVEQGGAATALREPDGNGYHALQWAALNNYPHVALYIVEHGGDVNATDHARQTALHWGXAVRGSTSVADVLMEHGARVEAADVNGFRAVHVASQYGQTAFLHHIISKYGADFDALDIDGRSALHWAAYKGNADTIRLLLFMDANQVRQDKNGCTPLHWAAIRGNLEVCTVLVHTGTKEELTLKDSGGLTPVQLAAEKGKLDMPLSCLLILSSASSCSXNSIVFAPNFSRITATAGLWSWAAVSLFFASQVMFYRVSRKNPGYIKANSKRTDPKEPLMEIDLTNSSTWTGNWSQLCPTCKIIRPMRSKHCPTCKHCVEQFDHHCPWISNCVGKRNKWDFFVFLWMGIATSFLGAAVGFHRLQTEPVILSSSESWIHFMVTKHPGAVLFMFLDVFLLTGALILTGAQAVQIARNITTNEAANRSRYTYLRGPDGRFRNPYSRGCQRNCTDFLISGYSNDEEVAWPTLQQTVQ

SEQ ID NO: 7346 - protein, 198 aa, Zea mays
  unsure (1)..(198): unsure at all Xaa locations
  Clone ID: ZEAMA-23APR03-C1306_60.p
VGDCHNTKGEKNMCVVGAINNYTAALKDSSSPFDPTESLMFLAHFVGDVHQPLHCGHTDDLGGNTIVVHWYRRKTNLHHVWDVNVIETAMKDFYGNDQSTMIQAIQQNITEEWADEEKKWEACRSRTKTCADKYAAESAKLACTAYEGVDQDSTLEDDYFFXALPVVQKRIAQGGVRLAAILNRIFGGNSRSGFRAVD

SEQ ID NO: 7347 - protein, 425 aa, Zea mays
  Clone ID: ZEAMA-23APR03-C13073_1.p
MGAMGIVVRAWAPPALAAAAAPAPSGSRDTGQAQRRSKPSRTGRVRVLGGTGRVGGSTATALSKLRPKLGILVGGRNREKGESIAAKLGGQSEFVQVDTRNTGMLEEALQVVAVRGVAKPEAAATPARRSRPIPLASVAVWSLVATGAANAAELWDPLALHGSSGLVLADLGIGDWFGGLLFSAGQQANEAVQDQLSALSFSSLAVIFGAGLVTSLSPCTLSVLPLTLGYIGAFGSGKSRSEVVGNSIAFSLGLATTLAILGVAASFAGKAYGQVGQGLPVAASGLAIIMGLNLLEVLELQLPSFFSDFDPRAAAANLPSGVQAYLAGLTFALAASPCSTPVLATLLGYVATSRDPIIGGSLLLTYTTGYVAPLLIAASFAGALQSLLSFRRYSAWINPISGAFLLGGGVYTLLDRVFPATSMAM

SEQ ID NO: 7348 - protein, 259 aa, Zea mays
  Clone ID: ZEAMA-23APR03-C1319_3.p
ISIDEAVEENEGSPRACACQIACSTSASRPSRNSALPGCAKFMASDTRKKLIQIDVSSDTVCPWCFVGKKNLEKAMEQSKGKFDFEVRWHPFFLNPDAPKEGVKKSDFFKMKFGPVQYEGAMSRMTEIFRGLGLEYDMSGLTGNTMDSHRLITLAGHQGYDKQNVLVEELFLNYHCQGKYIGDKQVLLDAARKVGIEGAEELLEDPIKGVDEVQEELKKYSSDISGVPHFVINNKYQLSGGQPPNEFTRAFEMAAKDGT

SEQ ID NO: 7349 - protein, 346 aa, Zea mays
  Clone ID: ZEAMA-23APR03-C13232_4.p
MARKCSSCGNNGHNSRTCGGHSRTTAAFENNGGAGVRLFGVQLHVGSSSPVAVAMKRCFSMECLSSPPPAAPAYYAAALAAANSSSPSASASASSSSSLVSVEEAQAPEKMASGYLSDGLVGRAQAERKKGVPWTEDEHRRFLAGLEKLGKGDWRGISRHFVTTRTPTQVASHAQKYFLRQSSLAHKKRRSSLFDVVENAAERATTTSSRERPRLTVTDAIIATASAAAPGTTAALPALSLGIRRPARPEYHVDVALPPSSLSMQLPRCSAAMGSASASPSPSLALALAGPKHKHPSPSSLTAAKASSSGQAPDLELKISTGRQSEHQVQTGSPPRTPFLGTIRVT

SEQ ID NO: 7350 - protein, 274 aa, Zea mays
  unsure (1)..(274): unsure at all Xaa locations
  Clone ID: ZEAMA-23APR03-C13271_1.p
MMDLLMRQQSAIPYPSSRPSPSPPSPLGSPARALGCTLAGHCTTCGRGGATNGTWDGIVPPEXARPRTRIVRLSPALRWEQAREPLHAGVDVGNVLGVGPGMPFAHAVLASEGAAAEPPVVVGLVPCAQGGTPIANWSRGTELYERMVTRARAAVAECSGRGHLAALLWYQGEADTMRRQDAELYQRRMETLVRDVRCDLGRPDLLVIQVGIATAQYNGKFLGVVREAQKAVKLPNVKYVDAMGLPIASDHTHLTTEAQVQLGNKLAESYLETL

SEQ ID NO: 7351 - protein, 486 aa, Zea mays
  Clone ID: ZEAMA-23APR03-C13300_1.p
MAPRTLGLNAAPLLQILRSLCLLALAAAAAVSGRRHGASPARGSGQSMYLAPACRAHTASVADFGGVGDGTTSNTAAFRSAVDHLSQYSGEGGGGGMLYVPAGKWLTGPFNLTSHFTLYLHQDAVILGSQDVGEWPIVDPLPSYGRGRDKVGGRFASLIGGSNLTDVVITGSNGTIDGQGAMWWSKFHKNQLKYTRGYLIELMHSDTIYISNLTLLNSPAWNIHPVYSSNIVVQGITILAPTNSPNTDGINPDSCSHVRIEDCYIVSGDDCVAIKSGWDEYGISYGMPSQHIVIRRLTCVSPTSAVIALGSEMSGGIQDVRAEDITAINTESAVRIKTAVGRGAYVRDVFARRMTLTTMKRVFWMTGDYKSHPDDKYDPNAVPVVANISYQDVVATGVYKEAARLQGIQGAPFRGICVANVTADLSKSRKYPWNCADIEGVSANVSPAPCDPLQGAHDGACPFPTDTLPIDQVTVQQCAYDIPATN

SEQ ID NO: 7352 - protein, 193 aa, Zea mays
  Clone ID: ZEAMA-23APR03-C13314_3.p
SGKDLDAVLKATPILPEKEGRIIIVQIFQGLVYLNKRGQKIIHYDLKPGNVLFDEVGVAKVTDFGLSKIVENDVGSQGMELTSQGAGTYWYLPPECFDLSKTPFISSKVDVWSAGVMFYQMLFGKRPFGHDQTQERILREDTIINARRVEFPSKPAVSNEAKDLIRRCLTYNQSERPDVLTIAQDPYLSYAKR

SEQ ID NO: 7353 - protein, 127 aa, Zea mays
  Clone ID: ZEAMA-23APR03-C13320_115.p
GPLGRSSSWIGGLRNWWRSSGGAVHWLNGPAAPSPSLLSATKAGYSSKVASVMVVVVPTGSSSGAAVMETAKVLPPPPPTTQMVVLPTLLAPREGSRDPPLLLLRAQRQRSRGWSRGPPSGLPKAWR

SEQ ID NO: 7354 - protein, 239 aa, Zea mays
  Clone ID: ZEAMA-23APR03-C13377_2.p
FDGHSVTVSTSTTGLFSGSGKRRQVSAEKIVFDLTPLQEQRLQSLKERLNVPYDETRTDHQESLRALWNASFPDTELTSLVSEQWKDMGWQGVNPATDFRGCGFVSLENLLFFARTYPASFKRLMLKQQGMRTTWEYPFAVAGVNISYMLIQLLELNSGRPKSLPGINFIKVLTEHEDAFDVLYCIAFEMMDAQWLAMRASYMQFKEVLEATRQQLERELSLEDLNGIHDLPACNLLYK

SEQ ID NO: 7355 - protein, 434 aa, Zea mays
  unsure (1)..(434): unsure at all Xaa locations
  Clone ID: ZEAMA-23APR03-C133909_1.p
MAFHKICGDYSKPSRRSRTRQRFCRNGARAAFVGNVGVHGEHRGPRKRQKAASASGSVAPYLPQELVRNILLRLPSRSVLRFRAVCKDWLRIVSDREFAPXHNRHQPAMPLVSFLRSAAGSKRGQTDCCVDAFDLSADSFRSVVRFADKGTRCSSFDIHGSCDGLLLLSFDARFYVCNPATHQWTRLPAPLRASWLAGFYRHEPTGEYRALFYRGQWPGTDYYIMVADSRKGRGIGLPSEKYGYKFRRQPYSLPVLLRGHLHWMAAIEGYDYEMLAFNTTTEKFTVMCPPVVRWHMSLAEVGNELALLSCGHQVPMLELWILKDYENKSWVCTHWIRLPELKMSTFAFDDFSRMIFVSEKGVLIATPEQKLLRYDLNGTLLESFPCNNGSHLKITPYTFKESLVRHAFFETPDCNADGHEDEDEPEPPPFFLGL

SEQ ID NO: 7356 - protein, 821 aa, Zea mays
  Clone ID: ZEAMA-23APR03-C133_47.p
PLSRIVPISPNELNLYRIVIVLRLIILCFFFQYRITHPVEDAYGLWLVSVICEVWFALSWLLDQFPKWYPINRETYLDRLALRYDREGEPSQLAPIDVFVSTVDPLKEPPLITGNTVLSILAVDYPVDKVSCYVSDDGSAMLTFEALSETAEFARKWVPFCKKHNIEPRAPEFYFARKIDYLKDKIQPSFVKERRAMKRECEEFKVRIDALVAKAQKIPEEGWTMADGTPWPGNNPRDHPGMIQVFLGHSGGLDTDGNELPRLVYVSREKRPGFQHHKKAGAMNALIRVSAVLTNGAYLLNVDCDHYFNSSKALREAMCFMMDPALGRKTCYVQFPQRFDGIDLHDRYANRNIVFFDINMKGLDGIQGPVYVGTGCCFNRQALYGYDPVLTEADLEPNIIIKSCCGGRKKKDKSYIDSKNRDMKRTESSAPIFNMEDIEEGFEGYEDERSLLMSQKSLEKRFGQSPIFIASTFMTQGGIPPSTNPGSLLKEAIHVISCGYEDKTEWGKEIGWIYGSVTEDILTGFKMHARGWISIYCMPLRPCFKGSAPINLSDRLNQVLRWALGSVEILLSRHCPIWYGYNGRLKLLERLAYINTIVYPITSIPLVAYCVLPAICLLTNKFIIPAISNYAGAFFILLFASIFATGILELRWSGVGIEDWWRNEQFWVIGGTSAHLFAVFQGLLKVLAGIDTNFTVTSKATDDDGDFAELYVFKWTTLLIPPTTVLVINLVGIVAGVSYAINSGYQSWGPLFGKLFFAIWVILHLYPFLKGLMGKQNRTPTIVIVWSVLLASIFSLLWVKIDPFISPTQKALSRGQCGVNC

SEQ ID NO: 7357 - protein, 369 aa, Zea mays
  unsure (1)..(369): unsure at all Xaa locations
  Clone ID: ZEAMA-23APR03-C134086_1.p
SSSALSSSWRCSARASSPPWPCSSAAPPTRPRSRARRSPCRPRRRRAAGSSSRWSGGRGRRRPAWHNMTDDELLWAASWRPSVRRYPYRRTPKVAFMFLTRGPLPLAPLWERFFAGAGGGDAGLFSVYVHATPGYRPDFAPASAFYRRQVPSQVAEWGEPSMFDAERRLLANALLDPGNERFVLLSESCVPLYGFPAVYSYLTRSRESFVGAFDDPGPGGRGRYQGGLAPEVVREQFRKGXWFELDRALAVDVVADGRYYPKFREHCRPPCYADEHYLPTALSILAPARIANRSVTWVDWSRGGAHPATFGEADVGEAFLRRLTAPGKGQGNCTYNGQPAQVCFLFARKLAPGTLQPLLRLAPKLLGYG

SEQ ID NO: 7358 - protein, 225 aa, Zea mays
  Clone ID: ZEAMA-23APR03-C134439_1.p
MGSTSPSGLELTMAVPGLSSSSGSEGFGCNNNNGSGNGNNMRDLDMNQPASGGEEEEFPMGSVEEEEDERGGAGGPHRAKKLRLSKEQSRLLEESFRLNHTLTPKQKEALAVKLKLRPRQVEVWFQNRRARTKLKQTELECEYLKRCFGSLTEENRRLQREVEELRAMRVAPPTVLSPHTRQPLPASALTMCPRCERITAATAARTPRPAPAASPFHPRRPSAAF

SEQ ID NO: 7359 - protein, 686 aa, Zea mays
  Clone ID: ZEAMA-23APR03-C1344_5.p
MAAAEARGGEFPVGMKVLVVDDDPTCLVVLKRMLLECRYDVTTCPQATRALTMLRENRRGFDVIISDVHMPDMDGFRLLELVGLEMDLPVIMMSADSRTDIVMNGVKHGACDYLIKPVRMEELKNIWQHVIRKKFNENKDHEHSGSLDDTDRNRPTNNDNEYASSANDGGDGSWKSQRKKREKEDDETDLENGDPSSTSKKPRVVWSVELHQQFVNAVNHLGIDKAVPKKILELMNVPGLTRENVASHLQKFRLYLKRIAQHHAGIPHPFVAPVSSANVAPLGGLEFQALAASGQIPPQALAALQDELLGRPTSSLALPGRDQSSLRVAATKGNKHHEEREIAFGQPIYKCQNNAYGAFPQSSPAVGGLQPFAAWPNNKVGMPDSTSTLGNVGNSQNSNMLLHELQQQPDTLLLGTLHNIDAKPSGVVMSSQSLNTFPASEGISPNQNPLIIPSQPPSFVSSIPPSMKHESLLGLPSTSTSLLGGLDMVNQASTSQALISSHGTNLPGLMNRSSNAIPSPGISNFQSGNIHYVVNQNAMGVSSRPPGVLKTESTDSLSCSYGYIGGSTSVDSGLFSSQSKNPQYGLLQNQNDVNGSWSPSQDFDSFGNSLGQGHPGTTSSNFQSSALGKLPDQGRGRNHGFVGKGTCIPSRFAVDEVESPTNNLSHSIGNSGDIVNPDIFGFSGHM

SEQ ID NO: 7360 - protein, 457 aa, Zea mays
  unsure (1)..(457): unsure at all Xaa locations
  Clone ID: ZEAMA-23APR03-C13513_4.p
MDSMMTPEILSANLALVMDKFSDDDTDTELDLDSPTEGFASIADAIEDVRQGKLVIVVDDESRENEGDLIMAASLVTPEAMAFIVRHGTGIVCVSIKEDDLERLCLPLMVTTKENEEKLCTAFTVTVDAKEGTTTGVSAKDRAKTVMTLASPDSRPEDFNRPGHIFPLKYREGGVLKRAGHTEASVDLAMLAGLPPVAVLCEIVDDADGSMARLPKLRVFAERENLKIISIADLIRYRRKRDRLVERASVARLPSQWGNGHAYCYRSAIDGIEHLAMVKGDIGDGQDIMVRVHSECLTGDIFRSARCDCGDQLAMAIEMIEKAGRGVIVYLRGHEGRGIGLGHKLRAYNLQDDGRDTVEANEELGLPVDSREYGIGAQILRDLGVRSMKLMTNSPAKYSGLKGYGLSIAGXVPLVTPITSENRKYLETKRTKMGHVYGLANAQVNQPSGSQSTEEKH

SEQ ID NO: 7361 - protein, 168 aa, Zea mays
  unsure (1)..(168): unsure at all Xaa locations
  Clone ID: ZEAMA-23APR03-C13520_3.p
RPRSSPQPPWKGICTPQPLWKGRVRCPGSASQPPWKARICSFHRRHPSPFNPLTFHGQRGSAVSIDGIIGYTPIKCQACTPLQPIDAYRRTQIIYYCQVMHGAFGVRLHAGKQAEVLNQIVYELPEXHPLSETKPLREILGHTVPQVMAGCILGILMAVVMLLALGRS

SEQ ID NO: 7362 - protein, 562 aa, Zea mays
  Clone ID: ZEAMA-23APR03-C13556_3.p
MALSASPAQEELLQPAGRPLRKQLAAAARSINWSYALFWSISSTQRPRVLTWTDGFYNGEVKTRKISHSVELTADQLLMQRSEQLRELYEALRSGECDRRGARPVGSLSPEDLGDTEWYYVICMTYAFLPGQGLPGRSSASNEHVWLCNAHLAGSKDFPRALLAKSASIQTIVCIPLMGGVLELGTTDKVPEDPDLVSRATVAFWEPQCPTYSKEPSSNPSAYETGEAAYIVVLEDLDHNAMDMETVTAAAGRHGTGQELGEVESPSNASLEHITKGIDEFYSLCEEMDVQPLEDAWIMDGSNFEVPSSALPVDGSSAPADGSRATSFVVWTRSSHSCSGEAAVPVIEEPQKLLKKALAGGGAWANTNCGGGGTTVTAQENGAKNHVMSERKRREKLNEMFLVLKSLVPSIHKVDKASILAETIAYLKELQRRVQELESRRQGGSGCVSKKVCVGSNSKRKSPEFAGGAKEHPWVLPMDGTSNVTVTVSDTNVLLEVQCRWEKLLMTRVFDAIKSLHLDALSVQASAPDGFMRLKIGAQFAGSGAVVPGMISQSLRKAIGKR

SEQ ID NO: 7363 - protein, 301 aa, Zea mays
  Clone ID: ZEAMA-23APR03-C13606_3.p
MAASTTSRTNSRVNYSNEIHDLSTVQGGSAAAAAAALFYPDSKSIADIFPPHLGKKVISEVVATFLLVFVTCGAASIYGEDNARISQLGQSVAGGLIVTVMIYATGHISGAHMNPAVTLSFACFRHFPWIQVPFYWAAQFTGAMCAAFVLKAVLQPIAVIGTTTPSGPHWHALAIEIVVTFNMMFVTCAVATDSRAVGELAGLAVGSAVCITSIFAGPVSGGSMNPARTLAPAVASNVFTGLWIYFLGPVVGTLSGAWVYTYIRFEEAPAAAKPDTQRLSSFKLRRMQSQSALAADEFDTV

SEQ ID NO: 7364 - protein, 139 aa, Zea mays
  Clone ID: ZEAMA-23APR03-C13616_2.p
NGNCAVTTTAGVEDVIADSKAHKVLVKGKKAAADPMKVVERVQKKTGRKVELLSPMPPPPEVEEKKEDEAEKKKDDEKKAEPEPPKPEEKKEPPVIAVVLKVHMHCEGCLIVVIGVVFVSLHLSSSNAAKPRASSSEYR

SEQ ID NO: 7365 - protein, 375 aa, Zea mays
  unsure (1)..(375): unsure at all Xaa locations
  Clone ID: ZEAMA-23APR03-C136634_1.p
MNRATTTERADEEMLFRFSTSSSSTSTSGRTAWLGQRWVGKVAAAAVVALLLLSTALPGGARREPDVNNNGRSFVFNYTLTKAVVEYAAAVYMTDLTALYTWTCSRCNDLTRGFEMTCIIVDVQNCLQAFVGVDHNLNAIIVSIRGTQENSIQNWIKDLIWKQVKLNYPNMPNAKXLRPAITNAVRKARKLHGHSDVIVTGHSMGGALASFCALDLAMSFGSNNVHLMTFGQPRVGNAAFASYFAQYVPYTVRMTHERDIVPHLPPYFFFLPKLTYKHFPREVWEHEVDGNTTYQVCDGSGEDPNCCRSVFALFWSASDHLTYMGVEIAADDWSTCRIVLGRGVEQLKGSLPNNIVTSGRSVDVVIADDDTLQID

SEQ ID NO: 7366 - protein, 529 aa, Zea mays
  Clone ID: ZEAMA-23APR03-C13679_12.p
MFSPPFSPSPSPPSLEAFAPQLLRPVRPPTRLIPPAAMDPYKHRPSSGSNSSFWTTNSGAPVWNNNSALTVGQRGPILLEDYHLIEKLAQFDRERIPERVVHARGASAKGFFEVTHDVSHLTCADFLRAPGVQTPVIVRFSTVVHERGSPETLRDPRGFAVKFYTREGNFDLVGNNMPVFFIRDGMKFPDMVHAFKPNPKTNLQENWRIVDFFSHHPESLHMFTFLFDDVGIPLNYRHMEGFGVNTYSLINRDGKPHLVKFHWKPTCGVKCLLDNEAVTVGGTCHSHATKDLYDSIAAGNYPEWKLYIQTIDLDHEDKFDFDPLDVTKTWPEDIIPLQPVGRMVLNKNVDNFFAENEQIAFCPAISVPGIHYSDDKLLQTRIFSYADTQRHRLGPNYLMLPVNAPKCAHHNNHHDGFMNFMHRDEEVNYFPSRFDPARHAEKVPIPPRVLTGCREKCIIQKENNFKQAGERYRSFDPARQDRFIQRWVDALTDPRVTHEHRTIWISYWSQCDAALGQKLPSRLNLKPSM

SEQ ID NO: 7367 - protein, 624 aa, Zea mays
  unsure (1)..(624): unsure at all Xaa locations
  Clone ID: ZEAMA-23APR03-C136994_1.p
MEHSSAEDSDISDSDIAEHKEEICAQLRAGKLNVKRGEAFRCPFCPGKKRQDYNLKDLLQHATGIGAASKRSAKVKASHLGLAMFLEKDIASTLEQPLQIVPYKPKTPKDEEIFVWPWMGIVVNLQCEFKGKECSRESEERLTAQFSRFRPLQATTLRDGKNQQFCAIVKFAKDWSGFKDAMAFENHFVLEQYSKPDWKKKKLQXDDLYGWLAKTDDYNSPEPIGEYLRKNGNLRSVGDLEREGLKETGERVAHYARQIDATNLLRLRQVSRSLPPYAYARCPALVRPVRRRGAPPGILNMQKDARRNSWKIINDNIRLHKELETKKKEIGRRHEELEKLVMNSTNREKLEAAKEEIAKENRLLYLATLKKKEEDEKFLKLVKEQEQEKENVRKMVYDLEMQLASKQKLELERELLRGNLEVWKYMGEEDAKSKEMLDKLHEALKEKDEEMEHIDSMNQTLIIKQRRTNDELEEAKKELTTDLVNMSSARSIVGVKKMGELDNKAFLASCKEKTADELSLSILCSKWEDEIRQPEWHPFKVIDVGGQAKEIIREDDEKLQALKAELGVQAHDVVVKALLEMNEYNPSGRYPIPELWNFKEDRRAPMGEAVAYIVKQWKVSKRKH

SEQ ID NO: 7368 - protein, 334 aa, Zea mays
  unsure (1)..(334): unsure at all Xaa locations
  Clone ID: ZEAMA-23APR03-C136_15.p
MVVVAEPVPRRLCWWLRPWRRCWAPGLAATKFDDVVQPSWANDHVVYDGDLLKLRLDSNSGGGFVSRTKFLYGKASADLKLVPGDSAGVVTAFYXLSSAGDKHNEFDFEFLGNVTGEPYLVQTNLYIDGVGNREQRIDLWFDPTADFHTYAVLWNPSQVVFMVDDTPIRVYENATLHQGHGHGHGHHRHGGAAAEANGTNTTTTTLAAAPAPFPGPQPMAVYSSIWNADDWATQGGRVKTDWSHAPFEATFREVRVDGCAWAANATDGDAAEARRCSESSWGKEGRYWWKEKEMSELSVHQSHQLVWARAHHLVYDYCVDTDRFPVQPPECAGR

SEQ ID NO: 7369 - protein, 368 aa, Zea mays
  unsure (1)..(368): unsure at all Xaa locations
  Clone ID: ZEAMA-23APR03-C13715_3.p
MGVYLSTPKTDKVSEDGENDKLKFGLSSMQGWRATMEDAHSALLDLDNDTAFFGVFDGHGGKVVAKFCAKYLHREVLHTEAYAAGDLGAAVHRAYLRMDEMMRGQRGWRELQALGDKINQFTGIIEGLIWSPKASDSNDRHDDWAFEEGPHSDFTGPNCGSTACVALVRNRQLVVANAGDSRCVISRNGQAYNLSRDHKPELEAERERIQSAGGYIKMGHVNGSLNLSRAIGDMELKQNKFLSPDKQILTANPDINIVELCDDDEFIVLACDGIWDCMSSQQLVDFIREHINTCXEESLSAVCEGVLDRCLAPSTMGGEGCDNMTMILVQFKKPFAQVKDASDAEQLTGDAGCSETHGAEENDSDKQI

SEQ ID NO: 7370 - protein, 518 aa, Zea mays
  unsure (1)..(518): unsure at all Xaa locations
  Clone ID: ZEAMA-23APR03-C13731_2.p
MAAANGDACRSVGGVPRPTNPMVTPLLTDLYQFTMAYAYWKAGKHLDRAVFDLYFRKNPFGGEFTIFGGLEECIRFIANFKFTEEEIKFLRSVMPACEDDFFEYLRSIYCSDVEVYAIPEGYAVFPKVPLMRIEGPVAVVQLLETPFLSLVNYASLVTTNAARHRLVAGKSKNLLEFGLRRAQGPDGGISASRYCYMGGFDATSNVAAGRLFGIPIRGTHSHAFVSSFMGLDEITDKTLTSSDGSNTCEDFISLVQNWLIRIQDSSSLHGTFGETSQSELAAFTSYALAFPNSFLALVDTYDXYKAVGIRLDSGDLAYLSVEARKFFHAVEKEFVVVGFGKTSITASNDLNEETIDALNKQVTYIVSIQNXDVVACRFLLQNRXEIMYIVISNILKFVLMICVIQCLDIMTGEDEPGXKIGERLXCRHPFNESKRAYVVPQHVEELLKCYWPGNSSNSREELPSIHEIRTRCIHHLDRMRPDHMRRLNPTPYKVSVSAKLYDFIHFLWLNEAPVGELQ

SEQ ID NO: 7371 - protein, 445 aa, Zea mays
  unsure (1)..(445): unsure at all Xaa locations
  Clone ID: ZEAMA-23APR03-C13739_1.p
MLSQQNPGGESAGTPPLYLGIDFGTSGARYALIDEHGAIHSEGKRAYCAPVGDAAGWASSWRAALFQLLADVPPAHRPSVSSISIDGTSATALIVDSETGEXLGGPFLYNEGFPDALPAVESVAPANHTVCSPTSTLCKLVSWWAASGGAAAGAAVLMHQSDWLLWLLHGRPGGVSDYNSALKVGYDPELGAYPGWLTSQPYSRMLPAAVRPPGAPVAALRDDVRSQYGFSEDCVVCAGTTDSIAAFLAARRSEPGTAXCDQVTSLGSTLAIKLVSRVHVADARFGVYSHRLDDVWLVGGASNTGGAVLRQLFTDDQLAALSEHIDPAVPSPLDYYPLPKKGERFPVSDPDMMPRLQPRPGSDAEYLHGILESIARIEAKGYSLLKELGATAVEEVFTAGGGAQNDRWTAIRERVLGVPVRKAQQTEAAYGAALLALKGAKSLAG

SEQ ID NO: 7372 - protein, 335 aa, Zea mays
  Clone ID: ZEAMA-23APR03-C13742_2.p
VGIWATAAASSLFRNGEASYSNSTHEGIKTIPVQRACEFTTNSVLCVCIVTWNMNSKMSAEDVAKLVSSDRKFDLLVVGLQEAPKPDVSRVLQEALAGTHVLLGQKSMQSLRMLLFGSRSSEKYIREMKVDKHAVGGCGGIIGRKKGAVAMYINFSGIRMVFVSCHLAAHEHKVEKRNAEFQHISQSLFARYGAPTPYAQSADITVWLGDLNYRLQGISSTPARKMIEENRQSKLRGRDQLLQEAEKGQVFSGYCEGTLSFKPTYKYDVGSSVYDTSYKVRVPSWTDRILFKVGQSSGLDAVLSSYESLDCVRSSDHKPVKAHLCLKVRSDGDAD

SEQ ID NO: 7373 - protein, 478 aa, Zea mays
  unsure (1)..(478): unsure at all Xaa locations
  Clone ID: ZEAMA-23APR03-C137878_1.p
MAEPSPHPTVVLHACLGVGHLIPMVELAKLLLRRDLAVIIAVPTPPSSTADFFASSASAVATLEAANPAVSFHHLPPPDYPVPDPDPFLRMLDALRLTVPSLTAFLRSLPSVXGLVLDLFCGDALDAAASAGIPAYFYYTSCAGDLAAFLHLPHYFATTEGGPSFKDMGKALLHFPGVPPIPASDMPHTVLDRAARTCASRIVHYGRVXEARGLLINTYEWLEARAVRALRDGVCVPGRPTPPVYPIGPIIVRGQEAAEKGERHACLSWLDAQPERSVVFLCFGSLGAVSAAQVKEIARGLESSGHRFLWVVRSPPEDPTKFFLARPEPDLDSLLPEGFLERTSDRGMVVKMWAPQVEVLRHAATGAFMTHCGWNSVLEAASAGVPMLCWPMYAEQRVNKVFVVDEIKAGVVMDGYDEELVSAAEVEKKVRLVMESEEGEKLRERLALAKEKAAEALADGGPSRMAFEEFLKDIMLAK

SEQ ID NO: 7374 - protein, 351 aa, Zea mays
  Clone ID: ZEAMA-23APR03-C138232_1.p
MAVESWTVPTPVKDLAALVDEPPSRFVQREEHRPGSLMLAADMPDPLPIVDLNKLSTADEAAKLRSALQTWGLFLATNHGIDASLMEDLMEASREFFHQPLQERQKYSNLREGTRFQLEGYGSDPVVAQDHILDWNDRLQLKVEPEDERSLAQWPKYPESFRDLLHEYASKTKSMRDRILRAMAKILELDEEEFIKQLGASPQAYARFNYYPPCPRPELVLGIKAHSDGPVLTVLLVDREVGGLQVQRENTWFNVPFVPHTLVINLGDSLEIMSNGIFKSPVHRVVTNAEKERISLAMLYAVERDNVLQPAAGLLDEKRPARYRRITEADFLEGVKEHFSKGIRMIETLKI

SEQ ID NO: 7375 - protein, 225 aa, Zea mays
  Clone ID: ZEAMA-23APR03-C1382_3.p
MARERREIRRIESAAARQVTFSKRRRGLFKKAEELAVLCDADVALVVFSATGRLSQFASSSVNDIVDKYSTHSKNLGKSHQQPSIDLNVEQSKYSGLNEQLAEETNGLRQMRGEDLEGLSVEELHRMERKLEAGLHRVISTKDQLFMQQIGELLQKGTQLEDENRRLKEQMPQVLTGGTMVVAAAAENILTEDGQSSESVMTALHSGSSLDCDDGSDISLKLSLP

SEQ ID NO: 7376 - protein, 333 aa, Zea mays
  unsure (1)..(333): unsure at all Xaa locations
  Clone ID: ZEAMA-23APR03-C1388_3.p
MELALSLGETMADAGRDLMLGLGMGVGVRREEEAQRGRRDREVRRELEFTARSARSSPEPAVRLTLLHGLGLPWPPPPSSETNRHLEASARGFDVNRAPSLSAAGGAAEEDEEQDEAAAAAASSSPNNSASSFPTDFSAHGPGGARRXRACSRASDEDDGGSARKKLRLSKEQSAFLEDSFKEHATLNPKQKLALAKQLNLRPRQVEVWFQNRRARTKLKQTEVDCEYLKRCCETLTEENRRLQKELSELRALKTVHPFYMHLPATTLSMCPSCERVASNSAPAPASSPSPATGIAAPAPEQRPSSFAALFSSPLNRPLAAQAQPQPQAPANS

SEQ ID NO: 7377 - protein, 184 aa, Zea mays
  Clone ID: ZEAMA-23APR03-C13898_3.p
SSPTLPADHRQPVPAFQSTISLPLLSHPPKSKLRPDRPTARAHTHTRAWRSATRRRSPRSCFSASRSSSSSSQPSPTSSPSASAPAAAVPQPRPALLDAALQLAPPAAAAGQPVEASARTSANRCSSCRKRVGLTGFRCRCGDLFCGAHRYSDRHGCRYDYRGAARDAIARENPVVRAAKIVRF

SEQ ID NO: 7378 - protein, 284 aa, Zea mays
  Clone ID: ZEAMA-23APR03-C13909_3.p
MAAAASTMSLLPISQPRKQQQQGAGAVVVFQRRPWDARRRRYVVPTARLFGPAIFEASKLKVLFLGVDEGEGSSKHLHAHHPAPAPALLPRTYTLTHSDVTASLTLAVSHTINRAQLQGWYNRLQRDEVVAEWKKVRGRMSLHVHCHISGGHLLLDLIAGLRYYIFRKELPVVLEAFVHGDGDLFSRHPELEEATVWVYFHSNLARFNRVECWGPLRDAAAPAPAEDDSTAPAAASIAMEGQMPVGEWPHRCPQQCDCCFPPHSLIPWPNEQDMATAAGQVRQQ

SEQ ID NO: 7379 - protein, 460 aa, Zea mays
  unsure (1)..(460): unsure at all Xaa locations
  Clone ID: ZEAMA-23APR03-C13911_2.p
MDEAEEMQVERLHEEADAGGADTDKLSYEIFSILESKFLFGYTDPHQLWLPKPAAELPAQASAAAPGKAAQRGKVCVLCVDGGGGGLRALLPGRALAHLEAALRRASGDPDARVADYFDLAAGTGAGGVFAAMLFSTHSRGXPLFHAXDTWRLVADHAPRMFRRPAASSSTSLFCRGKKRPLAAPTAALEAAMKPAFGQELTLRDTIKPVLISCYDLKTSAPLVFSRADALENGSYDFRLCEVGRAAWSEAGRFEPAEVASVDGATSCAAVDGGPTMGSPAAAAITHVLHNKHEFPFVRGVEDLLVLSIGGCSGGGSGAAGEAELRRMRRWGPKEWARPIARIAADGAADLVDHAVARAFGQCRASNYLRIQAKRESMPPCGTDGEYDPTPGNVRALLAAADEMLKQRNVESVLFEGRRVGEQTNAEKLDWFAAELVAEHRSRASRIAPTVAFKQAPQKP

SEQ ID NO: 7380 - protein, 213 aa, Zea mays
  unsure (1)..(213): unsure at all Xaa locations
  Clone ID: ZEAMA-23APR03-C1394_4.p
METFPLVKNILLLDSEGKRVAVKYYSDGWPTLSAKLAFEKSVFAKTQKANAGTDAEIVMFDGQIVVYKFIQDLHFFVTGGEEENELILASVLQGFSDAVERLLKLSFLYXSLSFQTLFVLLHVIVLMLIVYECVSNLGGFRNMVDKRTALENLDLILLCLDEIVDGGIVLETEGREIAEKVSGHGSEGASSAEQTLVNALTQAREHLAKSLLM

SEQ ID NO: 7381 - protein, 437 aa, Zea mays
  Clone ID: ZEAMA-23APR03-C13992_1.p
MAGASATNGGGNGGGGKVVSMPLQYFCVLAAVVVAVMVLSLSFMSPAAMVAVRQNLSSVAAAPGGSSNSTAGGAGAGGAAGLAEASPPAGWKEKEQEQARRPPVVLFNFGDSNSDTGGVAAAGGIRIMPPEGRTYFHHPTGRLSDGRVIIDFICESLGTRELNPYLRGIGSDYSNGVNFAMAGSTVTHGVSPYSLNVQVDQFVYFRHRSLEMFERGLEGPVSKEGFESALYMMDIGHNDMVGVAHTPSDQWDKKITEIVGEVRQAISILYDNGARKFWIHGTGALGCLPALVVQETKGEQDKHGCLAGVNRAAKAFNRKLSQLCDDLRFHLKGATVVYTDMFAIKYDFVANHTKYGIEWPFMVCCGNGGPPYNMKQGRPGCGDLCPPEAKVVSWDGVHFTDFGSGLAAKLAMSGEYSKPRVKLASLIHGGSKKTSDS

SEQ ID NO: 7382 - protein, 663 aa, Zea mays
  unsure (1)..(663): unsure at all Xaa locations
  Clone ID: ZEAMA-23APR03-C1399_46.p
RTSAPRRRDGHNSPPGIWPVTVSHPPYAFGTATCLAGTPHRGVDHPRRRSPKLRTAPRPPSPMEPHLPAHLTRLLKTQPLHALLSDASTYRAARHLFDAVPRPTAALCXXFVSVLSKLSLHQELIEAVSSLHRRGGAIPSGCIPLVLKSCALSAASCQGTQTHCHALVRGMLGDVFVQTALVDFYAKNGNMDSAVMAFEEMPIKDPIPMNCLIIGYSRSGDVEEARRLFDSMPRKTSASWNSMIACYAHGGEFQEALTLFDQMLREGASPNAITITTVFSICAKTGDLETGRRAKAWVSEEDLQNVIVHTALMEMYVKCRAIDEARREFDRMPRRDVVAWSTMIAGYSHNGRPHESLELFERMKATNCKPNEVTLVGVLSACAQLGSDELGEQIGSYIESQTLPLTSYLGSALIDMYTKCGHVARARDVFHRMEQKVVIAWNSMIRGLALNGFAEDAIALYGEMVGDGVQPNEITFLALLTACTHAGLVDKGMAFFQEMKKNKQHASPQVEHCACIVDLLCKSGRLWEAYKFICDMEVEPNAVIWTTLLSACRAHADVELAKLAAGKLVVLEPNSSSIYVLLSNIYADAGLWGDVREIRDLMRSKNLQKLSAYSWIELDGEVHRFLVQDTYHPRSAEIYNVVDGLGLQLERTSPDHELISEVC

SEQ ID NO: 7383 - protein, 360 aa, Zea mays
  Clone ID: ZEAMA-23APR03-C14001_4.p
CAVAAPCACCRQSLGLVKPMEEMLMAASAGAANPSQGSNPNPPPPAAPLTGAGSTERRARPQKEKALNCPRCNSTNTKFCYYNNYSLQQPRYFCKTCRRYWTEGGSLRSVPVGGGSRKNKRSSSSSSSSAAAASASTSSSATSSSMASTLGAASKSPELAHDLNLAFPHHGGQHAAEFPAFPSLQSSNDMCDPGGGMTSNGRGGGAGPAVGALSATELWRSSGCYMPLQMPGDYTAAGFALGEFRTPLLPDAHGPGSSGAAAAAGYGCSAGLPQGVPDNAGRLLFPFEDLKPPVSPGGGGVAGGGASATGGAGDGNSSHDQFDHNKEQGGGGSPGAGAGHDTAGFWSRVYNFGRKFPKFS

SEQ ID NO: 7384 - protein, 462 aa, Zea mays
  unsure (1)..(462): unsure at all Xaa locations
  Clone ID: ZEAMA-23APR03-C1403_24.p
RAELSCLQLRPTPTARQSAAASVERSALLSAASYLPAQSHSHAPTSESRSQPVLLGSDRRGVRRWSQIRRRRGSHCWALLLLAAPARPASAAPVEDGLLSNGDFETAPAGGFVRSASVAEGASSIPGWTINGTVELISAGQHQGGMILIVPQGDHAVRLGNDASVGQVVDVEKGSDYAVTFSAARTCAQLEALXNVSVLGGVSQTVDLQTLYNIEGWXAYALAFQATEEQAHLQFMNPGMEDDPTCGPILDNVAVKKLFTPDKPKDNVVLNGDFEEGPWMFPNTSFGVLLPTNLDEQTSAIPGWMIESNRAVRYIDSDQYKVPQGKRAIELLSGKEGIISQMVETTPEKVYSLTAMLGAAGDSCQPPMAIMAFAGDQAQNFHYSPLGNATSQAVNVTFTARAERTRVAFYSVYYNTRSDDHSSLCGPVIDDVRVWGLNTAAGLKASAGLVLGIVGVVGMVLF

SEQ ID NO: 7385 - protein, 397 aa, Zea mays
  unsure (1)..(397): unsure at all Xaa locations
  Clone ID: ZEAMA-23APR03-C1403_30.p
MEADSARKRLALLALLLLAAPVRPASAAPVEDGLLSNGDFETAPSGGFVKSASVAEGASSIPGWTINGTVELISAGQHXGGMILIVPQGDHAVRLGNDASVGQVVDVEKGSEYAITFSAARTCAQLEALNVSVLGGVSQTVDLQTLYNIEGWDAYALAFQATEEQAHLQFMNPGMEDDPTCGPILDNVAVKKLFTPDKPKDNVVLNGDFEEGPWMFPNTSFGVLLPTNLDEQTSAIPGWMIESNRAVRYIDSDEYKVPQGKRAIELLSGKEGIISQMVETTPQKVYSLTFTLGTAGDSCQPPMAVMAFAGDQAQNFHYSPMSNATSQAANVTFTARAERTRVAFYSVYYNTRSDDHSSLCGPVIDDVRVWALNAAAGLKASIGLVLGVVGVVGMVLF

SEQ ID NO: 7386 - protein, 228 aa, Zea mays
  Clone ID: ZEAMA-23APR03-C1403_37.p
MENCNNGQAAAVSMDDFKVVVPVHPLISHWVSVLRDRSTPSHAFRSAMGELGRLLIYEATRDWLPTVTRQIQSPVGTEVVESVSEMEPIMIVPILRAGLALADLATSILPSTRTFHLGMARDETTLMASVYLNKLPDRFPKGCKILIVDPMLATGGTVTAAVDLVMERGAEISQIKIISAVAAPPALKKLNQRFPRICVYTGAMDQIVNEKGFIIPGLGDAGDRSYGT

SEQ ID NO: 7387 - protein, 349 aa, Zea mays
  Clone ID: ZEAMA-23APR03-C140567_1.p
MDGTSFDLTEHEGSNLSPFLLKLFNEWDDRKTRGLFHHDISSCETKVLPGVHNFVATLIEGRDQKKRPTEFTMNQVLQPFVSEKFNFTKVSPLEVIFRFNDTEKDPAQYFDGVPDTVSASSSAILINVSPIGYCHVLLTPKIQDCLPQRIDQESFLIAMYVAREARTPFFRVGYNSLGGFATINHLHFQAYYLKVQYPVEKAITEKLKTLGNSVSIFHLVDYPVNGFVFEGGASLEDLSDVVSKVCIFLQENNRPFNVLISESGKRIFLLPQCYAEKQLLGKASQEFLDMRINPAIWELSGHLVLKRRKDYEEASEANIRRFLVEAALSETEFQELNRCVLDFLTSSLG

SEQ ID NO: 7388 - protein, 448 aa, Zea mays
  Clone ID: ZEAMA-23APR03-C14073_1.p
MVMKEAAEEHDGRRDVTVTVEPALPVQQHRLPLSNLDLLLPPLDVSLFFCYLHPAPTAIALKEALAKTLVAYYPLAGEVVANGDGEPELLCSGRGVDFTETAAAGVELREVRLGAVDEGVEKLVPVKKTGVTMAVKLSKFTCGGAVVGCTFDHRVCDAYSFNMFLVAWAAAARGSSAPPPPDPCFRRSLVAPRDTPHRRAPSTDALINRLFSPRSAAPPPPPAAAGSVNRIYRIAAEDIAALKASAGPGRTKMEAFTALLWQLCARAASPRQSQCCMGVVVDGRTRMFPDGAMKAYFGNVLTIPYGVIGSEDLRCMALADVADDVHRWVAEAATGDHFRGLVDWVEALRPKPAAARAYLGGTGGNEAMACIVSSGMSFPVGKADFGTGLPAFASYHFPWPAGAGYVMPMPSARGNGDWVVYVHVAPEVAKVMEESTVFQALVNSYAFE

SEQ ID NO: 7389 - protein, 556 aa, Zea mays
  Clone ID: ZEAMA-23APR03-C14075_2.p
MALAGTSKVVLGCIAFGIFWVMAVFPTVPFMPVGRTAGSLLGAMLMVLFRVISPEDAYAAIDLPIIGLLFGTMVVSIFLERADMFKYLGNLLSWKSRGSKDLLFRVCIVSAFASALFTNDTCCVVLTEFILKVARQNNLPPQPFLLALATSSNIGSAATPIGNPQNLVIAVESGISFGQFLLGVFPAMIVGVLTNAAILLLYFWKYLSVEKDQEGGQPTGPEVVADDEVTSHRFTPARMSHVSSLNPDDMDCVSEPIIRSNSVSTTGNENLRSRSINSEADIQLAIKSLRASSMSHEMVEVSTVPDRRDEGASSRKFTRTASQQRSVIIEDLAPSPEINGEKEKETEVAEKRWKVLVWKTAVYLITLGMLIALLMGLNMSWTAITAALVLLALDFTDAQACLEKVSYSLLIFFCGMFITVDGFNKTGIPNTLWELVEPYSRIDSAKGVALLAVVILILSNVASNVPTVLLLGTRVAASAASISHGSERKAWLILAWVSTVAGNLTLLGSAANLIVCEQARRAQFFGYNLTFWSHLRFGVPSTIIVTAIGLLIVISY

SEQ ID NO: 7390 - protein, 556 aa, Zea mays
  Clone ID: ZEAMA-23APR03-C14075_3.p
MALAGTSKVVLGCIAFGIFWVMAVFPTVPFMPFGRTAGSLLGAMLMVLFRVISPEDAYAAIDLPIIGLLFGTMVVSIFLERADMFKYLGNLLSWKSRGSKDLLFRVCIVSAFASALFTNDTCCVVLTEFILKVARQNNLPPQPFLLALATSSNIGSAATPIGNPQNLVIAVESGISFGQFLLGVFPAMIVGVLTNAAILLLYFWKYLSVEKDQEGGQPTGPEVVADDEVTSHRFTPARMSHVSSLNPDDMDCVSEPIIRSNSVSTTGNENLRSRSINSEADIQLAIKSLRASSMSHEMVEVSTVPDRRDEGASSRKFTRTASQQRSVIIEDLAPSPEINGEKEKETEVAEKRWKVLVWKTAVYLITLGMLIALLMGLNMSWTAITAALVLLALDFTDAQACLEKVSYSLLIFFCGMFITVDGFNKTGIPNTLWELVEPYSRIDSAKGVALLAVVILILSNVASNVPTVLLLGTRVAASAASISHGSERKAWLILAWVSTVAGNLTLLGSAANLIVCEQARRAQFFGYNLTFWSHLRFGVPSTIIVTAIGLLIVISY

SEQ ID NO: 7391 - protein, 675 aa, Zea mays
  Clone ID: ZEAMA-23APR03-C14079_1.p
MLPPRAAAVPLLLLALAAGAAGGADDLASDAAALQAFLAPFGSATVSWNSSQPTCSWTGVVCTGGRVTEIHLPGEGLRGALPVGALGGLNKLAVLSLRYNALSGPLPRDLATCVELRVINLQSNLLSGELPAEVLALPALTQLNLAQNRLSGRISPAIAKNGRLQLLFLNGNRLTGELPNVSMPSLTTLNVSFNNLSGEIPKSFGGMPATSFLGMPLCGKPLPPCRAPGSEASPSQSPTLRPEAPAPTDNRGRGRHHLAGGAIAGIVVGCAFGFLLIAAVLVLVCGALRREPRPTYRSRDAVAAELALHSKEAMSPNGYTPRVSDARPPPPPSVPPPPAVSAAAAGRKKLFFFGRIPRPYDLEDLLRASAEVLGKGTHGTTYKAAIESGPVMAVKRLKETSLPEREFRDKVAAIGGIDHPNVVPLQAYYFSKDEKLMVYEFVAMGSLSSMLHGNRGSGRSPLSWESRRRIALASARGLEYIHATGSMVTHGNIKSSNILLSRTVDARVADHGLAHLVNPAGAATTTRVAGYRAPEVVADPRRASQKADAYSFGVLLLELLTGKAPAHAVLHDEGVDLPRWARSVVKEEWTSEVFDTELLRHPGAEDEMVEMLRLAMDCTEPAPDQRPAMPEIVARIEGLGGTASASTATARSGRSASVDEADDRPLRTTGSIRQS

SEQ ID NO: 7392 - protein, 580 aa, Zea mays
  Clone ID: ZEAMA-23APR03-C140979_1.p
MRDGSNTTKKSKLSWSKSLVRKWFNIRSKAHDFHADDVAAIGRTVAGGGDDEWRRGSSFTRREPSTVKKSKTERSSRRSNGHSRRGKIDLDAAEATVTLDYRIFVATWNVGGRSPPNNMSLEDWLHAAPPADIYVLGFQEIVPLNAGNVLGTEDNVPAKRWVSLVRRTLNNLPGTSGNGSFRTPSPAPNPVVEIDDDFEGLSSKQNSASFFHRRSFQAGLSRSLRMEGDILAPQPRLERRYSVCDRAIYGRRPSDYENNYRWGGSSDDENNTGESPSTVYSPVSYGYGNASSLEDGQRRPGQTRYCLVASKQMVGLFLMIWARKDIRDDIRNLKVSCVGRGLMGYLGNKGSISISMLLHQTSFCFVCSHLTSGQKEGDELRRNSDVLEILRKTRFPMVYGQYERSPETILGHDRIIWLGDLNYRIALSYRSVKALVEMRNWKALLEKDQLRIEQRGGRVFVGWTEGNIYFPPTYKYSNNSDKYAGDDMNQKEKRRTPAWCDRILWYGAGLGQLSYVRGESRFSDHRPVYSVFSAEVESINHSRIQKMSCSSSQLDIQELLPYSYGYTDINPYGYTDLNFY

SEQ ID NO: 7393 - protein, 394 aa, Zea mays
  Clone ID: ZEAMA-23APR03-C14128_2.p
MKAVGYSPYDSSGTDDDLPPAQNRGLRGRSFSGNVVASAGAFPYMRANNDLESEIHRVEQDAYTGILRAFKVQSDAISWEKESLITELRKELRVSDEEHRELLNKVNEDGTIRRMRELRQAGGSPSGLHHGNMVLYGAEPGSTTKRQRASHSIPLQSAGLQSPMMPSHSVSSAKWGPLQARGTKARTPIPLALPSVDPSSLINHKVYTRWPEDNNFYEATITRYNPVTGEHGLVYDMGTQAESWESVRLCDMAPEDIRWGFDGHLSNRDVWSPSGPMLMRHMTNNGAMAGSIKGRGRLSINETIKDYAPPENGTNRNFDHVDIPNTGSVVMEVKRVLFNPNMPEIEKARKLLKDQEQSLLDAIARLDEASDSDNEDMAMEGRMGSAGERNGITT

SEQ ID NO: 7394 - protein, 211 aa, Zea mays
  Clone ID: ZEAMA-23APR03-C141498_1.p
MGCATSKQFSRSAPAHADPAVLATQTSFTVNEVEALYELYKKLSCSIVKDGLIHKEEFQLALFRNSRRANLFADRVFDLFDLKRNGVIDFEEFVRSLSVFHPKADTSEKTAFAFKLYDLRGTGYIEKEELREMVLALLDESDLCLSDSTVETIVDNTFSQADSNGDGRIDPEEWEEFVKKNPATLRNMTLPYLQDITMSFPSFIMRSEASD

SEQ ID NO: 7395 - protein, 555 aa, Zea mays
  unsure (1)..(555): unsure at all Xaa locations
  Clone ID: ZEAMA-23APR03-C141562_1.p
IRMRNSNFGFPRVLPTSSASAEPSRAPXRRRIGEATDPPPEMREEALERLRGVVRDSAGKHLYTSAIFLADKVAAATGDPGDVYMLAQALFLGRQFRRALHLLNNSRLLRDLRFRFLAAKCLEELKEWHQCLLMLGDAKVDEHGNVLDHDVGSDIYFDKDAEDHEINIKSALCFLRGKAYEALDNRDLARQWYKAAVKADPLCYEAIECLVDNYMLTCEEEVELLSSLQFGEEDGWLSAFYSCLVTKHEKEYLVEAKFKELEQEACSISSSSSGETMKNNIDVLVCKAEYYHQSGEYQKCFKLTSSLLERDPFHLKCTLVHLATAMELGHCNDLYLLACNLVKDYPQKALSWFAVGCYYYCIKKYDQARRYFGKATGLDGAFPPAWIGTGIAYAAQEEGDQAMAAFRTAARLFPGCHLPTLYMGMQYVRMHNFKLAEQFFTQAKSICPSDPLIHNELGVVAYNMKEEYQKAVSYYAKALTFPTKSLSAFAGLAYTYHLMDDFEAAINYYHKALWLKPDDQFCTDMLTYALESICQITARRKPGRGLLTATGGVTC

SEQ ID NO: 7396 - protein, 303 aa, Zea mays
  Clone ID: ZEAMA-23APR03-C14167_2.p
MAFASSLLPVPPYRVCATPASEVAAFSPAKKSVSLAAARQRRGSRHGVRAEVNESGSVLAVDALSQVKHVLLPVLDRNPYLSEGTRQAAATTASLAKKYGADITVVVIDDKPKESVPEHDTQMSSIRWHLSEGGFSEFRLMERLGEGQKPTAIIGEVADEWDLDLVVLSMEAIHSKHVDGNLLAEFFDWVQIGRLHCLLPWWEDATVDFMIRGGYNVINQIKQVKHKCLILWGEDDGIISSKLAYRLHQELPDAILRQVRQCGHIPHVEKPREAAKHVLEFLARNTSNKSDQSPSEPSVVVNR

SEQ ID NO: 7397 - protein, 464 aa, Zea mays
  unsure (1)..(464): unsure at all Xaa locations
  Clone ID: ZEAMA-23APR03-C141772_1.p
MGAAAAEVVAPRPPSAKRKSTTLKFLFELEKPDGGLLPGTAKLPPPSPEPEADSLIDKIASCNRAFTFVDAAEREEERDAKRDRLVEVLGAVRSSGGKRQPLDHRVMVALVEMVGANLFRAMPPPAYPALPPDGADEEAPAVALAPSWPHLQVVYDILLSVVAASDARTLRNHVDRAFLSALLALFASEDPRERDRLKTVYHQLYSKLTCERAFMRRSMAAAFLRLAYEAPAAERHCGAAELLEICGSIVNGFAVXPLKEEHRMFLARVLLPLHRTRWAHTYHRQLAYCVLQFVRKEPGLADAVVTDILRHWPVTNCQKEVLLIEELEEIVELLEPVQFQRLAVPICSRIARCVSSYSSQVAERALYVWNNERFLELATASPDVAERILPAFVASVESNLERHWSKCVQQVTASVKSLLEQVAPDLYARCAADLATRRSEAEAAAAVRDARWRRLEAAAAAAAK

SEQ ID NO: 7398 - protein, 322 aa, Zea mays
  Clone ID: ZEAMA-23APR03-C14187_2.p
MSSSSDLEQQVATALRRVTPVAAAPAVDRGGAPDLAAAIQRRMASQRARGADAFYAKFASARSLADQTFSRRRVQLKGLKDQLRDLQSQLRESLTLQSCKEWKYRIATEPMSEATATNERLRSWVADFRDKRNKGAAIVFEQLQAVESLEANSNEDAEMAEKVPKAVLWYNKFLGFRVIGGERGVKFVFDKIDPQRPEKEYSFRVSPRSQFIDSDPHVKDIDELAKDLDLNEHLFEFVRMAREKFQSPFMNETLPVSPDASAAPLPSPMVVSVNSRSGEAHSQTQSLSKNSARLLPAKRGATALPGASPGVLRRSPRLEGMR

SEQ ID NO: 7399 - protein, 211 aa, Zea mays
  Clone ID: ZEAMA-23APR03-C14200_1.p
MDSWYAWLSRTGLAPSLAHEYGRLFSRNELEPRDAPHFDHDLLKSMGIAVAKHRLEILKLARKQDAGASSSAASRLGRRATRCLSRCARRLAGGGAWRAASSSVTVVPRICGGEDAVRVGAVQRKGTGSGTTKKMVLMITDGGVAGGGYGYGLRGRGGARLSSASSQKASLMFHDWYQDEEEEMADDEDEHGGAGDGDIKWDSMFQDLKPT

SEQ ID NO: 7400 - protein, 207 aa, Zea mays
  Clone ID: ZEAMA-23APR03-C14293_3.p
MARRRGFSAVVPPAWLPAVLLCLAGAASGEPLPQYYNAIFSFGDSFSDTGNLPAGCIPITLTMYPSEDRSEYDPRTGCLKKYNSVALYHNAMLRVALDRLQRRRPEFRVVYADYYTPYIQFARTPHLYGYKRGALRACCGGGGPYNYNVSASCGLPGATTCEDPDAHVSWDGIHLTEAPYRFIANTWVKGPYAHPPLATVVLEDMVD

SEQ ID NO: 7401 - protein, 414 aa, Zea mays
  unsure (1)..(414): unsure at all Xaa locations
  Clone ID: ZEAMA-23APR03-C1429_8.p
MEEKRKLQWRRGRDGIVQYPHLFFAALALALLVADPFGLSPLAEVDYRPVKHELAPYGEVMGSWPRDNASRLRRGRLEFVGEVFGPESIEFDLQGRGPYAGLADGRVVRWMGEEAGWDTFAVMNPDWSEEVCANGVNSTTRKQHEKEEFCGRPLGLRFHGETGELYVADAYYGLMVVGQSGGVASSVAREADGDPIRFANDLDVHRNGSVFFTDTSMRYSRKDHLNILLEGEGTGRLLRYDPETSGVHVVLKGLVFPNGVQISEDHQFLLFSETTNCRIMRYWLEGPRAGEVEVFANLPXGFPDNVRSNGRGQFWVAIDCCRTPAQEVFAKRPWLRTLYFKFPLSLKVLTWKAARRMHTVLALLDGEGRVVEVLEDRGHEVMKLVSEVREVGSKLWIGTVAHNHIATIPYPLED

SEQ ID NO: 7402 - protein, 345 aa, Zea mays
  Clone ID: ZEAMA-23APR03-C143128_1.p
MVTRYTDCTFLPGRPNHGKNQKSAKVAAIPCTPAAQVGRGAASSEMEEKSSFIWQIDGFSSLLDKQEGWTNSGYFKIKDLNWYLQLNLKDRKSGDEREYVSLILVLSKTSGLEPDTIVEASFKLLIYDQAYGRHSEHEFSHRFQTTESSRSSGISCMILVYTLKEPSSGFIVGDSCVFGVELIKFTTAKVKDGSGTLHVQKRIGFCSAREAYTWIINDFLSLKGRCYSPEFEIGGHKWYLTMYPSGTGIDGDKEILSLYLHMAKPNGDASLQNSGVLVEVSLSIKDKVTSNRKTMTGRCQLQATEGEGWGWSNFMATKSVKDWYLVKGSCLIEADVAILGSSKMN

SEQ ID NO: 7403 - protein, 162 aa, Zea mays
  Clone ID: ZEAMA-23APR03-C14338_1.p
PWFFSSLDNLVCIGFFAASFFLSRTGDSSPTHVCGSRLRGTLLGGQGHYNWYQIHCPGRHLSVLGGWFRDVVRRGGIMAPSARPSVQTRFVLEAMAETNRSDETRWDKMFAALDSISGRLQKLETNHQQLMGQQVYHHLWRSKWRRIRMSWHGILMKYGRGW

SEQ ID NO: 7404 - protein, 663 aa, Zea mays
  unsure (1)..(663): unsure at all Xaa locations
  Clone ID: ZEAMA-23APR03-C14348_1.p
MAPHTTAAAGGGGGEEALEEASTLRHRHSAAKDGGEEGQANNGVAAAADDDGEGNALSVERAFADQAVPSWREQLTVRAFVVSFFLAIMFSVIVMKLNLTTGIIPSLNVSAXGLLGFFFATEADNPQNVKNPHIGWMIGFLFLVSFIGLFALVPLRKVMIVDYKLTYPSGTATAYLINGFHTPEGAKLAKKQVKTLGKFFLMSFLWGFFQWFYTGGDNCGFQNFPTLGLQAYKNKFYFDFSPTYVGVGMICPHIVNVSVLLGGILSWGIMWPLIGNQKGNWYDASLPESSLHGLQGYRVFISIAIILGDGLYNFVKVLIRTTAGFISMMKKNSTLPVSNNGSPITEGVSFDDERRRDLFLKDQIPRSVAYGGYVAVAAISIGTLPQVFPQLKWYYILVAYIFAPVLAFCNAYGTGLTDWSLASTYGKLAIFIFGAWAGASNGGVLVGLAACGVMMSIVSTAADLMQDLKTGYLTLASPRSMFISQVIGTAMGCVIAPCVFWLFYKAFADIGLSGSEYPAPYAIVYRNMAILGVDGFSSLPKNCLTLCYIFFAAAIVVNLVRDLVPKKVARFIPLPMAMAIPFYLGSFFAIDMFIGTVILFAWETINKAKANAFAPAVASGLICGDGIWTLPQSILALAKVKPPICMKFLSRSVNAQVDGFLGS

SEQ ID NO: 7405 - protein, 186 aa, Zea mays
  Clone ID: ZEAMA-23APR03-C1437_44.p
MAASSLSRPATPAALRHGACHGLGLALPRSLPPSAATRCAALRRDASGGRDQYGGALVDEGMPVLRRRIREAWMVETNYEAPAEWAPWEKRYYPAYVSDVSSLVGALQLLLMGTRPGVAIAVAALVLASVPVSTVAALHHLAMVAEAVLQSVHHISSIQSDHLLVSFFLFICNLEAVCRVNSIGGL

SEQ ID NO: 7406 - protein, 476 aa, Zea mays
  Clone ID: ZEAMA-23APR03-C14437_1.p
SQTYLPSVPRSKQRPKPKMTRTTQLVAAIAVSFLSAAAASNTTTSLQSLVAEVSQWREIHLGGGAAAAHGVRPSTVVAWALSFLAASVSSAGGVGGGSLFLPILNLVAGLSLKRATAYSSFMVTGGAASNVLYNLACTGGGGRGRLIDYDIALLFQPCLLLGVSIGVVCNVMFPEWLITLLFSLFLAFCTAKTCRAGVKIWRSESSGCGSGARSSRGGHSHSKEPLLPRGTSDGDAEGGGGNGAGFPWGDVALLVIIWLCFFALHVLIGDKHGKGVIRIRPCGVAYWLITFFQLPAAVAFTGYIVYAKRKKRAVHSESQEDGSKADLADAGVEALPLPTLPLAAFVTGALSGLFGIGGGLLLNPVLLQIGIPPQTAAATSSFMVLFCASMSMVQFILLGVEGVGQACVYAGVCFAGSVAGVVVIERAVSKSGRVSLIVFLVTAIMALSAVIVTCFGALDVWMQYTTGEYMGFKLPC

SEQ ID NO: 7407 - protein, 338 aa, Zea mays
  unsure (1)..(338): unsure at all Xaa locations
  Clone ID: ZEAMA-23APR03-C14445_1.p
MCGGCRRRQCGPDGTPDGGRRGCGTVIAVLALAAAAAVAFLESAAGGISYAGDGWLHECAKWDAEGXRFLASTFFGGGVAEVRAGEGGXPRSRVVVADPVAAGRVALGLAVDAPRRRLLLVYADRPPRLGYAALGAYDLGSWRRLFLTRLDVPGESTFPDDVAADEEGNAYVTDAKGSKIWKVGPDGALLGVIKNATFVQRPGLRHNLVGLNGIVYHPNGYLLVVHTSGGDFFKVDPKTETVRVVKVRGSLRRGDGLELLSPTRLVVAGLPNRLVESSDDWETASVTGQYVGPVHRIGSSATVKDGDVYVNHIVGFGLGRKKTHVLARAVFSPLAVTS

SEQ ID NO: 7408 - protein, 337 aa, Zea mays
  Clone ID: ZEAMA-23APR03-C14445_2.p
MCCRRQRGPDGTPVDGGRRRRRGCGAVLAVLALAAAAAVAFLESTAGGVSYTGDGWLHECAKWDAEGGRFLASTFFGGGVAEVRAGEGEERVVVADPDAAGRVALGLAVDAPRRRLLLVYCDRPPRFGYAALAAYDLGSWRRLFLTRLDVPGESTFPDDVAADEEGNAYVTDASGNKIWKVSPSGVLLGVIKNSTFVQRPGLRHNLVGLNGIVYHPNGYLLVVHTFGGDLFKVDPKTEAVHAVKVQGSLGRGDGMELLSPTRLVVAGTPSSRLVESSDDWETARVTGQYVGPVHRVGSSATVKDGDVYINHIVGFGLGKKKTHVLARAVFSPLAAES

SEQ ID NO: 7409 - protein, 420 aa, Zea mays
  Clone ID: ZEAMA-23APR03-C14448_1.p
MAYLPPHKRQPSTTASTPIPAPNPPPPSLSSSLRSLSLSSPRGRGRGRGAVGRHPLASTKIFRAAGCISRWFPLPPFSPAGDGEEYILRLEPFPCPPIEHRTGAKPLALVVASTPGQGSSGSTAAAVTSIAEQFLPDLLAAAERVKAEGAPKDELVKLSLVARLGTVLFECQPGGSPVSLDELRQAAKAGEDGSRSQLRKTFYTSLSSECLDDMERTMVKRIGLDFDSSKKHYHVKVSDKNRSDSTISCKCTVEEDGSLAIHKVELNQVRHLVEDISCLFKGLDLRLMLSKKRILKNLDSEVENAVKSLVSTAIIDPNVKGGVRWPLGKESIGERFSIVGVWHTDYKAFRNETMRLKLRHADRFDHRTSTGGVSDEVTFKLTAISCKLEEDDLAESAVKEMLESAVQMLWDNALNYRVVP

SEQ ID NO: 7410 - protein, 206 aa, Zea mays
  Clone ID: ZEAMA-23APR03-C14448_2.p
MFSLSNVDFVMPLFISYYFYVWHQNCSTSTKPDCYVLLLLFLTLSQDPCIVPQNSHQVDVNFVVQYMGLDLRLMLSKKRILKNLDSEVENAVKSLVSTAIIDPNVKGGVRWPLGKESIGERFSIVGVWHTGYKAFRNETMRLKLRHADRFDHRTSTGGVSDEVTFKLTAISCKLEEDDLAESAVKEMLESAVQMLWDNALNYRVVP

SEQ ID NO: 7411 - protein, 257 aa, Zea mays
  unsure (1)..(257): unsure at all Xaa locations
  Clone ID: ZEAMA-23APR03-C1445_2.p
MDGGGSGPAPNAAHTAEEVFRDYKARRAGMIKALTTDVERFFKLCDPEKENLCLYGYPDETWEVTLPAEEVPPEIPEPALGINFARDGMXEKDWLALVAVHSDSWLLSVAFYFGARFGFDREARRRLFSLINNMPTIFEVVTGAVKKQQAKEKTPNSSSKSNKPSSKVQSRAESRSKAKVPKDEEESGDDDGDEEAEEHDNTLCGTCGTNDGKDQFWICCDNCEKWYHGKCVKITPARAEHIKQYKCPDCTNKRVRA

SEQ ID NO: 7412 - protein, 396 aa, Zea mays
  Clone ID: ZEAMA-23APR03-C14515_1.p
MEVAERPMASSHLAALVSLLIPCLLALLLLRLAAVLDPDPDAAVPRIKAAAPLPLRFRHDGAFKILQVADMHFGNGATTRCRDVGPEGGGARCSDLNTTRFLRRVIEAEKPDLIAFTGDNIFGGSATDAAESLLRAISPAIEYRVPWAAILGNHDQESTMTREELMTFMSLMDYSVSQVNPPGFLVHGFGNYHVGIHGPFGSELVNTSLLNLYFLDSGDREMVNGVKTYGWIRESQLAWLRSTSLELQKKIHAPALAFFHIPIPEVRGLWYSGFKGQYQEGVACSSVHSGVLGTLVSMGDVKSVFLGHDHLNDFCGNLNGIWFCYGGGFGYHAYGRPHWPRRARIIYSELKKGQRSWLEVDSISTWKLLDDEKLSKIDEQVIWRHSTDDSDHRVYL

SEQ ID NO: 7413 - protein, 93 aa, Zea mays
  unsure (1)..(93): unsure at all Xaa locations
  Clone ID: ZEAMA-23APR03-C14527_1.p
LVSWPSILAASVVINLSIFLSHDVYNFLLDSGMDPVSXANSSPLSPSSVLQALRYSTYLGSQEDSSADSSNTIDGIMNGVIKEKLKIIPKDVR

SEQ ID NO: 7414 - protein, 103 aa, Zea mays
  Clone ID: ZEAMA-23APR03-C14545_1.p
GCYSLPLLPTPLYLFPQICSNQRRNIWFPKPVLNAAPTGLDAQTVTGSVLTASSLQACCWCYRPDAAYISSAAEQDHTISEQHSLADQTSIILNLHLTEHPFN

SEQ ID NO: 7415 - protein, 325 aa, Zea mays
  Clone ID: ZEAMA-23APR03-C14584_1.p
MMLTRASMGVMDAAAVDEVVRRLVEGGRGGRQVQMSEAEIRQLCVEAKQVLLSQPNLLRIHAPVKICGDIHGQFVDLLRLFDLGGYPPTSTYIFLGDYVDRGKQSLETICLLLAYKLKYPDNIYLLRGNHEDAKINRVYGFYDECKRRFNVRLWKIFCDCFNCLPMAALIDDKILCMHGGLSPELTSLDQIKDIERPTEIPDYGLLCDLLWSDPSHDTEGWGESDRGVSCTFGADKLVEFLEKNDLDLVCRAHQVVEDGYEFFAERRLVTIFSAPNYCGEFDNAGALLSIDESLMCSFQILKPNETGAPHSRKPLPSKAPKGENV

SEQ ID NO: 7416 - protein, 268 aa, Zea mays
  Clone ID: ZEAMA-23APR03-C146634_1.p
MAQMLLLLLLLAAPTVPAEAAATASTPTLVFLLAGQSNMGGRGGATNGTWDGVVPPACAPSPRILRLSPSLRWEEAREPLHAGIDLHNVLGVGPGMPFAHALLRSWRRSGRRPAVVGLVPCAQGATPIASWSRGTPLYDRMLARARAAVARGPATRLAALLWYQGEADTIRRQDADAYTPRMEALVRDVRRDLGMPDLLVIQVGLATGQGRFVDIVREAQRRVSLRNVRYVDAKGLPVANDYTHLTTPAQVKLGNMLAAAYMAATHTH

SEQ ID NO: 7417 - protein, 295 aa, Zea mays
  Clone ID: ZEAMA-23APR03-C14751_3.p
MGWQLPGSSLEGSAKVSGWKPPVLSLEGIANGSGSQASCPSTQRGTKSSGWQRSSSSPDGSRKASGWQQSSTSPEGSGKAHGWQRSGSFTQGGTKAAGRQPSRSCTDRIAKVDGWQRTSSSPEGSRKASGWHSSGRDSSKIASSASENRKLSSSHQATTPTGRHSLAKRQGSSDKGAAGWDEALGNSSEASKRQQGNSDKNAGSGVALGSNRSWHPSSGNPSRGGQGNHQHDRDSHSGDSRRGSSNYPRRSDNRHDHGSGGSSRPSSRGQSQRGLCKHYESGHCGKGSKCQYLHR

SEQ ID NO: 7418 - protein, 370 aa, Zea mays
  Clone ID: ZEAMA-23APR03-C14793_1.p
MIRFRASRNRRSSFGDQVTWFFEFCKVEDPEHLFGEGYYTSLLSEGTNPQDYDDLVDLYPEEQPQRVEVNTYAPSARPNHKRSKNFSDVEDELLVSAWLNISLDPIIGYNQTRSSYWTRIYDYFHANKTFSSTRSQNSIMHRWTSIQEGVNRFTGCLAQVERRRQSGATMQDKLTQACALYKSEDKQHKAFPYMHCWNKLRTQRKWEMKLEELAVGKSSNKKQKMNSNETSPPHLPSATETSEPTTPNETVTTRPPGKKKAKAAAFQAEKKGYTETLNKLFEKKKETDEFKEMKKDERFRLALAVEQERAANEKLNMQLRSKELELRQQEVEQHKKREEERIMTLDLSVMPADQKQYYMRLRSKILSENA

SEQ ID NO: 7419 - protein, 465 aa, Zea mays
  unsure (1)..(465): unsure at all Xaa locations
  Clone ID: ZEAMA-23APR03-C14806_2.p
MGGCFSQEEHRLQSRPAEAAGPDGLQKSKSDSKATASVLAPPKAVVDLQVEGYGNVNIFTYDELSAATKNFRPDQILGEGGFGVVYKGVIDENVRAGFPSRQVAVKELNPEGFQGDKEWLAEVNYLGQLSHPNLVELIGYCCEGSHRLLVYEYMXCGSLEKHLFRRVCLNMPWSTRMKIALGAARGLEYLHRAERSIIYRDFKTSNILLDADYNAKLSDFGLARTGPSGDQTHVSTRVMGTYGYAAPEYVMTGHLTARSDVYGFGVVLLEMIIGRRAVDDSRPSREHNLVDWARPLLVHNRKLFRIIDPRMEGQYSTKAATEVASLAYRCLSQNPKGRPTMSQVVETFEAVQNMPECQDILLQNGITGAVTLYEVPKEPADRVELEKAKQEPAVKTAAIPPVNGKPAPQSRRTRPGNGRSKSEPSLECKMYIPSPDSDEQQLGLEALASPNGSMKDHPDEDLYKI

SEQ ID NO: 7420 - protein, 618 aa, Zea mays
  unsure (1)..(618): unsure at all Xaa locations
  Clone ID: ZEAMA-23APR03-C14820_1.p
MKQEGRRRQHQHQHHRPPPRLELAMAHARGGGGHGHGHEEEAEAAVCLDGDSEAGEARSAGRAPPWRDQLTARGMVASLAVGAMYSVIVMKLGLTTGLVPTLNVSAALIAFVILRGWTQALARFGVATRPFTRQENTVVQTCAVACYSIAVGGGFGSFLLALNKRTYEMAGEDTEGNLPGSYKEPGIGWMTGFLFAVSFVGIVALIPLRKXFFFDFSLTYVGAGMICSHLVNLSLLLGALLSWGIMWPLVSDLKGDWYPADMPESSMRSQGYKAFICIALLLGDGLYNFVKVVAFTVKSLLGRSRLKNAKKEEDIPVLDEIQRNEIFTRDSIPTWLAYSGYLALSAVAVFAIPLMFHEMKWYYVIIAYLLAPALGFCNAYGAGLTDINMAYNYGKVALFILAAWAGKDSGVVAGLVGCGLVKSLVSISADLMHDFKTGHLTLTSPRSMIIAQAIGTAMGCVIGPLTFLLFYKAFDIGNPDGYWKAPYALIYRNMAILGVQGFSALPLHCLQLCYGFFGFAVAANLMRDLLPPKYGKWVPLPMAMGVPFLVGASFAIDMCVGSLMVFIWHIIDRSKASLMVPAVASGLICGDGLWIFPESLLALAKISPPLCMAFRSSH

SEQ ID NO: 7421 - protein, 302 aa, Zea mays
  Clone ID: ZEAMA-23APR03-C14913_1.p
MLSRDKQVMAAPMAAADGGLRRLFEKPLPENPTLLEALSAWNRNVHHPSSKPIDTASFTEIFGELHFQEKQQPDRGALLPPSPSPPPTPSPPPTPLPPSRTLSWLDIAAEAEKSKDDSSLDALLRPKPATTVATVKRSASFCTKKGSSASLLLCTEGLGSESTVDADDMFKDGDAEAEAEAAAAALKGTDTADGSDAEEAVKEERQPKTFPPPIPSIGRGGKPYVCFRSFREDGRFVLLEVVIPGKELLQATREGGRLRLQFANAAAGGVGVVDEAVHGGDDDGDPRGKNACIDDDDHDDER

SEQ ID NO: 7422 - protein, 276 aa, Zea mays
  unsure (1)..(276): unsure at all Xaa locations
  Clone ID: ZEAMA-23APR03-C14918_2.p
SSSIRETPWIDCLGERGRGWLIRSPLPPPCCRPTRDNLVPIRVDVEVDGQRYRDAFTWNPRDPDSEIISFAKRTAKXXKLPANFVPQMLQSIQGQLAEFRSYEGQEMQIKEKIVPLKIDLRVNNTVIRDQFLWDIGNLDSDPEEFARTLCDDLNITDPEVGPAIAVSIREQLYEIASQSVSVMREKQMSKKGRRAPEFSSNSKAVNNAVDLFKYFGSKGSVIRYMIISSKNLDALMITVVWYFGYDGTGREVPTNNVHSVWTNTLLAYCSLVSKPP

SEQ ID NO: 7423 - protein, 446 aa, Zea mays
  Clone ID: ZEAMA-23APR03-C1493_5.p
SKRPLSLPHSGASTTTSSSSSRIKRPMGAHATAAAAAVLLVATCVAAVAAAAAAALLQHEPGRISGDAVGVLDDDPVGKLKVFVYEMPRKYNRMLLDKDSRCLHHMFAAEIFMHQFLLSSAVRTLDPEEADWFYTPAYTTCDLTPQGFPLPFRAPRIMRSAIRYVATTWPFWNRTDGADHFFLTPHDFGACFHYQEERAMERGILPLLRRATLVQTFGQRNHVCLQDGSITVPPYADPRKMQAHLISPGTPRSIFVYFRGLFYDMGNDPEGGYYARGARASVWENFKDNPLFDISTEHPSTYYEDMQRAIFCLCPLGWAPWSPRLVEAVVFGCIPVIIADDIVLPFADAIPWEDISVFVAERDVPRLDSILTSIPLPDILRRQRLLARDSVKQALLFHQPARPGDAFHQVLNGLARKLPHGEGVFLQPGEKALDWDAGLQSDLKPW

SEQ ID NO: 7424 - protein, 480 aa, Zea mays
  Clone ID: ZEAMA-23APR03-C1494_7.p
MAASTTAAAAASVLLLLLSLARGGGLMSIVSYGERTDEEARRMYAEWMAAHGRTYNAVGAEERRYQVFRDNLRYIDAHNAAADAGVHSFRLGLNRFADLTNDEYPATYLGARTRPQRDRKLGARYHAADNEDLPESVDWRAKGAVAEVKDQGSCGTCWAFSTIAAVEGINQIVTGDLISLSEQELVDCDTSYNQGCNGGLMDYAFEFIINNGGIDTEKDYPYKGTDGRCDVNRKNAKVVTIDSYEDVPANDEKSLQKAVANQPVSVAIEAAGTAFQLYSSGIFTGSCGTRLDHGVTAVGYGTENGKDYWIVKNSWGSSWGESGYVRMERNIKASSGKCGIAVEPSYPLKEGANPPNPGPSPPSPTPAPAVCDNYYSCPDSTTCCCIYEYGKYCFAWGCCPLEGATCCDDHYSCCPHDYPICNVRQGTSLMGKDSPLSLSVKATKRTLAKRTGLSPATQLTALKSSALRKRSVALGRQQPG

SEQ ID NO: 7425 - protein, 206 aa, Zea mays
  Clone ID: ZEAMA-23APR03-C1497_19.p
MASRRRTLLKVIILGDSGVGKTSLMNQYVNKKFSNQYKATIGADFLTKEVQFEDRLFTLQIWDTAGQERFQSLGVAFYRGADCCVLVYDVNSMKSFDNLHNWREEFLIQASPSDPDNFPFVLLGNKVDVDGGNSRVVSEKKAKAWCASKGNIPYFETSAKDGTNVEDAFQCIVKNALKNEPEEELYVPDTVDVVGGNRAQRSSGCC

SEQ ID NO: 7426 - protein, 113 aa, Zea mays
  unsure (1)..(113): unsure at all Xaa locations
  Clone ID: ZEAMA-23APR03-C14996_2.p
ICFVTGDNHLGEKQVNVNNPFFHKTPSGMPQLLLLSTILISLFPNCCGACTVFFKTNSELVIAVRTHLSAIFSYAPFFSLAVMLKDQIQVNLPFKLQFNYFISGFCKTXSKKI

SEQ ID NO: 7427 - protein, 178 aa, Zea mays
  unsure (1)..(178): unsure at all Xaa locations
  Clone ID: ZEAMA-23APR03-C149_162.p
MVDRDRSGIYGGXSAYGQEQGGGRPMGEQVKGMIHDKGPTASQALTVATLFPXLGGLLLVLSGLALVASTVGLALVTPEFLLFSRVLVPAALLIGTAVAQFLTSGALGLGGLSSLTCLANTVRRAFQRTPDYVEEARRRMAEPAAHAGHKTAQAGHGIQSKTQEAGAGTGAGGGRSSS

SEQ ID NO: 7428 - protein, 338 aa, Zea mays
  unsure (1)..(338): unsure at all Xaa locations
  Clone ID: ZEAMA-23APR03-C149_215.p
MGKIKIGINGFGRIGRLVARVALQSEDVELVAVNXDPFITTDYMTYMFKYDTVHGQXKHSDITLKDSKTLLFGEKPVTVFGIRNPEEIPWGEAGAEYVVESTGVFTDKDKAAAHLKGGAKKVVISAPSKDAPMFVVGVNEDKYTSDVNIVSNASCTTNCLAPLAKVIHDNFGIIEGLMTTVHAITATQKTVDGPSAKDWRGGRAASFNIIPSSTGAAKAVGKVLPELNGKLTGMSFRVPTVDVSVVDLTVRIEKGASYEEIKKAIKAASEGPLKGIMGYVEEDLVSTDFTGDSRSSIFDAKAGIALNDHFIKLVSWYDNEWGYSNRVVDLIRHMFKTQ

SEQ ID NO: 7429 - protein, 337 aa, Zea mays
  Clone ID: ZEAMA-23APR03-C149_235.p
MAKIKIGINGFGRIGRLVARVALQSDDVELVAVNDPFISTDYMTYMFKYDTVHGQWKHHEVKVKDSKTLLFGEKEVAVFGCRNPEEIPWGSVGAEYVVESTGVFTDQEKAAAHLKGGAKKVVISAPSKDAPMFVVGVNEKEYKSDINIVSNASCTTNCLAPLAKVINDKFGIVEGLMTTVHAITATQKTVDGPSSKDWRGGRAASFNIIPSSTGAAKAVGKVLPVLNGKLTGMSFRVPTVDVSVVDLTVRLEKSATYDEIKAAVKAEAEGSLKGILGYVEEDLVSTDFQGDSRSSIFDAKAGIALNGNFVKLVSWYDNEWGYSTRVVDLIRHMNSTK

SEQ ID NO: 7430 - protein, 180 aa, Zea mays
  unsure (1)..(180): unsure at all Xaa locations
  Clone ID: ZEAMA-23APR03-C149_265.p
MADRDRSGIYGGXSAYGQQQGGGRPMGEQVKGMIHDKGPTASQALTVATLFPLGGLLLVLSGLALAASTVGLALATPVFLLFSPVLVPAALLIGTAVAGFLTSGALGLGGLSSLTCLANTARXQAFQRTPDYVEEARPQGWRRPRAHAXGHKTAQAGHGIQSKAQEAGAGTGAGGGRTSS

SEQ ID NO: 7431 - protein, 457 aa, Zea mays
  Clone ID: ZEAMA-23APR03-C1501_29.p
MLDINLFRTDKGGNPDLIRESQRSRFASVELVDEVIALDKAWRERQFELDKIRQAQRTSKKIGKLKASKQEEEAKKLMESTDEIKKRLAAKEVEVQEAKSTLDAKVTTIGNIVHESVPVSDDEANNKIVRTFGEKRVEDNLKNHVDLCRMLDIVALEKGADVAGGRGFYLKDEGVLLNLALINFGLAFLRKRGFKPMQTPFFMRKETMAKCAQLAQFDEELYKVTGDGEDKYLIATSEQPLCAYHLGDRIYPAELPIKYAGYSTCFRKEAGSHGRDTAGIFRVHQFEKIEQFCITSPNGNDSWEIHEEMLKNSEDFYKEIGLPYQVVSIVSGALNDAAAKKYDLEAWFPASKTFRELVSCSNCTDFSQRRLGIGYGQKKNDEQSKQFVHMLNSTLTATERTLCCILENFQKEDGRRVKGTLQPYMGGIEFLPFKQPLDVKQASDSKSNKSKSKGNAA

SEQ ID NO: 7432 - protein, 86 aa, Zea mays
  Clone ID: ZEAMA-23APR03-C1501_52.p
MTNFVCFPIQRLPFSVGFIGCMVGTIYVSMVLHSYFLSVIFSVLQVCPWPVQFLSGLYFFKSCYTVEVTCFSALGTLPVCETSKTG

SEQ ID NO: 7433 - protein, 103 aa, Zea mays
  Clone ID: ZEAMA-23APR03-C15031_21.p
PWVVLMCRCRPSSAPELAKCGLNRALADGDLSITHLQVARESWWRRSHISWNDCRRRRRLRLRLRLRLLDMQARRGEARQRAVGDVRRTCFSAPFSSFLSTRV

SEQ ID NO: 7434 - protein, 223 aa, Zea mays
  Clone ID: ZEAMA-23APR03-C150352_1.p
LRCLSIPHACTKLIFGVVPGPQFSARAPWANPSFSAQTQGRTAMPPVALRLRAVFPPFRHALHPRHTYYLRCLSTRLDLAYFRGHARTSVFGPCAMGEPLVFGPNARPNSHAAPCHTSPCRFPSVPPCPSPKTYTLASVSFHTLGLSLFPRSWPNRCFRPARHGERLVFSPNARPNSPAARRRAPPCPSLRSSRASVLFSLRSSVPFTKDIHIMFGVFPHAWT

SEQ ID NO: 7435 - protein, 333 aa, Zea mays
  unsure (1)..(333): unsure at all Xaa locations
  Clone ID: ZEAMA-23APR03-C15094_3.p
MALEAVVFSQPQAGHFGCGRGDSPYAVPWSDLLQGGGGGGGGFGDVCAAGEWVDQHDLDTCWAAPTVGDDWDXGRRSRGDHSSSDAASTDHGSRKAAPEPAAGRRKRRRTKVVKNKEEIESQRITHIAVERNRRRQMNEYLAVLRSLMPPSHAHRGDQASIVGGAINYVRELEQLLQSLEVQKSLKQSRERRPAAGGASCSPPFAGFFSFPQYSTASSTTSSSGGEKCRGHDVAAADIEVTMVEGHASLKVLARRRPKQLLKLVAGLHQLRVPPLHLNVTAAVDAMVLYTFSLKVEDDSKMGSVEDIATAVHEILGSIQRQQQEEEEEETAAM

SEQ ID NO: 7436 - protein, 150 aa, Zea mays
  Clone ID: ZEAMA-23APR03-C15095_1.p
CREKQQSSLSLSPLYGSKAGRGAGGCGVLRPQAGTTASLPLPGLRLPRDGRHGGDDGRRSELSRAVVEQRCVVRHEDGRLAGVAFRRDGRRRVPEQREEDPQGARPDSQQACREDDDRAAPERLASRRPAGGGGGGGNRSYHCRCSSSCT

SEQ ID NO: 7437 - protein, 193 aa, Zea mays
  Clone ID: ZEAMA-23APR03-C1510_5.p
LLCARKIGFQWRQPPLMPPSPPSPTPRSRQPPRPDPDPPVPDLTAFASAFLYVVDRDVLGRVWRVDLPWSWRRCSSSLRRPPVGAGGGDGAAEQRWRQRTPAPGGAQGARVAAPTPPIQAPAGGVRGRCGERRGAAGERVSRPGRRVARRRLAGAVPGQSYDRASSMARHRTHVTPGGNWQGNARSGLRRRFV

SEQ ID NO: 7438 - protein, 225 aa, Zea mays
  Clone ID: ZEAMA-23APR03-C151241_2.p
MGGVISGDSPRHTSSASKLEKKMVEAMQQRALKGTSVKSLNSVIMKFPKIDESLRKCRTIFQQFDEDSNGEIDQLELKHCFQNLGIESTDQEIKDLFQACDIYENMGMKFNEFIVFLCLVYLLDDPAVSEVRKRMGLGSLEPTFETLVESFVFLDKNKDGYVSKSEMIQAINETIGGERSSGRIGMKRFEEMDWDKNGTVTFKEFLFAFTHWVGINNEEDEDEEE

SEQ ID NO: 7439 - protein, 438 aa, Zea mays
  unsure (1)..(438): unsure at all Xaa locations
  Clone ID: ZEAMA-23APR03-C15139_6.p
MRSLLLPRRCAFASRRFLSALAGSGARAPCAGVVYGFGDNSHGAVGQPPPAAHAYVPTPVPSLPPSVSAVAAGHYHSLAVSAAGEVXAWGRNDEGQLGRGLHSPRNTWSNAELVRGLENVQVQAVSASGVVSAAIGSDGSLWVWGRSKRGQLGLGKDIVEAAVPSKVKALASYDIVKVSFGWGHSMALTKDGKLFGWGYSENGRLGEMGQSTRALSAEEYIGKTVDKYSSVMLEAVGSVVXSVIGMHLIWEPSLVHEASRLEVSDVSCGLDHSLILCSDGIVLSGGDNTYGQLGRKAGPPKLLPVGMSYRPFSMSASVGHSLALCYTTTEGTAGVETGLLSWGWNCSSQLGRSSQEDIPALVDSLSRERLVSASAGRVHSVALTSKGEVWTWGSGRNGRLGLGSSIDEAAPCLVDTLEGVEVLQVAAGMDHNLLLVAE

SEQ ID NO: 7440 - protein, 428 aa, Zea mays
  unsure (1)..(428): unsure at all Xaa locations
  Clone ID: ZEAMA-23APR03-C1514_2.p
MSYHCRVLVPVPFHYPPGAGARVGAGAGSPFPSASRALRLPRPRASVEKREQVAAMEEQGGQAALGWAARDDSGVLSPYSFSRRVPKDDDVTIKVLYCGICHTDLHVIKNDWRNAMYPVVPGHEIVGVVTGVGGGVTRFKAGDTVGVGYFVGSCRSCDSCGKGDDNYCAGIVLTSNGVDHAHGGAPTRGGFSDVLVASEHYVVRVPDGLALDRTAPLLXAGVTVYSPMMRHGLNEPGKHLGVVGLGGLGHVAVKFGKAFGMKVTVISTSASKRQEAIENLGADEFLISRDKDQMKAATGTMDGIIDTVSAWHPITPLLALLKPLGQMVVVGAPSKPLELPAYAIVPGGKGVAGNNVGSVRDCQAMLEFAGKHGIGAEVEVIKMDYXQHGHGAAREERRPLPLRHRRRRQPRLCRLGMAAKVSIRAQPQ

SEQ ID NO: 7441 - protein, 274 aa, Zea mays
  unsure (1)..(274): unsure at all Xaa locations
  Clone ID: ZEAMA-23APR03-C151910_1.p
MVSLRFPTAAIPRLPPSQAPNGVAIAATVAAAAAAAAAVSGQLDPHGQVHRPASXHPAPLWASLSLADAAAPSSVEPRTGATFPTEAAVGRRLLGIGLRKTSVLGLKSIDVYAFGVYADDNDLKQQLKEKYSKFSVSELKGNGELINDALERDIPMTVRLQIVYGRLSIRSVRSAFEKSVGSRLQKFGGQDTKELLQSFVAVFKDEYKLPKGSVIELSRESNHVLKICIEGEEVGSIQSKLLCKSLLDLYIGDDSFDENAKDGIHENIASILKS

SEQ ID NO: 7442 - protein, 297 aa, Zea mays
  Clone ID: ZEAMA-23APR03-C151984_1.p
WWCDNMMAMVFCYGAAECLYSTGWHNTQNKAGQARAEGRLMMSCQQVGNGGSLCDDAAETQGARPQALLPCQTFPGLVAEHVGRDVVEVLVHGLDRRPPPSRLVAHHRALLLPLLLPGSATSAAVAAQSQSHHHVQTQMLLLQLLLLVLVLVLAIFVLQLKRGCGTLPPLHHLAGRLGRHRRYRHDESPGLHLHGGVQVVVGDDGPLVAAAAAVAVGMVPLPERRDALPPRPRLLLLHGLPRARPSSRQEGSEWWSRSSVVRLRARSPVTHAGAGEGEGELVELFRLARAMNWCTYL

SEQ ID NO: 7443 - protein, 177 aa, Zea mays
  unsure (1)..(177): unsure at all Xaa locations
  Clone ID: ZEAMA-23APR03-C15227_4.p
QIASHWAQLGPNLSTNNFGRAGTPPPLAAQRLALFPSLVFWPRPHWWAQYSRGSCPPVMPLGPMNPCMRFCRSQRGLATWWGGPSLMXQQPVAFPLQRMPVMMPQRMTPNMKSPLMMPSMMSPMVFPSMMSQMMMPQCHCDAVSQIMLQQXLPFMFNPMAMTIPPMFLQQPFVGAAF

SEQ ID NO: 7444 - protein, 381 aa, Zea mays
  Clone ID: ZEAMA-23APR03-C152384_1.p
MDLSGTQGELAIPMHANVASPYGGGVGGHVLQLHRDDHGSNNGQSPAPLLPPPPAAAEETESSAKKRGPAAGAGGGGGSSAVKYRECLKNHAAAIGGNATDGCGEFMPSGEEGSLEALKCSACGCHRNFHRKEVDDEDDDMYGAAEGFSGLGLGLGLGHGHRAARRLLAPAMAHPHHKSGGGGLLISGADPYAAYASARALPPALPPPPGHAHHHHQYVMPLNMMHTSESDDMEGGRGGCGDAARGSGGSSSSRKRFRTKFTPEQKARMLEFAERVGWRLQKLDDGMVQAFCQEIGVKRRVLKVWMHNNKHNLATKRLEASPAQEQAMAGMASPPPPPPPPQLHLPLQMPAGVMPPPPPPPQAGSSCHRGGPGSPLPLKLE

SEQ ID NO: 7445 - protein, 320 aa, Zea mays
  unsure (1)..(320): unsure at all Xaa locations
  Clone ID: ZEAMA-23APR03-C152408_1.p
MPLGTSPAVAEAEAWTWENAAAGAAAGFATVAALHPLDVVRTRFQVSGGRGWSEVPPYRNTAHAVYTITRSEGLRGLYAGFYPAVLGSTVSWGLYFFFYNRAKQRYLQRKNDQLHPVHHLISAAEAGALVSLFTNPIWLVKTRLQLQTAKHHTSQYSGFSDXLKTILREEGFLALYRGIGPGLLLVTHGAIQFTAYEELRKAMIFFKSAQSRADDTGGGESLLNSVDFAALGAGSKVAAILLTYPYQVIRARLQQRPGTDGTPKYSNSWHVVKETAKYEGVRGFYRGITSNLLKNLPAASLTFVVYENVIKLFKATKEKT

SEQ ID NO: 7446 - protein, 354 aa, Zea mays
  unsure (1)..(354): unsure at all Xaa locations
  Clone ID: ZEAMA-23APR03-C15287_4.p
HTPPKKCPRHGFLLAVLVVGSVLCTAAAPRALAAAARELAGDDEAAAAMASRHEKWMAEHGRAYKDEAEKARRLEVFRANAELIDSFNAAGTHSHRLATNRFADLTVEEFRAARTGLRQRPAPSAGAGRFRYENFSLADAAQSVDWRAMGAVTGVKDQGACGCCWAFSAVAAVEGLNKIRTGRLVSLSEQELVDCDVSGVDQGCDGGLMDNAFQFVARRGGLASESGYPYQGXDGPCRSSAAAAASIRGHEDVPRNNEAALAAAVANQPVSVAINGEDMAFRFYDSGVLGGACGTDLNHAITAVGYGTANDGTRYWLMKNSWGASWGEGGYVRIRRGVRGEGVCGLAKLPSYPV

SEQ ID NO: 7447 - protein, 217 aa, Zea mays
  Clone ID: ZEAMA-23APR03-C152_4.p
MSHIWSSFLTYYAINPSFFSCNSFDRDWKKIEAYVGSKTVIQIRSHAQKYFLKVQKNGTGEHLPPPRPKRKAAHPYPHKSSKKALQVVLPQQVSHIMEQGCGTPMDVATVATDSSVNNAFPVQHFSPRHTQAMPDFARVYNFLGSIFDPETNGHLQKLKEMDPIDAETVLLLMKNLSINLTSPNFEEHRRLLSSDASSMDQESGSSRVHLPFMITSK

SEQ ID NO: 7448 - protein, 666 aa, Zea mays
  Clone ID: ZEAMA-23APR03-C15320_1.p
MAAPVRAIPLPSPVLYPRMSLWGRSSCSRRRAPGVRAAVEAAEGASRATEPVEVVGVGSRKDAVIDFCLGSRTLSSTPIRFWTVHVMDNSKVQLIQKGHGTDAVFRDLEPPLFLHPCPPAVILVSSAGQDADHITAMELLSVVKSAGNLAASIFLKPFCFEGQRRQVEAVDLIGKLQTCSNFHIVIEADSLLETEVETLAEALESANNAVLSTISMISIMMSGYNKMFWSSLNAQIKEVGPEEVAKLLRSYGEARVGFGAGYNIQSAIKQAVFHCPFLRGGIKDLNNVVFLSLTTARVLSESDLISILHIFRRVTGFTKDIIFSRNSESDLEPKLIVVSLLTVRNHYDGSVSTVQEGFLSSLALHFPFISSLMGGDTPEQKQIRSKHSFNRLPDNRFNSVEQDEFSRLSNRSFDATVSKSFPEEFEDLESVRNQRIKPESLEGDLAVTGEMNKDDDNEHLVSQKEHRFLSNSPGFDIAQSWAKQRVMASGSSKNDELDAVALPVGVKLSKVQSDHSPDMQTETLGADTTVASGHAAFGVSFSDVRLEKVMDVCSSAITFLRNRMDRPRKRGSNSLSSRAALMLDAEREPEKTWSPIVEIHYVGGTYRGRCQEGVPEGKGRLTFSDGSFYDGLWRYGKRSGLGTLFHSNGDVYHGTWRDDLIHGKVD

SEQ ID NO: 7449 - protein, 312 aa, Zea mays
  unsure (1)..(312): unsure at all Xaa locations
  Clone ID: ZEAMA-23APR03-C15345_1.p
MLAFEQQVLADLVEDPNGGLVVLSSGLXLASLAATLLLHLHQTPGNAAGGGCLLVLSATDTLKARIRRRLQDKLQVHDVPPDLAAQQRXTLYASGAALFLSPRALAADLLNSRLLPSRVQALLLLSARPLXDTSSDAFICDVGIVLEEVLEEAPKWKVLWEVAGFSKAERMKKSLYVRRLHLWPRFHVLAAADLERAPPDVVDVRVPMTPPMRGIQAAVLATMDACLKELRRTNKVDVEDLTVDKGLFKSFDEIVRRQLDPIWHTLGKKTKQLVADLRTLRKLLDYLVRMNLMRKKQQELACHPRMVSWRMM

SEQ ID NO: 7450 - protein, 389 aa, Zea mays
  Clone ID: ZEAMA-23APR03-C15348_2.p
SKTPRLLPSFQSHGASPSFPDLTTRLPCPAGPLRRLARPSLTPPPRSSPAALQHGSSSQQTPTAMAAALLLLLVPPVGLLAALAFLTRPRARIALKDSHVFITGGSSGIGLAMATAAAREGARVSILARNLARLEEARAAIQRDSGRDDVGVHAADVRDADAVARALQEAGPVDVLVCNHGVFVPQELERQDMDEIKWMVDINLMGTFHLIKAALPAMKARTRETRLPGSIAIMSSQAGQVGIYGYTAYSASKFALRGLGEALQHEVVGDNINVSLIFPPDTETPGLEEEHKRRPELTNIIAGLSGGMKADDVAKKALDGIKSAKFIVPCNFEGTMLAVATAGLSPQSSALMAFIEVIGTGLMRFAALCFQWNWFSTIESYYAKNKKSQ

SEQ ID NO: 7451 - protein, 551 aa, Zea mays
  Clone ID: ZEAMA-23APR03-C15360_2.p
MGVWREGAGWCFCSGGGGDDGGRSERVKAAIFSARASALAAVRAQGRHHGSGLLIHRNLLLTTHGNLPSAAAAEDADALLGQGRLVARLEPHRFFISSSILDLTIVGIDYTQGDSTLQGQQPHYLKTSCKPSLDHGSPVYLLGHTGKKELVIGEGKVVIGTDNLIKLSAEGVTWCPGSAGFDAQGNLAFMICDPMKLASSPTARSSSASSSSSHSWKKDQPMQFGIPISVVCDWLYQHWQGSLDEVSKPKLPLVRLMSSRSDHSSTSFTRRHVFKPDDENDDASVCSKPKHQQVSGSTATARISHEANPIVDLRTSCEQGVTTPEIYESPRRSSCQAQKNAAAPIQLLDINFPPRVPKTIFLPLPLKQMLSDENNVETSKPKNRSKDNGFPSGLIWHRNIEAECRDPPVALQHMDCSSEGQSSSSPAEIPEYGCQDQYNSEEETMYSAETMESRNIPSPREKHVGRSQSCVTYSRWSSPRTSSMQNGTLRKQHTLIPVRKTLSQNTTLPQRSHDYLSPTVSSAMKKRNSMEQQQPTKPRRSTIQSSPKWMF

SEQ ID NO: 7452 - protein, 119 aa, Zea mays
  Clone ID: ZEAMA-23APR03-C15367_4.p
MASIAGSSALSFARPVKAINTNSLAFSPLRKGNTFLRLQPMPMRSVSCAAKKDTTDKVCEIVKKQLALPDHTEVFRRTRVEKSRARRDHGHHQGGIRPGDFGASQSSLPAAPAIRLLQQ

SEQ ID NO: 7453 - protein, 137 aa, Zea mays
  Clone ID: ZEAMA-23APR03-C1537_1.p
AATTDPPIDCNWSEEGMADLLSVPEDDLGGRVQYNERAGEGWPQRDDPQDRWSAPANTKWLRQSQRPGGEAGNAYNGKTQVSLHFHRDEAADDLRGQCFQVLSNRGGGPPDRDAHIKKTVFYKNSKAAHMGEIGTAN

SEQ ID NO: 7454 - protein, 365 aa, Zea mays
  Clone ID: ZEAMA-23APR03-C154232_1.p
MVSRRTLLVMMATVVVLHRSRTLCAAASAAAAPPATTKQARTPALFVFGDSIVDPGNNNALTTTVRCNFPPYGQDFPGHNATGRFSNGRVPSDIVASRLGIKEHLPAYLGTELSDFDLLTGVSFASGGCGFDPLTAELVSVLTMDNQLDLFKEYKEKLERVASGAHRAADIVSRSLYMVVTGTDDLANTYFTTPFRRDYDLESYIEFVVQCASDFIKKLYGLGARRINIAGAPPIGCVPSQRTNAGGLERECVPLYNQAAVVFNAALEKEIKRLNGSDALPASVLQYIDLYTPLLDMIQRPDAYGFNVTNRGCCGTGVFEVTLTCNRYTAEPCRDPSKFLFWDTYHLTERGYDLLMAQIINRYGV

SEQ ID NO: 7455 - protein, 267 aa, Zea mays
  Clone ID: ZEAMA-23APR03-C1542_2.p
LEGKVALVTGGATGIGEAIVRLFMEHGAKVCIADIQDEAGQQLRDALGGDAQGAMFVHCDVTSEEDVSRAVDAAAERFGALDVMVNNAGVTGTKVTDIRNVDFAEARRVLDVNVHGVFLGMKHAARAMIPRKRGSIVSLASVASAIGGTGPHVYTASKHAVVGLTKSVAAELGRHGVRVNCVSPYAVPTALSMPHLPQGARADDALKDFLAFVGGEANLKGVDAMPEDVAQAVLYLASDEARYVSAVNLMVDGGFTAVNNNLRAFED

SEQ ID NO: 7456 - protein, 131 aa, Zea mays
  Clone ID: ZEAMA-23APR03-C1548_24.p
MAGIGPIRQDWEPVVVRKKAPTAAAKKDEKAVNAARRSGAEIETMKKYNAGMNKAASSGTSLNTKRLDDDTENLAREQSSVSGHFSHEQSDRRFFVPRIPVDKFGHLSTVDVINDLYMFMFTSVAVDDVFF

SEQ ID NO: 7457 - protein, 296 aa, Zea mays
  unsure (1)..(296): unsure at all Xaa locations
  Clone ID: ZEAMA-23APR03-C15497_2.p
MDYSGTKESPPAGAWWSRETVAVVTGANRGIGHALAARLAEHGLTVVLTARDGERGEAAAAPLLARGLAVVFRRLDVSXXASVAEFAAWIRDALGXLDILVNNAAVSFNEXDTNXSVEHAEAVLRTNFYGAKMLTEALLPLFRQSSATSRILNVSSQLGLLNKVSDPSLRALLLDEDGLTEAGIEAMVSRFLAQVKDGTWGGQGWPKVWTDYSVSKLALNAYSRLLARRLQXARGARVSVNCFCPGFTRTGMTKGWGKRTAEEAADVAARLALLAPAELPTGTFFKWCTPQLYSKL

SEQ ID NO: 7458 - protein, 250 aa, Zea mays
  Clone ID: ZEAMA-23APR03-C1552_4.p
MLAATTASLRPPIRSFPRVASHPGASHGGACGANPLLTRRRRRALVCRADLQQDAPFAAAIGACVLASLVLPPPRSRGEAGDEVEDEGEFGATDTRMAVMGIISFLPYFNWLSWIFAWLDSGRRRYLVYAAVYLAPYLRTNSHASADETWLPVASIFICILHIQLEASIRSGDIESFKFIQRAWNLVFPRAAKEKDAHHGNKRDSIGMGDRHNRRIPTAHESRERLRNSDIFKRKLDDPNDEKQKKSDWN

SEQ ID NO: 7459 - protein, 521 aa, Zea mays
  Clone ID: ZEAMA-23APR03-C15563_1.p
MDSKSVGIVGAGVSGLAACKHALDKGFRPVVFEADGSVGGVWAHTLESTRLQAPTTAFRFSDLAWPPESAREAYPGHRRVMEYIRSYARAFDLLKHIRFHSQVLGVEYLGATEEEVMGWDQWSGDGTAFGAVKGGGWRLTVQDLKVGSTEVFVVDFLILCIGRHSGTPNIPEFPANGPELFKGKILHSLDYSYMDDGDAAEFVRGKRVTVIGSGKSAFDIAAEVAKVNGAAQPCTIVYRTRHWLVHKSSVWGVDLSYFYLNRISQLLVHKPGEGFLRCMLAAALSPLRWAISKAIETYYKWSVPLRKHGMVPDYSFSFAMSSCLIAMLPEGFYDRVDEGSIVLRKSKAVGFSSDGVVLRDRNESVRSDIVILATGFRGDQKLRDIFTANWCREIVAGSPDTAAPLYRECIHPRIPQLAIVGYSESLTNIYASERMSNWVAQFLAGGFQLPSVRCMEESVAEWAEYKNRYNGRYFRRSCVSTANIWLNDLLCRDMGCNPRRKKGFLAEWFQPYGPADYAGLC

SEQ ID NO: 7460 - protein, 364 aa, Zea mays
  Clone ID: ZEAMA-23APR03-C15588_1.p
MKASIKFRDDDRPLLRAKVPVGVLGLPFFSGLVAGGDAKDLRFDLSTAFTSGPALRLSYRPNEPLQPFALSAARQGAHWRAGAGVPLGPPAEFNLTSSNPPAFSLVFKPRIGDFAVASSVRSPPPPPPASTLPPLSVKMSDLVTNGDDHDRKAHGNGFSFSGNGFAANVAAAAGTGGGGVGALLSRMRLTTRSVLPLWSKASLRFQWGLRVPPEIKAALADDGYGRKAGSLAISKLPLLVMNKITIEHTPKVPSQSETDKKRKKDAPPAAEGEVFSLMKRQLEELNAESTMLRLAVEDLRAEVGASKGDGRKLPATVPHPQRSFVSKPDHHFHSDAKDLGDSGTKPASNDASEGLKKALEARRK

SEQ ID NO: 7461 - protein, 228 aa, Zea mays
  Clone ID: ZEAMA-23APR03-C1572_26.p
MASSMLSATTVPLQQGGGLSEFSGLRSSASLPMRRNATSDDFMSAVSFRTHAVGTSGGPRRAPTEAKLKVAINGFGRIGRNFLRCWHGRGDASPLDVIAINDTGGVKQASHLLKYDSTLGIFDADRVPTPNVSVVDLVVQVSKKTLAEEVNQAFRDAAANELTGILEVCDVPLVSVDFRCSDVSSTIDASLTMVMGDDMVKVISWYDNEWGYSQRVVDLADICANQWK

SEQ ID NO: 7462 - protein, 249 aa, Zea mays
  Clone ID: ZEAMA-23APR03-C157979_1.p
MGMRPGWVGGLVEESFFVGCAAHEDRKKNEKNIFCLGCCASICPHCAPAHRHHLLLQVRRYVYNDVVRLDDLERLIDCSFQPYTINSAKVIFLKPRPQSRPFKGSGNVCLACDRILQEPFHFCCLSCKVDHVMMQGGDLSNILLYVPGGPPDLGCGFPRFENLRFDDDPGQYGQATPSSILEDPVEHGGSASASGGSSNGGSARNHARRDVDVPTRKKKSGGGGGGFFPQIVLSLGNRRKGAPHRAPLA

SEQ ID NO: 7463 - protein, 267 aa, Zea mays
  Clone ID: ZEAMA-23APR03-C15839_2.p
MATLSSCSRLSSGTGAAAIHRQPARAGAVLVVTCRRSSSATVRAAAAATAAAPAAVELQNKGVSLPTWAEFELGRAPVYWKTSSGLPPSPGEGLTLFYNPAATKMAPNEVFGVAFNGGFNQPIMCGGEPRQMTLQERGKADPPIYTIRIRVPQHAVSLIFSFTNGAEWDGPYTLKFRVPKPWQNKPLSFFNEGLADELNREGACDLAIYPDENIAITSCAMDGYLEEGGDRCKLDIVSGCTDPSSDMFDPLATVDDGSCPLESDSEE

SEQ ID NO: 7464 - protein, 643 aa, Zea mays
  Clone ID: ZEAMA-23APR03-C15937_1.p
MAALQPSFSPAMTLKSSCSALKFPKTALLSGFGGIPRLQDAQDRNTSVAYLIPKAASVTDQSIAEPPKTKQNRHTVDPTAPEFLPLPSFEECFPRSTKESSEIIHEESGHVLKVPFRRVHLTGDQKHFDTYDTSGPQNISPRIGLPKIRKEWIDRREKLGSPRYTQMYYAKQGIVTEEMLYCASRENLSPEFVRTEVARGRAIIPSNKRHLELEPMIVGRNFLVKVNANIGNSAVVSSIEEEVHKLQWATMWGADTVMDLSTGRHIHETREWIIRNSPVPIGTVPIYQALEKVNGIAENLSWEIFRDTLIEQAEQGVDYFTIHAGVLLRYIPLTAKRMTGIVSRGGSIHAKWCLTYHKENFAYEHWDDILDICNQYDVALSIGDGLRPGSIYDANDSAQFAELLTQGELTRRAWAKDVQVMNEGPGHIPMHKIPENMEKQLEWCNEAPFYTLGPLTTDIAPGYDHITSAIGAANIGALGTALLCYVTPKEHLGLPNRDDVKTGVISYKISAHAADLAKGHPYAQAWDDALSKARFEFRWLDQFALSLDPVTAMAFHDETLPSEGAKVAHFCSMCGPKFCSMKITEDIRKYADENGYGTVEEAVIQGMNAMSAEFLAARKTISGEQHGEAGGEIYVPESYAAQK

SEQ ID NO: 7465 - protein, 120 aa, Zea mays
  Clone ID: ZEAMA-23APR03-C1594_15.p
MAAAAGSKGRAIAESFVSRVLAGKAASPRRAVHASAYDKNLEDQVRPAFVPDDVIGSAGSPDKYWSPHPKTGVFGPAAVDPKLAAGGAPDAGADAAGGTVLDQKVWFRPLEDVEKPPPAA

SEQ ID NO: 7466 - protein, 160 aa, Zea mays
  Clone ID: ZEAMA-23APR03-C1595_14.p
MVRGSLCMCSSASLLLFWLHLYDLTKEGSLDGPHLHTVYPHGSTDTLPFATMGSGSLAAMSVFESKYKEGLTREEGIQIVCEAICAGIFNDLGSGSNVDVCVITKGKTEYLRNHQLPNPRTYASSKGYSFTKGQTEVLSSKVTLLKQKVEVAEGGDAMEE

SEQ ID NO: 7467 - protein, 347 aa, Zea mays
  Clone ID: ZEAMA-23APR03-C160108_2.p
MGNSDAASPASAAAARDSKKKRGSRSAAKLKQSKRDTRREQFLSRGQGNKDAKSAASPTGAVSGSPILASPHPPLPRRRADSRSRGSDPEDRDEAIAAGLEADGSGLDSPGSDKRQSGDCPQRKGFPGNGGGPSLSSGSSVWSSSRSVSDAEEDTGGPEDESEVFDDWEMAADALYVDDSSCNQSSGPTPTLPQAPTTAEPSHAAKPEPIQSKTRAWAPDDIFRPQSLPSISKQTSFPTSIGNRWQDMGMSAAQQGILSLPLSCPICCDDLDLTDSSFCPCPCGFHMCLFCHNRILVEDGRCPGCRKQYNTVSAAEGGGGGGSRATVGTGREMEKRLSRSCSMGPSY

SEQ ID NO: 7468 - protein, 304 aa, Zea mays
  Clone ID: ZEAMA-23APR03-C1605_20.p
MEFWGLEVKPGSTVKCEPGYGFVLHLSQAALGESKKSDNALMYVKIDDQKLAIGTLSVDKNPHIQFDLVFDKEFELSHTSKTTSVFFTGYKVEQPFEEDEPSSTMDLDSEDEDEERDVPVVKENGKADGKKQKSQEKAVAAPSKSSPDSKKSKDDDDSDEDETDDSDEDETDDSDEGLSSEEGDDDSSDEDDTSDDEEEDTPTPKKPEVGKKRAAESSVLKTPLSDKKAKVATPSSQKTGGKKGAAVHVATPHPAKGKTIVNNDKSVKSPKSAPKSGVPCKSCSKSFISETALQAHSKAKHGGK

SEQ ID NO: 7469 - protein, 333 aa, Zea mays
  unsure (1)..(333): unsure at all Xaa locations
  Clone ID: ZEAMA-23APR03-C1606_1.p
MASAAGAALCPCSFSTVLSSSPSTPFRPARTTPRPSLRPLPRRARLPLRPGHSRVGSCLQVLRCLPKCDSGKPDGGGDAGLSGRKAARPAGQGGPRRPAQFGASSCGLAFTTVVGVIMLQASQQALAATQFAGLQPADVLGDLGDVSTGFAFSXFLLIFFSELGDRTFFIAALLAARSSGAVIFLGTFGALAVMTIISVVLGRAFHYVDGIIPFSFGGTDFPVDDIAAACLLVYYGVTTLLDAASGDDEKINEEQEEIELAXGAIWPAQFGASSCGLAFTTVVGVIMLQASQQALAATQFAGLGTFLSEKIIAYIGGSLFLAFAAITIVEIVT

SEQ ID NO: 7470 - protein, 151 aa, Zea mays
  Clone ID: ZEAMA-23APR03-C1611_15.p
MVKAVAVLAGTDVKGTIFFSQEGDGPTTVTGSISGLKPGLHGFHVHALGDTTNGCMSTGPHFNPVGKEHGAPEDEDRHAGDLGNVTAGEDGVVNVNITDSQIPLAGPHSIIGRAVVVHADPDDLGKGGHELSKSTGNAGGRVACGIIGLQG

SEQ ID NO: 7471 - protein, 151 aa, Zea mays; identical to SEQ ID NO: 7470
  Clone ID: ZEAMA-23APR03-C1611_7.p

SEQ ID NO: 7472 - protein, 91 aa, Zea mays
  Clone ID: ZEAMA-23APR03-C161639_1.p
MSKQGKRPTTTMSGGGSAAESPASSCVSSDAEDEVQQAVAPKPMVVVGCPQCLMYVMVSGEEQQPKCPRCKSPVLLHFLRGGNGKLPAGRQ

SEQ ID NO: 7473 - protein, 368 aa, Zea mays
  unsure (1)..(368): unsure at all Xaa locations
  Clone ID: ZEAMA-23APR03-C161_8.p
MMMMGEGVSMPPWSHHVPVSGVDEGDEMTPYLLAALRQYLPCNDAGAEAEEDEAAAAMAAGVDGYGCDEFRMYEFKVRRCARARSHDWTECPFAHPGEKARRRDPRKYHYSGATCPDFRKGGCKRGDGCDMAHGVFECWLHPARYRTQPCKDGTACRRRVCFFAHTADQLRVLPPTPQQQSSPRXAPPALPPLAESYDGSPLRRQAFESYLTKSIMCSSPTSTLLSPPKSPPSESPPLSPDFRRGCWPGAGSPVNDVLASLRQLRLSRANSSPSGGWCSYPASAVAYGSPTGGALYGLSSTPRATAGSGYMANLDPLDVTFGGDEEPVERVESGRALRAKVFERLSREGAVSGDAGGPDVGWVSDLIN

SEQ ID NO: 7474 - protein, 570 aa, Zea mays
  unsure (1)..(570): unsure at all Xaa locations
  Clone ID: ZEAMA-23APR03-C16276_1.p
MTTLSSGVLLKLLDGMKSGAAKPVGEHRTAVLQVTDIVPAELDEKDLFPKHGKFYVKVSDASHSIYATLPLAQADLVLSNKLHLGQFVHVDRLDPASPVPVIVGARPLPGRHPLVVGTPDPAARAKPAAPXRGSWGPEQNAXIKPTTLNFDAERTTPVKERPALSTPVKDRAGGATPARERGAAATPGRERTAAASPALSSASLRKSSSVLPRLTRSKSFVADRDQQHPRIPKSPFPTEKSSVSCTASRATRRVAKEEEPSSPPSDDELGSSATSTKKRSATAARVPVPGKLSLLGKDAMEQREQAQKVALEALRNASATDNVARIYKLFSEVSKTARPEAPATCFDSFLSFHQEAVQAVTDIEAIQAATSMAAAVASDEQQLEDAPPVLQEIAQNRTVVRRRGIGLGSVSKSVSFAPGTLDPKQDDGGGKAIRSSSASRKCLATDKIGEDGGDEKRSSSSGPSSATTTTAHSALGSSLKLAKKIQAEAGSWFMDFLEAALETGLKKSKASSMGDGRKQSSCCCPQSLMLRVINWVEMEQSGGDSSGRKTAHPRAAAVARKLRIKAKNPS

SEQ ID NO: 7475 - protein, 516 aa, Zea mays
  unsure (1)..(516): unsure at all Xaa locations
  Clone ID: ZEAMA-23APR03-C1627_1.p
MSSSREVMVLSDSEVQSAPPTPRPPPPVSAPPSQIHSPSPARSPLASPVRKAVAGVKAGCLEEEVGGHVTRLADPRDAWLPVTESRSGNAYYAAFHSLSSGIGFQALVLPTAFASLGWTWAIICLTLAFGWQLYTLWLLVRLHEPVAGATRYSRYMHLAXPCFGDRWANILALLPVTYLSAGICTALIIVGGGSMKMLFGIAYGGSCLARPLTAVEWYLVFVCAAVVLSQLPNLNSIAGVSLVAAVAAVAYCTMIWAVSVARGRVAGVSYDPVHKAPDDVDAALGVLNGLGIIAFAFRGHNVVLEIQGTMPSTLKHPSHVPMWKGVKVAYAIIALCLYPIAIGGFWAYGNQIPPNGILSALYKFHSRDASRLVLGVTTLLVIINCLTTFQIYAMPVYDNMEAGYVHKKNRPCPXWMRSGFRAFFGAVNLLVAVAMPFLSELAGLFGGISLPVTLAYPCFMWVAIKKPRKGTATWNVNWALGILGMRHXGLVLIVGNLWGLVEKGMRVKFFKPADFQ

SEQ ID NO: 7476 - protein, 2159 aa, Zea mays
  Clone ID: ZEAMA-23APR03-C1632_20.p
MEGEGHHGVVLACSICGFLFAVLSPFSFWVLWAVNWRPWRLYSWIYARKWPTYVQGPQLSTLCSLLTLCAWLVVISPIAVLLVWGSVLIALLERNIIGLAVIMAGVALLLSFYSIMLWWRTQWQSSKAVAYLLLLAVGLLCAYDFCAIYVTAGASASELNSPSGFFFGVSVISLAINMLFICKILFNVSGFDVDEYVRRSYKFAYSDCVEVAPVSCSPEPPDPSELYMTKSSRVKHLGLLYISSLLVLVGYSILYGLTSKEARWLGALTSVAVVILDWNLGLCSFRFELLKSRMIVLFVAGTSRAFLVSFGVHYWYLGHCISYAFVASVLLSAAVSSWLSISNPSVARIDALRSTVIKLREGFRRKGQNSSSNSSEGCGSSVKRSSGSVEAGQNGNATDSMYRSNSQSDGVNWSSIPFDRSNSCQEGRSSDKNIDSARASLAHRSNSCLSAVQDSETAVVSVDRHGDPTTSLVCSSSGLESHGCEPSGSATTSGNQQLLDLNLAAIFQDRLNDPRISSMLKKNGGLGDVELANLLQDKGLDPNFSYMLKDKVMDPRILALLQRSSLDADREHQDDVDVTATDSDRLDTTIANQISLSEELRRSGLEKWLNISRLIFHHLAGSPIRAFIVFTVMFIIETATVAIYRPETIKVINATHEQFEFGFSILLLSPVVCSIMAFIWSLRAEEMLMTSKPQKYGFIAWLLSTCVGLFLSFLSKSSVILGLSLTVPLMVACLSFAVPIWIRNGYSFWIPGREFANRENVSQAPGEKERALFVITIAVFTASIIGLGAIVSAKPLDALGYKGWDADKNSSYSPYATSMYLGWALSSTIAVITTGLIPIVAWFATYRFSPSSAICVGLFATVLVSFCGASYWGVVNSREDGVPLKADFLAALLPLLCIPAFFSLFTGLYKWKDDDWKISRGVYLFVGMGMLLLFGAVAAVIVTIRPWTVGVACLVAILFLVFVIGVIHYWTSNNFYLTRTQMLLVCSIAFLLALAAFLMGLFHGKPFVGASIGYFSFIFLLTGRALTVLLSPPIVVYSPRVLPVYVYDAHADSAKNVSYAFLILYGIALATEVWGVIASLIMNPPFVGAGVSATTLVIAFSFAVSRPCLTLKMMEDAVHFLSKDTVVQAMSRSANKTRNAISGTYSAPQRSASSAALLVGDPALTLDRAGNFVLPRADVMKLRDRLRNEEIAAGSFLCGVKDCLLICPQSLSNIDYRRNMCAHARILALEEAIDTEWVYMWDKFGGYLLLLLGLTAKAEQIQDEVRLRLFLDSIGLSDLSAKEIKKWMPEDRRQFELIQESYIREKEMEEEALMQRREEEGKGRERRRALLEREERKWKELEISLLSSIPNTGSRDAAAMAAAVRAVGGDSALEDSFARDRVSSIANHIRKAQLARRAEQTGIPGTICILDDEPRSTGRHCGELDLCLCQSQKVTLSIAVMVQPVSGPVCLFGSEFQKVCWEILVAGSEQGMEAGQVGLRLVTKGERMTTVAKEWNIGASSIADGRWHLVTVTLDADLGEATSFIDGVYDGYQNGLPLPTDNGIWEPGTDIWVGARPPMDLDAFGRSDSEGSDSKMQIMDAFLWGRCLSEDEVTVLHTAMSPAEYGFFDLAPGDAWHGSYSARVDDWESEEAYELYDQGDVEWDGQYSSGRKRPVHDAVAIDLDSFARRPRKPRFETRDEVNQRMLSVERAVRDALIAKGERNFTDQEFPPEDRSLFVDPMNPPLKLQVVSEWMRPSDIAKDISISCQPCLFSGSVNSSDVCQGRLGDCWFLSAVAVLTEMSRISEVIITPEYNDEGIYTVRFCIQGEWVAVVVDDWIPCESPGKPAFATSRKQNELWVSILEKAYAKLHGSYEALEGGLVQDALVDLTGGAGEEIDMRSPQAQLDLASGRLWSQLLHFKQEGFLLGAGSPSGSDAHISSSGIVQGHAYSILQVREVDGHKLIQIRNPWANEVEWNGPWSDSSPEWTERMKHKLMHVPQSKNGVFWMSWQDFQIHFRSIYVCRVYPPEMRYSVHGQWRGYNAGGCQDYDSWHQNPQYRLRVTGRDALYPVHVFITLTQGVGFSRKTNGFRNYQSSHDSSMFYIGMRILKTQGCRAAYNIYMHESAGGTDYVNSREISCELVLDPYPKGYTIVPTTIHPGEEAPFVLSVFSKASIRLEAV

SEQ ID NO: 7477 - protein, 374 aa, Zea mays
  Clone ID: ZEAMA-23APR03-C16337_1.p
MAAPHDEAAAWAEEAARRVWAGAVPLQVHLHDADVTALPPPPPFLTLGPRIGYLPLLIPVIRAHFSNALPPGVDTVWFEYKGLPLKWYVPIGVLFDLLCADPERPWNLIVHFRGYPSEILSPCEGEDSVKWSYMNSLKEATFIITGNSKSVMNMSHADQVALWESVMKGNLDGYKNISTRLKLGPFEDDVLVRTASVERQRQQNSDEPESPGSSKPCRVPVRLYVRNVQEDLEYIEHAVPVSDWENVSYINRPFETRKAEGRSYITLEHALQTLLPEFFSSKPPGSADGSQHAGAMDAAADSSDATNSSSRSQEAEQALASPAEAGSAKRAKVKLVRVQGVELDMDIPFLWVADHLKNPEYYVHICVYVGTRKQ

SEQ ID NO: 7478 - protein, 202 aa, Zea mays
  Clone ID: ZEAMA-23APR03-C163427_1.p
MKARGAGGGEKGRGRRGRGRGLRGVCVFCGTSGCARSADGDPAGALGKELVSGEVDLVQGGESGGLIGEVSEAVHRGGGHVIGIIPTSLMGKEITGETVGEVRAVAGMHQRKAEMARNSDAFIALPGGYGTLDELLEVIAWAQLGIHSKPVGLLNVDGYYDFLLAFIDKAVDDGFIKPSQRHIFVSAPDARELVQKLEVCIV

SEQ ID NO: 7479 - protein, 107 aa, Zea mays
  Clone ID: ZEAMA-23APR03-C16403_6.p
MFAIHNKVWSYGIYSLISSRFVQTVPVNPKPFLNNLTGKPVIVKLKWGMEYKGYLASVDSYMNLQLANTEEYIDGQFSGNLGEILIRCNNVMYLRGVPEDAEIEDAE

SEQ ID NO: 7480 - protein, 212 aa, Zea mays
  Clone ID: ZEAMA-23APR03-C16415_7.p
MDLSPNPESPGSGGDGGGGGGGAGGSSSGGASPSGGFGTPQTPSRYEAQKRRDWNTFGQYLRNHRPPLSLAQCSGAHVLEFLRYLDQFGKTKVHTPACPFFGHPNPPAPCPCPLRQAWGSLDALVGRLRAAYEENGGRPENNPFGARAVRLYLREVRDHQSRARGVSYEKKKKRKKAPPHPVPAAVISSSHDGNGHHYEHQMPPPPPPGAAA

SEQ ID NO: 7481 - protein, 316 aa, Zea mays
  Clone ID: ZEAMA-23APR03-C16430_3.p
MASLTLPPAPPNPRQDAIDLHKAFKGFGCDSTTVINILTHRDSVQRGLIQQEYRAMYHEELSHRISSELSGNHKKAMSLWILDPAGRDATVLREALNGDTMDLRAATEIICSRTPSQLQIMKQTYYARFGTYLEHDIAHHTSGDHQKLLLAYMGIPRYEGPEVDPTIVTHDAKDLYKAGEKRLGTDEKIFIRVFTERSWAHLASVSSAYHHMYDRKLEKVIKSETSGNFEFALLTILRCAENPAKYFAKLLRKAMKGLGTDDMTLIRVVVTRTEIDMQYIKAEYLKKYKKPLAEAINSETSGNYRTFLLSLVGHGH

SEQ ID NO: 7482 - protein, 362 aa, Zea mays
  unsure (1)..(362): unsure at all Xaa locations
  Clone ID: ZEAMA-23APR03-C1647_13.p
MGSTAADVAAVVDEEACMYAMQLASSSILPXKNAIXLGLLEVLQKEAGGGKAALXPEEVVARMPAAPSDPAAAAXLVDRMLRLLASYDVVRCQMEDRDGRYERRYSAAPVCKWLTPNEDGVSMAALALMNQDKVLMESWYYLKDAVLDGGIPFNKAYGMTAFEYHGTDARFNRVFNEGMKNHSVIITKKLLDFYTGFEGVSTLVDVGGGVGATLHAITSRHPHISGVNFDLPHVISEAPPFPGVRHVGGDMFASVPAGDAILMKWILHDWSDAHCATLLKNCYDALPENGKVIVVECVLPVNTEATPKAQGVFHVDMIMLAHNPGGKERYEREFRELAKGAGFSGFKATYIYANAWAIEFIK

SEQ ID NO: 7483 - protein, 706 aa, Zea mays
  Clone ID: ZEAMA-23APR03-C16551_3.p
MDGGEDRTFKANFTGEGVTMLQDRVKEKLRELMGDYSDDTLAEYVVVLLRNGRRKDEAAKELQVFLGDDNDAFVSWLWDHLSSNLHLYVHAKSASSKDDVKSTHSAARGLPVHSVTSSMQVNHEPEAETQKTVVTHKKRDWGHQKRDWGTIDRGQSEAVPLRSVVANVSHVDEKDFHKSHADEKAFHKSHSLRRTRSPDMHNHRKRSREADVQSTKRSSHPVVSAPRRLLQFAVRDAVRTVQPVTSSSESDSKRIRSVVSTLASDSTLDITHIRLQKINSDLRVPGATAALRAAAEAAGDALKDSFSRSVFSRLGRMPTINSTEQSPYHREQDLKGKEYENIDNIQAENQVEFDERNQHGGSDVYMRDQRTEEATGFIPNIDEYDQNSAVRSNGLGSRQSALPASGGKESLVLGYVRGASEIRSRRLIAQGPHAGSGPRPSEKTQNVSGNTNMQKLPIHVTGDAVAFDHQVPMEKVADARKSHVKTAQANDVSMMTDKSKDLIQPSSMLQAQKASGAAGSNTTGQPEGGPDSRTVFVSNVHFGSSKDALSRHFNKFGAVLKTHIVTDGVTGQSTGSAYIEFLHKESAEQALTLNGTSFMSRILKVVRKSSTEVTQLPVLPRASWGSPFASRLIRTAYPRPNYPGAIRGRLSLRGAARSLQWKRGVADSGDVGKPSPTAPGNQLVTPATRNFTYTRTEPKTNAGAMA

SEQ ID NO: 7484 - protein, 417 aa, Zea mays
  unsure (1)..(417): unsure at all Xaa locations
  Clone ID: ZEAMA-23APR03-C16562_1.p
MSSPSVASLRLPMLPASPPLSRRAIAGVTPSAAAPRALLLQPLAPKALAAYHQPALLLHQRRRHGPPPVAAVTASKPVLKDPKKYQEWDSMTAKFAGAANIPFLLLQLPQIVLNTRNLLAGNKTALFAVPWLGMLTGLLGNLSLLSYFAKKKETEAVIVQTLGVISTYAVLVQLAMAESMPVPQFVATSVVVAAGLILNFLNYFGWIPGTLLLLWEDFITVGGLAVLPQVMWSTFVPFIPNSVLPGIISGSLAVAAVAMARMGKLSNAGVKFVGSLSGWTATLLFMWMPVAQMWTNYLNPSNIKGLSAFSMLLAMLGNGLMIPRAVFIRDLMWFTGSAWASVLQGWGNLACIWSASMARIYSMERCHCLWQQLALVFLEGAVFWEVMNRRQPCFSCTLXAANCSRVGRSPAINHGSC

SEQ ID NO: 7485 - protein, 107 aa, Zea mays
  unsure (1)..(107): unsure at all Xaa locations
  Clone ID: ZEAMA-23APR03-C165_2.p
MGEAHLDECCHCQGCAGKYTLLRDEENPTVXIFERRLPCCGCGIGWSSFLLGFLCPLIWYFAATLYCCKYYNKDPRERPGLAASAVAALIFTVLALIALSVALIIYI

SEQ ID NO: 7486 - protein, 791 aa, Zea mays
  Clone ID: ZEAMA-23APR03-C1660_1.p
MATRWRRSLLWVAVVQFLTLCVAEHLVVEAYKKSYIVYLGSHAYGRDASAEEHARATQSHHHLLASILGGDDDHHHETARQSIFYSYTKSSINGFAAHLEESVAQQIAEHPEVVAVLESKMLKLHTTRSWDFMDLERDGHVLPGSIWNHARFGQDVIIASLDSGVWPESHSFQDDGGQVPARWKGSCQDTVKYGVACNRKLIGARFFNKDMLFSNPAVVNANWTRDTEGHGTHTLSTAAGGFVPRASLFGYATGTAKGGAPRARVAAYKVCWSGECAAADVLAGFESAIHDGADVISVSFGQDAPLADDVKSLFHEPVMLGSLHAAIHGVSVICSAGNSGPYDDTVVNAAPWVTTVAATTVDRDFPNVLTLGNSVRLRGTSLESTTLHSSMLYPMIDAARAARTTSNPYDAASCGLGTLDPAAIRGKIVVCRRGGGGGGDVSRVSKGMAVLEAGGAGMILANDRMDGDDIVADPHVLPATMITYSEAVSLYGYMESTSNPVANISPAKTEVGVKNSPSVAGFSSRGPSGTLPYVLKPDIAAPGVDILAAFTEYVGPTELASDKRRSEYAILSGTSMACPHVSGVIALLKAARPEWSPAAMRSAIMTTARTQDNTGAPMRDHDGKEANAFAYGAGNVHPNRAVDPGLVYDAGPDDYFTFLCAMGISAADMKRLSAGKFACPANSAKEAPAMEDLNYPSIVVPSLRGTQTVTRRLKNVGRPAKYLASWRAPVGITMEVKPRVLEFSKVGEEKEFKVTVTSQQDKLGMGYVFGRLVWTDGTHYVRSPVVVNALA

SEQ ID NO: 7487 - protein, 210 aa, Zea mays
  Clone ID: ZEAMA-23APR03-C16616_2.p
AGARGGMHCGEAWRRRLNPSEKARGEAADAAVGPRGPAPPPAQGAHRPRHASRINKQQPPLNPNPPSPLLCCRIPTHSHRLQQPTQRHQQRHQQERDRRSHDKGRRRRHEVLLPSAEDARRRCCRRHYQAHWWRLQEGGGAPPQEGRARHQRPPSPRSRRWQPPEAEAEQRERAGREFDMDTRYGPCLDVTRAQRWRRADEQPCLWEGRV

SEQ ID NO: 7488 - protein, 125 aa, Zea mays
  Clone ID: ZEAMA-23APR03-C16616_4.p
MTRGGGGDMKSFFRQQKTHAAAATTKPTGGVSKKAAAHHHKKAALATNVHPAPDHGAGSRQQGEAEAEQRERAGREFDMDTRYGPCLGVTRPQRWRRAAALGLAPPPALLALCADEQPCLWEGRV

SEQ ID NO: 7489 - protein, 287 aa, Zea mays
  Clone ID: ZEAMA-23APR03-C1665_15.p
MEGKEEDVRLGANKFSERHAIGTAAQGTDDKDYKEPPPAPLFEPGELKSWSFYRPGIAEFVATFLFLYISILTVMGVSKSTSKCATVGIQGIAWSFGGMILALVYCTAGISGHINPAVTFGLFLARKLSLTRAVFYIIMQCLGAICGRGVVKGFQQGLYMGNGGRRNVVAPGYTKGDGLGAEIVGTFILVYTVFSATDAKRRARDSHVPILAPLPIGFAVFLVHLATMGITGTGINPARSLGAAVIYNQHHAWADHWIFWVGPFIGAALAAIYHQVIIRAIPFKSRS

SEQ ID NO: 7490 - protein, 290 aa, Zea mays
  unsure (1)..(290): unsure at all Xaa locations
  Clone ID: ZEAMA-23APR03-C1665_42.p
MEGKEEDVRLGANKFSERQPIGTAAQGAADDKDYKEPPPAPLFEPGELKSWSFYRAGIAEFVATFLFLYITILTVMGVSKSTSKCATVGIQGIAWSFGGMIFALVYCTAGISGGHINPAVTFGLFLARKLSLTRXALFYIIMQCLGAICGAGVVKGFQQGLYMGNGGGANVVAPGYTKGDGLGAEIVGTFILVYTVFSATDAKRNARDSHVPILAPLPIGFAVFLVHLATIPITGTGINPARSLGAAIIYNRDHAWNDHWIFWVGPFIGAALAAIYHQVIIRAIPFKSRS

SEQ ID NO: 7491 - protein, 338 aa, Zea mays
  unsure (1)..(338): unsure at all Xaa locations
  Clone ID: ZEAMA-23APR03-C16664_2.p
MSGRVFVLAAAFGVLLAAAAVSSRPVLTPLGTSRPAAGDLSVYFHADSCPQLETIVRSSVDAXALQQNVRLTAGLLRLLFHDCFPQGCDASILLDNGERGLPPNVGLQQEAVQLVEDIRGKVHAACGPTVSCADITVLATRDAVSLSGGPSFTVPLGRLDSAAPASSNDVFTLPPPTATVDELLTAFGSKNLSDPADLVALSGAHTVGKARCSSFGDVAGPATDDVTRCVTATCSAPGSGDTLRDLDFLTPAVFDNLYFVELTLRKNKGVMLPSDQGLVSDPRTSWLVQGFADNHWWFFDQFRTSMIKMSQLRGPQGNVGEIRRNCFRPNTNGIAASA

SEQ ID NO: 7492 - protein, 47 aa, Zea mays
  Clone ID: ZEAMA-23APR03-C1672_19.p
YREPAADAAAGDAPRRARKEATMRAKWKKKRMRRLKRKRRKMRQRSK

SEQ ID NO: 7493 - protein, 263 aa, Zea mays
  unsure (1)..(263): unsure at all Xaa locations
  Clone ID: ZEAMA-23APR03-C1672_25.p
MAVGKNKRISKGKKGGKKKTVDPFSKKDWYDIKAPSVFSVRNIGKTLVSRTQGTRIASEGLKHRVFEVCLADLQGDEDQAYRKIRLRAEDVQGRNVLTNXFWGMNFTTDKLRSLVKKWQDINRSPCLMFKTTDNYMLRLFCIGFTKRRPNQXVKRTCYAQASQIRQIRRKMVEIMINQASTCDLKELVSKFIPEVIGKEIEKSTSSIFPLQNVFIRKVKILKAPKFDLGKLMEVHGDYKEDVGVKLERPVEGDEAVQEVAAAE

SEQ ID NO: 7494 - protein, 298 aa, Zea mays
  Clone ID: ZEAMA-23APR03-C167444_1.p
MAAAGGGREATTSGCGLKRRYAPHDQEEETMNQDQPSKEDRCGRIWSGIDLLKDVTENKHVLPTGLEGIDRLLGGGLRQGQLTEVTGPSSSGKTQVCLHSASHAPVKHMGVVMYLDTTNSFSPSRIATIIDGTNDLSDRKGFDLLSKERLKTVMQSIICESVFDIFGMFEVLHQLEVSLLNEKVIGDGRRICLLIIDSISSLLAPIIGGKYPQGRSMMISLAMILKKLAYEHNLAVLVTNHMVSAGNGAVKPALGESWKSVPHVRLMISREHSSNICTGTVLKHTLLASGRTAKFVLL

SEQ ID NO: 7495 - protein, 232 aa, Zea mays
  unsure (1)..(232): unsure at all Xaa locations
  Clone ID: ZEAMA-23APR03-C16750_2.p
MAAPLLRQWRSLAVLGALLGLHLIAAVAQSPPTTPTTPAAPTTPAAPTTPAAPTTPATPTTPAAPTTPAAPTTPAAPTTPAAPTTPIAPTTPXXTXXPXXPPAVLPPAVLPPAAAPPPTATPPAEAPASLPPXTTPPPVAEAPAELPPAEAPSKGKNKHKRRRKQHGKKEAPAEAPQPLSPPAPAAPSPADLEDVSGPAPSADVNASCRQHQHWASVVVQTAMAALLLSLAW

SEQ ID NO: 7496 - protein, 242 aa, Zea mays
  Clone ID: ZEAMA-23APR03-C16773_2.p
MCTLEQRGRVFVLTLTGDGEHRLGHALISSLRSAVASAAAGAAKAGPGAALVTVGEGRFFSNGLDIGWAGTSRARLGELVDALRPLVADLLALPMPTVAAVTGHASAGGCLLALCHDYRIMRGDRGVLYMSEVDIGLPLPPYFMAVLRAKITAANALRDVVLRGKKVRAAEGKDMGIVDAVYPSALETADQAFKFAEQLAARKWDGGVYASIRMSMYPEACRSVGIVEESDEEKRKHFASKL

SEQ ID NO: 7497 - protein, 335 aa, Zea mays
  unsure (1)..(335): unsure at all Xaa locations
  Clone ID: ZEAMA-23APR03-C16826_1.p
MAAFSSSNGVPPGFRFHPTDEELLLYYLKKKVGFEKFELEVIREVDLNKIEPWELQETCRIGSAPQNEWYFFSHKDRKYPTGSRTNRATTAGFWKATGRDKCIRTSYRKIGMRKTLVFYRGRAPHGQKTDWIMHEYRLEDADDDAQGXPSEDGWVVCRVFKKKCFFKIGGGEGSTTSSQGADAGGHLATMSPPLGGHHDLAYMHPHPYYHHAASYYSQMQTPGPHATAYSHHVQVQDLLTNHRPTDDDGAGTGYDFSGLHVEHQPGGGLDVGSSDGVATDDGGQLAGERRDQTTGTAADHQWQAMDGFSNGGSAEVQQMTGAQRGGEMDLWGYGR

SEQ ID NO: 7498 - protein, 181 aa, Zea mays
  Clone ID: ZEAMA-23APR03-C16889_6.p
MAGKGAKATAAKSADKDKGKKTGGPVSRSSRAAPQEKSAPKKDVYQLFAEKVRDNKQLESRWAIMQETRVEYFRGKDFNTFVKNHPEVREILGPDKDLEVEDIVNTLLTKNLVIRCDRVMKTVRPGKKKLSSWPAHLEIHNEQVFTENDGFFAWMFLKRRTLWQTIPSFQKHPALVALFLE

SEQ ID NO: 7499 - protein, 299 aa, Zea mays
  unsure (1)..(299): unsure at all Xaa locations
  Clone ID: ZEAMA-23APR03-C168951_1.p
MPLPPLLPRLYPTPPPLRAGDRGNAVPLSPGRRRPALLAVVRAKRKDEASFTDRILDYIEGGPKLRRWYGAPDLLPKDGAAEDEEDESQDIEESRDAVLVTNGDSEIGQMVILALILKSARTKALVKDKRTTEEAFGTYVECMVGDIGDKSFTKRALRGVRAIICPADDGFFSEPIDLKGVQHIVLLSQLAVYRNSGGLQAIMNSKLKTLAEKDEEVVLASGIPCTIIRTGSLQSTPGXREGIASKGRISKEDAATICVEALNSIPLKTHIFEVANGKEKVIDWKAWFEEQTKREEEIQ

SEQ ID NO: 7500 - protein, 276 aa, Zea mays
  unsure (1)..(276): unsure at all Xaa locations
  Clone ID: ZEAMA-23APR03-C168951_3.p
MPLPPLLPRLYPTPPPLRAGDRGNAVPLSPGRRRPALLAVVRAKRKDEASFTDRILDYIEGGPKLRRWYGAPDLLPKDGAAEDEEDESQGTXEKALCKFELLGGCVFLFVGRSGXQIDIEESRDAVLVTNGDSEIGQMVILALILKRARTKALVKDKRTTEEAFGTYVECMVGDIGDKSFTKRALRGVRAIICPADDGFFSEPIDLKGVQHIVLLSQLAVYRNSGGLQAIMNSKLKTLAEKDEEVVLASGIPCTIIRTGSLQSTPGGERGHSKQGK

SEQ ID NO: 7501 - protein, 289 aa, Zea mays
  unsure (1)..(289): unsure at all Xaa locations
  Clone ID: ZEAMA-23APR03-C169422_1.p
MLFSRSPAATNQPLAPSRRTLLLSPCPRAGATPAPVADAALLPGGLRAESLPRHVAVVMDGNSRWARARGLPSAAGHEAGRRALEEVVRLSRAWGVRTLTAFAFSHENWSRPKVEVEFLMGQFEREVRESLSEFLREGIRLRVIGDSSRLPVSLQRTARXAEEATRNNSQLDLALAISYSGRRDIVQACRXVAQKKSDNLLEPEDIDESLFAGELETSHANANGNELPYPDLVIRTSGELRLSNFLLWQSAYAELFFTDTLWPDFGEADYLQALVSFQSRDRRFGVRKL

SEQ ID NO: 7502 - protein, 267 aa, Zea mays
  Clone ID: ZEAMA-23APR03-C16987_1.p
MADHFALMTGRLLTESTLQSAIQEAFADAVASTAAGYDRTDPSAVPEDVQPGMGVGKGKGKSGVMVECRICQEEGDEAYMETPCCCKGSLKYAHHRCVQRWCNEKGDTICEICLQQFEPNYTAPLFRHGRSLINSRGAGEVRENVGASHGQTSDQADGASSVDSQNLHLKGVVYCRVVAIALMILLVLRDAILLMLRDDEMCSVELITLLLFRTAGIVIPVYIILVSVTALLHWCNQRRIFRIQVVHETTVSEPRGAGGLQHIINIR

SEQ ID NO: 7503 - protein, 372 aa, Zea mays
  Clone ID: ZEAMA-23APR03-C17024_1.p
MSVADGDDDEAFLIALDAAEAAALDSSKRRRLSTTSTSPTPSTSPSPAATEGPYLAALKGSHSSTWKQQLQDLGYAHKRPDGSKPLAPGTGASGSCFKCGDPGHWARECPQSVPNTGGGGQIGGGGDGGGGGGGGYVNAGVEVEDKACPCGVGSCLVLTSNTPKNPGRKFYKCPMRDGGCNFFEWCDAPSPAPANARNNMVVHSETSATDMLCPCSAGTCLILTTKTGKNVGRQFFCCPLNQGGGGGSCGFFKWCDELQPRVGAPLQASAQYQADSMPSIQNPSQRSSSSCFKCGQENHWARDCPNQPSDPYPDKGGRPVAPAGSPGACYNCGRSGHWSRDCPTSNSGGGGGTGTSRARSSSALSSWNSQRY

SEQ ID NO: 7504 - protein, 178 aa, Zea mays
  Clone ID: ZEAMA-23APR03-C17046_1.p
MGICVSCDAADEGAATARVVLPSGELREYAPPATAGTALQAAGGEGPWLLCDADGMAFEGPVAVAAVAPGEELQAGQIYFVLPAEMRRRRLTREEVAALAVRASSALVKAAQPSSPCRRLRRGAVAPLVFPVPEEEYAAADAVSPRRAAKPHQKRRVACRGGRASRFSPDLTAIPESE

SEQ ID NO: 7505 - protein, 153 aa, Zea mays
  Clone ID: ZEAMA-23APR03-C17066_4.p
TTPVSVICLSWQSLSTSVGDGAKWLVNKLKGKMQKPLADLLKEHNLPVGLFPREATNYEFVPETRRLTVYIPSPCEVGYRDGSELRFDATVSGTLGEGRLTEVEGIKTKVLVWARVTAVKADAAKVHFTAGIKRSRSRDAYEVVRGGITVDEF

SEQ ID NO: 7506 - protein, 158 aa, Zea mays
  Clone ID: ZEAMA-23APR03-C17113_1.p
MGFFRRIAGFFGVSRDDADHSDSPSSAGVAAELPRDRAAAAHGARRGFSVQVPVPVPVERHGPGPGPVLLPCPQGDGGVQGFRWYTRQLSMDEDGDVADEFLDEIIPESSVNNAKSPVGRFQVKYNTKRTALALRKHVIAVDGEIRHSLEHQGQLRWV

SEQ ID NO: 7507 - protein, 653 aa, Zea mays
  Clone ID: ZEAMA-23APR03-C17121_1.p
MSARLRVADVRAELQRRGLDVSGTKPALVRRLDAAICEAEKAVVAAAPTSVANGYDVAVDGKRNCGNNKRKRSGDGGEEGNGDTCTDVTKLEGMSYRELQGLAKARGVAANGGKKDVIQRLLSATAGPAAVADGGPLGAKEVIKGGDEEVEVKKEKMVTATKKGAAVLDQHIPDHIKVNYHVLQVGDEIYDATLNQTNVGDNNNKFYIIQVLESDAGGSFMVYNRWGRVGVRGQDKLHGPSPTRDQAIYEFEGKFHNKTNNHWSDRKNFKCYAKKYTWLEMDYGETEKEIEKGSITDQIKETKLETRIAQFISLICNISMMKQRMVEIGYNAEKLPLGKLRKATILKGYHVLKRISDVISKADRRHLEQLTGEFYTVIPHDFGFRKMREFIIDTPQKLKAKLEMVEALGEIEIATKLLEDDSSDQDDPLYARYKQLHCDFTPLEADSDEYSMIKSYLRNTHGKTHSGYTVDIVQIFKVSRHGETERFQKFASTRNRMLLWHGSRLSNWAGILSQGLRIAPPEAPVTGYMFGKGVYFADMFSKSANYCYASEACRSGVLLLCEVALGDMNELLNADYDANNLPKGKLSTKGVGQTAPNMVESKVADDGVVVPLGEPKQEPSKRGGLLYNEYIVYNVDQIRMRYVLHVNFNFKRR

SEQ ID NO: 7508 - protein, 510 aa, Zea mays
  Clone ID: ZEAMA-23APR03-C17151_2.p
MGDFNVALVIVAAVVSVLVLLVSVYLLVNYQHPDDVNQAYFPKLVVVLGLTVAVLSILMLPADVANRQACRKAVYNGACSLTLPMRTLWLVVYIVDAVLVFLVIPFAMFYYEGDQDKSVGKRLRTALIWVVASAVVCGLVLGILYGLVGKVDFTVRHLSSSVQTFPNSFSGFSSGQPCISPLTRQCAASTAPANSQTTWTMRATFPEYVVALTTIVGSVLFTIFGGVGIACLPLGLIFSFVRRPKAVITRSQYIKEATELGKKARELKKAAEALHQEERSGNKGRKWRKNVKAVEKELLLLEDDMKALEEMYPQGEQAEATWAFTVLGYIGKLIFGVVGLIVSIAWVAHIVIYLLIDPPLSSFLNEVFIKLDGVWGLLGTAAFAFFCFYLLIAVIAGEMMLGLKLVFITIHPMKWGGTLMNSFLFNVGLILLCSISVIQFCATAFAYYAQATAAQEIFGHTLQSLRGIKYLYKYNVFQYGFVALAILTLFYYAIFGWRKKKPTGRFQLSK

SEQ ID NO: 7509 - protein, 200 aa, Zea mays
  Clone ID: ZEAMA-23APR03-C17256_2.p
MEAPAAKRVLRVASISGSIRKASWHSGLIRAAAEVCEDCIPGLRVDHLDVADLPMLNTDLETNGGTGFPPAVEAFRAKVRHADCFLFASPEYNYSITSPLKNALDWASRGVNCWADKPAAIVSAGGNFGGGRSSYHLRQVGVFLDIHFINKPELFVFAFFEPAKFFDSDGNLIDADTRERLKQVLLSLEAFTRRLQNNKD

SEQ ID NO: 7510 - protein, 412 aa, Zea mays
  Clone ID: ZEAMA-23APR03-C17332_1.p
MGPTAGSGEDKAMLELRKKHRVDLERLTITSRPFKTLSFFVLAIAQNLERTCSSVLKKGYQLKTAMLLVVATWVLLMFTDGLNEKHLQELLWYVRFGLWWIILGVASSIGLGSGLHTFIMYLAPHVALFTIKAVQCGRVDLKSAPYDTILLERRPSWLEKDCLQFGPPIYHETIPFSKILQEVYLEAILWGIGTALGELPPYFLSRTASMSGRIIDELEDLDASISEGFLSSALRQAKRWLMSHSQYLSFTLILLLASVPNPLFDLAGILCGQFNIPFWKFFLATLIGKAIVKVCIQTTLVITLCNNQLLDLVEKRLIWAFSNVPGVASVLPSFVSKLKMAKNKFLSAHVAASASTSVKKWNLSFSLVWNTLVWLMVANFIIQIVTSTAQGYLRTQQEREISKKLETELSAS

SEQ ID NO: 7511 - protein, 360 aa, Zea mays
  Clone ID: ZEAMA-23APR03-C1745_8.p
RRRAGGSGVAALPPLHSFDTPLYRFNVPDLRVGTLDSLLALSDDLVKSNVFVEGVSHKIRRQIEDLERAGGVDSGALTVDGVPVDTYLTRFVWDEGKYPTMSSLKEIVGSIQSQVAKIEDDMKVRAAEYNNVRSQLTAINRKQSGSLAVRDLSNLVKPEDMVCSEHLVTLLAIVPKYSQKDWLSSYESLDTFVVPRSSKQLYEDNEYALYTITLFAKVVDNFKVRAREKGFQIRDFEYSPEAQESRKQEMEKLLLEQEVMRTSLLQWCYASYSEVFSSWMHFCAVRIFVESILRYGLPPSFLSAVLAPSTKGEKKVRSILEDLCGNVHSIYWKGEDDVAVAGLGGESEVHPYVSFTINFV

SEQ ID NO: 7512 - protein, 300 aa, Zea mays
  Clone ID: ZEAMA-23APR03-C17498_5.p
MGALDLHLDFASAQHGQAKLKEYAKSSLLSDGNYNTDKINGSNPDDYEKFEKGIMHYGCPHYRRRCRIRAPCCNEIFDCRHCHNETKNSIKIDKMKRHELPRHEVQQVVCSLCGTEQEVRQVCINCGVCMGKYFCGLCKLFDDDVSKQQYHCNGCGICRIGGRENFFHCSKCGCCYSIALKNSHACVEGAMHHDCPICFEYLFDSTNDVSVLPCGHTIHVKCLKEMEEHCQFACPLCSKSVCDMSKAWERLDMELATLSDSCDHKMVRILCNDCGAISDVQFHLIAHKCQNCKSYNTRQI

SEQ ID NO: 7513 - protein, 219 aa, Zea mays
  Clone ID: ZEAMA-23APR03-C175576_1.p
MTPLPAVPWPEMFPTAGITGVARRPEKGRPPRTLRRHRANKPRGSGVRTAGRTCRRVEAAALVSTRRRPPVPQPDRPDELERVESAGGRVINWMGYRVLGVLATSRSIGDYYMKPFISAEPEVTVTERTHRDEFIILASDGLWDVMSNEVACRVAKSCLCGRAASKCPDTIRGSSASDAAAVLVEFAMSRGSTDNISVVVVELKRLKRWKGGSRQNGRT

SEQ ID NO: 7514 - protein, 410 aa, Zea mays
  Clone ID: ZEAMA-23APR03-C1757_1.p
WPPPARARLSVCQRCCGEITGEGGFAFVASADKAGAGDLRAAEAAREMAWEQLHSGPWSEVGTAWRDAYALACLNVARLRTHAASGGDSDRSAALRALDMGLIMGGNLLRADLEAALARISAEACGGSEGGEGVVDKEDQRWREALDRNRDIADALKILPANSLSCKKVERRSCISLEEFICNYFLRDTPVIISGTIEHWPARTKWKDIEYLKKVAGDRTVPVEVGKNYVCSEWKQELITFSQFLDRMSSTVCPSNLTYLAQHPLFEQIKELSEDIIVPEYCYAGGGELQSLNAWFGPEGTVTPLHHDPHHNILAQVLGRKYIRLYPAFIAEDLYPHTETMLSNTSQVDVDNIDLKEFPRVENLEFIDCILEEGDLLYIPPKWWHYVRSLSTSFSVSFWWRAAVQPSGGS

SEQ ID NO: 7515 - protein, 222 aa, Zea mays
  Clone ID: ZEAMA-23APR03-C17581_3.p
MTMKLDAPARQKSQDAEQNGRTAAAGVLGIDEPWSQPKLRLTGHAQADADALVPPLNFAMVDDGIFRSGLPDAGSFRFLLSLNLRSVVYLCPEPYPEENARFLQQNGIQLHQFGIEGSKSGSTVPDAMVVQEPFVYIPEETIREALKVILDARNQPVLIHCKRGKHRTGCVVGCLRKLQKWCLSSVFDEYLHFAAAKARSTDQRFMELFDASSLTHLAASQY

SEQ ID NO: 7516 - protein, 190 aa, Zea mays
  Clone ID: ZEAMA-23APR03-C17597_4.p
MGKYMRKAKASSEVVIMDVAAAPLGVRTRARALALQRLQEQQTQWEEGAGGEYLELRNRRLEKLPPPPATTRRSGGRKAAAEAAATKEAEASYGENMLELEAMERITRETTPCSLINTQMTSTPGSTRSSHSCHRRVNAPPVHAVPSSREMNEYFAAEQRRQQQDFIDKYNFDPANDCPLPGRFEWVKLD

SEQ ID NO: 7517 - protein, 362 aa, Zea mays
  Clone ID: ZEAMA-23APR03-C17620_2.p
MAAPSHVLPFLSPAGGCAASSARAHSGYRAGLLRCSAAAGQAGFFTRLGRLIKEKAKSDVEKLFSGFSKTRENLSVVDELLTYWNLADTDRVLDDLEEALLVSDFGPKISFRIVDTLREEIRDGKLKSCAEIKAALKRCILELLTSKGGNSELNLGFRKPAVIMIVGVNGGGKTTSLGKLAYRFKNEGVKVLMAAGDTFRAAARDQLEVWAERTGSEIVIDNDKKAQPPAVLSQAVKRGKREGFDVVLCDTSGRLHTNYGLMEELVSCKKVLAKALPGAPNEILLVLDGTTGLNMLQQAREFNDVVGVTGFILTKLDGTARGGCVVSVVDELGIPVKFIGVGEGMEDLQPFDAEAFVEAIFP

SEQ ID NO: 7518 - protein, 285 aa, Zea mays
  Clone ID: ZEAMA-23APR03-C17639_1.p
MAAAPAPLPAPVADWWERVNGSPAWQDGIFWALAVLYGAIATASFIQVARIQCRVPEYGWTTQKVFQFLNFVVNGARCSIFAFRRQVQQVNPPIFQHVILDLPGLAFFTTYALLALFWAEILYQARGIMTDRLRSGFYIINCVVYALQGFLWLWLWWNPNHSMLVTSKLFIAGLSFFTALGFLIYGGRLFIMLKYFPIESKGRQQKLREVGRVATICFCCFSARCIMMCFNAFDEEADLDVLDHPVLNLFYYLLVEILPSSLVLYILRRIPAKLRLSQYHPVSSS

SEQ ID NO: 7519 - protein, 348 aa, Zea mays
  Clone ID: ZEAMA-23APR03-C17646_1.p
MGSLPSRPSPASAECAPRRPATVASSELAPLFSPRRRPLHHFLAPLHVAEGGAFARALLRARGRLFFTRGRESGLVARNTAQTLASLGLARAGFLAPVAALHGDIGALFPGDVLVLLSKSGASDELLALAPCARAKGAYLVSLTSAASGDDCPLAAACDLNVHLPLQGEVCPFGLAPVTSTAIQMVFGDTVIAAIMEARRLSRDQYASNHPAGKIGKTLIFKVKDVMKKQNELPLCKEGDMIMDQLTELTSKGCGCLLVVDEEHHLIGTFTDGDLRRTLKASGPAIFSLTVGEMCNRNPRTITAEAMAVEAMEKMEAPPSPVQFLPVVNENNVVCGIITLHGLVSAGL

SEQ ID NO: 7520 - protein, 523 aa, Zea mays
  Clone ID: ZEAMA-23APR03-C1764_3.p
MPPHGGMLAYAALALAALRLLLSYKSALYALRRLWRCADEWAQAYQYHEVPRFAGAQCGCDGAENPLFRKVAAYVAALPSLEDADAACVVSSASRTNGGLSLQLGPGHTARDTYLGARLAWTSAGGERLVLRVRRHDRSRVLRPYLQHVESVAEEMEQRRRELRLFANTAVDATTGAPRWASAPFTHPATLDAVAMDPDLKARVRADLESFLKGRAYYHRLGRVWRRSYLLYGPPGTGKSTFAAAMARFLGYDVYDVDLSRADAAGDDLRALLLHTTPRSLVLVEDLDRYLQGGGGDAEARAARVLSFMDGIASCCGEERVMVFTMRGGKDAVDAAVVRPGRLDVHIQFTLCDFEAFKALASNYLGLKDHKLYPQVEEGFHAAGARLSPAELGEIMLANRASPSRALRSVITKLQRVASGGAAPPRNPAHRRNTSWSGAWTGQQWEDQAQPARASAVSVEVDETAAGAPATCGGVFGKEAPMREFKKLYGLIKVRSRREGAGAVPLEGDAHGPPTPGNHDRER

SEQ ID NO: 7521 - protein, 387 aa, Zea mays
  Clone ID: ZEAMA-23APR03-C17683_1.p
MESAVLACQAPTAAAAAAPGAGGDRGAEGVVMLRRSGLAACLTCPLCGRLLRDAATITECLHTFCRKCISEEFVNKEVCCCPVCSIDLGCAPLEKLRIDHSLQYVRSKVFPSKKRKVEDPEVTSPITSPIKTKVRSLSSLTKHAPQMSMQKCLRKRRTKASCLQNLPLHSTLRGSSNITKKSGGWRPLGCHFRAAKKKRSLRPKSDDIKTAGKRTDDPVDVTLASQAKTRKQITRRGNLEKRTGTKKVLILKGKQKNTKTKNTPNKRRLPALWFYLLAAFDQKGHPPLPQIPSKFLRIKDVNLPASFIQKYLAQKLNLSSETEVEIFCGGRPVSPGITLHDLADHWIGKRSKGRVRSSVGTPAAEFVLKVFYARSGAPLPKTESNQD

SEQ ID NO: 7522 - protein, 287 aa, Zea mays
  Clone ID: ZEAMA-23APR03-C17691_2.p
SIQVRPLGSSRLEDEEIAASGVKLDACVLCKIFQKSGPGPKIGAQYGAPFNEEDWNDASNVECSPCVPSVAPCAPESSRGGLNSAGQRLAVSYDVKVSLGSSAEGINRPAVNGVHPVRPSPDAPNDCIHIQLLAEVMRCSSTSMHVLRTAGDDGLLADSTADYSSDNRISLDAIETIFCEVDELGPQAMVNNTNHCDSCGEYLIHPTMVARGAEQYLELNDLSFSLTDGPDSCGVLFSNGVSVEQLPDLELRFEQFSPDHISNTAIASTSTTVGSSASVPLLEDHRT

SEQ ID NO: 7523 - protein, 115 aa, Zea mays
  Clone ID: ZEAMA-23APR03-C17698_2.p
MKLVRFLMKLNNETVTIELKNGTVVHGTITGVDISMNTHLKTVKLTLKGKNPVTLDHLSVRGNNIRYYILPDSLNLETLLVEETPRVKPKKPTTGKPLGRGRGRGRGRGRGRGPR

SEQ ID NO: 7524 - protein, 177 aa, Zea mays
  Clone ID: ZEAMA-23APR03-C176_4.p
MVKSYGLDLRFKFDLYSLAGKESASVYTSWYLNDVDYYGGFEQDELDELFEAMQSNYKAWCLGFAPLCVGGDMESVAVQEFSRTLFNIRPDIALNVAQTIFQSDVRSLLPHVSVPCHIVQSTKDLAVPVVVSEYLHRHLGGDSIVEVMPSEGHLPQLSSPDIVTPVLLRHIQHDIAV

SEQ ID NO: 7525 - protein, 260 aa, Zea mays
  Clone ID: ZEAMA-23APR03-C17706_4.p
MASSVPAPSGSVITVASSSSSAAAAAVCGTGSPCAACKFLRRKCQPDCVFAPYFPPDNPQKFVHVHRVFGASNVTKLLNELHPFQREDAVNSLAYEADMRLRDPVYGCVGVISILQHNLRQLQQDLARAKYELSKYQAAAAASASTAPTGPQAMAEFIGNAMPNGAHNFINIGHSAALGSLGGSASVFGQEQFGNAQMLSRSYDGGEPIARLGINGGGYEFGYSTAMGGSGAVSGLGTLGISPFLKSGTAGGDEKPNGGQ

SEQ ID NO: 7526 - protein, 150 aa, Zea mays
  unsure (1)..(150): unsure at all Xaa locations
  Clone ID: ZEAMA-23APR03-C1772_14.p
MDVSGAGGKAKKGAAGRKAGXPTKKSVSRSSRAGLQFPVSRVGRYLKKGRYAQRVGTGAPVYLAAVLEYLAAEVLELAGNAARDNKKTRIIPRHVLLAIRNDEELGKLLAGVTIAHGGVLPNIHTVLLPKKVAEKAAKEPKKAAKSPKKA

SEQ ID NO: 7527 - protein, 537 aa, Zea mays
  Clone ID: ZEAMA-23APR03-C1776_1.p
MASLLRLPSLLSPSKPLLRRRLPAARLAASAASRGQASATAGAAAPAAAETRGGDREGQVTPRSADFNAWYTDVIAAAELADYGPVRGTMVIRPYGYAIWEAIQDYLNVKFKETGHSNMYFPQFIPYSFIEKEASHVEGFSPELALVTIGGGKELEEKLVVRPTSETIVNHMFTKWIQSYRDLPLMINQWANVTRWEMRTKPFIRTLEFLWQEGHTAHATLEEAEKEAMQMIDVYTKFAFEHAAIPVIPGRKSRVETFAGANRTYTIEAMMGDKKALQAGTSHNLGQNFSRAFGTQFMDENGQIEHVWQTSWAISTRFVGGIIMTHGDDAGLMLPPRIAPIQVIIVPIWKKGDEKAVVVEAVDSVQKILKEAGIRVKVDDSELRTPGWKFNHYEMKGVPVRIEIGPRDVTNKSVVVSRRDVPGKQGKEFGVSMEPSILVNHIKGRLDDIQASLLQKAITFRDSNIVDVSSYGELKEAISEGKWARGPWSASDADELKVKEETSATIRCYPFEQPEGTKKCFMTGNPAEEVAIFAKSY

SEQ ID NO: 7528 - protein, 253 aa, Zea mays
  Clone ID: ZEAMA-23APR03-C1777_1.p
KCYVVLCSLQNRDKPINVNIGTTVKGAVDDLDLVIKTLEENGFKDRFYIHCDGALFGLMIPFVKKAPQVTFKKPIGSVSVSGHKFVGCPMPCGVQITRLEHINALSSNVEYLASRDATIMGSRNGHAPIFLWYTLNRKGYRGFQKEVQKCLRNAHYLKDRLKEAGIGAMLNELSSTVVFERPKDEEFVRRWQLACEGNIAHVVVMPSVNIDKLDYFLNELVDKRATWYQDGISQPPCIARDVGVENCLCGLHK

SEQ ID NO: 7529 - protein, 495 aa, Zea mays
  unsure (1)..(495): unsure at all Xaa locations
  Clone ID: ZEAMA-23APR03-C1777_4.p
MVGSVGNGLADLGARAVSMNGAGKALRPAGAAAAAAAAETLPMELDPSEALVAAAVEAKGEEAANGRREFVMGRNVHTSCFAVKEPDADDEETGEREATMASVLALYRRSLVERTKHHLGYPYNLDFDYGALTQLQHFSINNLGDPFIESNYGVHSRQFEVGVLDWFARLWELEKDEYWGYITNCGTEGNLHGILVGREVFPDGILYASRESHYSVFKAARMYRMDCVKVDTLMSGEIDCADFQRKLLQNRDKPAIINVNIGTTVKGAVDDLDLVIKTLEENGFKNRFYIHCDGALFGLMIPFVKKAPQVTFKKPIGSVSVSGHKFVGCPMPCGVQITRLEHINALSSNVEYLASRDATIMGSRNGHAPIFLWYTLNRKGYRGFQKEVQKCLRNAHYLKDRLKEAGIGAMLNELSSTVVFERPKDEEFVRRWXQLACEGNIAHVVVMPSVNIDKLDYFLNELVDKRATWYQDGISQPPCIARDVGVENCLCGLHK

SEQ ID NO: 7530 - protein, 140 aa, Zea mays
  unsure (1)..(140): unsure at all Xaa locations
  Clone ID: ZEAMA-23APR03-C17841_1.p
MDGPRGLAPGRGRGRGEGRTVPPEWIGGSGSGQGAVPDGSWSYSWGWTSGPEGGWGYGHGSAQPPXGAADGFAYGGSGGGGSGRGGIEFSFGGLSGGFGWGAGGGPFGVGGGHGSWSARGGGFSGGGRQRPPRGRGRGSN

SEQ ID NO: 7531 - protein, 91 aa, Zea mays
  Clone ID: ZEAMA-23APR03-C18007_3.p
MFSRRIEIGKDRDLSKKFWSTKDPGQQPFSFSIGQGSVIKGWDEGVMTMQVGEVARIQCTPDYAYGAGGFPAWGIQPNSVLVFEIEVLSAQ

SEQ ID NO: 7532 - protein, 256 aa, Zea mays
  Clone ID: ZEAMA-23APR03-C18037_1.p
MGRGKVELKKIENPTNRQVTFSKRRMGLFKKANELAILCDVQIGVIIFSGSGRMYEYSSPPWRIASVFDRYLKAPSTRFEEMDIQQKIVQEMTRMKDERNRLRMIMAQYMAEDLASFSAQDLSNLEQQIEFSLYKVRLRKQELLDQQLLEIHQREMHMPAEQGGYLCLMNPAAAIASGQHQQAGEMVGINPRPFPWWDVGASGSGSGSQSQQQLLHGRDAAESSMTALGLSPQLHGYRLQPRQPNLQQDADIHGWL

SEQ ID NO: 7533 - protein, 269 aa, Zea mays
  unsure (1)..(269): unsure at all Xaa locations
  Clone ID: ZEAMA-23APR03-C1807_1.p
MLNMMTDLSCGPSSKVKGGEAAAPTGSGGDRQGQGGKVEKRIENTTNRQVTFCKHRQAPQKHAHEXHGLPKQAYAASALFDAAGPPLLFTNRCSLYEYANNSVKSTIARYTKANSDSSNTGXTVAEVNAQYYQQESSKLRQMIHSLQNANTRNIVGDSIHTMGLRDLKQMEGKLEKAIIKIRARKNELLYAEVDYMQKREMDLQTDNMYLRSKIAESNETGQPAMHMTMGAPPTSEYDHMAPFDSRNFLQVSMPQHYSHQLQPTTLQLG

SEQ ID NO: 7534 - protein, 301 aa, Zea mays
  unsure (1)..(301): unsure at all Xaa locations
  Clone ID: ZEAMA-23APR03-C1807_2.p
LTSSFSSLSGSLPEERHCHTTTPPMLNMMTDLSCGPSSKAKGGQPAATTGSGGDRQGRGKIEIKRIENTTNRQVTFCKRRNGLLKKAYELSVLCDAEVALVVFSSRGRLYEYANNSVKSTIERYKKANSDTSNSGTVAEVNAQHYQQESSKLRQAIDSLQNANRTIVGDSIHTMGLRELKQMEGKLEKAINKIRARKNELLYAEVEYMQKREMDLQTDNMYLRSKIAENNETGQPAMNMIGVPSTSEYDHMAPFVDSRNFLQVNMQQQPQHYSHXAATNDPPTRMMKLRIFGQQSMHASTQ

SEQ ID NO: 7535 - protein, 437 aa, Zea mays
  Clone ID: ZEAMA-23APR03-C182482_1.p
MASWPAASRRRSSGGMKSAELSGSGASYGYGRTSSSPDACGYGRQLSAYSARSSQVSRSGSFSAAAQRVAGAFTGCFVPRRQVKAGEEEEEEEKKSKRSMDSGSYHGWNEANLSAAAGSWQEGRALTIADVSKATSNFSEKNVIRQGRSSTMYRGKLRDGSQIAVKCVTKLNDQSPTAELWRELEKIQHRNLARLFGFFERAADSLVVVEYVGNGSLREHLDESCGNGLELAQRLNIAIDVAQAITYLHEYKERPIIHGGIRSSGVLLTDALTAKVAGFGLAGTAASGSGSGSDATPARSAAGYVDPEYLSTYQLTDKSDVYAFGVLLVELATGRPPVERTRGGEARLTTKWALQRCRAGEAVVAMDPRMRRSPASVAAVERALALAAQSVAAARDERPSMRRCSELLWTIRRDYHRQEEPRCGAVAEERSDEWVIR

SEQ ID NO: 7536 - protein, 110 aa, Zea mays
  unsure (1)..(110): unsure at all Xaa locations
  Clone ID: ZEAMA-23APR03-C18297_2.p
MAAWSTCSGLPSDPLTIASKMATTRSASLLALLLLVSATAAAAGTSKGRAGXAACQDLATRGQCAASGGCRWCRSEALDDMCFEAIEAWRLPXQVFSCDPPSGAAHARFN

SEQ ID NO: 7537 - protein, 204 aa, Zea mays
  unsure (1)..(204): unsure at all Xaa locations
  Clone ID: ZEAMA-23APR03-C1834_34.p
MGAYKYVSELWRRKQSDVMRFVQRVRCWEYRQQPAIVRLTRPTRPDKXRRLGYKAKQGYVVYRVRVRRGGRKRPVPKGIVYGKPKHQGITQLKFQRNKRSVAEERAGRKLGGLRVLNSYWVNEDSTYKYFEIILVDVAHTTIRNDPRINWLCNPVHKHRELRGLTSAGKKFRGLRGKGHTHHKNRPSRRATWKRNQTLSLRRYR

SEQ ID NO: 7538 - protein, 137 aa, Zea mays
  Clone ID: ZEAMA-23APR03-C1834_52.p
MLLLVTRSVPDATAHRPAALVVQYHPAEPRQLALDAHQHPPLPYRPQRSAAGQGSGQLPPLHQSPRPWPPEPPPPPPSALPPPRRRRRLPRSRTRSHHPPRRQPYGRRRGPAPTGCCRRRRRRASPSREPRTGRGPW

SEQ ID NO: 7539 - protein, 257 aa, Zea mays
  Clone ID: ZEAMA-23APR03-C183_2.p
MDGGAGFPGTQPVSRSPEDVFRDYRARQAGLIRALTTDVEKFYVMCDPEKENLCLYGLPNETWEINLPAEEVPPELPEPALGINFARDGMDEKDWLSLVAVHSDSWLMSVAFYFGARFGFDKESRKRLFTMINNLPSIYEVVTGTAKKEPKEKTPKSNIKTNKSGSKPSRHTEPNSRVPKMPPPKDEESEEEEGEPQEDQESALCGACGLGYDDFWICCDLCETWFHGKCVKITPAKADHIKQYKCPSCTGSKRAKV

SEQ ID NO: 7540 - protein, 342 aa, Zea mays
  Clone ID: ZEAMA-23APR03-C184141_1.p
MEGEGYFTNLLQDGLHNEIDTEIQQTMPINDSNPSSKANQKHKGKNFTEDEDRLLISAWLNVSMDSTQGTNQTRDTFWKRIYLYYEANKGDLGRNISERTQTSLLHRWGTIQEAVSKFCGCITSIDNRNQSGMTIHDRVEQAEILFKEQDHPKHRSFTFRHCWHVLRNQPKWLDKLRQLAEVKASNKKQKTTKNSSPGIVDLTTQDGHDKDPQEIVNSSIDAPKRPPGKKKAKEALRRGGNDACTEALELLWAKKREDEVAKELKREERYAMSYALDKERLELDKERHVLEKERLENEANNIYLKTIAEEQKIMLLDLNSMTELQREYYTSLQAEIVARRRN

SEQ ID NO: 7541 - protein, 618 aa, Zea mays
  Clone ID: ZEAMA-23APR03-C1841_3.p
GFPVRVIIPGCIGGRMVKWLKRIIVTPAESDNYYHFKDNRVLPSHVDAELANAEAWWYKPEYIINELNINSVITTPCHDEILPINAFTTQRPYTLKGYAYSGGGKKVTRVEVTLDGGETWLVCTDHPEKPTKYGKYWCWCFWSLEVEVLDLLSAKEIAVRAWDESLNTQPEKLIWNVMGMMNNCWFRVKTNVCKPHKGEIGIVFDHPTLPGNESGGWMAKEKHLETAEAAAPGLKRSTSTPFMNTTDVGKEFTMSEVRKHASQESAWIVVHGHVYDCTKFLKDHPGGADSILINAGTDCTEEFDAIHSDKAKALLDTYRIGELITTGTGYSSDNSVHGGSVLSHLAPIRRAVRAPALSNPREKIHCRLVGKKELSRDVRLFRFSLPSPDQVLGLPIGKHIFVCASIEGKLCMRAYTPTSMVDEIGHFDLLVKVYFKNEHPKFPNGGLMTQYLDSLPVGGYIDVKGPLGHVEYTGRGSFVINGKQRHASRLAMICGGSGITPMYQIIQAVLRDQPEDHTEMHLVYANRTEDDILLRDELDRWAAEYPYRLKVWYVIDQVKEGWKYSVGFVTEAVLREHVPEGGDDTLALACGPPPMIQFAISPNLEKMKYDMANSFVVF

SEQ ID NO: 7542 - protein, 199 aa, Zea mays
  Clone ID: ZEAMA-23APR03-C184503_1.p
SVRHRIPFHSIPSRQPSMESSSHITGGDDDAGGEGCNSCESGWTMYLASPMHMHGHDDDDDAGGSANQGSSVDDGYGYMISGGGNKKQDYDDDDGDGDSLASDASTGPAKAANKSPSPPPEHKHGKEDDDRGHRGGGGGGKEETKLATSSRKKAAAAGNGKLMDKAAAAAAGGGEGNSSRRGHGKGGGGGSSRRSFFLW

SEQ ID NO: 7543 - protein, 130 aa, Zea mays
  unsure (1)..(130): unsure at all Xaa locations
  Clone ID: ZEAMA-23APR03-C1847_14.p
MASIAGSSALSFARPVKAINTNSLAFSPARKGNTFLRLQPMPMRSVSCAAKKDTTDKVCEIVKKXALPDHTEVCGESKFSELGADSLDTVEIVMSLEEHFDISVEESSAQTIATVEDAADLIDKLVAGKA

SEQ ID NO: 7544 - protein, 222 aa, Zea mays
  Clone ID: ZEAMA-23APR03-C185786_1.p
NLLYARAHSRLAAHVYVSFVHHAPVLAWHLAGIVHIFNEEEQTTEYTGDCVSADDDHHHHSDLPTLPTSPDKTTPATALALRRGPTGQLHRRRPAAAAAAAPNHSCRQQLVEALGDRTRRERGRGAASGTRRRRAPGSTAVAAYPFAVVKPGGADGGVTLADINRWILTPPARPVRHPVGEFACAPRVSAANRPGPSGRTVAGFTRLRTAGRGTITIVRTRG

SEQ ID NO: 7545 - protein, 367 aa, Zea mays
  unsure (1)..(367): unsure at all Xaa locations
  Clone ID: ZEAMA-23APR03-C18659_1.p
MEVAATSPWPEEPLLRPPSPQPNLRADAASSGDPASPPPSAVRPSRLAALIGRAEGRRGTXMLVPETTSPELXEWRADWANSRPVLALDIAWNVAFAAAAAAVLSSSAEESPVKPLRLWVVGYAAQCLVHVGLVCADTRRETRRARRSASDVESAGAGTDSSDADSEDDERAEGRSSYTGRCETMNTLISFLWWIIGFYWIFSGGEVLEHGAPRLYWLTIVFLAFDVFFAVFCVAVACFIGIALCCCLPCVIAILYALAGQEGASDADISVLLRYRYSDPSEDGEKGVDEGLMIPILNNSGMSTSERILLREDAECCICLSSYEDGAELSALPCNHHFHWPCITKWLRMNATCPLCKYNILKGSDSA

SEQ ID NO: 7546 - protein, 398 aa, Zea mays
  unsure (1)..(398): unsure at all Xaa locations
  Clone ID: ZEAMA-23APR03-C187271_1.p
MAGRREEWCGEVLQRQREEEEEEQEEDDYIDMDLSSAAARTPVAQEFEFMSAPLDXWGETLAASPADELFYKGKLLPLHLPPRIQMVEELLDGRGRGRGRDRDRDRELLFRGVSSTAPATPYESCNASPANSSCYDYGYASGELNVEEYFQEYAAGLALAEDAAAAPRKPWSRRLRFMRQLNLGLRLRASKAYLKTILFAARPGSPADEKSGLGAVAARGAREEIAAHGHGHLRAWTKNPFAQTRMNTRCVASHGGTSRAAAAAAGGRCKEREHGAHRRSFSSVIVRYSPSNKMSPVPALPPSSCSSSSASSSVRTSSGSSDGGAGPALRRSSSASSEVENPVQGLIAYCKRSQQLASVRKSASDAGFRFLSSSASRIAAESESESDGLDELTEICRG

SEQ ID NO: 7547 - protein, 348 aa, Zea mays
  Clone ID: ZEAMA-23APR03-C18729_2.p
MSSHAVGTSNGGSGDAAAGGAARRNTRMPKYSKFTQQELPACKPILTPKWVVSVFLIVGVIFVPIGVVSLLAARDVVEIIDRYDEACVPVNMTENKLAYIQNETISKECIRNLTVTKYMKQPIFVYYELDNFYQNHRRYVKSRNDAQLRDASKANQTSACEPEKTTANGQPIVPCGLIAWSLFNDTYNFTRGNENLTVDKKDISWKSDREHKFGKDVYPSNFQNGALKGGATLNPKIPLSEQEDLIVWMRTAALPTFRKLYGRLYFDLKENDTITVRLNNNYNTYSFGGKKKLVLSTATWLGGKNDFLGFAYLIVGGLCIFLAFAFTLLYFVKPRKLGDHNYLSWNRR

SEQ ID NO: 7548 - protein, 146 aa, Zea mays
  Clone ID: ZEAMA-23APR03-C189175_1.p
MASLLCPASSCPSASLRRTAASPAAPSFASSRHYGAPLTFRVASQPRQALAAAPYGYGSDLLRPIDTQTIIIAAAVVSAVSLSLVLGLKGDPVPCDRCAGNGGTKCVFCNDGKMKVENGVVECRVCRGAGLILCKKCAGSGYSKRL

SEQ ID NO: 7549 - protein, 165 aa, Zea mays
  unsure (1)..(165): unsure at all Xaa locations
  Clone ID: ZEAMA-23APR03-C18919_3.p
LDSLCCCCASLHGDAQEEPSEAALRGAFKIKEDGDKKIELKPGFYMEHDEDVRAVVVEFDRYFNYYKVXYGTLCNSEKLGCLFITTNRXVVTNLTSHYKFLDYYISSXLGRFGITTSQICMMGDWLVIDILFGQNGGCKTLLVLQGSYQFLNSNSDKGTTDLTSA

SEQ ID NO: 7550 - protein, 180 aa, Zea mays
  Clone ID: ZEAMA-23APR03-C189581_1.p
MAAVVEAAPAAETAAKAVAEEEAGVTAPGPPVGGSNSKALIVVDKVDDKPFSLNNMPRNSNDRDIALATVEIEKINSLIKAWEENEKAKADNKTAKKQSIILSWENTKKAIIEAELKKKKEELEKKMAEYAEKMKNKKAIIHKKAEEKRAMVMAQHGEEILKTEEMAAKYRATRVAPKIS

SEQ ID NO: 7551 - protein, 442 aa, Zea mays
  unsure (1)..(442): unsure at all Xaa locations
  Clone ID: ZEAMA-23APR03-C19086_1.p
MTKLPWWRADASELVAVTAMGVWEAVLAGGGRRFIKRKDSDAGETGSHPHHPVLILNIFFKKKDLSAGSVGVDGERRALPLALRGRALEELRSSLYNEMHSAEGAKRQQQRFCGPSVALTFNFAVAVGIXMANKMVMGSVGFKFPIALSLIHYAVAFVLMATLKTLSLLPVAPPSKSTPFSSIFALGAVMSLSTGLANVSLKHNSVGFYQMAKIAVTPTIVVAEFMLFQKKVSSKKAVTLAVVSFGVAVATVTDLEFNFFGACVALAWIVPSAVNKILWSSLQQSGNWTALALMWKTTPITIFFLLTLMPLLDPPGLLLFNWNFRNSCAVIISALFGFLLQWSGALALGATSALSHVVLGQFKTIVIMLSGYLIFGSDPGITSVCGAVLALGGMSFYTYLGLKKDPATSGKKAPSRQNSFMARPKVAADDSDDADSEQDDTV

SEQ ID NO: 7552 - protein, 378 aa, Zea mays
  unsure (1)..(378): unsure at all Xaa locations
  Clone ID: ZEAMA-23APR03-C190_34.p
MADGEDIQPLVCDNGTGMVKAGFAGDDAPRAVFPSIVGRPRHTGVMVGMGQKDAYVGDEAQSKRGILTLKYPIEHGIVSNWDDMEKIWHHTFYNELRVAPEEHPVLLTEAPLXNPKANREKMTQIMFETFNVPAMYVAIQAVLSLYASGRTTGIVLDSGDGVSHTVPIYEGYALPHAILRLDLAGRDLTDSLMKILTERGYSFTTTAEREIVRDIKEKLAYVALDYDQELENAKSSSSVEKSYELPDGQVITIGAERFRCPEVLFQPSFIGMEAPGIHETTYNSIMKCDVDIRKDLYGNIVLSGGTTMFPGIADRMSKEITALAPSSMKIKVVAPPERKYSVWIGGSILASLSTFQQMWISKAEYDESGPAIVHRKCF

SEQ ID NO: 7553 - protein, 385 aa, Zea mays
  Clone ID: ZEAMA-23APR03-C190_36.p
MDIRRDFHMAEGEGEWSYSKNCRRQQVAVRETRPMVETAVKQVYAALLPRTMVVADLGCSAGPNTLLFISSVLSSIAAAAGAERCKPPSGGGDDDDHHVELQFVLNDLPGNDFNHLFRSVEEEFRRAAGCERGPPPPPYYVMGLPESYYNRLFPRQSVHLFHSSYCLHWRSQEPEGLEAWRKPCLNEDNIYIARSRTTTPSVAKLFQEQFQKDFSLFLKLRHEELVHGGRMVLVFLGRKNEDAYSGDLNQLFALVATALQSLVLKGLVEKEKLESFNLPIYGPSVGEVEDLVTQSGLFSMDLIKQFEMNWDPLDDSEGDDVVEDSARSSMNVAKYIRSVLKSLIVRHFGEAIIDAWFAEFRRLVAEHLEKEKTKFTTFAMCLKKE

SEQ ID NO: 7554 - protein, 644 aa, Zea mays
  Clone ID: ZEAMA-23APR03-C190_39.p
MAAAAAAKAAAAAVSAGAAFVLSSERAHADGGGSTFRFPGFYSSAPSPAPAPAPAPAAPPPQESNAPEEAPKVSTQHPRTSAAGFDPAPLERGVEAINKLKQASDPKKLFEFMKKQEETHQQEIAAKKLELQKALAEIELEQKRVDFEERKKLDQQRAKIKSQMAQYEDELKRKRLQAEHEAQRLRNQELVKMQEESGIRLEQIRRATEEQIQEQRRQTERHRADLEQATISKKAMAEAEGRILVTRQTEDVKRRLILEEINADREKWIQVINTTFEHIGGGLRTILTDQNKLVVAVGGVTALAAGIYTTREGARVVWGYVDRILGQPSLIRESSRGKYPWSGFLSRATSTLTSKLKNGSNLGKDRNGFGDVILNPSLQKRVKQLANATANTKLHQAPFRNMLFYGPPGTGKTMAARELARNSGLDYALMTGGDVAPLGSQAVTKIHQLFDWAKKSNRGLLLFIDEADAFLCERNKTYMSEAQRSALNALLFRTGDQSKDIVLALATNRPGDLDSAVADRIDEVLEFPLPGEDERFKLLKLYLDKYIIKAGDKHEKSWLQFFRRQPQKIEVKGITDDLIREAASRTQGFSGREIAKMMASVQAAVYGSKDCELTPGLFREVVDYKVAEHKQRRRLAGEEPKQDA

SEQ ID NO: 7555 - protein, 725 aa, Zea mays
  Clone ID: ZEAMA-23APR03-C19148_1.p
SLVLPSSDPKQGMSFGDLDGGGSKRKKPYNRHAPRQIEQLEAMFKEFHHPDEKQRAQLSRQLGLDPRQVKFWFQNRRTHLKNQLERQENARLKQENDKLRVENLSIREAIRDLVCSCCGGPAVLGELSPEEHQLRLENARLRDELARVCTVTSKFIGKPMSHMELLLAKEPHPITGSSLELAVAVGVGSGVPSSKMPVSTISELAGSTSSSTGTVTTPMVTASLPMVSIVIDKSKFAQLAVSAMNELVKMARMNEPLWIPTIPSPGSPIMETLNFKEYLKAFSPCVGVKPTGFVSEASRESGIVTIDSSAALMEVFMDERRWSDIFYCIVAKASIVEEILPGVAGSRNGALLLMQAELQMLSPRVPIREVTFLRFCKQLAEGAWAVVDVSIDGLQTDQCLDTNTKCRRLPSGCVLQDTPNGCKVTWVEHAEYPEASVHQLYQPLMRSGLALGAGRWLATLQRQCECLAILMSSLAAPEHDSAAVSLEGKWSLLKLARRMMENFCAGMGASSSREWSMLDGLTGSMGKDVRVMVQNSVDEPGVPPGVVLSVATAVWLPVTPERLFNFLRDEELRAEWDILSNGGPMQQVLRITKGQLDGNSVALLRSDHTDSHLNSILILQETCTDRSGAMVVYAPVDFPAMQLVLGGGDSKNVALLPSGFVILPAGSSAGGVGHKSRGSLLTVAFQILVNSQPTAKLTVESVDTVYSLISCTIEKIKAALHCDVC

SEQ ID NO: 7556 - protein, 414 aa, Zea mays
  Clone ID: ZEAMA-23APR03-C19156_1.p
RRCRGGNGCKVGDDNGSLMVMWEDGFCRPRVAECLEDMDGEDPVRKAFIKMSIQLYNYGEGLMGKVASDKCHKWVFKEPSECEPNISNYWQSSFDALPPEWTDQFASGIQTIAVIQAGHGLLQLGSCKIIPEDLHFVLRMRHMFESLGYQSGFFLSQLFSSSRGASPTPTPPFPLKQPPAAPAARAPPQLFSWPGHHQPQQLPSPLFPPGPGAFHPSSARPMPPFPGGGGGGGKDEGHMFHLPPAAHHGTNKQPPQHMDEHHQQQQQPMVGAGGDAPDGDLRWPNGLSFFTALTGRADDAKLLFGGPGAGAGAADDDDKAAPDAHGGAENVEEYLSLESHSNKARKVDSPAAQSTNKFKRSFTLPARMSSSSSTSAFPSVSASTAPPQQQQAGMEYRGPHEGGVYSDLMETFLE

SEQ ID NO: 7557 - protein, 191 aa, Zea mays
  Clone ID: ZEAMA-23APR03-C19207_9.p
LLSQRTVVVALIRCLVSCSRVPREEDQLPRCSSGSLVSGRGFCASLERRRELRNVLFSTATSGDQDESSQAKDKISVTFVNKDGSEKTIRVPVGMSMLEAAHENDIELEGACEGSLACSTCHVIVMDVNYYNKLEDPADEENDMLDLAFGLTETSRLGCQVIAKPELDGIRLALPVATRNFAVDGYVPKPH

SEQ ID NO: 7558 - protein, 243 aa, Zea mays
  Clone ID: ZEAMA-23APR03-C19228_2.p
MSQLLHLPDLAAPRTRMGSALPAGARVKQGEAGTARGRRVLRLADPVRRECRVPVPLPPPPLLAAGRRGDDDDDDGVDEDRQRYYLNLGYAIRTLREELPDVLCKDHSFDIYREDIVFRDPLNTFKGLGNYKRLFWALRLTGRVFFRASWVEVVSIWQPAENSILLRWTAHGVPRVPWGWWDAAHARFDGASVYKLDRNGKIYEHTVHNVATNPPAKSKVLPVHELVRSLGCPSTAEPTCSDF

SEQ ID NO: 7559 - protein, 141 aa, Zea mays
  Clone ID: ZEAMA-23APR03-C19237_2.p
SGRQKYPYHVTVNFARSGGPGGQNVNKVNTKVDMRFNVKEAHWLGERIKERILQAEKNRINKDGELVISSTKTRTQKGNIEDALQKIQAIIDAASYVPPPPTEDQKKKIEKIAAVAERKRLQNKKVLSQKKEFRRNRTSWD

SEQ ID NO: 7560 - protein, 406 aa, Zea mays
  unsure (1)..(406): unsure at all Xaa locations
  Clone ID: ZEAMA-23APR03-C19242_1.p
MALATTAVSLHLFLTRPASVLRVGRGLPCLLLRATSSTSASPDFNITFAEPAPSKKAPSAQPLVPWIVRGEDGKPRLSTSPPPDVIQAIALAEAEAKKAANKETLKGQNGQXAAAAAAASNASVKGKERKPAPTVPPKFSKAARRFYNENIKEREPQRLAKVLAAAGVASRRTSEELIFQGKVTVNGSVCTSPQTKVDISKDSIYVNGNRISKKLPPKLYFAVNKPKGYICSCGEESKSVVSLFNDYLKGWNKIQPGLPKPRLFTVGRLDVATAGLIIVTNDGEFAQKLAHPSSNVTKEYVVTIDGAVHKKHLIAISEGTKIDGVMCIPDLVEPLAAQSDTRKTRLRIVVHEGRNHEVRELVQNAGLQVYALKRVRIGRFRLPADLGIGKFVELKQADIKALDGNN

SEQ ID NO: 7561 - protein, 307 aa, Zea mays
  Clone ID: ZEAMA-23APR03-C19248_2.p
MAAPLPLSAEDMLRVNGSRRFAAAMAAASPFASLADALLAARRIWLDEVDVNGWLEAFAAHPAIGTTSPSVSKWSKEEQSAALSTATDSTAQELAEWNARYREKFGFVFMICASGRTAAEVLAELKRRYTNRPIVELEAAAQEELKITELRLTKLFSLEPTVPSTTIEGPTVQSDKAAGSSNRSRPPITTHVLDIARGSPASGIEVHLEMWKDCSAPPSFNNKDFSGWETLGYSVTNNDGRSGQLMDIVDNIAPGFYRISFNTGKYAPAGFFPYVSIIFEIKENQAAEHFHVPLLHSPFSFTTYRGS

SEQ ID NO: 7562 - protein, 307 aa, Zea mays
  unsure (1)..(307): unsure at all Xaa locations
  Clone ID: ZEAMA-23APR03-C19248_3.p
MAAPLPLSAEDMLRVNGSRRFAAAMAXASPFASLADALLAARRIWLDEVDVNGWLEAFAAHPAIGTTSPSVSKWSKEEQSAALSTATDSTAQELAEWNARYREKFGFVFMICASGRTAAEVLAELKRRYTNRPIVELEAAAQEELKITELRLTKLFSLEPTVPSTTIEGPTVRSDKAAGSSNRSRPPITTHVLDIARGSPASGIEVHLEMWKDCSAPPSFNNKDFSGWETLGYSVTNNDGRSGQLMDIVDNIAPGFYRISFNTGKYTPXGFFPYVSIIFEIKENQTAEHFHVPLLHSPFSFTTYRGS

SEQ ID NO: 7563 - protein, 294 aa, Zea mays
  unsure (1)..(294): unsure at all Xaa locations
  Clone ID: ZEAMA-23APR03-C1937_15.p
MRSFAPVFLSAVVAWLELAGTAQGGNFYQDTEMTWGDGRGKVVDGGRGLDLTLDRTSGSGFQSKSEYLFGKIDMQIKLVPGNSXGTVTTFYLSSQGDAHDEIDFEFLGNVSGEPYTLHTNVFTRGQGQREQQFRLWFDPTTAFHTYSILWNPQHVIFAVDGTPVRDFKNHEARGVAFPRTQPMRLYASLWNADDWATQGGRVKADWSKAPFVASFRGFSADACVWDGGRQRCPEGTMEAAAVAGAGSGRGWWNQQLSDMSYRRMRWVQRKFMIYNYCADAKRFPQGVPAECKLR

SEQ ID NO: 7564 - protein, 458 aa, Zea mays
  Clone ID: ZEAMA-23APR03-C1941_2.p
MALTTASTVSSPSRIIRRFSSSQDSRPPSSLLHLAPRRGPGNSPRACSWHRLVVRRMGWAARALLGGLSDAGASESDEEEEHVLRVGQREGEIDDAVELSAAAVGPERWDVLGLGQAMVDFSGMVDDEFLDRLGIEKGTRKVINHEERGRVLRAMDGCSYKAAAGGSLSNSLVALARLGSSQSAGYPELNIVMGGSVGSDPLGSFYRAKLRRANVHFLSKPVKDGTTGTVIVLTTPDAQRTMLAYQGTSSTLSYDSDLASLVSKSNVLIVEGYLFELPHTIEAIKQACEDAHKNGAIIAVTASDVSCIKRCYNDFRDIVRNYADILFANANEARALCELPSTDSPMSATRYLSHSVPLVSVTDGMHGSYIGVKGEAIYIPPPQCVAVDTCGAGDAYASGILYGVLRGASDLKGIGLLASRVAAVVVGQQGTRLRVQDADRLAGSFEHHLDSLEFCSDV

SEQ ID NO: 7565 - protein, 318 aa, Zea mays
  Clone ID: ZEAMA-23APR03-C194322_1.p
MASPAAGTPPFLTKTYAMVEDSATDDTISWNDTGTAFVVWRPAEFARDLLPKHFKHSNFSSFVRQLNTYGFKKVVGDRWEFANDGFRRGEKHLLAGIQRRKGTGAVAAVPVPGIPAGIPLPLSSPPTSSGGEPAVSSSPPRGSTAGVSGAVAELEEENARLRRENARLARELARARRLCDGVRQLMARYDDDQGRGGDEDPADGDEGHGGSGEGPSGPEVKPMLFGVPIGAKRLRGARGDGDDVDDGEDNDEEPDEDDERQTVRKQGVKAARRNEASDLDVLTLSVRAAAAARTGGGSRDRKSPITAHPDRSLSLGLK

SEQ ID NO: 7566 - protein, 356 aa, Zea mays
  Clone ID: ZEAMA-23APR03-C1960_3.p
MAARGGGTRMTSAAAAAAPWVSVCSFLLCLAAFQGAEGAIGVNYGMVANNLPAPEQVVSMYKAKNISYVRLFHPDKDALNALRGSGVGVVLGTLNEDLPRLASDLSFAASWVATNVQPFAGAVQFRYINAGNEVIPGDAAARVLPAMQNLESALRSAGVTGVPVTTAVATSVLGASYPPSQGAFSEAAAPVMAPIVSYLSSKGAPLLVNVYPYFAYSSSGGQVALGYALLSADAGAASSVTDAGVVYTNMFDAIVDATHAAVEKAGVQGLELVVSETGWPSAGGEGATVENAAAYNNNVVRHVGGGTPRRPGKAVETYLFAMFNENGKAEGVEQHFGLFQPDMSEVYHVDFTAGSP

SEQ ID NO: 7567 - protein, 121 aa, Zea mays
  unsure (1)..(121): unsure at all Xaa locations
  Clone ID: ZEAMA-23APR03-C1960_5.p
LGYAXVTDGGAVYTNMFDAIVDATHAAVEKAGVQGLELVVSEXXXXXXXXXXXXXENAAAYNNNVVRHVDGGTPRRPGKALETYLFAMFNENGKAEGVEQHFGLFQPDMSEVYHVDFTAGX

SEQ ID NO: 7568 - protein, 2325 aa, Zea mays
  unsure (1)..(2325): unsure at all Xaa locations
  Clone ID: ZEAMA-23APR03-C19642_1.p
MSQLGLAAAASKALPLLPNRQRSSAGTTFSSSSLSRPLNRRKSHTRSLRDGGDGVSDAKKHSQSVRQGLAGIIDLPSEAPSEVDISHGSEDPRGPTDSYQMKGLQNNTNKGLYENVHDPSKFCTALSGQTSSDSIVVANSALAAAKFMRSRRTWANDTFGSAQATQLIAIVTPEDMRINAEYSSGADQFKAVPGGTNNNNYANVQLIVGMAQKLGVSAVWPGWGHASENPELPDALTAKGIVFLGPPASSMNALGDKVGSALIAQAAGVPTLAWSGSHVEVPLECCLDAIPEEMYRKACVTTTEEAVASCQVVGYPAMIKASWGGGGKGIRKVHNDDEVRALFKQVQGEVPGSPIFVMRLASQSRHLEVQLLCDQYGNVAALHSRDCSVQRRHQKIIEEGPVTVAPRETVKALEQAARRLAKAVGYVGAATVEYLYSMETGDYYFLELNPRLQVEHPVTEWIAEVNLPAAQVAVGMGIPLWQIPEIRRFYGMDYGGGYDIWRKTAALATPFNFDEVDSQWPKGHCVAVRITSEDPDDGFKPTGGKVKEISFKSKPNVWAYFSVKSGGGIHEFADSQFGHAFAYGLSRPAAITNMSLALKEIQIRGEIHSNVDYTVDLLNASDFRENKIHTGWLDTRIAMRVQAERPPWYISVVGGALYKTVTTNAATVSEYVSYLTKGHIPPKHISLVNSTVNLNIEGSKYTIETVRTGHGSYRLRMNDSTVEANVQSLCDGGLLMQLDGNSHVIYAEEEAGGTRLQINGKTCLLQNDHDPSKLLAETPCKLLRFLVADGAHVGADVPYAEVEVMKMCMPLLSPASGVIHCMMSEGQALQAGDLIARLDLDDPSAVKRAEPFDGMFPLMDLPVAASSQVHKRYAASLNAARMVLAGYEHNINEVVQDLVCCLDNPELPFLQWDELMSVLATRLPRNLKSELEDKYKEYKLNFYHGKNEDFPSKLLRDIIEENLSYGSEKEKATNERLVEPLMNLLKSYEGGRESHAHFVVKSLFEEYLTVEELFSDGIQSDVIETLRHQHSKDLQKVVDIVLSHQGVRNKAKLVTALMEKLVYPNPGGYRDLLVRFSSLNHKRYYKLALKASELLEQTKLSELRASVARSLSDLGMHKGEMSIKDNMEDLVSAPLPVEDALISLFDYSDRTVQQKVIETYISRLYQPHLVKDSIQMKFKESGAITFWEFYEGHVDTRNGHGAIIGGKRWGAMVVLKSLESASTAIVAALKDSAQFNSSEGNMMHIALLSAENESNISGISSDDQAQHKMEKLSKILKDTSVASDLQAAGLKVISCIVQRDEARMPMRHTFLWLDDKSCYEEEQILRHVEPPLSTLLELDKLKVKGYNEMKYTPSRDRQWHIYTLRNTENPKMLHRVFFRTIVRQPNAGNKFTSAQISDAEVGCPEESLSFTSNSILRSLMTAIEELELHAIRTGHSHMYLCILKEQKLLDLIPFSGSTIVDVGQDEATACSLLKSMALKIHELVGARMHHLSVCQWEVKLKLDCDGPASGTWRVVTTNVTSHTCTIDIYREVEDTESQKLLYHSATSSAGPMHGVALNNPYQPLSVIDLKRCSARNNRTTYCYDFPLAFETALQKSWQSNCSSVPEGSENSKSYVKSTELVFAEKHGSWGTPIIPMERPAGLNDIGMVAWILEMSTPEFPNGRQIIVVANDITFRAGSFGPREDAFFEAVTNLACERNPICAYLAANSEVHTXVGYGLASCFRVGWSEESSPERRLQYIYLTEEDYARISSSVIAHKLQLDNGEIRWIIDSVVGKEDGLGVENIHGSAAIASAYSRAYEETFTLTFVTGRTVGIGAYLARLGIRCIQRLDQPIILTGFSALNKLLGREVYSSHMQLGGPKIMATNGVVHLTVPDDLEGVSNILRWLSYVPANIGGPLPITKPLDPPDRPVAYIPENTCDPRAAICGVDDSQGKWLGGMFDKDSFVETFEGWAKTVVTGRAKLGGIPVGVIAVETQTMMQIIPADPGQLDSHERSVPRAGQVWFPDSATKTAQALLDFNREGLPLFILANWRGFSGGQRDLFEGILQAGSTIVENLRTYNQPAFVYIPMAGELRGGAWVVIDSKINPDRIECYAERTAKGNVLEPQGLIEIKFRSEELQDCMGRLDPELINLKAKLQDAKHGNGSLPDIEGIRKSIEARTKQLLPLYTQIAIRFAELHDTSLRMAAKGVIKKVVDWEESRSFFYKRLRRRIAEDVLAKEIRQIVGDKFTHQLAMELIKEWYLASQATTGSTGWDDDDAFVAWKDSPENYKGHIQKLRAQKVSHSLSDLADSSSDLQAFSQGLSTLLDKMDPSQRAKFVQEVKKVLD

SEQ ID NO: 7569 - protein, 586 aa, Zea mays
  Clone ID: ZEAMA-23APR03-C1970_16.p
MCGILAVLGVVEVSLAKRSRIIELSRRLRHRGPDWSGLHCHEDCYLAHQRLAIIDPTSGDQPLYNEDKTVVVTVNGEIYNHEELKAKLKTHEFQTGSDCEVIAHLYEEYGEEFVDMLDGMFSFVLLDTRDKSFIAARDAIGICPLYMGWGLDGSVWFSSEMKALSDDCERFITFPPGHLYSSKTGGLRRWYNPPWFSETVPSTPYNALFLREMFEKAVIKRLMTDVPFGVLLSGGLDSSLVASVASRHLNETKVDRQWGNKLHTFCIGLKGSPDLKAAREVADYLSTVHHEFHFTVQEGIDALEEVIYHIETYDVTTIRASTPMFLMSRKIKSLGVKMVISGEGSDEIFGGYLYFHKAPNKKEFLEETCRKIKALHLYDCLRANKATSAWGVEARVPFLDKSFISVAMDIDPEWNMIKRDLGRIEKWVMRKAFDDDEHPYLPKHILYRQKEQFSDGVGYNWIDGLKSFTEQQVTDEMMNNAAQMFPYNTPVNKEAYYYRMIFERLFPQDSARETVPWGPSIACSTPAAIEWVEQWKASNDPSGRFISSHDSAATDHTAVSRRWPTAAARPANGTVNGKDVPVPIAV

SEQ ID NO: 7570 - protein, 110 aa, Zea mays
  Clone ID: ZEAMA-23APR03-C19775_2.p
MAKRLLPSLNRVLVEKLVQPKKTAGGILVPETSKQIRLMSFLRLLPQRLPQLIRQVEQDVETVIHVLQPGPIGIVEHKFTDAEILEARATVKRAVDNWRRNWTLERNVSR

SEQ ID NO: 7571 - protein, 315 aa, Zea mays
  Clone ID: ZEAMA-23APR03-C19856_1.p
MASSLAARRLLSRAAAVRRRLRPSPPDPPRSISADGGPPPPVPPPPLPPVVEPPTSEGAGASSSSTTAGAGGAHRSSPGAAAGARRQGGAGYGEEQEKVLRASLLHVPRMGWPGMGWSESAMVAGARDVGVSPAIVGAFPRKEAALVEFFMDDCLQQLMDRIDAGEGEQLKNLILSERLSKLVRMRLEMQAPYISKWPQALSIQSQPANVSTSLKQRAILVDEIWHAAGDSGSDIDWYVKRTVLGGIYSTSEVYMLTDNSPEFRDTWTFVNRRIKDALDLQKTFQEAAYLAEAVGAGMGGTVQGVLNRVFQNRSG

SEQ ID NO: 7572 - protein, 169 aa, Zea mays
  Clone ID: ZEAMA-23APR03-C19880_2.p
MMSSSSGIKQEGPKLFSSRRILARDRSSVAVADASFRVYYSLGAGTVPFLWESKPGTPKSSVTPPASASASSTAGAVPVPPISPPPSYQQAVSRSKANKFARKQRPARTSWPPAGWIIGWLSLNVRRRSPPSSSPTDHQQRCVARNEHGVVVVDGDDERRSPRSSTLCF

SEQ ID NO: 7573 - protein, 605 aa, Zea mays
  unsure (1)..(605): unsure at all Xaa locations
  Clone ID: ZEAMA-23APR03-C19880_3.p
MTLSLRRKQLDVIVRMLHLNQQQLPNGGEGQGEDDAYKILVMDPPCISILSPVLKLGDLRHQGVTLTLAIDRPRQAVPDAPAVYFVRPTPGNVDRVAADAAAGLYGSFHVNFSTSVPRPLLERLATACAAAPPACAGRVARVADQYIDFVCIEDDLFSLAQPRAYVALNDPAAADADITALVDAVALGLFCVVATLGVVPVISCARGGPAEMVAGALDARLRDHLLAKPNLFTEAASAAVTSFQRPVLCLFDRNFELSVGVQHDWSYRPLVHDVLGLKQNKLKLPAEKYELDDSDKFWVANSWSPFPKVAEEIEAQLAKYKQDVDEVNQHTGGGKVGVEFDGTDLIGNTKHLMNAVNSLPELTERKNMIDKHTNIATSLLGHIKERSLDGYCSCENDMLVSGTVDRNTLLSLIRGKGTKEDKLRLAVTYLLSFATPPSSELEQVEAALRESEVDMSAFQYVKRIKXIINTQFAAASGTATKSNIVDWAEKLYGQSIGAVKNLLSDSRQLALTRTVEALMEGKPNPEVDDYLLFDPRAPRSGTSGQFKGPFREAVVFMIGGGNYIEYKSLIELKQRSQPSKHVIYGATEILSGAEFIHQLAELNYG

SEQ ID NO: 7574 - protein, 244 aa, Zea mays
  Clone ID: ZEAMA-23APR03-C19895_2.p
MAAADASRTLLAAVSLALAACCLAQLAAGDTNSVYEPCSDARIQRGDGFTFGVVFAGYNAFFSGNTQLSPCDRRLNLAASGQLAVFRPKVDEISLLTINTTTGFNPASAGGFMVAFAGRKYAARSTPIFVSNTSVTVSSFTLVLEFNKGRLQNLHWKKDGCGACSGKSNFVCLGKQTCAIRTQSCKSQGPVDCSVGIQLAFSGTDKHESVLNSWYEVSNLRQYSLYGLYSNLKGTLSGQFNKIF

SEQ ID NO: 7575 - protein, 212 aa, Zea mays
  Clone ID: ZEAMA-23APR03-C19920_3.p
MGKGFASYLAMKTGPEGGDAAAAQQALIDADLRELGVAARKLANHAFVLGGGLGFGTSFLKWLAFLAAVYLLILDRTNWKTNMLTALLVPYIFFTLPNVLFSLIRGEVGKWIAIIAVILRLFFPRHFPDWLELPGSIILLTVVAPSLFADSFRGDLVGVFICLVIGCYLLQEHIKASGGFRNAFRKGNGVSNSIGILLLFIYPVWAGVLQVL

SEQ ID NO: 7576 - protein, 92 aa, Zea mays
  Clone ID: ZEAMA-23APR03-C19935_4.p
MDSTGTGAGGKGKKGAAGRKVGGPRKKSVSRSVKAGLQFPVGRARIRRRARRAPLLPPRLLPPLSVCVLTYARMDDDGSVHRCHCSCLARSW

SEQ ID NO: 7577 - protein, 406 aa, Zea mays
  unsure (1)..(406): unsure at all Xaa locations
  Clone ID: ZEAMA-23APR03-C1997_2.p
MVMMMRSCLGGGLLPVAVMLCLNVVAAVMVSLVKVAMDGGMKPLVIVTLQQLTAAVFLAPIAFFKERKSRPKLTLEIFAYIFVSAALGLRHILXAALRQYMIFVALRYTTATFVTAFSNIAPVLTFLLAVATRSEALDLKSRTGLAKLLGTLVSLAGAMVLTLYKGVALTHAAAASQDHQQHSHGRLPPSAADSRGKWTLGTVAILGNCVCLSCWFLLHGRLAKKYPHVYSCNALMSLLSFLQVAVVGLCTQRSISPWIVTSKFNILTVLYAGIVGCGVSFVLVTWCIEKRGAVFVAAFIPVVQIIVSVIDFSILHEQLYLGRYARTRYHAITEWQSTXSKVKSPALLCSASPFVLCSVLGSVLVIGGLYLLLWGKRQEALHCPPPPPKVAEEDPADKEQQQVQHN

SEQ ID NO: 7578 - protein, 179 aa, Zea mays
  Clone ID: ZEAMA-23APR03-C19996_1.p
MIRENRRVQERRRETRHRHRCRRRRDGRSSPHLAVVGAARADVAIRTGARRPVPDPPQHRHGVRRVPAHAPHPERLIFFPRAPASDQRAQRRQSSLPDPPHASQRGAPPPPPQRSAGPPPGLHSAAPADGGEDLLAIATPASIPSPADATAIAVTILRWRGPAGRCFSWRLLGSCAPVL

SEQ ID NO: 7579 - protein, 802 aa, Zea mays
  Clone ID: ZEAMA-23APR03-C199_37.p
MAAKLTRLHSLRERLGATFSSHPNELIALFSRYVHQGKGMLQRHQLLAEFDALFDSDKEKYAPFEDILRAAQEAIVLPPWVALAIRPRPGVWDYIRVNVSELAVEELSVSEYLAFKEQLVDGQSNSNFVLELDFEPFNASFPRPSMSKSIGNGVQFLNRHLSSKLFQDKESLYPLLNFLKAHNYKGTTMMLNDRIQSLRGLQSSLRKAEEYLLSVPQDTPYSEFNHRFQELGLEKGWGDTAKRVLDTLHLLLDLLEAPDPANLEKFLGTIPMMFNVVILSPHGYFAQSNVLGYPDTGGQVVYILDQVRALENEMLLRIKQQGLDITPKILIVTRLLPDAAGTTCGQRLEKVIGTEHTDIIRVPFRNENGILRKWISRFDVWPYLETYTEDVSSEIMKEMQAKPDLIIGNYSDGNLVATLLAHKLGVTQCTIAHALEKTKYPNSDIYLDKFDSQYHFSCQFTADLIAMNHTDFIITSTFQEIAGSKDTVGQYESHIAFTLPGLYRVVHGIDVFDPKFNIVSPGADMSVYYPYTETDKRLTAFHPEIEELINSDVENSEHKFVLKDKKKPIIFSMARLDRVKNMTGLVEMYGKNARLRELANLVIVAGDHGKESKDREEQAEFKKMYSLIDEYKLKGHIRWISAQMNRVRNGELYRYICDTKGAFVQPAFYEAFGLTVIESMTCGLPTIATCHGGPAEIIVDGVSGLHIDPYHSDKAADILVNFFDKCKADPSYWDKISQGGLQRIYEKYTWKLYSERLMTLTGVYGFWKYVSNLERRETRRYIEMFYALKYRSLASQVPLSFD

SEQ ID NO: 7580 - protein, 633 aa, Zea mays
  unsure (1)..(633): unsure at all Xaa locations
  Clone ID: ZEAMA-23APR03-C200142_1.p
MASTAARRLLLPLLLVALIAAHRAAARFVVEKNSLRVTSPAVLRGVYECAIGNFGMPQYGGTMHGVVVYPKADAKACRPFADSGLSFKPRSGGLPVFLLVDRGDCYFTTKGWNAQNAGAAAVLVADDRVEPLITMDSPESSGXHIENITIPSALVTKRFGEDLRKALQSGDMVNVLLDWRESLPHPDERVEYELWTNSNDECGAKCDMQMSFVRSFRGIAQALEKRGYTQFTPHYITWYCPEAFVLSKQCRSQCINHGRYCAPDPEQDFSTGYDGRDVVLQNLVQICVFRVANGTRRPWMWWDYVHDFAVRCPMKEKKYTRECANGVINSLGLDIEKINKCVGDPEADKENPVLKAEQDAQIGHGSRGDVTILPTLVVNNRQYRGKLEKTSVLKAVCSGFEETTEPDVCLREDIETNECLENNGGCWLDKATNVSACKDTFRGRVCECPIVNGVKFIGDGYNHCEASGLGRCQINNGGCWNETRNGKSVSACSNQEAKGCKCPAGFKGDGANSCEDVDECKEKLFCQCKDCACENTWGSYECSCGGGNSLYIREHDTCISKHSSSTPGWGFLWVVFLGLALAGAGAYAVYKYRLRSYMDSEIRAIMAQYMPLXESQDMPSQQHHLVPVDRADV

SEQ ID NO: 7581 - protein, 125 aa, Zea mays
  unsure (1)..(125): unsure at all Xaa locations
  Clone ID: ZEAMA-23APR03-C20016_1.p
MANGGGYVWALHAGSNPRXAAGFNAALPAISAKFFSTLLLKYGMVILFNVTMWGWYVNSLKALSSLQATVTNFAANFISSGLAGCFLFDEPVPSVLXPVLSLSKSSIEEKQNSDLGGSFDHCVSF

SEQ ID NO: 7582 - protein, 215 aa, Zea mays
  Clone ID: ZEAMA-23APR03-C20150_2.p
MIYDQLIGKHKVHLGNHSFQTASTSSAIAFMLPLKALRQSSRFIVNNSCVFGIGFIKVATIKVNTTLETLFVRKMNIFNEAKVYTWKIEDFSALKNPSHSPEFEIAGYTWIISLNPSYDGNSLSLFLKMKKTNDVPKGSGSLVEFALSIKDQENGKDRKYPGRCQFSSKHHRWGWKKFISLEDFKDSSKGYLIKGKCCIEAEVAISGSSKTEYSM

SEQ ID NO: 7583 - protein, 276 aa, Zea mays
  unsure (1)..(276): unsure at all Xaa locations
  Clone ID: ZEAMA-23APR03-C2016_5.p
MALEPVARAVAEEVARWGAMRQTGVSLRYMMEFGVRPTERTLLLAAQFLHKELPIRIARRALDLDSLPFGLSTKPAILXGQHVALHDPDPEPGVIGLINTKMSPMTVARIASEDARAICMREYGSSPNVDIYGDPGFTFPYVTPHLHLMIFELVKNSLRAVQERYMDSDKLAPPVRIIVADGAEDVTIKITDEGGGIPRSGLSRIFTYLYSTAENPPDLDVHMEGVTVAGYGYGIPISRLYARYFGGDLQIISMEGYGTDAYLHLSRLGDSEEPLT

SEQ ID NO: 7584 - protein, 255 aa, Zea mays
  unsure (1)..(255): unsure at all Xaa locations
  Clone ID: ZEAMA-23APR03-C2017_1.p
MASGVSPXMALALAGFCFSLIFIAFVCSRLACALLRRHRRRARSRLLALPRYYTDYSFAAHHPAPGGGGGIGPAAVAALPTRAFAARPRGSAASDAESQCVICLEEYEERDVLRVLPHCGHDFHMACIHVWLEQNSTCPVCRISLLDNPNSEHNAPPPPPPPLPGVAVTMSSPGSPEPPGSDPCRCLFAGAGHSSRASSEAPPRHDPDQENQVASGPSVDGGANSNGMPLSEVNPTPPESNSQTGRKQQQPGPCK

SEQ ID NO: 7585 - protein, 298 aa, Zea mays
  Clone ID: ZEAMA-23APR03-C20187_2.p
MWHSFFSMHRIASRLGLLSRRCYSSAMKGGTSIAGVGDIIAVASGKGGVGKSTTAVNIAVALAKEFKLQVGLLDADIYGPSIPTMMNLHAKPEVNEDMKMIPVENHGVRCMSIGFLVDNDAPIVWRGPMVMSALEKMTRGVAWGDLDILVVDMPPGTGDAQLSMSQRLRLSGALIVSTPQDIALIDARRGANMFRKVQVPILGLVENMSCFKCPKCGEKSYIFGEGGAQRTAEEMDMKLLGDVPLEISIRTGSDEGNPIVISSPNSASAQAYVNVAEKVTQRLNELAEERRMGPEILL

SEQ ID NO: 7586 - protein, 118 aa, Zea mays
  Clone ID: ZEAMA-23APR03-C2019_15.p
MNKTGARLRLAPNMWMATGSEASKAAEAVVDRHKQDSKKMLHAVYRVGDLDRTIKYYTECFGMKLLRKRDVPDEKYTNAFLGFGSENTNFAVELTNFAEVSRPACVAPLPGSVLAVPL

SEQ ID NO: 7587 - protein, 243 aa, Zea mays [sequence omitted]

SEQ ID NO: 7588 - protein, 186 aa, Zea mays
  unsure (1)..(186): unsure at all Xaa locations
  Clone ID: ZEAMA-23APR03-C20279_2.p
REYISDLGFVLRPAAAAAAARQDKEQRDYRLIAKAVDEAYRAVECDGGGYPFGAVVVHGGGDDEVVSSSHNSVRKDADPSAHAEVTAIRQACKKLGKTSLAGCEIYTSCEPCPMCLGLIRLAKIKKVVYGAKSEVAAAAGLNGVLPEVFREYYQKSGVEMRQAEGEAAXGIAEEVFEETKGKFRNK

SEQ ID NO: 7589 - protein, 110 aa, Zea mays
  Clone ID: ZEAMA-23APR03-C2030_5.p
MAKHHPDLIMCRKQPGIAIGRLCEKCDGKCVVCDSYVRPCTLVRVCDECNYGSFQGRCVICGGVGISDAYYCKECTQQEKDRDGCPKIVNLGSAKTDLFYERKKYGFKKR

SEQ ID NO: 7590 - protein, 300 aa, Zea mays
  Clone ID: ZEAMA-23APR03-C20349_10.p
ESSSKPIAPTLLSRRIYIYIYILLHITRRLRPSQVRSTLASYHAAAPATARVGCNDIYRSYGVDAAVHGGAPAGGHHQQARAVALPRRQRRRLLHHHHGFRAQRQEAECGTAATKTTAARSWTGSSSISTPRRLPPEWQRCLDIKSGQIHYYNTRTQKRTWKDPRGEPEYRAAAEEEEEEDSANCAPPGLDLELNLTFEPRRAVAHEKKRPKPPAANKATHDRRRQPAEEAEDSSSGSSREMVAGVCMRCHMLVMMCRASPACPNCKFLHAPSRPVAPEPEPEPPVPLLKLGLQLLCCRD

SEQ ID NO: 7591 - protein, 372 aa, Zea mays
  Clone ID: ZEAMA-23APR03-C20349_3.p
MESLWKLTYLLDPASVALIATAISVAYASASRALDYGKEMERNLDFSEASITLDRSQALMIPLASSCSLLLMFYLFSSVSHLVTAFTAVASALALFFCLSPHITYLKARFNLMDPFMSRCCSKSFTRLQGLLMLFCIATVLAWLVSGHWMLNNLLGISICIAFVSHVRLPNIKICALLLACLFVYDIFWVFFSERFFGANVMVSVATQKASNPVHTVANKLSLPGLQLITKKLELPVKLVFPRNLLGGIVPGSNPGDYMMLGLGDMAIPGMLLALVLFFDNRKLKDVNVVPSDVSPLRRRNYVWYALTGYGIGLVAALAAGILSQSPQPALLYLVPSTLGPVMYLSWFRNELWELWEGSGTILNDKARLLEV

SEQ ID NO: 7592 - protein, 151 aa, Zea mays
  unsure (1)..(151): unsure at all Xaa locations
  Clone ID: ZEAMA-23APR03-C20360_1.p
MLSLSFSLLCFCVVDVENSFQTKLRLLSACTSPHGPRRGRRRDRRRRRRLQKMVGSMQAVDPAGRISALLALRQLLAMLXPLALLRPFIGARGRGVRCCGLRVGASGKXGKAAASVVLRVPAVSPMVATRRKIATRRTQEAXGRVYELIPR

SEQ ID NO: 7593 - protein, 181 aa, Zea mays
  unsure (1)..(181): unsure at all Xaa locations
  Clone ID: ZEAMA-23APR03-C20395_5.p
RSIPNCTCAPRLVARTLASRSEAREQPWRGAXALVSLLLLGLASAAXAADAPFVVAHKKVSLSRPKPGVERVAVSLDLYNQGSATXYDVSLNDDSWPTQAFELVTGEKSKTLERLDPXAYSTPIFPLDILAERPPEKKFEWAKRLVMKYGSLVSVVSFVGLFIYLVASPSKSSSKASKKRR

SEQ ID NO: 7594 - protein, 535 aa, Zea mays
  Clone ID: ZEAMA-23APR03-C2042_10.p
MALAFDEFGRPFIILREQEKKTRLRGLDAQKANIGAGKAVARILRTSLGPKGADKMLQSPDGDVIITNDGATILEQMDVDNQIAKLMVELSRSQDYEIGDGTTGVVVMAGALLEQAEKLLERGIHPIRVAEGYEMASKVAFDHLEHISEKFEFSADNIEPLVQTCMTTLSSKIVNRCKRALAEIAVKAVLAVADLERKDVNLDLIKVEGKVGGKLEDTELVYGIIVDKDMSHPQMPKRIEDAKIAILTCPFEPPKPKTKHKVDIDTVEKFQTLREQEQKYFDEMVQKCKDAGATLVICQWGFDDEANHLLMHRNLPAVRWVGGVELELIAIATGGRIVPRFQELSPEKLGKAGLVREKSFGTTKDRMLYIEKCANSRAVTIFIRGGNKMMIEETKRSLHDALCVARNLIRNNSIVYGGGSAEISCSIAVETAADRHPGVEQYAIRSFADALDAVPLALAENSGLSPIDTLTAVKAQQVKESNPHCGIDCNDVGTTDMKEQNVFETLIGKQQQILLATQVVKMILKIDDVISPSEY

SEQ ID NO: 7595 - protein, 318 aa, Zea mays
  Clone ID: ZEAMA-23APR03-C205002_1.p
MDDAESASRAGRRRAAAAAGMRLFSPEYYALCAGGGMLAAGATHLAITPLDVLKVNMQVNPMKYNSIFSGLNVLVKEEEPSSLWRGWGGKFFGYGVQGGCRFGLYEYFKKRYSDVLVDSNKSTIYFLSSASAQIIADVGLCPFESVKVRVQTQPMFAKGLVDGFPRVYATEGLSGFYRGLLPLWGRNLPFSMLMFSTFEHTVDFLYQKVIQKKKEDCSTIQQLGATCLAGYISGAVGTVVSNPADNIVSSLYNKKAENIIHAVKSIGFRNLLTRSLPIRIALVGPVITMQWFFYDTIKILTGLPTTGGLPRELEEANI

SEQ ID NO: 7596 - protein, 306 aa, Zea mays
  unsure (1)..(306): unsure at all Xaa locations
  Clone ID: ZEAMA-23APR03-C20565_4.p
MDVVKAAQLSGRTLERVVVHPLVLLSIVDHYNRVARDTRKRVVGVLLGTSSRGSVDVTNSYAVPFEEDDKDPRIWFLDHNYHESMFSMFKRINAKEHVVGWYSTGPKLRENDLDVHALFNXIIDVQPKELGIPTKAYYAVEEVKENATQKSQKVFVHVPSEIAAHEVEEIGVEHLLRDVKDTTISTLATEVTSKLAALKGLDARLREIRSYLDLVIEGKLPLNHEILYHLQDVFNLLPNLNVNELIKAFAVKTNDMMLVIYLSSLIRSVIALHNLINNKMLNKEHEKAEDSKPAAIPTAAGGGGAK

SEQ ID NO: 7597 - protein, 294 aa, Zea mays
  Clone ID: ZEAMA-23APR03-C205778_1.p
MGEEETRAGDLPEPCLAHAIALTSPRDACRCAAVSPAFRAAADSDYVWGRFVPEDHRRAIALHLHAAGRDRGPRKDAYLALCDGGGGGVPVDVDGDGWCRLWLDQASGAKCYALSARRLSLPWEDGDFCWRWAPHARSRFGEVAELMDCSYLDIYGRLPVAVLTRATSYAAYLVYGIAEGHRGLSFPDQEAAVSLGGRVPAESHHRRSVCLRPDEAEARKFWGAGAVIPYGVGGVHVPRLRDDGWWEVEMGRLRTVEAGEHEAPGEDVVASFEVVGSYPKRGLILEGIEFRKLQ

SEQ ID NO: 7598 - protein, 261 aa, Zea mays
  Clone ID: ZEAMA-23APR03-C2071_22.p
MMTASASYYLCRSLVRAPPLKSRSAVRCPSAAPPGASGATSTSKLVLEVKERLAREHPSLPTGRNGRDDDDMVLWFLKDRKFSVDEAVSKLTKAIKWRQDFGVAELSEESVKLLYQTGKAYVHDSLDIYGRPVLIVVAAKHFPSTQDPVENQKLCAYLVEKAVNRLPPGAENILGIFDLRGFRVENGDLQFLKFLMDVFYYYYPKRLGQVLFVDAPFVFQPMWQVVKPLLKSYASLVRFCDAETVRKEYFKEETVPPDFRD

SEQ ID NO: 7599 - protein, 332 aa, Zea mays
  Clone ID: ZEAMA-23APR03-C20738_2.p
MARYEASAAAPGVDFHLPDEILAVIPTDPYEQLDVARKITSMAITSRVSRLEADAARLRRDLADRDHAEAELRARLADSDARLAAALDENAKLAKERDSLAATTKKLTRNLAKLEAFKKQLMKSLSEDNLLQLSETSQDHNGEDNLTARVPYWKDEVCSSNTSSDTSIRSTITESIHGGGYQFSIKPYVPPKLTPGSTPMISSSSGSPRAYSTGPPSPNFFSGPTSPTKARSEGQLTFSSWQGSSSHQYSAPTSPQRHSFTGRPRIDGKEFFRQARARLSYEQFGAFLANIKEFNAQKQSREDTLSKAEEIFGTEHRDLYISFQNMLSRNQS

SEQ ID NO: 7600 - protein, 192 aa, Zea mays
  Clone ID: ZEAMA-23APR03-C207415_1.p
MGDVSLNGPIKAAEPGAGGIAKGNQVLDTMSAGWTDERHRLYISSMEASFVDQLYNHGSRPRNANGTAFKALRREYVEYEKTDAPVRRGAKCCGVPANPWMQHFRPRSDGGNNARGDGLGDSVGDLESGTEANRKSLSASHGRERDACEGEPQLLHESREVSDQNFADDEAEAETESMKAYKKRRLSRTMIN

SEQ ID NO: 7601 - protein, 398 aa, Zea mays
  Clone ID: ZEAMA-23APR03-C20748_2.p
KFELEFESSLEAIVLLQRSMLEKQWELPFEDDISTEDEDERSTVVVARSGVSARQRRMSGRRRGAFVGRKSVTVSPELMQSRNRIYLRGTVSKDLLTHKQVVQLSRKIKDGIWLQHQRSKLKEKLGNEPSYKQLAQSLRIPAPELRARMRESFLAREMLAMSNTRLVISIAQKYDNLGVELPDLIQGGLIGLLRGIEKFDASRGFRISTYVYWWIRQGVSRALADNSRSFRLPTYLHERLVAIRGAKYALEDQGIAPTVENIAESLNISEKKVHNATEAVHKVISLDQQAFPSLNGLPGDTLHSYIEDQNVANDPWHGFEERYLKEEVNSLINSTLNERERDIIRLYHGIGKQCHTWEDISRQFGLSRERVRQVGLVAMEKLKHAARREHLDALLEEY

SEQ ID NO: 7602 - protein, 349 aa, Zea mays
  Clone ID: ZEAMA-23APR03-C20748_3.p
PRLLFLLLSAQRRARRGAGRKSVAISPELMQSRNRIYLRGTVSKDLLTHKQVIQLSRKIKDGIWLQHQRSKLKEKLGNEPSYKQLAQSLRISAPELRARMRESFLAREMLTMSNIRLVISIAHKYDNLGVDLADLIQGGLIGLLRGIEKFDASRGFRISTYVYWWIRQGVSRALADNSKTFRLPTYLHERLLAIRGAKYALEDQGIAPTIENIAESLNISVKKVHNATEAVHKVLSLDQQAFPSLNGLPGDTLHSYIEDQNVANDPWHGFEEMYLKEEVNNLINSNLNERERDIIRLYHGIGKQCHTWEDISRQFGLSRERVRQVRLVAMEKLKHAARRKHLNALLEDY

SEQ ID NO: 7603 - protein, 123 aa, Zea mays
  Clone ID: ZEAMA-23APR03-C207620_1.p
MGHLFLLLVALLLLTSTRAAAAVHARASVIEEASFAGIRGVIGSRPPTCEGRCRSCGHCEAVQVPVSPQQLQRRKKEGLGLGRAAAAAATGGRARAMPASYYDHSNYKPLSWRCKCGRHILDP

SEQ ID NO: 7604 - protein, 424 aa, Zea mays
  unsure (1)..(424): unsure at all Xaa locations
  Clone ID: ZEAMA-23APR03-C20817_2.p
MALAVRTPRFQPRPASISAPTTPASTSLAAGNARPRPCAGAAVRASPFTEATSSSRYRRDAWSYAADGSSNSASPSSAAAAAAGRRDDEIALQLPELRRLLDVLRASRGRGAEEGGGPGEVALVGTGPGDPELLTLKAVRAIEAADLVLYDRLVSNDVLDLVGEGARLLYVGKTAGYHSRTQEEIHELLLSFAEAGANVVRLKGGDPLVFGRGGEEMDFLQQQGIKVEVIPGITSASGIAAELGIPLTHRGVATSVRFLTGHSRNGGTDPLYVAGNAADPDTTLVVYMGLSTLPSLAPKLMKHGLPPDTPAVAVERGTTPQQRTVFASLKDLVDEVKSADLVSPTLIIIGKVVSLSPFWVESSEHDALKVQSSYANEAXDDNRFSWFLVTGQYLRNARSQIWEHRFDLVYTETSQEAWILNGGW

SEQ ID NO: 7605 - protein, 221 aa, Zea mays
  Clone ID: ZEAMA-23APR03-C2086_3.p
MASHQDKASYQAGETKARTEEKTGQAVGATKDTAQHAKDRAADAAGHAAGKGQDAKEATKQKASDTGSYLGKKTDEAKHKAGETTEATKHKAGETTEAAKQKAGETTEAAKQKAGETTETTKQKAGETTEAARQKAADAMEAAKQKAAEAGQYAKDTAVSGKDKSGGVIQQATEQVKSAAAGRKDAVMSTLGMGGDNKQGDANTNTNTNTTKDSSTITRDH

SEQ ID NO: 7606 - protein, 390 aa, Zea mays
  Clone ID: ZEAMA-23APR03-C20964_2.p
MQSAAAIGLLRPCAARPLAAYTSPRRGAGACSGGTQPIITPRGIRLSARPGLVPASPLEEKENRRCRASMHTAASAGEEAGGGLAKTLQLGALFGLWYLFNIYFNIYNKQVLKVLPYPINITTVQFAVGSAIALFMWITGIHKRPKISGAQLFAILPLAIVHTMGNLFTNMSLGKVAVSFTHTIKAMEPFFSVLLSAIFLGELPTPWVVLSLLPIVGGVALASLTEASFNWAGFWSAMASNVTFQSRNVLSKKLMVKKEESLDNINLFSIITVMSFFLLAPVTLLTEGVKVSPAVLQSAGLNLKQVYTRSLIAAFCFHAYQQVSYMILARVSPVTHSVGNCVKRVVVIVTSVLFFRTPVSPINSLGTGIALAGVFLYSQLKRLKPKPKTA

SEQ ID NO: 7607 - protein, 179 aa, Zea mays
  Clone ID: ZEAMA-23APR03-C21000_3.p
MAAALWTLLLVVALSAALALASNRPVAAAATAAAEAANEVLRAHQLPGGLLPAGITAFRHDAATGAFEARLDAPSAARFEVGLRYNATVSGVISPGQIADISGVAAQDLFMWFPVHDIKVDIPSSGVIYFNVGVVKKHLPLAVFDAPPACTPDPLLQVISHPSLTLSMARALIHRSWDQ

SEQ ID NO: 7608 - protein, 329 aa, Zea mays
  Clone ID: ZEAMA-23APR03-C21059_3.p
MDSGSRSSGGAGFDDEDGLTTRREVSSSLQDLAVRVDWKGGSCSDGGTNQGPNTPRSKHSATEQRRRSKINDRFQILRELLPHNDQKRDKATFLLEVIEYIRFLQEKAQKYEATFPEWNQENPTMLPWSKGQIPGDSPPDPSHFVRNGSSPGSNFTGKLDDNHTSAAASGALDQAETNHVASGCYRSSETPANITNNAISQSQPQWTGPSPVDDSAVKSEMLNSQELAIDEGMISVSSTYSQELLISLSHALQSSGVDLSQTSISVQINLGKRAGKRSASAGGVSSNSKEPPADPASSNELGGHHVTTLGASADGLLPHATKRHKRDNS

SEQ ID NO: 7609 - protein, 255 aa, Zea mays
  Clone ID: ZEAMA-23APR03-C21070_3.p
MWPSWVKAHSSDSAAASTSTALVPAAGAGASPRLSIPNPSLKDLRSLLAPDSAATAPPSASPSPRVLHRIRVAASALRALRTLHQPPSRPPAAPAGKEPVPGGGRVVLYFTSLRVVRGTYEDCRAVRAILRGLRAAVDERDLSMDPGHLPELAALLPRVALPQVFVGGRHLGGADEVRRLHESGELRRIVAPAPGPAFYGSCARCGGERYLLCGACDGSHKRYSLKGGGGFRACAECNENGLVRCPACCVPVPVA

SEQ ID NO: 7610 - protein, 203 aa, Zea mays
  unsure (1)..(203): unsure at all Xaa locations
  Clone ID: ZEAMA-23APR03-C21090_24.p
MKFNIANPSTGCQKKLEIDDDQKLRAFYDRRISQEVSGDALGEEFKGYVFKIMGGCXQDLSVINLVIVKKGENDLPGLTDTEKPRMRGPKRASKIRKLFNLAKDDDVRKYVNTYRRTFTTKNGKKVSKAPKIQRLVTPLTLQRKRARIADKKKRIAKKKSEAAEYQKLLAQRLKEQRDRRSESLAKRRSKLSAAAKASAATSA

SEQ ID NO: 7611 - protein, 427 aa, Zea mays
  Clone ID: ZEAMA-23APR03-C21136_1.p
MGAPSSRALALGAAFLLLLVALPSAFLYLTSSAATRATLLDLKPFSARCAPAVAPLRVFMYDLPARFHVAMMGAAAGAGFPAWPPSAGGIRRQHSVEYWMMASLQDGGAGPERGREAVRVRDPDAADAFFVPFFSSLSFNVHGRNMTDPDTEADRLLQVELVDILWKSKYWQRSAGRDHVIPMHHPNAFRFLRAMVNASILIVSDFGRYTKELASLRKDVVAPYVHVVGSFLDDDPPDPFEARHTLLFFRGRTVRKDEGKIRSKLEKILKGKEGVRFEDSIATGDGINISTEGMRSSKFCLHPAGDTPSSCRLFDAIVSHCVPVIVSSRIELPFEDEIDYSEFSLFFSVEEALRPDYLLNELRQVPKRKWVDMWLKLKNVSHHYEFQYPPRKGDAVNMIWRQVRHKIPAVNLAIHRNRRLKIPDWWG

SEQ ID NO: 7612 - protein, 249 aa, Zea mays
  unsure (1)..(249): unsure at all Xaa locations
  Clone ID: ZEAMA-23APR03-C211527_1.p
MDEYQTRRSPAGERFIGMFSSPSTPSSSPTEPSFVAGDELHEDDFLFSSPDAAAPQPDGPRSPGRGAPQGHLGLLAALALREGDRRLLVRGGHGGGVAAAASAGTLLRRKATIAAAAASASATVASGNGGALSPTQSPTSSARAIPATAKPQNAGPARPYHQSAPVKVPVRPLRKPATGRWDEFDDDADFGRGDAAMLXPPHEMVARASAGGAGPAAPFSMLEGAGRTLKGRDLRRVRDAVLRQTGFLD

SEQ ID NO: 7613 - protein, 341 aa, Zea mays
  Clone ID: ZEAMA-23APR03-C21200_1.p
MHLESERMANTAKGKVCVTGASGFIASWLVKRLLESGYHVLGTVRDPGNGKKVGHLWGLEGAKERLQLVRADLLEEGSFDDAVMACEGVFHTASPVVTGSNSKEEMLDSAINGTMNVLRSCKKNPSLKRVVLTSSSSTVRIKDEADLPPNVLLDESSWSSIEFCESLQIWYAVAKILAEKAAWEFAGEHRIDLVTVLPTFVVGPTLSPELGPTASDVLGLFQGETGKFTTYGRMGYVHIDDVARCHMLAYEAAGARGRYICSAAVLDCGDLAALLARRFPAYPVPRSLPRAYGEQSYGFDTSKARALGLAEFKGVEEMFDDAVASFIGHGHLPAAEERRHA

SEQ ID NO: 7614 - protein, 323 aa, Zea mays
  unsure (1)..(323): unsure at all Xaa locations
  Clone ID: ZEAMA-23APR03-C21204_3.p
MGASSTPAAAAAAAPSRRKVTLYLVLLTLQYGAQPLISKRFVRQDTIVTSLVLATEAAKVICAIILLIADGSLKKQFSNWTLTGSLTASGLPAAIYALQNSLLQVSFKNLDSLTFSILNQTKLLWTSFFTFLILGQKQSSKQILALALLISAAVLLSVGESSSKGSNGGGSDYILLYGIIPVTVASMLSGLASSLCQWASQVKKHTSYMMTIEMSFIGSVCLLASTYRSPDGEAIRKYGVFHEWTSWTMVPVLMNAVGGILVGLVTTYAXGFVIVSALLVTALLQFVYDGKPPSLYCLMALPLVATSIFIYQKYPYVDKKKKV

SEQ ID NO: 7615 - protein, 162 aa, Zea mays
  Clone ID: ZEAMA-23APR03-C21207_4.p
MSGGIARGRLAEERKAWRKNHPHGFVAKPESLPDGTVNLMIWQCTIPGKQGTDWEGGYFPLTLHFSEDYPSKPPKCKFPQGFFHPNVYPSGPVCLSILNEDSGWRPAITVKQILVGIQDLLDQPNPADPAQTDGYHLFIQDPTEYKRRVKLQAKQYPALLVS

SEQ ID NO: 7616 - protein, 240 aa, Zea mays
  Clone ID: ZEAMA-23APR03-C2120_3.p
MGRGKVELKRIENKISRQVTFAKRRNGLLKKAYELSLLCDAEVALIIFSGRGRLFEFSSSSCMYKTLERYRSSNYSTQEVKAPLESEINYQDYLKLRTRVDFLQTTQRNILGEDLGPLSMKELEQLENQIEVSLKHIRSRKNQMLLDQLFDLKSKEQELQDLNKDLRKKLQETSPQNVIHDVSWEEGGHSGSSVLGPFQGLLQHHGNDPSLQTRYHQQAYMDQLNEDMADPDEHGRSGWI

SEQ ID NO: 7617 - protein, 228 aa, Zea mays
  Clone ID: ZEAMA-23APR03-C2120_4.p
SGSRTFAKRRNGLLKKAYELSLLCDAEVALIIFSGRGRLFEFSSSSCMYKTLERYRSSNYSSQEVKVPLDSEINYQDYLKLRTRVEFLQTTQRNILGEDLGPLSMKELEQLENQIETSLKQIRSRENQMLLDQLFDLKSKEQELQDLNKDLRKKLQETSPENVLHVSSWEEGGHSGASGNVLDPYQGLLQHPDNDPSLQFGYHHQAYMDQLNNEDLVDPNEHGRSGWI

SEQ ID NO: 7618 - protein, 177 aa, Zea mays
  Clone ID: ZEAMA-23APR03-C212984_1.p
LRMAFLLTLLLPWWPLSPWLSPAAAWFIFFNAVVSAIAVMSTSGSGSGGAGATPPSPTRRLCRSGSSMVLDRLRSLFIFSVEVEQLPIDESSSAAAASHCCWPEAEAASALSAIHRLRPQQPARRQRSAAPRNRAPLWRWQQPWSTRLRHRQRRRRAMQRRSKNMMSLLLAWTRPTR

SEQ ID NO: 7619 - protein, 636 aa, Zea mays
  Clone ID: ZEAMA-23APR03-C21363_2.p
MAKDYPASPKAQQLQESKKQRLTYILVVSALCIAFYVLGAWQNTTLPKPIGNSAITRVGCDPTAATAQSSGSVPSFGPGSGEVLDFDAHHRLTINNTDGDGELQQFPACPLNFSEYTPCEDRRRGRRFDRNMLVYRERHCPGKDEQVRCLIPAPPGYRTPFKWPRSRDYAYFNNIPHKELSIEKAVQNWIQVEGDKFKFPGGGTMFPRGADAYIDDINKLISLSDGKIRTAVDTGCGVASWGAYLLKRNIIAMSFAPRDTHQAQVQFALERGVPAIIGVMAKQRLPYPSRAFDMAHCSRCLIPWDEHDGLYLAEVDRILRPGGYWILSGPPINWKTHHRGWERTKDDLKREQDKIEDVARSLCWNKVVEKGDLSIWQKPKNHLECANIKKTYKTPHICKSDNPDAAWYTQMEACVTPLPEVSNQGEVAGGAVEKWPERAFLVPPRIKRGMIPGLDAKKFDEDKKLWEKRVAYYKRTIPIAENRYRNVMDMNANMGGFAASLVKYPVWVMNVVPVNSDRDTLGAIYERGFIGTYQDWCEAFSTYPRTYDLLHADNLFSIYQDRCDITGILLEMDRILRPEGTAIIRDTVDVLTKVQAITKRMRWESRIMDHEDGPFNPEKVLMAVKTYWTAEAEEEH

SEQ ID NO: 7620 - protein, 385 aa, Zea mays
  Clone ID: ZEAMA-23APR03-C21375_2.p
MASGDGDGGDGKKQSRRQLWAACLPRPGCFTVSAADEGPSAHGAGQGESKPKPTHLVVTVNGIVGSAENWRFAAKHFIRKHPEDVVVHCSGCNSAARTFDGVDVMGRRLADEVASIVDSRPELCKISFVAHSLGGLIARYAIALLYESETQKDSHEKFENHAVDYSSNQHSIGKIAGLEPINFITFATPHLGTRSHKQIPLLRGSNKLEKMAYRLSWIAGRSGKHLFLKDTEDEKPPLLLQMVTDYGGLHFMSALRSFKRRVAYSNVCNDFIVGWRTSSIRRQHELPEPRSFINNNRYPHIVYVEGPKIEDVDFLDAMIYEAKTTSEMEEVMLKGLNRVSWERVDVSFKKSRQRIFAHSTIQVKTYFLNSDGADVINHMIDHFVY

SEQ ID NO: 7621 - protein, 464 aa, Zea mays
  Clone ID: ZEAMA-23APR03-C213903_1.p
MVTPASPTTTLPAARKPLPLLLFSLSLPALLLLLSLVFLLSHTTFSLLICPLLPRMSSTRNATSAGSSGTHLGVSMDKTLQVFHATMPTTPSRRNATSSSSSTSFGVSADRTLQTFHAFAAAPPPPPAWPAAPSVTKSSRKKASAKRNKSLLKLLLRKTPQTRQFAPCTDELFAAPCTDRFFMTWLSPLEQFGRRELLVLESLFRWHRDGCLLVASDTMDSTGGRDKLRPFLERGFRLAVASPDLAYLLNGTPAEAWLGAVQRGRVSLGSIPLGQNLSNLLRLALLYRYGGIYLDADVVVLRPLSELRNTIGAQAMNDATGDWRRLNNAVMVFDRAHQLVHEFIAEFAAAFDGSKWGHNGPYLVSRVAARLRHLSPGLAFTVLPPRAFYPVHWSKIGGLFVAPKDRKGERWVKAKVENIKGQSFGIHLWNRESSRMEMEVGSVIETLISDSCLFCNSSMFVNQG

SEQ ID NO: 7622 - protein, 110 aa, Zea mays
  Clone ID: ZEAMA-23APR03-C214076_2.p
MDDAVNLLESLPLDVLIKILCKVNYSDLRHLLLVSKQVKEATIYARELHFKFSTPSTKSVFRDEETGGGDDTCPCAPKQHRAAKSRLRGQNLESIAVNLSASFESMLPEV

SEQ ID NO: 7623 - protein, 238 aa, Zea mays
  Clone ID: ZEAMA-23APR03-C21408_2.p
MAGRREGEHQASPWRSGTPAAEEDSGAFPSAIIFFALVGATATTAAVGQLRRTVSWFYTQLSRSEPYVFWEDIPRRPNRHRCGEAWERYHQRMRDRTEDQRERVERIRHMQDVFKKERSKCRDYRNWDSHNPNYYQHHQRDDWYWNAEAFYANQRTNFRAMTREAMTYTMSHHYSVLGLDRSRSEPFSDAEIKNAFRRKAMEYHPDQNQNNKEVAEAKFKEVMDSYEAIKRERRDRSC

SEQ ID NO: 7624 - protein, 484 aa, Zea mays
  Clone ID: ZEAMA-23APR03-C2140_1.p
MAPLRLRAGAAAPMAAAAATVVLAAILALFGCCAAAASAAATDVTAAAELDRIDRLPGQPPVNFSMYSGYVTVDAAAGRALFYWLMEASGVPAGSAPLVLWLNGGPGCSSLGYGAMEELGAFRVNPDGATLSLNPYAWNNVANVLFLDSPAGVGYSYTNTTDDLYAAGDNKTAHDSYAFLINWLERFPQYKHRDFYITGESYGGHYVPQLSWLVYQNNKGIKNPTLNFKGFMVGNAVIDDYHDYMGTFEYWWTHGLISDETYAKLWEDCKNDVSENPSEECQKIYEVAEAEQGNIDLYSIYTPTCKKTSLQKRRLIRGRMPWLPRGYDPCTELYITKYCNLPEVQDAFHANVTGIPYAWVGCSDPIYEYWKDSPRSMLPIYRELISAGLRIWVFSGDTDSVVPLTATRYSIDALSLPTITKWYPWYYDEEVGGWCQVYEGLTLVTVRGAGHEVPLHRPPQGLKLFEHFLRGEPMPKPVESVQSF

SEQ ID NO: 7625 - protein, 504 aa, Zea mays
  Clone ID: ZEAMA-23APR03-C21447_1.p
MAFFLAVACIYIVSLTLLVLLLDASRRRRTTGGGSSSTEEHKLPPGSLGLPFLGETLQLYSQNPKVFFASRLKRYGEVFKTHVLGCPCVILASPEAARMVLVSQAHLFKPTYPPSKERMIGAQALFFHQGDYHLRLRRLVKGWLGPDALRGLVPDVEAAVASTLDGWEGRVTSTFHTMKRLTFDVGVIAIFGHRLAGHVKEELRRNYFTMEKGYNSFPIPVACTSYSQAIKARQRLGAVLSGILAERRARRSDDDDDHGLLNALMRSRDDSGAAPPLSDDQIADNVIGVLFAAQDTTASVLTWILKFLHDNPKLLEAVKVEQMAAYEENDGGRLPLTWAQTRKMSITHLVILESLRLASIIAFTFREAVEDVHYQGFLIPKGWKVMPLFSNLHYSPDYFEDPHKFDPSRFKVAPRPGTFLPFGSGVHACPGNDLAKLEMLVLIHRLVTTYRWEVVGSSDDVTYSPFPVPKRGLLARLSRATTGSAVVGRAPPLDIGGPAGASYS

SEQ ID NO: 7626 - protein, 133 aa, Zea mays
  unsure (1)..(133): unsure at all Xaa locations
  Clone ID: ZEAMA-23APR03-C21515_1.p
CDTCRAGFETNATTPIAGAKVRLECRHYMSASGAVQRSAXGTTDAAGKYRIELVDNRGAEEVCSVALVSSPVPGCAEKEVGRDRAQVSLFTDAGAGLATTVRRANPLGFLKDKPLANCGQILSSYALGSAPSY

SEQ ID NO: 7627 - protein, 311 aa, Zea mays
  unsure (1)..(311): unsure at all Xaa locations
  Clone ID: ZEAMA-23APR03-C21550_2.p
MSRKEAEPAGQDGSSSSATDGGGGSGSGRELADALARRRLYREVTLALHSGLRDAKADFSFLRARGLRSLLGFLRSTASAADDALLLLFRHSQSIPDLQGNWHLLIIPVLFQNSLHQPKQDPVVTLDHIFGTEPMKITSPPTDSEIALALRVLEGCCLLYSRCTALAHKYKAVKVLLNILASRGPTEQGVCLDTLISLMLDSPSNQMDFEEYSGLEKVAELLKDVQVEKHIRXEMWGVPIVAHWTCFCEGKLSHTXQMKNLFGXAVRITYMGSKPVRLHLGCRAKADDLANTSNESCRILGTLLGLVHSSV

SEQ ID NO: 7628 - protein, 501 aa, Zea mays
  Clone ID: ZEAMA-23APR03-C21596_1.p
MGLRSPLVLLLLLLFLAATFRPSAAALAPPTGSIVKQLSSVVRWPRAAPSTHGPKQPGHPQYADGHVGVALQFESGYFVETLVEGDKLGVTPHTIRVSPVEGGELLAVDSAHSNIVRITPPLSEYSRGRLVAGSFQGHSGHIDGKPSDARFKRPTGVAVDDMGNVYVADTANLAIRKIGESGVTTIAGGKSNIPGYRDGPSEDAKFSTDFDVVYVKKMCSLLVIDRGNAALRKISLPQEDCTYQDSALLSSDLILVIGAVVAGYIFSGFQHGFGFSGSEKVEAPENEQHESSTIGKPPLVVESLKEEPGAGWPSLGTLIADLLKLAIEGVGKLLLSVVPQRMQHGKRKTDLTPLRDRLVMPEDREETAAAAQKLSSTPMRPETAHAPNPVTETAAPKAPKSTKPSKLRDSSTLSSKHRSSKRQEYADFYGTSEPAPVGAAAKVPKDRLRHRHHHREKSGEVAYGAAHHDLKPAEAKPADYSDPSYDPYVRSKYAAESGYRY

SEQ ID NO: 7629 - protein, 117 aa, Zea mays
  Clone ID: ZEAMA-23APR03-C21648_15.p
MEKYNSNTQFAPLRETPFALRGALGSSSSYLEQARGYTSSPVAALRPKMSTPGNRLLHTSCPLSSAVANRPLSPHLPLKKPQFSATFSIPHRIFGVALGVAIISVPLATKFSLMFGV

SEQ ID NO: 7630 - protein, 467 aa, Zea mays
  unsure (1)..(467): unsure at all Xaa locations
  Clone ID: ZEAMA-23APR03-C216720_1.p
MAWSETDAALFAAVLGRDAAHHLSTTPPHQDAPAASAPELQARLQDLVERGGAWTYGIFWQESCAGGRAVLGWGDGHCXDGGAPHHDDADRSVARKRALLRLHALXGGGDDEGADYALRLDRVTAAEMYFLASMYFSFPEGAGGPGHALATARHAWATVDPAPGWYVRASLAQSAGLRTVVFLPCKGGVLELGSAVPVRETPETLRALQTALAVARPPAREECMRIFGQDLSPGGSARAPRSVDNWAPHPHLAAQATAASALASKEAAAGHKAPEPPRSIDFSKPGKPGHGQAGGEERRPRKRGRKPANGREEPLNHVEAERQRREKLNQRFYALRAVVPKISKMDKASLLSDAIAYIQELEDRLRGGGGGGGGCSAARPDSPDVEVKAMQDEVVLRVTTPLYAHPVSRVFHAIRDAELIVAASDVAVADEAVTHTLVLRSPGPEQLTAETVLAAMSRGMTSATPSP

SEQ ID NO: 7631 - protein, 241 aa, Zea mays
  unsure (1)..(241): unsure at all Xaa locations
  Clone ID: ZEAMA-23APR03-C21698_4.p
MDGDGGGAGALHHHTRSPEDVFRDFRARRAGIVKALTTDVEKFYQQCDPEKENLCLYGLPNETWEVTLPAEEVPPELPEPALGINFARDGMVEKXWLSLVAVHSDAWLLSVAFYFGARFGFDKDARRRLFTMINNLPTVYEVVTGVAKKQSKAPNGSSKSSKPNSKXHPKEEEDSGREDAEEDQAYLCGSCGESYANGEFWICCDVCEKWFHGKCVRITPAKAEHIKQYKCPSCSTKRSRE

SEQ ID NO: 7632 - protein, 440 aa, Zea mays
  unsure (1)..(440): unsure at all Xaa locations
  Clone ID: ZEAMA-23APR03-C21729_1.p
MAPTAHHQAARDDELEKSRRKPGGGGKAAAVRCHPVLAEERKASIRGVVGDLLAMAGGGRRSLISLGVGDASSHACFRRGGEFAAEAVAHAALSGAFDCYAPSFGFPDARRAVAAHLSTGAVHRTHEADVFMTAGGTGAITAIATVLGGAPGANVLLPRPGFAPYEAACEVAGAEPRFYDLLPRRGWEADLAGVRALADAATAALVVINPNNPCGAVYSAHHLRXLAETARELGIPIVADEVYAHMVFGGSRFVPMASLAHIAPVVSIGALSKRFMLPGWRLGWLAFCDPNGALKHVRAATEMLLNVTSGPASIVQAAVPKILSAEHHEFHRNVVHLLESAADALYRRVNQIEALRCYSKPEGSMFMMVEINTSILHGVANDMDFARELIKEECVLVLPGSVIGLKNWVRIFFGAPVSLILEACDRIEMFCRRRTLKQNN

SEQ ID NO: 7633 - protein, 439 aa, Zea mays
  Clone ID: ZEAMA-23APR03-C21731_1.p
MGISARWLKSLVGLRKVGRQQQQRRKDDADVGRMKTDVADQFHFQIQHSQDDNSIAAQEIPEVSYGNDPPEDDSNVPSCFEPARSSAHMPFCQTEEAQKEIWAATIIQTAFRAFLARRARRALKGLVRLQALVRGHIVRKRAATTLRCMQALVRVQARVRARRVRMALENQTDRQNTSPEHTIEARVREIEDGWCDSIGSVGDIQAKLLKRQEAAAKRERAMAYALAHQWQASSRQPTAFEPDKNSWGWNWLERWMAVRPWESRFLGTYGTDGIFVVNENRQPDRSATKTPYRKPVKKHDSTLQSNMLNQKVFPSNSEGGGSSTNRSSGLVSTKSRLKVLPREGSEEASSHPSVIVRSTSNPKERISSINSKERTGDLDFQVHKRSSLPGIGPEAGKHLTKKGTVNRSLKATKDSQILGSRHHLASSIDPVPTRVELET

SEQ ID NO: 7634 - protein, 457 aa, Zea mays
  Clone ID: ZEAMA-23APR03-C21746_1.p
MASASAAPAPDREEIVFLDVETSTPPCVLLEFGAVVVCSRRLVDVSSFATLVRPANLDALPDPTARSNGITRGTLADAPPFRDVADMVYDVLHGGVWAGHNIVHFDSMIIMDAFAEIGRPPPQPKAMIDTLPLLTQCFGPRAGDMKLASLANYFGLGKQRHRSLDDVKMNIDVFKNCATVLFLEESLRGVRVPTVQNMSSGGATIRTQGITSDPAPNRDNPNESLLVGSSTVHVEEMMLDTTVTVQTDTRSSGAFSGFVELDDVSTESIKISAPLFLRPFGPRAIVQHKGSPLQLICPGLEVLWVNTKGFPNSPHRPKVGIKVDIPENLSKVLGFCDDLAQSSSSSPGPGAICSNSRWKSLIERDADRRPTVWLKIPTFGSGDTAACRTHVYEKECDGVVPRLVSERVDPSELASMLQGNKVVDAFVSVETFDHYQSAGIRLVANRLDVHFKRQQQA

SEQ ID NO: 7635 - protein, 510 aa, Zea mays
  Clone ID: ZEAMA-23APR03-C2175_18.p
MFIESFRVESPHVRYGPTEIESEYRYDTTELVHEGKDGASRWVVRPKSVKYNFRTRTAVPKLGVMLVGWGGNNGSTLTAGVIANREGISWATKDKVQQANYYGSLTQASTIRVGSYNGEEIYAPFKSLLPMVNPDDIVFGGWDISNMNLADSMTRAKVLDIDLQKQLRPYMESMVPLPGIYDPDFIAANQGSRANSVIKGTKKEQVEQIIKDIREFKEKNKVDKIVVLWTANTERYSNVCAGLNDTMENLLASVDKNEAEISPSTLYAIACVMEGVPFINGSPQNTFVPGLIDLAIKNNCLIGGDDFKSGQTKMKSVLVDFLVGAGIKPTSIVSYNHLGNNDGMNLSAPQTFRSKEISKSNVVDDMVSSNAILYEPGEHPDHVVVIKYVPYVGDSKRAMDEYTSEIFMGGKNTIVLHNTCEDSLLAAPIILDLVLLAELSTRIQLKAEGEDKFHSFHPVATILSYLTKAPLVPPGTPVVNALAKQRAMLENIMRACVGLAPENNMIMEYK

SEQ ID NO: 7636 - protein, 1616 aa, Zea mays
  Clone ID: ZEAMA-23APR03-C2179_1.p
MATLPRAAPPTPAALLPLPRAAPPLLLAGRAAAARRSRLRARGPSAAARRSWVVASAASSSSRAVVGGVARREAPPAPQKPTQQAADLNHILSERGACGVGFVANLKNMSSFDIVRDALMALGCMEHRGGCGADSDSGDGAGLMSAVPWDLFDDWASKQGLALFDRRNTGVGMVFLPQDEKSMEEAKAATEKVFVDEGLEVLGWRPVPFNVSVVGRNAKETMPNIQQIFVKVAKEDNADDIERELYISRKLIERAAKSFSWADELYFCSLSSRTIVYKGMLRSEVLGQFYLDLQNELYKSPFAIYHRRFSTNTSPRWPLAQPMRLLGHNGEINTIQGNLNWMRSRETTLKSPVWRGREHEICPFGDPKASDSANLDSTAELLLRSGRSPAEALMILVPEAYKNHPTLSIKYPEVTDFYDYYKGQMEAWDGPALLLFSDGRTVGATLDRNGLRPARYWRTSDDFVYVASEVGVIPMDESKVVMKGRLGPGMMITVDLQTGQVLENTEVKKTVASASPYGTWLQECTRLIKPVNFLSSTIMDNETVLRHQQAFGYSSEDVQMVIESMASQGKEPTFCMGDDIPLAVLSQRPHLLYDYFKQRFAQVTNPAIDPLREGLVMSLEVNIGKRGNILEVGPENADQVALSSPVLNEGELETLLNDSKLKPKVLSTYFDIRKGLDGSLDKTIQALCEEADAAVRSGSQLLVLSDRSEAPEPTRPAIPILLAVGAIHQHLIQNGLRMSASIVADTAQCFSTHHFACLIGYGASAVCPYLALETCRQWRLSNKTLNLMRNGKMPTVTIEQAQRNFIKAVKSGLLKILSKMGISLLSSYCGAQIFEIYGLGQEVVDLAFCGSVSKIGGLTLDELGRETLSFWVKAFSEDTAKRLENFGFIQSRPGGEYHANNPEMSKLLHKAIREKRDNAYTVYQQHLASRPVNVLRDLLELKSDRAPIPIGKVESATSIVERFCTGGMSLGAISRETHEAIAIAMNRIGGKSNSGEGGEDPIRWNPLTDVVDGYSPTLPHLKGLQNGDTATSAIKQVASGRFGVTPTFLVNADQIEIKIAQGAKPGEGGQLPGKKVSAYIARLRNSKPGVPLISPPPHHDIYSIEDLAQLIYDLHQINPKAKVSVKLVSEAGIGTVASGVSKANADIIQISGHDGGTGASPISSIKHAGGPWELGLTETNQTLIQNGLRERVVLRVDGGFRSGQDVLIAAAMGADEYGFGSVAMIATGCVMARICHTNNCPVGVASQREELRARFPGVPGDLVNYFLFVAEEVRAALAQLGYEKLDDIIGRTDLLKPKHISLVKTQHIDLGYLLSNAGLPEWSSSQIRSQDVHTNGPVLDETILADPEIADAIENEKEVSKAFQIYNVDRAVCGRVAGVIAKKYGDTGFAGQLNITFNGSAGQSFGCFLTPGMNIRLVGEANDYVGKGMAGGELVVVPVDKTGFVPEDATIVGNTCLYGATGGQVFVRGKAGERFAVRNSLCQAVVEGTGDHCCEYMTGGCVVVLGKAGRNVAAGMTGGLAYILDEDDTLVPKVNKEIVKMQRVNAPAGQMQLKGLIEAYVEKTGSEKGIAILREWEAYLPLFWQLVPPSEEDSPEACAEFERVLAKQATTQLSAK

SEQ ID NO: 7637 - protein, 243 aa, Zea mays
  Clone ID: ZEAMA-23APR03-C217_101.p
MASLFKDPSKLSAYKDRRFKGTQEEYEATLHASTTLYIGNMSFYTTEEQAYELFSRAGEIKKIIMGLDKNSKTPCGFCFVLYYSREDAEDAVKYISGTMLDDRPIRVDFDWGFEEGRQWGRGRSGGQVRDEYRTDYDPGRGGYGKMVQRELEAQRELVDYGGSFQPNAPPPYERGERKRGYGDSHRNDRGDYQRKRYRSSDDRSAPEESKRAPDSDPAEKNPRFREKGDSDEEEDDYDKRRRR

SEQ ID NO: 7638 - protein, 388 aa, Zea mays
  Clone ID: ZEAMA-23APR03-C217_86.p
TSTSASRLAPSLPPPPPHQSPLPYHGTGPPPPRPMTSPSSHHPDSTSASSTPRAGVGNGGIHHLHPPSLHPAPAPTPAAPPAQAQAAHGGPQVRLMCSFGGRILPRPGDRQLRYVGGETRIVSFPRAATSFAALVAALAKVAPVLFAPGAPRPSLKYQLPQDDLDSLVSITSDDDVDHLMDELDRIQDLSANVARPPRLRVFLFAPAPDAAFGSVFSGTTSEAASTDQWFVDALNAPAPQPHPTERGRSEASSIVSEVPDYLFGLETTSGEPSPGPAAVRAKSDATETPRHHDDDECDVPPSARQMPYVVEGASSWPAPAAAVHGAACVLLPRAAAGPLSRTVCAGRLHASPGLPHCRWRRKRGAWRRSSRGRRRLRRPAGTCRRSRR

SEQ ID NO: 7639 - protein, 181 aa, Zea mays
  Clone ID: ZEAMA-23APR03-C21819_3.p
LQKFRTRWINLRVPFQEVYGDVRCNLKEAVQLAGLTWEGRAHCGLDDARNTARLLALLMHRGFKFSITNSLVWQPAAAPQSTAATCHFSPDRSPDPVVVQLQHQQQQHKPKEALGSPASLVNPSYATPAGGKDRAMYCYCGVLSRWSVVRKPGPMQGRYFFGCGNWTATRRAICPYFAWAS

SEQ ID NO: 7640 - protein, 102 aa, Zea mays
  Clone ID: ZEAMA-23APR03-C218454_1.p
LGGGVKKKREGEKRGLKLTTKAATASNNHHRGGKLKKNDAWLSRMPNPHPSPEHVRRLLRRQGSPQSAEPLVCTTTTVTATASSLHRGKKDGDSEGEDEGES

SEQ ID NO: 7641 - protein, 84 aa, Zea mays
  Clone ID: ZEAMA-23APR03-C21924_3.p
DKTETCLTVIEQEMEQREKLVRRMWDVYTRTDNHVRLPRFWQEAFEAAYEELAGDDTLTTDAAISEIARMSIHRPEVEQSSNKD

SEQ ID NO: 7642 - protein, 334 aa, Zea mays
  Clone ID: ZEAMA-23APR03-C21935_2.p
MADSPSFRRYPLASSVDLVRWLPSSSISPSGRLLAAAVHDPTSGSFASSIRLLPLSDPVSRLASVPLPSRATALRCSHAALAAATSSGSLHFVPSSFDSDAAVSVPGGAGFHVGPVRGLDCGGEEWVTAGEDGRVHVVGGVADGRVVTRRMWDGKGMSGYEAARWASPVEFATGGAGCGVQWWDRRKGDAIVAQCNGIWGRGIVTGMVHSIDIHPSRKHICVVGGSSGTVFAWDLRQPQELIPISVLGLNETAEPVCESEVWEVLFDTYTKSSDIISSASARILPVMMCSEDGILAVVEQDKRPLELLAESCAINSFDIDPQNPSVSPWLHLVK

SEQ ID NO: 7643 - protein, 822 aa, Zea mays
  unsure (1)..(822): unsure at all Xaa locations
  Clone ID: ZEAMA-23APR03-C219428_1.p
MQQRSCSCLMERDAVLEDAAAGDGEEQDQDQDQEELVVPIGAQKHDPAWKHCVMVRSDGRMRLKCAYCGKHFLGGGIHRFKEHLARRPGNACCCPSVPRDVQDTMLRSLAAVAAKKMQRKLAAASTTPASVSTASGGTGSPIHMISLNEVLDFEAVPLEEQRPPVPEGSIRGSTSGKKKRKQVTYAPAPPLIPQIRPQHVRSTPQNNLLHGLQHVPPTPQTNPLHQVVMAVNAVTPAEHFEHAAPSEKEHVSVAVGRFLYDAGVPLEAVNSVYFQPMLEAIAAAGGRPETLSYHDFRGHILKRSLDDVTARLEFFRGSWTRTGCSVLADEWITDKGRTLINFSVYCPEGTMFLKSVDATSIVTSSDALYELLKSAVQEIGEKKVVQVITNNSEIHAAAGKKLGETFPTLFWSPCTFQCVDGMLEDFSKVDAISEIISNAKAITGFVYNSAYALNLMKKYLQGKDLLVPAETRAAMNFVTLKNMYSLREALQAMVNSDEWIDLLPKKGGIEXSNLVNNLQFWNSCAAVVHITEQLVHLLKLVGNPKRPSMGYVYAGLYKAKAAIKKELVSKNDYMVYWNIIDWRWDNQTPQPLHSAGFFLNPLFFYGIRGDISNGIFSGMLDCIERLVPDVKIQDKVQRELHIYRSETAVDFRRQMAVRSRRTLPPAEWWYTYGGACPNLTRLAVRILSQTCSARGCDRTNIHFEQVHDERMNSFERQRMHDLTFVQYNLRLQQRQQRKAKAFDPLSVDYIDVVDDWAVDRPAMFSGPAEQPNWMEINQSGNRMTSREPTEDEFESFIEGVDDEMIQGAAQGFHEDGDDPACG

SEQ ID NO: 7644 - protein, 299 aa, Zea mays
  Clone ID: ZEAMA-23APR03-C2196_2.p
MGEAASAVAASKRGGGGPAPFLTKTHQMVEERGTDEVISWAEQGRSFVVWKPVELARDLLPLHFKHCNFSSFVRQLNTYGFRKVVPDRWEFANDNFRRGEQGLLSGIRRRKSTALQMSKSGSGGSGGVNATFPPPLPPPPPASATTSGVHERSSSSASSPPRAPDLASENEQLKKDNHTLSVELAQARRHCEELLGFLSRFLDVRQLDLRLLMQEDVRAGASDDGAQRRAHAVASQLERGGGEEGKSVKLFGVLLKDAARKRGRCEEAAASERPIKMIRVGEPWVGVPSSGPGRCGGEN

SEQ ID NO: 7645 - protein, 429 aa, Zea mays
  unsure (1)..(429): unsure at all Xaa locations
  Clone ID: ZEAMA-23APR03-C21978_2.p
MEPEIQSLCPSTTAVLLLLAACLAAAVAALDAADYARPPLPAGGGGRRVLFANGLGLTPQMGWNSWNHFQCDINEAVVRSTADALVATGLAKAGYTYVNLDDCWADSERTKEVARVLLRDLVGYMVANPKTFPSGIKALXADYVHSKGLKLGIYSSAGTRTCSNRMPGSLGYEERDAKMFASWGVDYLKYDNCYRDGTPETVRFGRMSRALVNSGRPIFYSLCEWGFMEVPKWGGMYGNSWRTTGDINDTWSGMLDNIDLNDAYARYAKPGGWNDPDMLEVGNGGMAYNEYVVHFSLWAIAKAPLVIGCDVTRVSNETLGILSNAEVIAISQDRLGVQGQKVSKYGNDLEVWAGQLSGHRKAVLLLNRGATRSASITAAWPDVGIRRGVAVQARDVWKHETLPGWFTGSLTAVVGPHSCKLFVLTPVPS

SEQ ID NO: 7646 - protein, 487 aa, Zea mays
  unsure (1)..(487): unsure at all Xaa locations
  Clone ID: ZEAMA-23APR03-C22014_2.p
KLRYVEVEEDAGVELFYYFVQAESGAAAAADDTPFLFWLTGGDRCSVFSGLAYEIGTPSIWXPIRFVLEPYNGTLPRLRYNHNSWSKVSHILFVDSPVGAGFSFSRDPKGYDVGDISASLQLQEFLIKWFSDHPEYLANPFYIGGDSYVGKIVPFLRQMISEGIELGRRPFPNLKVCPSYISLRNGRCYIDVGYXLVYIQEINCSRSLRLMICRFXICHDQGYLVGNPITGESIDFTSRVPYAHGVGIISDQLYETILGHCQGEDYTSPANALCAQALDTFNNLINEVQNAQILLDTCVYASPAPNVLSRPVDGGRRILRAAGMGGGATLNHPPARPRFGCITYGYYLSYFWANDERTRTALGIKKGTVDEWVRCHDADLPYTIDLKSAIKYHRNLTSRGYRALVYSGDHDLLVPHLGTQAWVRSLNFPVVDDWRAWHLGGQAAGFTINYSNNMTFATIKGGGHTAPEYEPERCFAMFSRWILDRPL

SEQ ID NO: 7647 - protein, 483 aa, Zea mays
  unsure (1)..(483): unsure at all Xaa locations
  Clone ID: ZEAMA-23APR03-C22014_7.p
NSKRRYVEVEEDAGVELFYYFVQAESGAAAAADDTPFLFWLTGGDRCSVFSGLAYEIGPIRFVLEPYNGTLPRLRYNHNSWSKVSHILFVDSPVGAGFSFSRDPKGYDVGDISASLQLQEFLIKWFSDHPEYLANPFYIGGDSYVGKIVPFLRQMISEGIELGRRPFPNLKVCPSYISLRNGRCYIDVGYXLVYIQEINCSRSLRLMICRFXICHDXGYLVGNPITGESIDFTSRVPYAHGVGIISDQLYETILGHCQGEDYTSPANALCAQALDTFNNLINEVQNAQILLDTCVYASPAPNVLSRPVDGGRRILRAAGMGGGATLNHPPARPRFGCITYGYYLSYFWANDERTRTALGIKKGTVDEWVRCHDADLPYTIDLKSAIKYHRNLTSRGYRALVYSGDHDLLVPHLGTQAWVRSLNFPVVDDWRAWHLGGQAAGFTINYSNNMTFATIKGGGHTAPEYEPERCFAMFSRWILDRPL

SEQ ID NO: 7648 - protein, 201 aa, Zea mays
  unsure (1)..(201): unsure at all Xaa locations
  Clone ID: ZEAMA-23APR03-C22037_2.p
MFNSWSWPPPGGGSREATVAAALAREPRRFFAGAAVRERAHPCRWRPEKFFEVEMKVRDYEIDXYGVVNNAIYASYCQHGRHELLESVGISADAVARXGESLALSELNLKYFAPLRSGXXFVXVXVRLAGIKGVRMIFDHIITKLPNHELILEAKATAVCLNKDYYPTRIPRELLSKMQLFLPVDSRGSNEDVNNRNNSCN

SEQ ID NO: 7649 - protein, 211 aa, Zea mays
  unsure (1)..(211): unsure at all Xaa locations
  Clone ID: ZEAMA-23APR03-C22040_2.p
MESVASAAIATTSRSLPLPFSSTPVHRRRRAAFLPVAASKRHDDDKEAAKGSGSEPRREPTSLAPYGLSISPLSKDAAMGLVVXAATGSGWTTGSGMESPPTASKAGGAGRPEVSTLPWSLFTKSPRRRMRVAFTCNVCGQRTTRAINPHAYTDGTVFVQCCGCNVFHKLVDNLNLFHEMKCYVGPDFRYEGDAPFNYLDRNEDGDSIFPR

SEQ ID NO: 7650 - protein, 338 aa, Zea mays
  Clone ID: ZEAMA-23APR03-C22059_1.p
GEREYYEKQFATLRSFEEVDSLEESNEINEDEELAEQIQSEFAMKISNYANIVLLALKVYATIKSGSIAIAASTLDSLLDLMAGGILWFTHLSMKSINVYKYPIGKLRVQPVGIIIFAAVMATLGFQVFIQAVEKLVVNEAPDKLNQVQLLWLYSIMIFATIVKLGLWLYCRTSGNKIVRAYAKDHYFDVVTNVVGLAAAVLGDRFYWWIDPIGAIVLAVYTISNWSGTVWENAVSLVGESAPPEMLQKLTYLAIRHHPQIKRVDTVRAYTFGVLYFVEVDIELPEDLPLKEAHAIGESLQIKIEELPEVERAFVHLDFECDHKPEHSILNKLPSSQP

SEQ ID NO: 7651 - protein, 496 aa, Zea mays
  unsure (1)..(496): unsure at all Xaa locations
  Clone ID: ZEAMA-23APR03-C22081_2.p
MGGGGGGGGGKSEKARRSSARVRLWVARASTVLLWTCLVQLAAYRELWAPSVLSRWPGCLNQPHVARRPSERVADAGQTQAARALVVLPPKRIYRNNGYLMVSCNGGLNQMRAAICDMVTIARYLNVTLIVPELDKASFWADPSDFQDIFDVDYFIASLRDEVRILRQLPPRLKRRVEMGSLRSLPPVSWSDIGYYRRQILPLVKKYKVVHLNRTDARLANNGLPVEMQRLRCXVNYNALRFTPEIEDLGRRLVRALRRNGPFVVLHLRYEMDMLAFSGCTHGCSSMEAQELTKMRYAYPWWKEKVIDSDAKRKDGLCPLTPEETALVLQALGIDRGYQIYIAAGEIYGGQRRMAALTSAYPNVVRKETLLPWEVGLFQNHSSQMAALDYMVSLESDVFIPTYDGNMAKVVEGHRRYLGFRKTVLLDRRRIVELVDEYRNGTLSWTDFSSAVMASHTSRMGEPSRRQTVPDRPKEEDYFYANPHECLHQPEDVSAL

SEQ ID NO: 7652 - protein, 1038 aa, Zea mays
  unsure (1)..(1038): unsure at all Xaa locations
  Clone ID: ZEAMA-23APR03-C22165_1.p
MPAQAHNTSNLALISSDERGTRLLDQFEDTLVRVLVAAAAVSFLLALSSSAGTLTLAAFVEPLVIFLILVVNAAVGVWQEANAERRVDALREIQSHHAAVLRDARCVPRAPLARDLVPGDVVQLRVGAKVPADMRVPASRAPPSSASSRASLTGETASVNKTSRALPLEDADIQAKDCMVFAGTTVVNGAALCIVARTGMDTEIGAIHAQIHQASQEDDDTPLKKKLNEFGEALTKIIGLICALVWLINCKYFLTFDLQGGWVPRNITFSFEKCTYYFEIAVALAVAAIPEGLPAVITTCLALGTRKMAAKNALVRKLPSVETLGCTTVICSDKTGTLTSNKMSVAKLVAVGDSSQEVRTFKVDGTTYDPRDGKIHDWPAGSIDANLETIAKVAAVCNDANVAHSSHQYVATGMPTEAALKVLVEKMGLPGGKNGLSLDPSEILGCCAWWNNVAKRIATLEFDRTRKSMGVIVKTSSGSNALLVKGAVETLLERSSHIQLKDGSVVPLDEKAKRTILASLHEMSTNALRCLGFAYKEALAEFATYDGENHPAHKLLLDPANYAAIETDLIFAGLVGLRDPPREEVYDAIEDCRAAGIRVMVITGDNKETAEAICREIGVFSPDEDITFKSLTGKEFMALEDKKTLLRRKGGLLFSRAEPRHKQEIVRLLKEDGEVVAMTGDGVNDAPALKLADIGVAMGITGTEVAKEASDMVLADDNFSTIVSAVGEGRSIYNNMKAFIRYMISSNIGEVASIFLTSALGIPEGLIPVQLLWVNLVTDGPPATALGFNPPDKDIMKKPPRRSDDSLITPWILFRYLVIGLYVGMATVGIFVIWYTHGSFMGIDLTGDGHTLVTYSQLSNWGQCSSWXTTSRPRLSPPEPERSRSTXDPCDYFHAGKVKATTLSLSVLVAIEMFNSLNALSEDSSLLAMPPWVNPWLLVAMSVSFGLHFLILYVPLLATVFGIVPLSLNEWLLVLLVALPVVLIDEALKLAGRCTSPSSGPTRRSRKKKQKXASSERALTFDXRAQLLNHSINHVNKR

SEQ ID NO: 7653 - protein, 878 aa, Zea mays
  Clone ID: ZEAMA-23APR03-C222436_1.p
MRRRRCPLLAAVLFLLPLFHRHHAASGTDTDTVTLAAPLMGNRTLVSAGSAKYVLGFFAPDPDATGSGRAYLGIWFNGIPARTVVWVANRESPVLGSVGAAALRVLANGSLAIVVVDETDYDHDQQPVVWATPPPATSSGSNATAQLLDNGNLVLRVPGAGVVWQSFDHPTDTLLPGMKLGIDFRTGLDRRMVSWRAAGDPSPGEYSFRLDPSGSPELFLYRGSARVYGSGPWNGYQFTGVPNLKSNSLLTFRFVSAADEAYYSYGVVDSAAVLTRFVLDSSGQIQRLMWIDMTRSWSLFWSYPLDECDGYRACGPYGVCSVERSPICGCAPGFDPRFPKEWALRDGSGGCRRRTDLACAGDGFAALTNMKLPESANATVDMSLTLDQCREACLRNCACRAYAGANVSAPGATGCFLWTGDLLDMRQFGKGGQNLFVRLAASDLPLSSSSPADTDGRTKRLVEIIVPSVAAPALLLLAGLCICAVRTRRRRTKEKEAIPLALLRDAQRQSAPFGRRNQIAASTDAQDESLHDGQQGGSQDCDLPSFDVETIQAATGNFSAHSKIGQGGFGPVYMGKLDSGQDIAVKRLSRRSTQGLREFKNEVKLIAKLQHRNLVRLLGCCIDGSERMLVYEYMHNRSLNTFLFNEEKQPMLSWEKRFSIINGIARGILYLHQDSALRIIHRDLKASNILLDKDMNPKISDFGVARIFGTDQTAAYTKKVVGTYGYMSPEYAMDGVFSTKSDVFSFGVLVLEIVSGKKNRGFYHTELDLNLLRYAWRLWKDGESLEFMDQSIADTSNAAEVLKCIQIGLLCVQEQPKRRPTMSAVTTMLTCENPTLPEPCEPAFSTGRNHDDDDEDPEAKACRSNSASSWTCTVVEGR

SEQ ID NO: 7654 - protein, 600 aa, Zea mays
  unsure (1)..(600): unsure at all Xaa locations
  Clone ID: ZEAMA-23APR03-C22251_2.p
MSSTPPAVASPASEQTKSKKKKHKSKDLPATDPPSLAEAEEKTDGYLIKPQSLVPSLDTSTWPLLLKNYDRLNVRTGHYTPLPSGHSPLKRPLAEHLRYGVINLDKPSNPSSHEVVAWIKRILRAEKTGHSGTLDPKVTGNLIVCVDRATRLVKSQQGAGKEYVCVARFHAAVPDTARVARALEALTGAVFQRPPLISAVKRQLRVRTIYESKLLEHDPERHLAVFWISCEAGTYVRTLCVHLGLLLGVGAHMQELRRVRSGILGEQDNMVTMHDVMDAMWSLDNYKDETYLRRVVMPLEVLLTSYKRLVVKDSAVNAICYGAKLMIPGLLRFENDIETGEEVVLMTTKGEAIAIGIAEMTTAVMATCDHGAVAKIKRVVMDRDTYPRKWGLGPVALKKKKMVAEGLLDKHGKPNEKTPAEWLRNVVLPTGGDVSIASIAAAPEPEKVKVEQDAVAGEKVKEKKKKRQKDENNGDDASVPAKKIKVEEDAEVVEVEGDKSEKKKKKKXDEVESESADAAEAKEVEKADAADETGSEKKKKKKSKEGSAADETGSEKKKKKSKEGSAAVDAESAEHVDGAGVEKNKKKREKKKKIGETEQA

SEQ ID NO: 7655 - protein, 303 aa, Zea mays
  Clone ID: ZEAMA-23APR03-C222943_1.p
MDALWNGSSCDWPAPTVIISDDDAAAAELRRGPWTVDEDALLAAHVAAHGEGRWNELARDAGLRRTGKSCRLRWLNYLRPGVRRGGFTPREQLLILDLHSRWGNRWSKIAAHLPGRTDNEVKNYWRTRVQKHAKQLHCDVGSRRFHDAMRNLWMPRLIERIHADDSAAVAANATGDVSHFYSASPSHELSSSSQPAPAYRNAAPNGSCARAPSPDASCVTGPSSWSREASPASQFQSSGSTIAGPSTSTELCQNGCSSATSVDMFDESWSELLARANHDDTDFGLGETGDNWWGLEDIWEQPL

SEQ ID NO: 7656 - protein, 895 aa, Zea mays
  Clone ID: ZEAMA-23APR03-C2231_2.p
MASSSKASDSSSQRSKRSDQGTGREAAPASVVPIHGNLTQLIRQIKSRRLLYIKEKLEANRKTLQRHSCSLFDVAAAAEVASRGSDGGNALSQRAAEGQFRLAGSDLAHGIGERDVVYMQEENLASGTLVLSSSGAAAQRTVVRFVKLPLVERIPPYTTWIFLDKNQRMADDQSVVGRRRIYYDPVGNEALICSDSDEEIPEPEEEKHFFTEGEDQLIWRATQEHGLNREVVNVLCQFIDSTPSEIEERSEVLFEKNEKNSGSSDKIERQLSLDKTMDAVLDSFDNLFCRRCLVFDCRLHGCSQNLVFPTEKQPYSFEPDENKKPCGRQCYLRWRGGFQEIHDVGLSGCATYNMESGTVSHKVDVSIMSESEDSNREKGNIRSMTLVGTSGSKIISSVSAEESTTPPSADTSETENASSDMPPSSLRKYKISKRGPRYRERSPGKRQKVFTSDISFASNILNKLSIPEIRDTRLESREPGGDKLQILDESTKKTSSKDICGESPITTTENVGRESKKVSSTKNFLEHTLSCWSALERDLYLKGIEIFGKNSCLIARNLLSGMKTCMEVANYMYNNGAAMAKRPLLNKSISGDFAETEQDYMEQDMVARTRIYRRRGRNRKLKYTWKSAGHPTVRKRIGDGKQWYTQYNPCVCQQMCGKDCPCVENGTCCEKYCGCSKSCKNKFRGCHCAKSQCRSRQCPCFAASRECDPDVCRNCWVSCGDGSLGEPPARGDGYQCGNMKLLLKQQQRILLGRSDVAGWGAFIKNPVNKNDYLGEYTGELISHKEADKRGKIYDRANSSFLFDLNDQYVLDAYRKGDKLKFANHSSNPNCYAKVMLVAGDHRVGIYAKEHIEASEELFYDYRYGPDQAPAWARRPEGSKKDEASVSHHRAHKVAR

SEQ ID NO: 7657 - protein, 126 aa, Zea mays
  Clone ID: ZEAMA-23APR03-C2232_7.p
NPSPAAVVATAAARRRPPIAAKMQIFVKTLTGKTITLEVESSDTIDNVKAKIQDKEGIPPDQQRLIFAGKQLEDGRTLADYNIQKESTLHLVLRLRGGGWTPSGCCLRSGRSRVCWEGELAEYLFF

SEQ ID NO: 7658 - protein, 184 aa, Zea mays
  unsure (1)..(184): unsure at all Xaa locations
  Clone ID: ZEAMA-23APR03-C223_30.p
MAFALAGAFKGLSLVPATTSSFPRGDRASLSVGGAAGVPVPVPARRLTIQMAHKKGAGSTKNGRDSKGQRLGVKIYGDQLAKPGAIIXRGTRVYPGNNVGMGKDHTLFSLIDGLVKFEKYGPDKKKVSVYPYEKEPENPNSYRARKREYFRMRRERKKARAEGAAEPQLVLAAVDENSEVSADC

SEQ ID NO: 7659 - protein, 497 aa, Zea mays
  Clone ID: ZEAMA-23APR03-C22415_3.p
MAGKQFPSPANSRSASASSRRLLAAVAASLILLTASYFLLLSPSSHRSAPAILANPSATTSFLASLDRFLSDPHPSASAAAPVELDAAIRVQEDARLYGDPTWPAPAAGLLRVYVYEMPSKFTYDLLRLFRDSYRDTDNLTSNGSPVHRLIEQHSIDYWLWTDLIAPDSQRLLKSVIRVQQQEEADIFYVPFFTTISYFLLEKQECKALYREALKWVTDQPAWQRSEGRDHVIPVHHPWSFKSVRRFVKKAIWLLPDMDSTGNWYKPGQVYLEKDVILPYVPNVDLCDHKCVLETQSKRSILLFFRGRLKRNAGGKIRSKLVEELKSAKDIVIEEGSTGAQGKAAAQDGMRKSLFCLSPAGDTPSSARLFDAIVSGCIPVIISDELELPFEGILDYREIALFVSASDAVQPGWLLKYLRGINAKRIREIQSNLVKYSRHFLYSSPAQPLGPEDLTWRMIAGKLVNIKLQIRRSQRLVRESRSICTCECRVGNTTRML

SEQ ID NO: 7660 - protein, 204 aa, Zea mays
  Clone ID: ZEAMA-23APR03-C22425_2.p
HALASSARFYCTPPQVLLGDVGAGKSSLVLRFVKGQFVEFQESTIGAAFFSQTLAVNDETVKFEIWDTAGQERYHSLAPMYYRGAAAAIVVYDITNAASFTRAKKWVQELQAQGNSNTIVALAGNKADLLDTRQVSADEAKAYAQENGLFFMETSAKTATNVNDVFYEIAKKLLQGQQVQNPQGGMVLNQRPPERMVSSSSCCA

SEQ ID NO: 7661 - protein, 136 aa, Zea mays
  Clone ID: ZEAMA-23APR03-C22437_3.p
QFLRGSGGGGGGGGFPGVAWEVLRRHFSKKRSVDVRRINPKVPKEEAVAISGRLLQILSDHGPLTVGNTWNHAKDAGIAGLNSKTHMKILLKWMTGRNVVKLTCVHVGNAKKFLYSPSTESSSSAGASPSSTSASQ

SEQ ID NO: 7662 - protein, 220 aa, Zea mays
  Clone ID: ZEAMA-23APR03-C2243_1.p
VQNATSWSPILNGLGLKCDAECHDNKARCKGSTSDVSLFNCDVLWSNRKRPGHLYFEFFEVGSPYGRVPLIDKVYELSQGFPGLTSLKSAELSPVSWMSVAWYPIYHIPYQRSVKDLSACFLTYHTISSSFQDHGLETMTTDCCHPVANGKQNGHMDKKSNTVSLPPFGLAAHKIQGSLWTNPMTGDRRKMDFLFSAADSWLKQLGVQHHDFNFFITHPM

SEQ ID NO: 7663 - protein, 423 aa, Zea mays
  unsure (1)..(423): unsure at all Xaa locations
  Clone ID: ZEAMA-23APR03-C22444_2.p
ARGRLRAATRRSVDVDHAVGTARRGARCRLRCGTGRATGCVRWQRVVPAAREAGRRPAGGAQRRNFVVSPLSFHAALALVAAGARGETQRELLRFLDSESLVELHRAAATALVARLSDLPQASFACGVWVDRSRALTPEFIETAASRYAAVAESVDFLKNSEGGKXQVNDFVKGATKGLIDDVLPPGSVDSSTALVLANAIYFKGAWARPFDPSRTIFAPFHLPDGGTVRVPFMTTTTSGFEDQRVAVFPGFKALKLPYKNDGGAQQDAFYMLLLLPDGETLTLNDLYDKVVSSPGFIRKHTPVDEVPVGRFMVPKFKFTFEFEASHDIQKLGVNRAFQSGDFSGMVSGGNGLIISGVYHKATVEVDEAGTVAAAATVEFMSFVCARIDPPVDFVADRPFLFAIVERSGVVLFLGHVVNPLVE

SEQ ID NO: 7664 - protein, 256 aa, Zea mays
  Clone ID: ZEAMA-23APR03-C224668_1.p
METPAADSSGGDRYRSHLAGEGEKHTVWRHGAPPSYDAVNALFEAERTQEWPAGSLEEIVQNAIKTWEMELSHKARLSDFKSVSPGRFRLSVNGGRARSGEETLAVGSYNALLDSPLLARAGAYDASAETFRSSHDLFRAAFPRGFAWEVLKVYSGPPLLAFKFRHWGHKEGPYKGHAATGDKVEFFGVAVLKVDDELRAEDVEVYYDPGELLGGLLKGPKVASSEEDRREAAAVSASGAVPPPLACPFLNPGKPQ

SEQ ID NO: 7665 - protein, 203 aa, Zea mays
  unsure (1)..(203): unsure at all Xaa locations
  Clone ID: ZEAMA-23APR03-C224996_1.p
MAAAAAGSSRLLSALALAGVVSFLLVADPGVVAAEAAAAPPGLEFRVGGPRGWRVPDANTSYGWWAMNNRFHVGDRLYFKYANDDSVLVVNRLAFDACNASAPLAAFAGGATEFRLHRPGFFCFISGXPGHCEEGQRLIVRVMVHPAALAAAPAPGPGVPTMTRPGMPSGCSDGASSSAVDAAIAAAAGVAMATLVGMGLMLH

SEQ ID NO: 7666 - protein, 192 aa, Zea mays
  unsure (1)..(192): unsure at all Xaa locations
  Clone ID: ZEAMA-23APR03-C224996_2.p
MDFTLIPNPILQPRVSYPFYRRAYLLPFLLLCLPSAAVSYPLPLSGGAASPSGARRAPGSHRTRQAARRAAFLAEPGVGRPRRAKPGLEFRVGGPREWRVPDANTSYGWWAMNNRFHVGDRLCFKYANDXSVLVVDRLAFDACNASAPLGAFAGGATEFCLHRPGFFCFISGEPGHCEEEGQRLIVRLLVWV

SEQ ID NO: 7667 - protein, 355 aa, Zea mays
  Clone ID: ZEAMA-23APR03-C22501_1.p
MLLASPALRAYGEKDSLEPWKFKVAYDKLVFACGAEASTFGIRGVTDHAIFLREVHHAQEIRRRLLLNLMLSDLPGISEEEKCRLLHCVVVGGGPTGVEFSGELSDFIIRDVKQRYSHVKDYIHVTLIEANEILSSFDVRLRQYATKQLIKSGVRLVQGIVKDVQPNKIILDNGEEVPYGLLVWSTGVGASPFVKSLPFPKSPGGRIGVNEWLRVPSVHDVYAIGDCSGFLESTGKEVLPALAQVAERQGKYLASLLNHVMKAGGGHANSETEADLGRPPFVYKHLGSMATVGRYKALVDLRQSKESRGISLAGFVSWFIWRSAYLTRVVSWRNRFYVAINWLTTLLFGRDISRI

SEQ ID NO: 7668 - protein, 391 aa, Zea mays
  Clone ID: ZEAMA-23APR03-C22522_1.p
MGKSCVPPVAMVLVQLGFAGMNVVSKLALDAGMSPYVLIAYRNLIAAAVISPVAYLLERRSGATITKKVLLQIFVSSIFGATLNQVLYFVGLKSTSPTVACALTNTLPALTFVMAAALKMESVRPGTPAGQAKLVGTAVCVGGSMVIPFYKGPVLGLWASPLHWRFVADHAPSPAAAAAHSGAAVLGDVLIIASCVAWAVWFILHTKMSEGFSAPYTSTAIMCLMAGVQCAGVSAAMDRSLDVWKLGCDIRLYSVLYIGIVGSGIGFTLMSWCIQVRGPLYVSMFSPLLLVVVAIIGWAILGEKIRVGTAVGSVLIVAGLYMVLWGKGREMDRPDLDNDDDIADEETAVGLVGFSGKGGGAVAIASSRVEAISLPVSFSTTSPKRLQHIHG

SEQ ID NO: 7669 - protein, 180 aa, Zea mays
  Clone ID: ZEAMA-23APR03-C225374_1.p
MAARHGSRRTRADQWLFGGKWRGTVKETRHPPPVPEAKPPNPVPVQKDEGVCLEKPRVQREVADVAPGRRSMPEMEINMKEVVAVLGVKVMAADMPPFMQLHAFRCAKRSHDNLDKFSSRQLAHDVKKEFDKVYGPTWHCIVGTSYGSFVTHSRGCFLYFSMDKIIVMLFKTKIRKGLAS

SEQ ID NO: 7670 - protein, 190 aa, Zea mays
  unsure (1)..(190): unsure at all Xaa locations
  Clone ID: ZEAMA-23APR03-C22558_2.p
MEVRGSAPSMKPKVEPPLEASHDWEVTPLSGDNPFFTSVMRKSQVQNPFQLVHIFFSFLFPQSGTHARRSTPYCLFQVIPVRFHRHLPEARAPAVLLCRDRSWTVSYAGVGKWKRLQGAWRDFARDNGLRXGDACVFELLVPSTDATQGDGDGSKDQGEVVFRVQVLRGGLPAEITSRGATSDDPLVIVD

SEQ ID NO: 7671 - protein, 324 aa, Zea mays
  Clone ID: ZEAMA-23APR03-C2255_1.p
MARAGVSTAPLSRTHLLPPRPSLLHNTQHHSLLLRPQRKAPATTAAALPPAADLPALSLPAAAAAAAALAAAVSLSDPERRRRSQAEAAGGGDKEAVRAYFNSTGFERWRKIYGSATEGVNRVQLDIREGHAQTVAAALAMLRDSPLELSGATVCDAGCGTGSLAIPLAAAGADVLASDISAAMVSEAQRQAAAQSSSSSFRMPRFEVRDLESLEGRYDVVVCLDVLIHYPREEARAMIRHLASLADKRLLISFAPRTLYFDFLKRVGELFPGPSKATRAYLHAEADIEDALRQAGWRVANRGFISTQFYFAKLFDAVPVGSST

SEQ ID NO: 7672 - protein, 246 aa, Zea mays
  Clone ID: ZEAMA-23APR03-C2259_3.p
MPKIKSLSNACRVSFSPEGPISEEALERVRALLDMIRPLDVGLDNEAQIARNWSSSTRPSNGRRGRNGANQFAAPIKYLHIHECESFSMGIFCMPPSSVIPLHNHPGMTVLSKLLYGRLHAESYDWVDIPDHPIDQLQTRPAKLVKDCEMTAPETTILYPNAGGNIHTFRAITPCALFDVLSPPYSAEDGRHCSYFRKSQMNQPPVVLPAEIDSSQVVWLEELEDHQPPEGFVVARGLYKGPVIRR

SEQ ID NO: 7673 - protein, 129 aa, Zea mays
  Clone ID: ZEAMA-23APR03-C22649_4.p
MAPKVALFLALSLLFAATAHGCEPYCPGPVVPTPPVVPTPSSHSHGRCPIDALKLKVCANVLGLVKVGLPQHEQCCPLLEGLVDLDAALCLCTAIKANVLGIHLNVPLSLNLILNNCGKICPEDFTCPN

SEQ ID NO: 7674 - protein, 312 aa, Zea mays
  Clone ID: ZEAMA-23APR03-C22650_3.p
MASKYVARVPSPWWAPQRRLVGSWVSVCSVKCGALGGRDVVCAAVSFRPCIDIHKGKVKQIVGSTLRDSSNDGMELVTNFESDKSPAEFAKSYKEDELLGGHVIMLGSDPASQAAALEALHAYPGGLQVGGGINLQNAMSYLNEGASHVIVTSYVLSDGKMNIERLTKLVELVGKQRLVLDLSCRKKDGRYTIVTDRWQKFSDVFVDEPALEYLAAFVDEFLVHGVDVEGKRLGIDEELVELLGHHSPIPVTYAGGVSTMDDLERIKKAGKSRVDVTVGSALDIFGGDLPYKDVVLWHKKQSMVGQVSRNMW

SEQ ID NO: 7675 - protein, 307 aa, Zea mays
  unsure (1)..(307): unsure at all Xaa locations
  Clone ID: ZEAMA-23APR03-C22650_7.p
MASTCAARVPSLRWAPQRGWVGSWVSVRPAKCRTSGGHAVVCAAVSFRPCIDIHKGKVKQIVGSTLRDLANDSMELVTNFESDKSPAEFAKFYKADELLGGHVIMLGANPSSQAAALEALRAYPGGLQVGGGINLENAMSYLNEGASHVIVTSYVFSDGKMNTERLRKLVELVGKQRLVLDLSCRKKDGRYTIVTDRWQKFSDVFVDEPTLEYLAXFADEFLVHGVDVEGKRLGIDEELVELLGHYSPIPVTYAGGVSTMDDLERIKKAGKSRVDVTIGSALDIFGGDLPYKDVVLWHRKQSMVGQV

SEQ ID NO: 7676 - protein, 165 aa, Zea mays
  Clone ID: ZEAMA-23APR03-C22735_2.p
MAAPPPSYPAALKPEIGPDGLARDSPVIAYTEKVILEEQLQLKKYIQENYSKIRDVEKELESLTLEMKLTAGPKKAALEHLRKKIEISTEKIRLAKVKEEHAKKTWEVAAQVVKDEEDAKQKLCDDLNHLVQESAASQYARLEELKKRLESLNPIRDSVNVSVSE

SEQ ID NO: 7677 - protein, 147 aa, Zea mays
  unsure (1)..(147): unsure at all Xaa locations
  Clone ID: ZEAMA-23APR03-C22752_1.p
MVVCSTRKSFKDSLKVLEADIQHANTLAADFSRDYDGACLQMRMSYSPAAHFFLFLVQWTDCSLAGALGLLRXCYRQWRSRSQSCPFCRDSLKRVNSGDLWMLTDCRDVVDMATVTRENIRRLFMYVEKLPLVAPDNEGEASYAYEK

SEQ ID NO: 7678 - protein, 109 aa, Zea mays
  unsure (1)..(109): unsure at all Xaa locations
  Clone ID: ZEAMA-23APR03-C22866_8.p
MATKVICFLLLASLLLAVAFPVVKKGGGGGGGGGSVSGSGGGNLNPWECSPKCGSRCSKTQYRKACLTLCNKCCAKCLCVPPGFYCNKXAPAPCVGGGXENQEGGPKCP

SEQ ID NO: 7679 - protein, 537 aa, Zea mays
  unsure (1)..(537): unsure at all Xaa locations
  Clone ID: ZEAMA-23APR03-C2287_21.p
RCGVVEAGQRPGDGGGGGWARRGGRRGELVPAARRRSPSALWLRWERGQRRRXDICAEVLERLVADGHAEASDPEFRDRLAAHFGRLPHSYQLDINVDKATDVLVHQNVLAEAKDPDRRPAFYVRFLRIEDIDPANDSDASEEGDGDGDDLSVRQDTPYTHIHEVVFSTIDKPKLLSQLSALLSDIGLNIREAHVFSTHDGYSLDVFVVDGWPIKDTDGLHKALEASILRNEGSWSGSSHSSAAERTLPFQVKGGEWEIDKRLLKMGGLIASGSCGDLYHGTYLGEDVAVKVLRAEHLNKNVWNEFTQEVYILREVQHTNVVRFIGACTKPPQFCIITEYMSGGSLYDFVHKQHNVLNLTTLLKFAVDVCRGMCYLHERGIIHRDLKTANLLMDNDHAVKVADFGVARFQDQGGIMTAETGTYRWMAPEVINHQPYDSKADVFSFAIVLWELITSKIPYDTMTPLQAAVGVRQGLRPGLPKKTHPKLLDLMQRCWEADPSDRPAFSDILAELEDLLAQAQGTSGKTVQDPSNSNAKD

SEQ ID NO: 7680 - protein, 227 aa, Zea mays
  Clone ID: ZEAMA-23APR03-C2290_1.p
MCNTYADIEAAYNCLKEKYSVADEDIILYGQSVGSGPTIDLASRLPDLRAVVLHSPILSGVRVLYPVKRTFWFDIYKNIDKIGLVNCPVLVIHGTSDDVVDCSHGKQLWEHCKVKYSPLWLNGGGHCNLELYPDYIKHLKQFVSSVSKKTSKPDQKEIMAKDGTTSKEREEAYSEKPQPAAKCSQSQISRKSLDSRVGKSKTVDVPDKSRMSSDDIDKFRRRRCLVW

SEQ ID NO: 7681 - protein, 129 aa, Zea mays
  Clone ID: ZEAMA-23APR03-C22917_4.p
MDVLLGSGRFLARRPPLALVPRCSRGSPDKSGSDKGETSADWDKAWSAFKKKGKRTLFSDFSPDKYVTWNPRRSEYPLSEEVDPIKRTERSNLMLCTSPQFTLVRAIIIVLTLLIYTLVVPPKSCTSDS

SEQ ID NO: 7682 - protein, 316 aa, Zea mays
  Clone ID: ZEAMA-23APR03-C2292_3.p
MSFLFKSSNGGTTEKIPSPEEQREKINELRKELGEHSSAAIKDFLSDASLARFLRARNWNVQKASKMMKAAVKWRLAFKPENICWDDIAEEAETGKIYRADYKDKHGRTVLVLRPGLENTTSAIGQIKYLVYSLEKAIMNLTEDQEKMVWLTDFQCWTLGSTPLKVTRETVNVLQDCYPERLGLAILYNPPRIFESFWKIVKPFLDHETRKKVKFVYSNDKESQKIMAEVFDMEELDSAFGGKNPATFEYNSYAEQMQDDDKKMGSSHGSANSLLGSAGKEANGADSDASSEASFYSGTDSPTHENGEHSIAKKNG

SEQ ID NO: 7683 - protein, 161 aa, Zea mays
  Clone ID: ZEAMA-23APR03-C22955_3.p
MRIAVVAPVAAAYSCSSSLAAPASAPSRAHVAAAGMSSRASSFVGGGLAAVVASVAARPRRAGSGRDGALGCKCLFGLGVPELAVIAGVAALVFGPKQLPEIGRSLGKTVKSFQEAAKEFESELKKEPGEGGDQPPPATPTATAVGGAEKGLEASSSKEST

SEQ ID NO: 7684 - protein, 168 aa, Zea mays
  Clone ID: ZEAMA-23APR03-C229679_1.p
MASKQAAAGEALAAQINGMSRPEMYDMMSKMKTMIDHDQETVRRMLVDNPDVTRALFRAQVVLGMVKTPKTTQALDMVQPTAVSTAPSSVKTTAPDHVSLPPPPLPANQQSVAQLSAPFSSGLSNVGSTMDPPTISANPPQSAQAKGYLIHQMPSSAPQPSQHPNMAL

SEQ ID NO: 7685 - protein, 144 aa, Zea mays
  Clone ID: ZEAMA-23APR03-C22967_5.p
SGASPSRLSALVSQQEIVSLYHRFCQLDRNGGGFVSADEFMSVPEFAVNPLSQRLLRMLDGLNFKEFVAFLSAFSPRTSLQQKIEFIFRVYDTDCNGKVAFDDILSILRDLTGSFMTEQQRQVRTLDFRFPLGLSHDIAILAWA

SEQ ID NO: 7686 - protein, 345 aa, Zea mays
  unsure (1)..(345): unsure at all Xaa locations
  Clone ID: ZEAMA-23APR03-C23030_5.p
MASGGGGGLGAAGAGGRMPTWRERENNKRRERRRRAIAAKIFAGLRAHGGYKLPKHCXNNEVLKALCNEAGWVVEPDGTTYRQGSKPMERMDPIGCSVSPSPCSSYQPSPRASYNASPTSSSFPSGASSPFLPPNEMPNGIDGNPILPWLKTFSNGTPSKKHPLLPPLLIHGGSISAPVTPPLSSPSARTPRMKTDWDEAAVQPPWHGASSPTIVNSTPPSPGRPIAPDPAWLAGIQISSTSPNSPTFSLVSTNPFGVFKESIPVGGGDSSMRMCTPGQSGACSPAIPGMPRHSDVHMMDVVSDEFAFGSSTNGAQQAAGLVRAWEGERIHEDSGSDDLELTLKL

SEQ ID NO: 7687 - protein, 204 aa, Zea mays
  Clone ID: ZEAMA-23APR03-C2308_2.p
MADVDEYRCFIGNLSWSTTDESLKDAFSKFGNLTEAKVVLDKFSGRSRGFGFVTFDEKQAMEDAIEGMNGLDLDGRNITVDKAQPQGPGRDRNGDRDYDRERGSRYERGRDYGGGRAPRGGGGGGGGGGDCFKCGKPGHFARECPSGDGGRGDRYGGRDDRYGGGGGGGRYGSDRGGDRYSGRSRDGGSYGGGDRYSRDRSGPY

SEQ ID NO: 7688 - protein, 200 aa, Zea mays
  unsure (1)..(200): unsure at all Xaa locations
  Clone ID: ZEAMA-23APR03-C2308_4.p
MADVDEYRCFIGNXSWSTTDXSLKDAFXKFGNLTEAKVVLDKFSGRSXGFGFVTFDEKQAMEDAIEGMNGLDLDGRSITVDKAQPQGPGRDXNGDRDYDRERGSRYERGRDYGGGRAPRGGGGGGDCFKCGKPGHFARECPSGDGGRGDRYGGRDDRYGGGGGGGRYGSDRGGDRYSGRSRDGGSYGGGDRYSRDRSGPY

SEQ ID NO: 7689 - protein, 350 aa, Zea mays
  unsure (1)..(350): unsure at all Xaa locations
  Clone ID: ZEAMA-23APR03-C23137_1.p
MDSFSFLKYLRGGVVAGAHRAPAAATTIAASACEYGDDASSFFDLEFAVPGDESAASDAEEERVELSFAAEDEGVVAPVAAVAPAAEXEPEAAPPPPPSLPRPATRFRVLLLKLRKPKXAPXAADAAGTSAAPVASRFLVKLRVDDATPLASLFTRDNSSRASDAGADRPATAAAAAAEPQQQEQEVAASITAEERRFAKEVVLRYLSKIRPLYVKVSRRYGERLRFGGAASEGEEETDAEADPSPSQAPPPSVPAGVVACGVRAPRASVPAGLKQACKRLGKSRSASSAVAVAPSPAAAALSGPQXQRRDDSLLQVQDGIQSAIAHCKRSFNACNGTGTGPPQRCNSSP

SEQ ID NO: 7690 - protein, 359 aa, Zea mays
  Clone ID: ZEAMA-23APR03-C2319_3.p
MLSRGAVRLLLYRLRPPPLRLSWNPSGAMPSAAANRSCLCRFAYSTARVERGRTLPGKAVFLDLGAGRRFTPSGALSLRGCLGWRDGGGDGEFRRRVDGEAAGMKAQVLTTQRQLMRDPEVLPLEEAATGKSMNVNGACRRGKRLGFPEQAAAKMVVAVDVDEVLGSFLAALNKFIADRYSWNHSVSEYHVYEFFKIWNCSRERANFLVHEFFTTHYFQDGIHPIPGARDALQTLSSFCSLSVVTSRQDVIKNHTLEWIEKYYPGLFEQIHFGNHFALEGQSRPKSEICRSFGAQVLIDDNPRYALECANDGMRVLLFDYESSYPWCKTGADELHPLVTKVHNWEEVEEKLLSWVVPDS

SEQ ID NO: 7691 - protein, 89 aa, Zea mays
  Clone ID: ZEAMA-23APR03-C232179_1.p
MAGMAAAAVGSASSSSGPAVMLLCGKAEKVLGVQKAPGSCPYCGGVVAATDVEAEWALCCLPLCRRTKRRFACTACARRLVTYPAILHD

SEQ ID NO: 7692 - protein, 179 aa, Zea mays
  Clone ID: ZEAMA-23APR03-C2324_3.p
MDVDKQETMEETILVGDDLMRGPPSPVIPKEIASHVLEDVELCDGILKNLFLCLQINDIEPFCQDEIVLYRQCAEKRDKEIRERMQNSEYKLGFSMPLEEAKERATQLQSEVTLLERRMILASGLEGMEGFRQRWSLHGQLEDTRKRLEALNHGMAKRENQSSTAERTKSPARKKWFFW

SEQ ID NO: 7693 - protein, 215 aa, Zea mays
  Clone ID: ZEAMA-23APR03-C2326_2.p
MATAPVTSSMATNSTCVRLPSMPLRRAPAIVSFASRPWSTAMTSCTGLSRHSDVVAAAGHQKLMGSLNNNEGLMFGVVVARFNEVVTNLLLQGALETFERYSVKAENITVVSVPGSFEVPITAQKLGKSGKFDAILCIGAVIRGDTTHYDAVANSAASGVLNAGLSAGVPCVFGVLTCEDMDQALNRAGGKAGNKGAEAALTAIEMASLFRHHLG

SEQ ID NO: 7694 - protein, 225 aa, Zea mays
  Clone ID: ZEAMA-23APR03-C2327_35.p
MGSETETVNVEGIPFPAEITVGNPLSLLGTGITDIEIHFLQIKYNAIGVYLHNAGGGDSTTLLGHLGAWKGKTAEELLADAAFWAALVAAPVEKLFRVVVIKEIKGSQYGVQLESSVRDRLAAADLYEDDEEEALEKVADFFQSKYFKPGSVVTFHFPAPASASPGPAAEITFATEGKGDARIAVENGNVAGMIQTWYLGGDSAVSPSTVRSLADRFAALLAVAA

SEQ ID NO: 7695 - protein, 335 aa, Zea mays
  Clone ID: ZEAMA-23APR03-C2336_3.p
MAADGGGGVDWESLAEATSGAIGSLVSTTVLYPLDTCKTKFQAELQTHQGAQKYRNLSDVFWEAIRKKQFLSLYQGLNTKNIQSFVSSFFYFYGYSYFKRLYLEKSGAKSIGTTANLLVAAAAGACTVIVTQPLDTAASRMQTSVFGKSKGLRETLAEGTWMEAFDGLGISIILTCNPSIQYTAFDQFKQRILHRQRRKNAGSAEDNSGVALSAFSAFLLGAVSKSIATVLTYPLIRCKVMIQAADPDEDDDDEPGRPSKSRTPKTMLGALHAIWSKEGIPGFFKGLNAQILKTVLSSALLLMIKEKISKFTWVSLLALRRYLFVSQKRIKSATV

SEQ ID NO: 7696 - protein, 353 aa, Zea mays
  unsure (1)..(353): unsure at all Xaa locations
  Clone ID: ZEAMA-23APR03-C23432_2.p
MSPAAATTTFVAISIAVPNPTAPSRGRVRLPLGGVPAAPRRAVTSMAVSAPRSGAATSFLERRESERALHFVKYQGLGNDFIMVDNRDSSVPKVTPEEAAKLCDRNFGIGADGVIFVMPGVNGADYTMRIFNSDGSEPEMCGNGVRCFARFIAEIENLQGTNRFTIHTGAGKIVPEIQSDGQVKVDMGEPILSGLDIPTKLLATKNKAVFKLXLAVEGLTCHVTCVSMGNPHCVTFGANELKVLQVDDLKLSEIGPKFEHHEMFPARTNTEFVQVLSRSHLKMRVWERGAGATLACGTGACAVVVAAVLEGRAERKCVVDLPGGPLEIEWREDDNHVYMTGPAEVVFYGSVVH

SEQ ID NO: 7697 - protein, 480 aa, Zea mays
  Clone ID: ZEAMA-23APR03-C2346_22.p
MEQQNQVIEAPLLQQQREDGTSVQGGGEADSHGHRRGSNKLTFLPLVFLIYFEVAGGAYGAELAVKAAGPLFTLLGFLVFPFAWGVPESLVTAELAAALPGNGGFVLWADRAFGPLAGSLLGTWKYLSCVVNVAAYPALIADYLGHAVPTGGAARTGAVAGLTVLLSLVNFTGLSVVGWGAVALGLVSLAPSVLMTGMAVPQVRPRRWTVTVEGGSRDWRLFMNTVFWNLNYWDSASTMAGEVERPERTFPRALAVAVVLIAASYLLPLMAATGATDATPDAWTNGYLADAAGVIGGPWLKFWTQAGAVLSSVGMFEAQLSSGAFQLLGMADLGLLPAVFARLRTPWVAVAVSSAVTLAVSFLAFDEVVATANFLYSLGTLLEFAAFLWLRARQPDLKRPYRVPLSSLPALAAMCAVPSAFLAYVCAVAGWRVFALAGALTALGVGLHGSMRLCRAKRWLKFEGQQRGQGGHAAAPAHTV

SEQ ID NO: 7698 - protein, 455 aa, Zea mays
  unsure (1)..(455): unsure at all Xaa locations
  Clone ID: ZEAMA-23APR03-C2346_26.p
MMSSQKRRKGCIFFSLALLLCSASGGVPSLASENSPSEFAKIVQSKQTRHAGVCGADPQLLSSLAGSGAEVMVTVPNEQLEHVAEFQEEADLWVAANVARFLPSTRITHVVAGDDVPANSPGSAHFLVPAMLNLRSALVAAGLGGRVKVSSAMSGEALSAPAWSGVVGHVLRFLESAGSPLLLKSSSRPSEEASDARVGRAYAAMRALGVSGVPVIAADLAAGGDAVVPYYYYPGGHGRRRSLATTGTFCVALQNADPAALQAGLNWACGPGHADCSAIQPGGACYQQNNLPAIASYAYNDYYQEMASTGATCSFNGTATTTTNDPSSGSCVFAGSSTAGGSSNSSVPVGASPPTSLSPPTGFTPPVGSSPPSSSSSEFSPPAVGTAPLSGFTXPPDGGGFSTPPGSFNGTGTFGPSGTLSPYNGGTRGLSRAGLSLTALSAAAVAVLLASIDAM

SEQ ID NO: 7699 - protein, 387 aa, Zea mays
  unsure (1)..(387): unsure at all Xaa locations
  Clone ID: ZEAMA-23APR03-C235953_2.p
MAMETQTPETIVPPTTIPPLLTPYKMGAFELEHRVVLAPLTRQRSYGNVPQPHGAVYYAQRATRGGLLITEATGVSDTAQXGYTDTPGVWTPDQVAAWRPIVXAVHAKGAVFFCQLWHVGRVSTTALQPGGAAPISSTDRAVAPQLSFDGHLEKFSPPRRLEAREIPAIVDDFRRAARNALLAGFDGVEVHGANGYLIEQFLKDSANDRDDEYGGSLENRCRFALEVVRAVAGEVGPGRVGVRLSPFTDYMDCHDSDPEALAGYLVRSLSDVGVLYCHMIEPRMAIVDGRRQIPHRLRPFREAFRGTFIAAGGYDRAEGDKVVEEGYTDLVAYGRLFLANPDLPRRFRLPDAPLNKYDRTTFYTSDPVIGYTDYPFLADADADKFFD

SEQ ID NO: 7700 - protein, 139 aa, Zea mays
  Clone ID: ZEAMA-23APR03-C2366_3.p
MANSSSGLAVNDECKVKFRELKSRRSFRFIVFRIDDTDMEIKVDRLGGPNQGYGDFTDSLPANECRYAIYDLDFTTIENCQKSKIFFFSWSPDTARTRSKMLYASSKDRFRRELDGIQCEIQATDPSEMSLDIVKSRTN

SEQ ID NO: 7701 - protein, 406 aa, Zea mays
  unsure (1)..(406): unsure at all Xaa locations
  Clone ID: ZEAMA-23APR03-C23673_2.p
MEAAPRRQQQEEEGCPCGGPEAADHFERLHDAVLLDVLNRIGDVKALGRCALVSRRFHALVPLVDSVFVRVDCVIPDDPPSSSSAGAAPGSPPHQAPAPTACGRGALARVARALLGGVARPIHALGQILSSAAATVSRRSEPLPASPPPAPVADVSHHSPSEVLRSFRELRRLHIELPTGELGIDDGVLLKWKADFGSTLGSCVILGASSVSSKPPAGSAQAETAAADSTPAAPDTGRETEEPGSXPDSLYTNGGLKLRVVWTISSLIAASARHYLLHPIICNHGTLESLDLTDADGQGVLTMDKRQLQELRVRPVSPSGSSHRTLMPALSMRLHYAPLIELPGGTLLKGATLVAIRPSEDALREGQGVAGPAGTCWISEAFEEPYRTAAKVLLKRRAYCLEMNSF

SEQ ID NO: 7702 - protein, 509 aa, Zea mays
  Clone ID: ZEAMA-23APR03-C237618_1.p
MPMVAASPEKLHCGEAGSGDKEKEVAGRDDAEVMSPQLSDEPLREKAQRIQVMLTGGMSERLPDRGKKLLATLDAIHREQDRRQARGDGARAPGNEACERIVRSRCIESSGLHSDLSRVKVSVADFMSSFGADKEAGIKISSLEIKGRSPNKPSTSIENKGKLCEEKDSCEASSQQMNSVHEELHLDTSENMRKTSSDVGASNNGNNIMWEEVPTPSRKRKGADPVSFSMRLRPRKEDVVLLDGDTPHPESAKETSNNWDAGKLYYPSREHLCSVEISSDDIRCFQPESLLSSPIMNFYIMYLQGPMSSIIRSRGEYHIFNTYFFSKLEAIATKKDKITYFLKLRRWWKGVDIFRTAYILMPVHAEFLKEEWNYLNENISSKECPLRETVWKNLPRKVEKKIVEVPQQQNDYDCGLFVLYYMQRFIQEAPERFRKKDYSMFGKRWFRPEEPSQLRDQIRHLIHSCRETELTKDATASSGEGQPKIGNDGTDPSDASEPKTPKHLSDRTG

SEQ ID NO: 7703 - protein, 239 aa, Zea mays
  Clone ID: ZEAMA-23APR03-C23776_2.p
AAATNHHGWSSPSSRWGAAPGSATARSTTDCERFLERPVIALGVLLLALFLLILLLFAFTVFAFVVTNRGAGWVVSGRGYKEYRLGDYSTWLQRRVENSQNWAKIRSCLQDGKVCQKLASRKETAAQFVNSNLSPIQSGCCKPPTGCNFTYQSETVWTKPAGFNTTTDDPDCTTWSNDQTVLCYDCMACKAGVLANLKNDWKKIATVNIVFLIFLVVVYSVGCCAFRNNRQDNSYPAWK

SEQ ID NO: 7704 - protein, 161 aa, Zea mays
  Clone ID: ZEAMA-23APR03-C2381_2.p
MADALLPRRFLAPLSVVSGASSSASSSPPCLWVLSSPGSPRRPRLAAGHPQPRPRRFTRHKLCRTALENPDILFLKVNFDENKPMCKRLNVKVLPFFHFYRGADGLLEAFSCSLAKFQKLKDAIAMHNTARCSIGPPVGVGDVDLLDNASPQEKPAEASPR

SEQ ID NO: 7705 - protein, 401 aa, Zea mays
  unsure (1)..(401): unsure at all Xaa locations
  Clone ID: ZEAMA-23APR03-C238698_1.p
MERGGGGGGGDEMMMTSGATGRIVPVFRSVLSRRALLRVAVALHSLFIWLLLLARGLRRHRAGTGADASASEAGAGTWSAWRWRLRLQAAEEEDVRRRRALAEEVPMEEDRGTRWATFLVTGARRNALFCXRLWAPAVDEMRGILVIIHGLNEHSGRYVHFAEQLTACGFGVYAMDWIGHGGSDGLHGYVPSLDYVIEDIEVLVDRILMENPGVPCFLLGHSTGGAVVLKASLYPHIREKLEGIVLTSPALRVKPAHPIVGAVAPIFSLVAPRFQFKGANKRGIPVSRDPAALLAKYSDPLVYTGPIRVRTGHEILRISSHLLHRLEKVTVPFLVLHGTADRVTDPLASRELYGAAASAHKDLRLYDGFLHDLLFEPERDEVGAEIVAWMDGMLRLRRQAG

SEQ ID NO: 7706 - protein, 121 aa, Zea mays
  Clone ID: ZEAMA-23APR03-C238_34.p
FCCKQKATPLGSSTRASERAAHLSGKRRRGLDRSRRRTPPWRRLAAAQEGRFSVPEAAPFTAVLKYAAEEFKVPPQTSAIITNDGIGINPQQSAGNVFLKHGSELRLIPRDRVGAVVMSSS

SEQ ID NO: 7707 - protein, 149 aa, Zea mays
  unsure (1)..(149): unsure at all Xaa locations
  Clone ID: ZEAMA-23APR03-C238_62.p
MATKIFSLLMLLALSACVANATIFPQCSQAPIASLLPPYLPSMIASVCENPALQPYRLQQAIAASNIPLSPLFQQSPALSLVQSLVQTIRAQQXRASFLTQQQLLPFYQQFAANPATLLQLQQLLPFVQLALTNPAASYQQHIIGGALF

SEQ ID NO: 7708 - protein, 332 aa, Zea mays
  unsure (1)..(332): unsure at all Xaa locations
  Clone ID: ZEAMA-23APR03-C2390_5.p
MMGGFLSRVLLLAFGYAYPAYECYKTVELNKPEIAQLIFWCQYWILVALLTVLERFGDFTISWLPFYSEAKLMFFVYLWYPKTKGTTYVYGTFFKPYISQHENEIDRNLLELRARATDTVVLYFQKAASAGQSTFFDVLKYVAAQSPSQKSRQRFHQDSQQPPQQQQPQVQVQQAQPQKQAAPVMRRASSIAARQAAMXSQSQETKPVSSSPKIKRQTSARSGSVASTKPPVAASALKPGGSPKKGEVKPAADPVQTPTTGADSPKPEPSAPSLPGAEGVDKMAIDEASGDAPEGAEELDPALEEETPMEETIRVTRAKLRRRTATEDPAGN

SEQ ID NO: 7709 - protein, 363 aa, Zea mays
  unsure (1)..(363): unsure at all Xaa locations
  Clone ID: ZEAMA-23APR03-C2390_8.p
KSGWLEEPNASVSELTARRTRSPLLSSSSGSPSPHAIPTHYRLAFGYAYPAYECYKTVELNKPEIAXLIFWCQYWILVALLTVLERFGDFTISWLPFYSEAKLMFFVYLWYPKTKGTTYVYGTFFKPYISQHENEIDRNLLELRARATDTVVLYFQKAASAGQSTFFDVLKYVAAQSPSQKSRQRLHQESQQPPQQQQPQVQVQQAQPQKQAAPVMRRASSIAARQAAMAQQSQETKPVSSSPKIKRQTSARSGSVASTKPPVAASAPKPGGSPKKGEVKPAAGPVQTPTTGADSPKPEPSAPSLPGAEGVDNIAIDEASGDAPEGAEELDPALEEETPMEETIRVTRAKLRRRMTTEDPAGN

SEQ ID NO: 7710 - protein, 125 aa, Zea mays
  Clone ID: ZEAMA-23APR03-C23_34.p
MGRVRTKTVKKTSRQVIEKYYSRMTLDFHTNKKVLEEVSILPSKRLRNKVAGFTTHLMRRIQRGPRPLLRRLGATEVVAATAAAAAAGGTDVWAHPGFGRVILSIYSIVLPFASVTVLVSVLPLD

SEQ ID NO: 7711 - protein, 302 aa, Zea mays
  Clone ID: ZEAMA-23APR03-C23_37.p
MTPSSALALAHHAAVSPLPSSTPRPSPRSSSLSLGPGSAGLGPRRLVAAAPPRAFFSSSPYQPPQPEGFSQHREYGLVPMVIETTSRGERAYDIFSRLLKERIVCIHGPIADDTASLVVAQLLFLESENPLKPVHLYINSPGGVVTAGLAIYDTMQYIRCPVTTLCIGQAASMGSLLLAAGAPGERRALPNARVMIHQPSGGAQGQATDIAIQAKEILKMRDRLNKIYQKHTRQPIDKIEQCMERDLFMDPEEARDWGLIDEVIENRPASLMPDGIGGGLDVPSLGVGPGGRGRDAVEPSAV

SEQ ID NO: 7712 - protein, 220 aa, Zea mays
  Clone ID: ZEAMA-23APR03-C23_39.p
MGSTSAFVIRWINFFTMILALLVVGFGFWMSTHDDECRRTLTVPVIALGGVIFLISLVGFLGAWKNISCLLWTYLIMLFVVLVAIMVFTVLAFIITNSGSGHTVPGARYKEYRLQDYSSWFVKQLDDTEKWARLKSCLVKIDDCNSLSRRYKTAREYKLADLTPMESGCCRPPAECGFPALNASYFDLSYHPASANADCKLYRNARSVRCYDCGGGGWRD

SEQ ID NO: 7713 - protein, 148 aa, Zea mays
  Clone ID: ZEAMA-23APR03-C23_41.p
VRAEFLSADGKVISTSSQPCMLKFKSVHMHFIETFLQSVSLLSGYSSESQVIRLKMRGITQGLEPTTAVRIILEQRAEFGRGAGIPEIYVASLKLEGELPLVRRLLWNWRWTFFVWSSTGLFVSELLFALVCCRPCIFPRSGHNVAAP

SEQ ID NO: 7714 - protein, 260 aa, Zea mays
  Clone ID: ZEAMA-23APR03-C23_46.p
MLRRLAAVAQRTFSSSSSPHAPPLAASGYTPRREYGLVPMVIEHTSRGERAYDIFSRLLKERIVCIHGPITDDTASLVVAQLLFLESENPAKPVHLYINSPGGVVTAGLAIYDTMQYIRSPVTTLCIGQAASMASLLLAAGASGQRRALPNARVMIHQPSGGASGQASDIAIHAKEILKVRDRLNKIYAKHTGQAIDRIEQCMERDMFMDPEEAHDWGLIDEVIEHRPVSLVSDAVGSDSQNLGGGGAGVNKGADEPSSA

SEQ ID NO: 7715 - protein, 117 aa, Zea mays
  Clone ID: ZEAMA-23APR03-C23_49.p
MAAADVEYRCFVGGLAWATSNESLENAFASYGEILDSKVITDRETGRSRGFGFVTFSSENSMLDAIENMNGKELDGRNITVNQAQSRGGGGGGGGGYGGRREGGGGGYGGGGGGWRD

SEQ ID NO: 7716 - protein, 173 aa, Zea mays
  Clone ID: ZEAMA-23APR03-C24073_3.p
MDSHGKPKPAGSPPPTPPTPPTPPTPPTPPTPPTPPTPPTPPTLPTPPTPLTPPTPPTPEARKGFMRRIFPFLLAANLFVGAYVLVRANQKDSAKKDPTTDPATATAGKPAEPVSIPRKELPPIPEDDQRKLYKWMLEEKRKIKPRNAAEKKKLDEEKALLKEFIRAGSLPSL

SEQ ID NO: 7717 - protein, 341 aa, Zea mays
  Clone ID: ZEAMA-23APR03-C242372_1.p
MASLLKKFVDAVQWNAEDVAGRLGIVLHAAFLFAGFQPYGRQPRSGHLRKEQSRKTGGSACLCRMYTAPDLAQREGADAAVLLLCVQGNDVALLVFATSDGDGNDTPENAYLERLDLKIVRPLLSRSLGGVEPWASRICKSLADGLCWCFLDKLCRRNGLALSGFSSLHDDLRAVVLEKLTDGKDLARVECVSSQLRLLVAERGQELWRTLYKALPSWQCLPSRYRYLPKSESPDAEAETLNIASIWKHKYAQARRRPDPTFRNLLWHFDFDDDYIQLFCHVRPSIGYCFVQDPSEEKRIPPRVDRSGGGHRRRLPRDDRKEWHGGGAIHSPSSRYRWKHR

SEQ ID NO: 7718 - protein, 244 aa, Zea mays
  Clone ID: ZEAMA-23APR03-C242486_1.p
MATATSSRRVSVPALAAAAVLLLASVAAADDHNGVYDPCADASVQRGDGFTFGVVFSGRDSFSSGGVQLSPCDSRLGLANRAQVALFRPQVDEISLLTVNSSSFDPSSSGVYMVAFAGKKYAARSPPVFVGNISYTGTGFTRRSHCYRPPLENLFWKAGGCSSCSGRSDFACVDGSCAVRTASCRGKGGQVECSPGIQLAFSGTDRHEAVLNSWYEVSKLRQYSLFGLFSNLKDSLTNQFSSFF

SEQ ID NO: 7719 - protein, 244 aa, Zea mays
  Clone ID: ZEAMA-23APR03-C242486_2.p
MATATSSRRVSVPALAAAAVLLLASVAAADDHNGVYDPCADASVQRGDGFTFGVVFSGRDSFSSGGVQLSPCDSRLGLANRAQVALFRPQVDEISLLTVNSSSFDPSSSGGYMVAFAGKKYAARSPPVFVGNISYTVTGFTLVLEFQKGTLQNLFWKAGGCSSCSGRSDFACVDGSCAVRTASCRGKGGQVECSPGIQLAFSGTDRHEAVLNSWYEVSKLRQYSLFGLFSNLKDSLTSQFSSFF

SEQ ID NO: 7720 - protein, 244 aa, Zea mays
  unsure (1)..(244): unsure at all Xaa locations
  Clone ID: ZEAMA-23APR03-C2431_13.p
MALAPTSAAVLKTPFLGARRALAKPAPRRALVIAAAAAAKKSWIPAIKSDAEIVXPPWLDGSLPGDFGFDPLGLGKDPAFLKWYREAELIHGRWAMAAVLGIFVGQAWSGIPWFEAGADPSAIAPFSFGSLLGTQLLLMGWVESKRWVDFFNPDSQAVEWATPWSRTAENFANFTGEQGYPGGKFFDPLGLAGTVKDGVYIPDVDKLERLKLAEIKHARIAMLAMLAFYFEAGQGKTPLGALGL

SEQ ID NO: 7721 - protein, 263 aa, Zea mays
  unsure (1)..(263): unsure at all Xaa locations
  Clone ID: ZEAMA-23APR03-C2431_7.p
PQPPKLKANHQTPGHGARAHFRCRAQDXPFLGARRALANAAAKPAPRRALVVAAAAAAKKSWIPAIKSDAEIVNPPWLDGSLPGDFGFDPLGLGKDPAFLKWYREAELIHGRWAMAAVLGIFVGQAWSGIPWFEAGADPSAIAPFSFGSLLGTQLLLMGWVESKRWVDFFNPDSQAVEWATPWSRTAENFANFTGEQGYPGGKFFDPLGLAGTVKDGVYIPDVDKLERLKLAEIKHARIAMLAMLAFYFEAGQGKTPLGALGL

SEQ ID NO: 7722 - protein, 495 aa, Zea mays
  Clone ID: ZEAMA-23APR03-C24433_1.p
MSAGSAAAVSGTDSAPHFVLVPMMAAGHAGPMLDMARTLSGRGALVTFVTTPLNLPRLGRAPSDGALPIRFLPLRFPCAEAGLPEGCESLDALPGLGLLRNFNDACAMLRGPLVALLRDREGDAPPASCVVSDACHPWTGGVARELGVPRFSFDGFCAFSSLCMRQMNLHRIFEGVDDDDTRPVRVPAFPIHVEISRARSPGNFTGPGMKEFGEEIMSESERADGLVVNSFAEMEPMFVDAYEAAMSKKVWTIGPLFLAPTVPLAATAENANAVRCVSWLESNKLRTVVFVSFGSLVRSSLPQLVEIGHGLEATKRPFIWVVKPGNLAEFERWLSEDGFESRVGETGLVIRDWAPQKAILSHPATGAFVTHCGWNSVLECVAAGLPMVSCPHFAEQFMNEKLVVDVLRVGVPVGVKGAAQWGVEAEGVLATRQDVEGAVAAVMDCGEEGSARRARAAELGRKAREAVVHGGSSFRNVALLIQHVQQRTSTRNPWI

SEQ ID NO: 7723 - protein, 329 aa, Zea mays
  Clone ID: ZEAMA-23APR03-C24491_2.p
EHHIQTNHGPVSVAVYGDHDKPALVTYPDIALNYMSCFQGLLFCPEAASLLLHNFCIYHISPPGHELGAAPISPNAPIPSVDDLADQVADVLDFFGLGSVMCFGVTAGAYILTLFAAKYRERVLGLILVSPLCKGPTWTEWLYSKVTSNLLYYYGMCGLVKECLLQRYFSKEVRGFSEVPESDIVQACKSLLDQRQSMNVWRFVQTMNERYDLSEHIKRLQCRTLIFVGDNSQFHTEAVHLTSKLDRRYCALVEVQACGSLVTEEQPHAMLIPMEYFLMGYGLYRPPSQVVECSPRSPLSPFCISPDLLSPESMGVKLKPIRTRVRLEV

SEQ ID NO: 7724 - protein, 330 aa, Zea mays
  unsure (1)..(330): unsure at all Xaa locations
  Clone ID: ZEAMA-23APR03-C24597_3.p
MAMAALRRXGRRLIXXSXVXNPSLAAAFSXXTXSSAVSQPEMAPLGARSISTQIVRNRMKSVRNIQKITKAMKMVAASKLRAVQTRTENSRGLWQPFTALLGDAPSVDVKKNVIVAITSDKGLCGGINSTSVKVSRALHKLTSGPEKETKYVILGEKGKVQLLRDSKDSIEMTATELQKNPINYTQVAVLADDILKNVEYDALRVIFNKFQSVISFKPTMVTILSPEVAEKESEAGGKMGDLDSYEIEGGETKSEILQNLAEFQFSCVLYNGALENACSELGARMSAMDSSSRNAGDMLDRLTLTYNRTRQASITTELTEIISGASALEG

SEQ ID NO: 7725 - protein, 91 aa, Zea mays
  Clone ID: ZEAMA-23APR03-C24639_2.p
LKQLSLEFLFQGRKEKKKKNKKKKKKKKKKKKKKKKKKITEKRKRENKKGRRRKHREHGPRRRGGGGGDGPGVFVCSARRPGGGAPFAARR

SEQ ID NO: 7726 - protein, 113 aa, Zea mays
  Clone ID: ZEAMA-23APR03-C246548_1.p
MAVAGSRIKSKVREWMRKRMAPRRKTAAAATGSGDNSGGSKSASAPAPAPAQSSPRRKLLAAALPSALRCRKPRGNVLAALFQRAAYHLLWLVESVVVVAQLCFFFVRFGFRL

SEQ ID NO: 7727 - protein, 104 aa, Zea mays
  Clone ID: ZEAMA-23APR03-C24697_1.p
MPPCKVAAALLLLIITTISVNTVTGSRCNAQEKNQIVSLCQMYIQRGTLVQLPSQTGPCCAAVRELERVHRGMQMKCIADLLNAGDLQKYDPTKIKHLDISCYT

SEQ ID NO: 7728 - protein, 306 aa, Zea mays
  unsure (1)..(306): unsure at all Xaa locations
  Clone ID: ZEAMA-23APR03-C24731_3.p
MAADSSMGFHQGITASLYNHHMLSFQSNSDVGISGDATGAMVMAPGSVGGGSSNAGLFLSANTGVMGNAPGVAPSRTSSGDALLGTGTPKYKYVTGPPSDWSDREVAILKEGLVRYAREPSIMRYIKIAAMLPNRTIRDVALRCWWSTGKERRKKPDGFYTGKKMRDMKPIQDKMVASVPIANXSHDTYNQCNPFFDINATSKSTKSGSQRSATQRLLEENNQLLNQISANIKTFKTVENTDLFLRTSNNIKTILSRMSETPGIMGQMPPLPLSINEDHINSLIQLNRLVASYGTTSISHHTKQEP

SEQ ID NO: 7729 - protein, 385 aa, Zea mays
  unsure (1)..(385): unsure at all Xaa locations
  Clone ID: ZEAMA-23APR03-C24778_1.p
MAPSRALHRPSLLATAAALLLLILPPSAAAAVPAPALFIFGDSLVDAGNNDYLVTLSKANGPPYGIDFESSGGNGKPTGRFTNGMTIADIMGESLGQKSLAPPFLAPNSSAAITSSGINYGSGSSGIFDDTGSFYIGRIPLGQQVSYFANTRSQMLETMDEEAVADFFSKALFVIVAGSNDILEFLSPSVPFLGREKPDDPSHFQDALVSNLTFYLKELSELGARKFVVSDVGXLGCIPYVRALEFMPAGQCSASANRVTEGYNRKLRRMVEKMNREMGPESKFVYTDTYRIVMAIIQNHRQYGFDDALDPCCGGSFPLPPFLCIGAVANRSSSTLCSDRSKYVFWDAFHPTEAANLIVAGKLLDGDAAAAWPINVRELSQYEHK

SEQ ID NO: 7730 - protein, 163 aa, Zea mays
  Clone ID: ZEAMA-23APR03-C247850_1.p
NHLMEYLKYCSGWHKKQPWRHKHGSDELHRWRIPQSRRVGGDCRRRILEMRRIGGCHGARGADGEPHTRLWGATSGKPPVSCLRIREPLSLCLQVEEPTSRHRICEPQSLHHQIGEPVSPCLRIGELPPSCLWIKELSSAATHGAAVARIPGSTAIAHCHTQI

SEQ ID NO: 7731 - protein, 126 aa, Zea mays
  unsure (1)..(126): unsure at all Xaa locations
  Clone ID: ZEAMA-23APR03-C2478_9.p
MATEQAAENYTVEDLVALNPYNPDILXDLEKFVNEQVSSQTYNLDANLSLLRLYQFEPERMSIQIVAHILIKQMEEQFKVLIVLSHYLETARFRQFWDEAAKNRHISEAVPGFEQAIQSYAGKYTS

SEQ ID NO: 7732 - protein, 222 aa, Zea mays
  Clone ID: ZEAMA-23APR03-C2487_3.p
TLCTPFGRNNPANTETDANLITCTSQEGSPSNLNIQALTQIPPSSSFTTIWMKIHGHPACQCVCISDSSFAFLTNRKKHKAENKHNTVIQINYCLIIHVQMVTSAQLADNSQASQVSTTSSPKQRLPLQGLHQPPFLSERPCPSHPPGLQPAQPTTACMISRLAPTLATLTLLAIVATHSRPLHPPMVSPYKLVQLCCLMDGYVCMETYQHSIDNPIPILWC

SEQ ID NO: 7733 - protein, 333 aa, Zea mays
  Clone ID: ZEAMA-23APR03-C24902_4.p
MGSQTIASQAGGGGRGMGSSGGAGAAQRGQMQSLARQGSLYNLTLDEVQSHLGEPLHSMNLEELLKSVFPDDLDPDGGTTSQYEQSSGLLRQGSITMPPELSRRTVDEVWKDIQDAPNRNVGESGRRKRERQPTLGEMTLEDFLVKAGVVAEGYLKDLNGIGSVEQVGSTGAAGLTAGAQWLDHYQQRITAIEPHQHRQHSLPGAYIPGQLSLQSLNVGPSAILESYSDGHISSPMMGALSDSPMPGRKRGSPGDVADKLVERRQKRMIKNRESAARSRARKQAYTNELENKVSRLEEENKKLTTLKELENILFSEPLPEPKYQLRRTGSATF

SEQ ID NO: 7734 - protein, 160 aa, Zea mays
  unsure (1)..(160): unsure at all Xaa locations
  Clone ID: ZEAMA-23APR03-C24936_3.p
HATTKRLSLSLGRRPPSHSTRTPWRACSAPPRPGAPGRLHRRAVGAGVGGRRVRGDLAHLGAAVVTRRGGGRACRGGTTVGECMEYLDVDAEGEADVAGXGTGGSKRRVLQGGSGYIGYDALRRDNVPCSQRGAXYYNCQPGAEANPYSRGCSAITQCRG

SEQ ID NO: 7735 - protein, 222 aa, Zea mays
  unsure (1)..(222): unsure at all Xaa locations
  Clone ID: ZEAMA-23APR03-C24938_2.p
MEVAAANQLLPMALGPNSPSSSTSSSSPSSAAAAASSPSPRQQHPHAPAPPSPTPRPVTRIIDTTAFPTTFVQADTASFKQVIQRLTGSDTPPPPQKTVKSYPHHHGSGPIKPAFTVYERRIGQSNLKMIAPLAMAVNXEGXPKVLSPSVLDFPSLALGSPVTPLLADPFNRSASASPGEQDEAEAAAIAQRGFFLHPSPRGAVEPPRLLPLFPVTSPKMAQ

SEQ ID NO: 7736 - protein, 330 aa, Zea mays
  unsure (1)..(330): unsure at all Xaa locations
  Clone ID: ZEAMA-23APR03-C24987_4.p
MPESVGGAPPSPPWKMKALPPQGFSESPFPPRAARVGSSSPAVAGVDSHGFPDIEKEVFARLMEKRISEVVAAPVPFLEELLPHFERLPLSCXLDVNIDKAEDMLLHQRILNECADPENRPIFHVYSLGVMSCLLKTYXPINMLHRKFEPCSGIEDLWIEDLSLTGQKVVGDYVAGSSRGDVEILHVHEIIFSTIDKPKLLAQLSALLSEVGLNIREAHVFSTTDGFCLDVFVVDDWDTKETDTLLQILKETAARNHASLSNPTNSAASERVLELQEKIGDSNIDRNFIDIIYGLAGSYFYCYNVIATTYPLHHTKNKIINYKKKKKKKK

SEQ ID NO: 7737 - protein, 405 aa, Zea mays
  unsure (1)..(405): unsure at all Xaa locations
  Clone ID: ZEAMA-23APR03-C24992_1.p
QQQQQRQARSHVHGRQPGPAAPPPRPHSQPXIDLPAGKDKADAAASKAGAAVFDLRREPKIPAPFLWPQEEARPSSAAELEVPMVDVGVLRNGDRAGLRRAAAQVAAACATHGFFQVCGHGVDAALGRAALDGASDFFRLPLAEKQRARRVPGTVSGYTSAHADRFAAKLPWKETLSFGYHDGAXXPVVVDYXVGTLGQDFEPMGWVYQRYCEEMKELSLTIMELLELSLGVELRGYYREFFEDSRSIMRCNYYPPCPEPERTLGTGPHCDPTALTILLQDXDVGGLEVLVDGEWRPVRPVPGAMVINIGDTFMALSNGRYKSCLHRAVVNQRRARRSLAFFLCPREDRVVRPPASAAPRRYPDFTWADLMRFTQRHYRADTRTLDAFTRWLSHGPAQAAAPPCT

SEQ ID NO: 7738 - protein, 535 aa, Zea mays
  Clone ID: ZEAMA-23APR03-C2503_1.p
MESAPSTAAVMERERLTAELAFAEADAEPSSFVVKIRCRLPDFARSVNLKYVRLGLRSGAIPAPSSWVPLALAPSLLVAAAYSLVGADKFYSLDLLTCIAWLAAAVLLLTVYFLMRPRPVYLVDFACYRPGNEHAISKEGFLDMTESTGCFNAEALEFQTKITKRSGLGDRTYLPPGIQARPPRLSMEEARAEAEAVMFGCLDSLFSATGIDPRRDVRVLIVNCSLFNPTPSLASMVVHRYKMREDVKSFNLGGMGCSAGLIAVDLARDMLQANPGCYAVVVSTENITLNWYFGNDRSMLLSNCIFRMGGAAALLSNRRADAGRAKYRLLHTVRTHKGATDECYSCVYQREDEAGKVGVSLARELMAVAGDALKTNITTLGPLVLPMCEQLKFLKSLVLRRALRSRGVRPYIPDFRRAFEHFCVHAGGRAVLEEVQRSLGLRDADMEPSRCTLHRFGNTSSSSLWYELAYAEAKGRVRRGHRVWQIGFGSGFKCNSAVWRALRDVPPVHADGAGGGSNCNPWVDSIQSYPPKEYI

SEQ ID NO: 7739 - protein, 404 aa, Zea mays
  Clone ID: ZEAMA-23APR03-C25044_2.p
IAPRVSKTQPNRASDHARVSVPASAHPWIDRLAQGLSGGTGAMEEDPLIPLVHVWNNAAFDHASASAWHAHSPAPASAREGDKENHRPEPDVEAEVDDVEAEIYHIEAEILRLSSRLHHLRTSKQTEPPKRGQVARTRMRGLSLGQLDVAAAVDSDPLTDKQQPRAAQGLKKPIKQAPAAPRGRSSSLGSLEIVATNPRVLRSSSAAAAAPQRKIQGEGEGGAARPILRPIKEPPVQRRRGVSLGPLEIHHGVGSKPGAAARVKHFSNNRLGAVREEGQRSKEHAVPARPWPSSNARHPLDARQGTAASRAKARSGSMSPSRFRRQSTSKAAETRAGNAKPTATEATRGGSEAVNHTSNSHDEEAGGELQGQGCPEPLQHPTWLLPSSCDTRQPMQAVSPGIGY

SEQ ID NO: 7740 - protein, 216 aa, Zea mays
  Clone ID: ZEAMA-23APR03-C25048_1.p
MKCRSDAPGGGDGHRDRVPAPAATGVGGSPPGERSKKQRTQEPSSSSSVDGECSSSTSSSQALPPPLPEQLPQDAGVGEQPPPGPEAAGGEQARVPDLGEDLVFEVLMRAEARTLAAAACVSRGWRLLARDELWWEAAFVRECPCTRFLRAVASLGGFRRLHEMYIRPVQRRAAGAPRGQQRRQLPVRMGRDQVQVSLSRPSLTVFAIDLILPEDA

SEQ ID NO: 7741 - protein, 366 aa, Zea mays
  unsure (1)..(366): unsure at all Xaa locations
  Clone ID: ZEAMA-23APR03-C25103_1.p
MVSLRCAVGLCSSAQVGSSWPLFQSPHRIAVPSVAARDVTSPRAPSAWSRSASAASMETARLTPREQATTRICQVSSFATELLEIRSKEPSLHVLLIAGNPGXAAFYKDCVEALYENLGGQASITAIGHISHSQKDCEHGRLFSLYEQIDHKVDFIEQELQHSEQPIVLVGHSIGAYIGLEVFKRLQNKIKFIVGLYPFLKMNKSSVTQSAIGYIARSSLLSKWASLFASFIGSLRPSITRGIVRRFLGPSWSVTAVDAACSHLLRYNTMRNVLFMAMTEFQKLTEEPDWTFIRAQEDKMAFLFGVDDHWGPLSHLEEISKHAPRVTLSVETEGHTHGYCCTEAGSVWVADYIANLIKNQMLLWNN

SEQ ID NO: 7742 - protein, 188 aa, Zea mays
  unsure (1)..(188): unsure at all Xaa locations
  Clone ID: ZEAMA-23APR03-C25155_1.p
SPVSSPPIPAAAGPPPASFRRRRRRWSRPRLPAPAAPPSSYPVXSTMPAAAGPPPASFRRGRRRSSRPGLPPPGGAPLPPPRELPAGARQGEQCQGYEAQHTRAAGRKGTAPPSATRSAPRRRPATAGAPAAAVAAAAAALNPAPCLIVSAAPVRTYARFSGPRCFSWLLLVLLEAFALLCSASAQMP

SEQ ID NO: 7743 - protein, 178 aa, Zea mays
  Clone ID: ZEAMA-23APR03-C25155_3.p
MRPGGAGFNATAAAKVAAAPAVAAGSAAAHSAWHSPVPYLFGGLAAMLGLIAFALLILACSYWKLSGYLEGGAGEGGSGAGAGGDKPAASDLPPPVWEEKILVIMAGDVKPTYLATPMSSRASSFGDRSSQGGEQEEKEKSKVQQQVAMASVVKDAELNGERSESRRREGEERHIPEV

SEQ ID NO: 7744 - protein, 372 aa, Zea mays
  unsure (1)..(372): unsure at all Xaa locations
  Clone ID: ZEAMA-23APR03-C251595_1.p
MAMSFHFHPLAASRVHFSPLPFAAAAAGVPSPSSSVAIAAHHHHHQHCRRRFSAIVATAAAASAATTEFDFKAYMGERAVAVNRALDAAVPAGEPPAALHDAMRYAXLLAGGKRVRPALCLAACAVVGGPEPWAMPAAAAVEMVHTMSLVHDDLPCMDDDDLRRGKPTCHVVYGEPIAVLAGDALLSLSFHHMASVGSYPPDVDPEKHPARVVRAIGELARCIGSEGLVAGQVVDLEMTGTSETVPLERLEYIHLHKTAALLEASVVIGAIIGGGTDEQIERLRKYARSIGLLFQVVDDILDVTKSSEELGKTAGKDLASDKTTYPKLLGLEKSREFAEELLSDAVEQLACFDKEKAAPLLHLANYIAHRQN

SEQ ID NO: 7745 - protein, 245 aa, Zea mays
  unsure (1)..(245): unsure at all Xaa locations
  Clone ID: ZEAMA-23APR03-C2516_14.p
MVMASSSGLRSCSAVGXPSLLAPSSRSGRLAPFCAXATTSGRVTMSAEWMPGQPRPAHLDGSSPGDFGFDPLGLATVPENFERFKESEVYHCRWAMLAVPGILVPEALGLGNWVKAQEWAAVPGGQATYLGAPVPWGTLPTILVIEFVAIAFAEHQRTMEKDPEKKKYPGGAFDPLGFSKDPAKFEEYKLKEIKNGRLAMLAFVGFCVQQSAYPGTGPLENLASHLADPWHNNIGDIIIPRSISP

SEQ ID NO: 7746 - protein, 352 aa, Zea mays
  Clone ID: ZEAMA-23APR03-C251922_1.p
IYVPERFAFVTRLGMDYYNILKVNRNATLEDLKKSYRRLARTWHPDKNLTGGAEAEAKFKQITEAYEVLSDPEKRAIYDQYGEEGLKGMPPPGSQSRSSTTAGPSGPSNFHYNPSDPDDFFAEFMASNKTYSFDHDRRRFQPRSHWTSARNSRSEAPSGSQKENGASTSNIEKPPPVEKTLLCTLEELYNGTKRKMKITRNVAKPDGRIEVETEVLAVEVLPGWKKGTKITFPNKGDKLHGQLAQDLTFVLDSKPHDVYNLEGNNLLVKQVIPLVDALAGAEINLTTLDGRNLPVRVEEVVRPGYEVVLENEGWPIRKEPGKKGKLVIKFDVTFPMRLSPSQRAAIRRIMGS

SEQ ID NO: 7747 - protein, 270 aa, Zea mays
  Clone ID: ZEAMA-23APR03-C2520_71.p
MAATSSSSSSTVVALAALLFLLLVTCGSCARPASFNASDFTADPNWEAARATWYGAPTGAGPDDDGGACGFKNVNLPPFSAMTSCSNEPLFKDGKGCGSCYQIRCQNHPACSGNPETVIITDMNYYPVAKYHFDLSGTAFGAMAKPGRTDELRHAGIIDIQFKRVPCNYPGQKVTFHIEEGSNPVYLAVLVEFEDGDGDVVQVDLMEANSGSWTPMRESWGSIWRLDSGHRLAAPFSLRITNESGKTLVANQVIPANWVPNTYYRSIIQY

SEQ ID NO: 7748 - protein, 275 aa, Zea mays
  unsure (1)..(275): unsure at all Xaa locations
  Clone ID: ZEAMA-23APR03-C2520_83.p
MGMGSLLSLYLLPRAVFLLLAACCSFASGGVNNYNTSDAAARQLQWGNARATWYGQPNGAGPYDNGTXGACGFKNVNQYPFMAMTSCGNQPLYRDGKGCGSCYKIRCSKHAACSGRTETVVITDMNYTPGVAPYHFDLSGTAFGRLAKPGRNDDLRRAGIIDIQFARVPCEFPGLKVGFHVEEGSTQVYFAVLVEYENGDGDVVQVDLMEKRARRWTPMSQSWGSIWRLDSNHRLQPPFSIRTRTDSGKTLVARDVIPLNWRPNTFYRSIVQYSS

SEQ ID NO: 7749 - protein, 375 aa, Zea mays
  Clone ID: ZEAMA-23APR03-C2523_5.p
MAQPQQRVYQAWKGDNRFFFGGRLIFGPNVNSLGVSVALIVIPVAVFCVFVAHHLRHQFHAYDAGYAILVIAIVLTIYVLLLLLTTAARDPGIVPRASHPPEDIHYDNLSLTDTPGILQFPRVKEVIVNGMPVKVKYCETCMVFRPPRCSHCSICNNCVERFDHHCPWVGQCIGKRNYRYFFLFVVASSLLSIYVFIITALYIKFLMDGDYPTVWKALKHSPASLALMIYCFISLWFVGGLTGFHTYLISTNQTTYENFQYRSDGRLNVYDQGCLSNFQEVVCAKIEPSKHKFRAHIQEEVRAPPANRAGESEEEQVGGPRAKVGDGLDIDGDLMKISHRHNHEDVDIEIGCGDANEVECSVSDSKVKDNTDAHM

SEQ ID NO: 7750 - protein, 823 aa, Zea mays
  Clone ID: ZEAMA-23APR03-C25244_1.p
MPYPHPYPWQSSRRRRRRRGRDGAPRQPQARRVVERAAAGPGHATTTQQPDNVSSAKVFQTSRVETESKLRNGRKPQDLEDEHQAEEAELQPLIDQVRAMLRSMNDGDTSASAYDTAWVAMVPKVGGDGGAQPQFPATVRWIVDHQLPDGSWGDSALFSAYDRMINTLACVVALTKWSLEPARCEAGLSFLHENMWRLAEEEAESMPIGFEIAFPSLIQTARDLGVVDFPYGHPALQSIYANREVKLKRIPNALMHAFPTSILHSLEGMPDLDWPRLLNLQSCDGSFLFSPSATAYALMQTGDKKCFEYIDRIVKKFNGGVPNVYPVDLFEHIWVVDRLERLGISRYFQREIEQCMDYVNRHWTEDGICWARKSNVKDVDDTAMAFRLLRLHGYNVSPSVFKNFEKDGEFFCFVGQSTQAVTGMYNLNRASQISFQGEDVLHRARVFSYEFLRQREEQGMIRDKWIVAKDLPGEVQYTLDFPWYASLPRVEARTYLDQYGGKDDVWIGKTLYRMPLVNNDTYLELAIRDFNHCQALHQLECNGLQTWYKDNCLDAFGVEPQDVLRSYFLAAACIFEPSRAAERLAWARTSMIANAISTHLRDISEDKKRLECFVHCLYEENDVSWLKRNPNDVILERALRRLINLLAQEALPIHEGQRFIHSLLSLAWTEWMLQKANKEENKYHKCSGIEPQYMVHDRQTYLLLVQVIEICAGRIGEAVSMINNKDNDWFIQLTCATCDSLNHRMLLSQDTMKNEARINWIEKEIELNMQELAQSLLLRCDEKTSNKKTKKTLWDVLRSLYYATHSPQHMIDRHVSRVIFEPV

SEQ ID NO: 7751 - protein, 136 aa, Zea mays
  Clone ID: ZEAMA-23APR03-C25319_1.p
MMRGDDEYRYHHQQQQHGPGGGAPHGLIMAVVVGLVVAGPLFLGEGGEAVTSAVADLLGPTGLLLLPVGLVLVIRVLSSDRGAAALAGALSLGGSPDSVHRVGGSPVGVALALALIAALLYYRSALFGGGGGGDDE

SEQ ID NO: 7752 - protein, 254 aa, Zea mays
  Clone ID: ZEAMA-23APR03-C25349_1.p
MSGEAAAVGGGEGEANGIPPNVTIYINNLNEKIKLEELKKSLTAVFSQFGKILDVLAFKTLKHKGQAWVVFEDVASATEALKRMQGFPFYDKTMRIQYAKTKSDIIAKADGTFVPRERRKRTDEKSEKKQKREHHHDAGASQIGMGVTAYPGVYGAPQLTQIPIAGGQRVMMPEIIVPNNILFVQNLPHETTPMMLQMLFCQYPGFKEVRMIEAKPGIAFVEYGDETQATAAMNNLQSFKITKENQMVITYAKK

SEQ ID NO: 7753 - protein, 238 aa, Zea mays
  Clone ID: ZEAMA-23APR03-C25353_4.p
MASSAEERFLRQLSASNGGDAGVYGGQQLGHKEYCAERRGSRRWSRKRAAAARGYCGAGGGYDYDYDVKQQAEAASPAARKRVIVVVDETSGSKHAMMWALTHVASKGDFLTLLHVLLPHSASGGGCSRGEEASSLANSLGTLCKASRPEVRICRHTCTCASADTLARHARYLLLVSCSLLVHIHTNFGFLGYKPLFGNSNRLIWQDSGRPASPPLPGLTRPFMQVSTRWQKNFWLLA

SEQ ID NO: 7754 - protein, 149 aa, Zea mays
  Clone ID: ZEAMA-23APR03-C2539_16.p
MADQLTDEQIAEFKEAFSLFDKDGDGCITTKELGTVMRSLGQNPTEAELQDMINEVDADGNGTIDFPELLNLMARKMKDTDSEEELKEAFRVFDKDQNGFISAAELRHVMTNLGEKLTDEEVDEMIREADVDGDGQINYEEFVKVMMAK

SEQ ID NO: 7755 - protein, 319 aa, Zea mays
  unsure (1)..(319): unsure at all Xaa locations
  Clone ID: ZEAMA-23APR03-C25453_2.p
MSSSCSDASRDDAVSSPDLPPLAAPVAAAAAAAAAAASSGGGIGLGGVGSGRRLPPPCWTHEETLXALIEAYRDRWEALQKGNLRAADWDDVANAVTARCGRFPTATPKSGVQCRHKVEKLRKRYRAERSRSAGRSKGPKWPFFPLLHDLAGGGVPDPSPNAIVKIKTKGPAPPASSPSPVSSPSSEVEAVRSRSLHGLISNGGAGSGLRFTIPKASRTKPVAAAAVKSERSGSEDDAESEAMAEVAAALRAVGEGFLRMEERRLELSLQMEKERMESEMKRTQTMLDAQQLFLEAFLGKQLQHKKAHVSPSSAAMEED

SEQ ID NO: 7756 - protein, 309 aa, Zea mays
  Clone ID: ZEAMA-23APR03-C25488_1.p
MKLKNSALETFKENNTIFTPEGNFHSTKMREEYVAGPNQPAVVETRCKWMIGDVTEVLDRNTWKLGKILKMLKNDYFVIRLADCIRLKEFHISSLRIPRGLEAPESKPFHAAADKATGRDKRRPADGASPGTRAVQQTCHRTTYDLGSSGKKRKPDADASRHPGIASAHTRKVAAASNLNGGIADSYLHNYPQAIGDAQCSVASCSVNDLYRLGNGGNAERRPAAAVCLPDDAMSACPCTPGARDGEGEEEAAAALHGLQLEAYRSTMRALYASGPLTWAQEALLTNLRLSLNISNEEHLLQLKRLLSS

SEQ ID NO: 7757 - protein, 414 aa, Zea mays
  Clone ID: ZEAMA-23APR03-C255099_1.p
MWESPRQTQAHTPFPSWIPYAGTFAAGVGMVAAADSSLPSERGPGPDCAWNQSAPSVGARDGGSGYRGNYFLSLLDSKNVTPEMFEDDVVVLPAASPSRDYLGVGGGAGAAASNMAGPAAAYGLLDPYYSPVVASRAPPVDHETASSPLVYSGDGVVRGTSMPCYDDHEEKRPTGGRQPQGFGAPAAAFLQEMMIPSRVETKLHSGLGYLGMVSQRLETSFGVVGSLPDAAGSFSDEYNSNRSSADFMSSNSNRSLEKRVGGSSSGRGAATRRKSDGGLGGNTKKSKQEASPKASSAPKQPQVPRVKIGEKITALQQIVSPFGKTDTSSVLFETIEYIKFLHEQIRMFSEPYMTKSSYKGHIGLRGEEEESGTGHDLRGRGLCLVPVSLTSQAYQEDDTLPDCWAPAYRGCLYR

SEQ ID NO: 7758 - protein, 272 aa, Zea mays
  Clone ID: ZEAMA-23APR03-C25576_1.p
MNSSGEYDAAFAATIAAAAFAIAAREDKLAAQKNSVPIEEVTPSLSPVNRAEGTKKPAGGNKIARWFSGKEPIEHEDDDEGPVNVSVRRPLKPAPGKPEDVPADHHKVAPRMLETSLGVRKGSGSSSRSAERKWSKEFEQEQAVQKAPSAVRPATSYRSGRNGEGAAGVAATGGTGSKADEWEKAKLGRVGEECEKMMETMAEWETEKKSALDRKREKALEEYNLEKTRISKISGGARAMAEERKYNDRKKIREKARKMRSTGKPPRTCACF

SEQ ID NO: 7759 - protein, 165 aa, Zea mays
  Clone ID: ZEAMA-23APR03-C25576_3.p
GRVRDLPAGRQRGNGARSLSKNRLFRKRRGSAVRPATSYRSGRNGEGAAGVAAPGGTGSKADEWEKAKLGRVREEYEKMMETIAEWETEKKVKARCQKEQKETELDRKREKALEEYNLEMTRISKISGGARAMAEERKYNDGKKIREKARKMRSTGKPHRTCACF

SEQ ID NO: 7760 - protein, 310 aa, Zea mays
  Clone ID: ZEAMA-23APR03-C2557_1.p
GFLPSWFGSAPWPMGSGGFAAAVAACPSAAEAFLKYYGIVSGGTSAESRQALVELSLAIDGIEGMRDVIFADIPKLIPFIDLEDMSLFSCFYDFVFFICREKGQKSVTIQRAVAAWRIVLSGRFRLLDRWCNFVEKYQRHNISEDTWQQLLAFSRCVNEDLEGYDPRGAWPVLIDDFVEQMHRIYHSTDCSSAMESQCNISSTLKGLDPQPGSKRKCPHLKSNEEDVELSDSFTRSVHLTPIKRLKESHDARYGAGESAKTTHFSNSSSGGYHEDMNLHNSRGCLQNSPCNVEDALSKGFEGCISMKCPF

SEQ ID NO: 7761 - protein, 369 aa, Zea mays
  Clone ID: ZEAMA-23APR03-C25709_2.p
MHLQVRDMLGDGRLIKRRVVDGKGEFPMDCPLHDSLLRVHYKGILLDEPKSVFYDTRADNDGEPLEFCSGESLVPEGFEMCVRLMVPGEKSVVTCPPDFAYDKFPRPANVPEGAHVQWEIELLGFEMPKDWTGLTFEEIMDEADKIKNTGNRLFKEGKFELAKAKYDKVLREYNHVHPHDDEEGKIFANSRNSLHLNVAFCYQKMGEYRKSIETCNKVLDTNPVHAKALYRRGMSYMLLGEFDDARNDFEKMITVDKSSEPDATAALLKLKQKEQEAEKKARKQFKGLFDKKPGEISEVGVESEGGKDAGDARGSGEATSADRGANAVDSPTRESEYAFEEERPGLLGRLWPSARRIFSSVGINRCTIL

SEQ ID NO: 7762 - protein, 255 aa, Zea mays
  unsure (1)..(255): unsure at all Xaa locations
  Clone ID: ZEAMA-23APR03-C2572_6.p
MAKLMNKLVDSFEHDEIPDVGCVRAVLAELVLTFLFVFTGVSAAMAAGSDGKPGDAMPMATLAAVAIAHALAAGVLVTAGFHVSGGHLNPAVTVGLMVRGHITKLRAVLYVAAQLLASSAACVLLRFLSGGMVTPVHALGRGISXPMQGLVMEVILTFSLLFVTYAMILDPXQVRAIGPLLTGLIVGANSLAGGNFTGASMNPARSFGPALATGDWTNHWVYWIGPLLGGPLAGFVYESLFLVQKMHEPLLNGEV

SEQ ID NO: 7763 - protein, 311 aa, Zea mays
  Clone ID: ZEAMA-23APR03-C2572_8.p
MSHSPLPPPVFQNISLRFSESFSLQGTETTGAFTPPAFPSPPGTTGLLAIIHPSMAKLVNKLVDSFDHDEAPAPDVGCVRAVLAELVLTFLFVFTGVSASMAAGAGGKPGEAMPMATLAAVAIAHALAAGVLVTAGFHVSGGHLNPAVTVGILVRGHITKLRALLYVAAQLLASSLACILLRYLSGGMVTPVHALGAGIRPMQGLVMEVILTFSLLFVTYAMILDPRSQVRTIGPLLTGLIVGANSLAGGNFTGASMNPARSFGPAMATGVWTNHWVYWIGPLLGGSLAGFVYESLFMVNKTHEPLLNGDI

SEQ ID NO: 7764 - protein, 239 aa, Zea mays
  unsure (1)..(239): unsure at all Xaa locations
  Clone ID: ZEAMA-23APR03-C25748_1.p
KSGQKSPVCRGPRSSAAEVQATNKSFPSPPASTLLSFSSAVPHRIASPRRQRNSSPGRDLFHPPSLSAASLPRLGACLGCSRPRIRCSTPASSATPTSSPSSTTPTPTPGAPPPPPTPSLPTPPPPPLPTTSRRSPPRSSPPLRRTTATSHTQPPGVRTXAAPVPAARTRRRLAGAPPPGIAAPALPPPPAMPPRGPDAGRDAAPSAALATPAGRRRARGERGRRRGGPRGGGGRAEGR

SEQ ID NO: 7765 - protein, 223 aa, Zea mays
  Clone ID: ZEAMA-23APR03-C25754_1.p
MPPSGRKPKAAPSEPRRRPQSRLEFRATVDGAWYEARVAVQCGALRVMYEEFLEEQDEWYDLAALAASSVRDVAKLRARFRVPSTPLEDTQCCDLQAGARLCVSCLLDGGDLKFYDAVLDSVFPAAHEIVDGMERCACRFAVQWSDGPRAGSMEEVGIERVCCVQSSPVQDPVLIEFLDGVTKLAGDANRETVSQEICVAPVAEGGVHANVPPGFQWKFGSSE

SEQ ID NO: 7766 - protein, 203 aa, Zea mays
  Clone ID: ZEAMA-23APR03-C25828_1.p
MRNYGQSLYNRQSPVARCANFVCAVLLTLVLIAGVILFVLWLSLRPHRPRFYLADFSIPNVNRQSGSGLANLPVRFTVNEHNPNQKIGMYYDEVVASVFYGDQLVATGSVMHPFYQVPKGDTPVQGTLTAKAPVPSDPSWGRFAGEVSAGSVGMRLELSSKLQFQAKMWDSKNHHIKVECDFTMQGDGTLRKQDKDSQCTLYF

SEQ ID NO: 7767 - protein, 63 aa, Zea mays
  unsure (1)..(63): unsure at all Xaa locations
  Clone ID: ZEAMA-23APR03-C25885_3.p
IRGAQKKTNTSQARGRKLGTLKNRPPLFFFFFFFFXFFFLLFFFFFFFFFFFFFFFFFFFFFF

SEQ ID NO: 7768 - protein, 108 aa, Zea mays
  Clone ID: ZEAMA-23APR03-C258_15.p
MAPKKDKAPPPSSKPAKSGGGKQKKKKWSKGKLKEKVNNAVLFDQATYDKLLSEVPKYKQITPSILSERLRINGSLARRAIKDLMARGLIRMVSVHSSQQIYTRATNT

SEQ ID NO: 7769 - protein, 68 aa, Zea mays
  Clone ID: ZEAMA-23APR03-C258_9.p
MAPKKDKAPPPSSKPAKSGGGKQKKKKWSKGKLKEKVNNAVLFDQATYDKLLSEVPKYKQIYTRATNT

SEQ ID NO: 7770 - protein, 249 aa, Zea mays
  Clone ID: ZEAMA-23APR03-C25909_1.p
MQGEYRSSSEESAAAAAAAAMAPLAAAAAAAVKMEAEQAAMASAAAPQLGSAHQHQHQQMQPRRQYRGVRMRKWGKWVAEIREPHKRTRIWLGSYATAVAAARAYDTAVFYLRGRSARLNFPDEIPSLAPSEGEGEGDGGEPARDPADGGGTLSAASIRKKAIEVGSRVDALQTGMMVPPPHHRERQRHHHHHHHHLPQLRMHAAAAEAAAVAEHRQEVKQSPQRPAWSGRVKNPDLNRAPSPESSDAE

SEQ ID NO: 7771 - protein, 227 aa, Zea mays
  Clone ID: ZEAMA-23APR03-C25909_2.p
MQGEYRSSSEESAAAAAVAAAAAMAPLAAAEVKMEAEQVAMAAPQLGAAHQQTQPRRQYRGVRMRKWGKWVAEIREPHKRTRIWLGSYATAVAAARAYDTAVFYLRGRSARLNFPEEIPSLGLADGVDVGEPARSGGGGGCTLSAASIRKKAIEVGSRVDALQTGMVVPPPHHRERHRHHNHLPQLRGHAHAHAEEQQQQPQRPVWSGRVKNPDLNRAPSPESSDAE

SEQ ID NO: 7772 - protein, 673 aa, Zea mays
  Clone ID: ZEAMA-23APR03-C25939_2.p
MRMTFDLLNMFKHRRSRRSGGSAASEDSSGSGLFQGTSQSRQRQQQLLDCLDEVQGEEGEQETPQQDAHVQGEEGEQDDEGEQDEEVDPMGAGSAGDASDGSTSFRYKKSNALGPRPAERRLIRPHGEWSWEDLTWDGTGRRPKVNAVLGSLCRFYYPGMVELNGERFAAMQWADWGLKDYVEPGESGESSSGGGSSEKKRRTCQVAVWDEFWGRFQLPDDIEEDQAQWTRVRGTFGKCADKIIKDAMYNARIAAVNYYYKKIKGQKMSKALGANEIYLTEEQYLESVVDWLAKDMEAWRWLAKRWASPEWIAESNKHRANRGTEGPRHRYGADGHLGTARRMEAESGVAPSFMEVYVRGHRGPDPANPDELCSEAAREKMNAYGEEMTQRHGPDFDWMHSDLDASALYHSGGGRKHGRFAFGTGVVEYNRTLGQGKTSSSAGSSRSSKSAREAQLEEETRAAQEQARAAQEQARAAQEQVGQLTQYMTSYFQEMTTRLGPDMNLPAFRPPQAQGWGQWPGQAPASQPQWTGVGWTQAPPGTWTPPPPQGSQPVPGWMPPVSQPPAGSQPFQAWMAPPPTGWVPPPQGWPAQQYPWMHAQPPPHHGSQGSASHAHGSEGGCQRPRLPRPWFWRGVATFLVAEEGVAKTHIARRVSSEFVYGLCMDMYRLCLWF

SEQ ID NO: 7773 - protein, 692 aa, Zea mays
  Clone ID: ZEAMA-23APR03-C259_65.p
MEKKTVHVPAEGNGEIENGTSSSQNPETLEHPVLLSASQTVPNNLGIRKNYKRAANRGKKGSQGLTGQAYTLRSSDIDVRVLRSTSGSKTTSTEHVQPPGQPAAKRRKRSRASNKNSTDEFSQIRKRVRYILNRMNYEQSLIEAYASEGWKNQSLDKIRPEKELERAKSEILRCKLRIREVFQNIDSLLSKGKIDESLFDSEGEISCEDIFCATCGSKNATLGNDIILCDGACDRGFHQNCLNPPLRTEDIPMGDEGWLCPACDCKLDCIDLINELQGSDISIEDPWEKVFPEAAAMTNGSKQDEAFDLPSDDSDDNDFDPNMPEEHVASKEEGSSEEEEDDDGGSDSDDSDFLTCSDDLEPLIDKKKVDDLGLPSEDSEDDDYDPAGPDSDKDVEKKSNSDESDFTSDSDDFCKEIKKSGGHDEVSSPPLPDVRVGDMEKNTAQSNTTSSADDPMETEIDQSVVLPVSRRRQAERLDYKRLYDEAYGEASSDSSDEEEWSGKNTPIKSNEEGEVGSPAGKGSRVAHHNELTTQNTKESLHSLHGSVDEKHGDLTSNGSNIKDRKGHFGPVISQKLHEHFKTQPYPSRSLKESLAEELGLTFHQVNRWFENRRHFARLASSRKGISPDKHSPQNTNSPVTPSMQPKEPEGTVMEESNVCINRDATISKKAVSSKVGSRKNLSKSSPKSRVKS

SEQ ID NO: 7774 - protein, 279 aa, Zea mays
  Clone ID: ZEAMA-23APR03-C259_66.p
WHIYSFHQSSKNSIIQLLRFISSSPGAQEDASPPPQHSLTSRPLHHDNLLRHYCSSGTFSTSLTKHSEPLLDLRLPLGDLLLVHPDLPPLAASLSSSAGHHPLVRIHSRSPSRDGREEENAGAPGGDGIRDARGLGLEHDAHRVAVVRGGVVGEPPLLGAHGLVHLLLGEVEVAPELHRHALPHHRRRRRRRPRRVHGRRLAPRREEQRGEGVRQRAEKAHALVTTARELIDAESIGIRDRGGWPAWGCENWEIFCGFFIRGLIELWSDERFAWAIGFF

SEQ ID NO: 7775 - protein, 139 aa, Zea mays
  Clone ID: ZEAMA-23APR03-C26043_9.p
MPRRSSGRSAPRPAPRAASLRNPPQPARQAPPPAPVRDGGGSMFGGIGSTIAQGMAFGTGSAMAHRAVDSVLGPRTIQHETLATEAPAAAPAAPAMNADACSFHSKAFQDCLNNYGSEISKCQFYLDMLNECRRGGVSA

SEQ ID NO: 7776 - protein, 341 aa, Zea mays
  Clone ID: ZEAMA-23APR03-C260999_1.p
MGRAAGLARAGVTAAGRATTTRVMRAAVSAFFAGYHRFTSVAALLALPFSAAVLASEAMAPSSGALRAVAARLRSVFAAAGFPPSPFFALLEAKLSQTVFTFAATLPFALTFLLLAKACVAAMLRLRDDDASESPPPRRRRVAVAALPPCAAVARAYPAVVATHLLNAFLMLSANAAVFSLLLLAFGAADLLGLTSHVWTLALSAAGAIVYSLVVGVATVVCNLAIVVAATEPGCAGHAAVLRACVAIRGRVSTALALALPTNLGMAAAEALFGLRVVAQRRRDGRLAPGVAGEAFSIAYIHAICVVLEIIVTCMFYRSCKRSEADELRELEPEEKGDLQA

SEQ ID NO: 7777 - protein, 420 aa, Zea mays
  Clone ID: ZEAMA-23APR03-C260_40.p
MAIRKGSSYAVAALLALASVAAVAGEVFFQEKFEDGWESRWVKSEWKKDENMAGEWNHTSGKWNGDAEDKGIQTSEDYRFYAISAEYPEFSNKDKTLVLQFSVKHEQKLDCGGGYVKLLGGDVDQKTLGGDTSYSIISRPDISRYSTKKVHTILTKDGKNHLIKKDVPCQTDQLTHVYTFIIRPDATYSILIDNEEKHTGSIYEHWDILPPKKIKDPEAKKPEDWDDKEYIPDPEDKKPEGYDDIPKEIPDPDAKKPEDWDDEEDGEWTAPTIPNPEYKGPWKQKKIKNPNYQGKWKAPMIDNPDFKDDPYIYAFDSLKYIGIELWQVKSGTLFDNIIITDDPALAKTFAEETWGKHKEAEKAAFDEAEKKKEEEDAAKGGDDEDDDLEDEEDDEKADEDKADSDAEDGKDSDDEKHDEL

SEQ ID NO: 7778 - protein, 169 aa, Zea mays
  unsure (1)..(169): unsure at all Xaa locations
  Clone ID: ZEAMA-23APR03-C26116_3.p
APPLIFFLFFFFFPSSMIHTXXLDQRPSAHYMFLSLSTTYYCSKPIYEEQVARDKRERERERERERERERDQLCMMHQERKQTASMPLWTSARWCAQAASYRAGGLEHRRRRFQVLDKHYGSSFKETTRDFLFCLAALTNTMERHAGAHHGLRTSCSPLRQATGFYNQQ

SEQ ID NO: 7779 - protein, 325 aa, Zea mays
  Clone ID: ZEAMA-23APR03-C261381_1.p
MIGGGRAADSHPASCSSSSSSSSSPSGPSTGGSRLHRSKRRPDILNMLMSAACLSSSSSDTGKGQSKFSSNKVTHGFHLVEGRSGHDMEDYHVAEYRYENDHELGLFAIYDGHLGDSVASYLKANLFDNILKEPLFWSDPQEAIKNAYSSTNKYILENTRQLGPGGSTAVTAIVVDGTDMWIANVGDSRAVLSETGTASQVTVDHEPHTTNERKRIEEKGGFVSTFPGDVPRVNGQLAVARAFGDQSLKAHLSSEPDVKHIKINSSTEFVILASDGLWKVMKNQEAVDLVKSTKDPQTAAKRLTSEALGRMSKDDISCIVIRFRC

SEQ ID NO: 7780 - protein, 110 aa, Zea mays
  Clone ID: ZEAMA-23APR03-C261_11.p
MTEEEAKKVEVEVEVTKAAPAKENAAEEKAVIPATEPPAAQEKPPAPADDSKALAIVESEYNLLCLILPLCSGRLAMERWCWRTGFCSKNSEKLSSSLLYALVRRLCTSW

SEQ ID NO: 7781 - protein, 101 aa, Zea mays
  unsure (1)..(101): unsure at all Xaa locations
  Clone ID: ZEAMA-23APR03-C2624_6.p
MSHAWSAEATLAGAKAAAVATIASAIPTLASVRMLPWAKGNINPTGQALIVSTAAGMAYFIAADKKILSLARRHSFDQAPEHLXNTSLQGTXRAQPAIFRP

SEQ ID NO: 7782 - protein, 227 aa, Zea mays
  Clone ID: ZEAMA-23APR03-C26277_4.p
MKHVKTIMSKNKAKKDGNSSHLWAQTLNTWPCMQHSWVGRRSVAAGHGVLDTRRRAGHRVRDARHRAGHRVRDARRHARHRVGDANRRARHRVLDACRHALARLRHLLNGAGGAVLLQLRAVGRGSGGVLDALRRVLRLVLALGLKQEVGEGSLDGHHITTGAHEQDGSSEHTKSLRQLLVFGPVPLVVELGVQEHGELVPRLRHRRNWPRHDPALRSPSASSPMGF

SEQ ID NO: 7783 - protein, 133 aa, Zea mays
  unsure (1)..(133): unsure at all Xaa locations
  Clone ID: ZEAMA-23APR03-C264885_1.p
MGVTYQRLLSQGSQSQRPRSGVRARAWVLLRWAAVRLSCAARRRXTGGGGAGRARRLAWAGLCGRGGSGRRSATAGGGAGAGAGVLGYDSASYARNFDDGAWKAEEGVSWAGPGGAFFPGANIGGAAVDTARL

SEQ ID NO: 7784 - protein, 96 aa, Zea mays
  Clone ID: ZEAMA-23APR03-C2648_2.p
MLRTAHVHFAGTFTLSNLGMFGVDRFDAILPPGTGAIMAVGASEPTVVGTKDGRIGIKSQMQVNVTADHRVIYGADLAAFLQTLAKIIEDPKDLTF

SEQ ID NO: 7785 - protein, 299 aa, Zea mays
  Clone ID: ZEAMA-23APR03-C264924_1.p
MPAPAQPPRGTRKRARASRRAPTTVLTTDTSNFRAMVQEFTGIPSPPFAAGVGVGGPAASLRTRFDHIFPPPSSSLPPYLLRPFPQKLPAAPSSFPPFTTTTTTATPSSSSSTPVGVANANAATGTSATAAAPSNPAAPAAAAAAGAGDTFHHLTSSALLRLQDPSGCYLSFPNLLDPQPPSSQCIFGAAGGFGQASRLHDPAPSPSDFLASGSLGLSHGGLLGSEGLHLHHPRTDDELSGVVAAGASGGSCKLNYSHAGAATSSSGADKPPDGGGAGAGGTGRPGRGEGLDPWICTSE

SEQ ID NO: 7786 - protein, 482 aa, Zea mays
  Clone ID: ZEAMA-23APR03-C26495_1.p
MATGGKSAAPQPPPAASSSSERALESVHFSSGNPRIEETRGVVVLHPDPPAAASWSHVPLGSKPRVCVLAVPNHMTYADFCRFCGAFVPHTLEMRIVRTDGAEDQYSVLINFDTQSSTDSFYKHFNGKQFSSLEGGVCHVRFVEEVHYTELIEHAHTSVTNLAEQPTCPVCLERLDQDPGGILTTICNHSFHCSCISKWTDSSCPVCRYCQQQPEKSMCSICGTSENLWICLICGHVGCGRYKGGHAIEHWKETQHCYSLELETQKVWDYAGDNYVHRLIQSKTDGKLVEYNFHGDHTAESTCSLCSGDAAMDEALLNSKFEAIVEEYNDLVTFQLEKQRNYYESLLLEVKEETEKEISAATEKAMSTKLQKLEVKFDKCMEEKKFLDEVNGNLVKNQEMWIETIRKAQAREQAALRLKDEKIEKLQEELRGLIAHFDCQSDTAQASNAISSDIPGGMILPVASESSSSGGVVGGTGNGEQN

SEQ ID NO: 7787 - protein, 127 aa, Zea mays
  Clone ID: ZEAMA-23APR03-C2653_2.p
MAGKAAAATAARWAEGYPWKEKLAKYKGELGKGVWGYWELGAWKPLGISARKRARLRKEVLLAGEDWSYDPPRGEMRTKRKGHKCDRISAEKRANTVELMKKMPQMLLDYKKRRWEKKMKVEESGKN

SEQ ID NO: 7788 - protein, 232 aa, Zea mays
  Clone ID: ZEAMA-23APR03-C2656_6.p
MGSKAPFCLTLLLLLAAACGPAAHANDAVLKEHISSTKIPARLKRGSGLCSACENFTSEAVTYLGKEQTQDRIVEFLHDACSQSFSFEQKCVELMDSYATLLFAKITEIRPEAFCKRYGLCRDTALLSGVGSDSTCVFCHHLLDEIMSKLKDPDAEFEIIQILVKECNKIEGHVQQCKRLVLQYIPLILVNGEKFLEKNDVCALAQACPASSRKTFSSMLKGALWSDAWLEG

SEQ ID NO: 7789 - protein, 297 aa, Zea mays
  unsure (1)..(297): unsure at all Xaa locations
  Clone ID: ZEAMA-23APR03-C2660_2.p
MAPKAAEQERAAAEQGQEQPRLRGVRKRPXWGRYAAEIRDPVRKARVWLGTFDTPEQAARAYDAAARRLRGPRATTNYPGDVVREAPCTAPALAASASGSTESSSSSSSRDDGHPPPPLPTAPSSLGLGLGLFPATVATQPCLFLDPAPVEREEGERERSCCSRSPPSVWRASGSTSTSTCLRPPRWSCSVGDSNSSKKGLCSSSVVLASQFACALATSQFATSQCKSRNRRPNIFLLQKKKKKKKKKKKKKKKKKKKKKKKKKKKKKKKKIKKKKKKKKGGPVLRTQCYHPWHATS

SEQ ID NO: 7790 - protein, 439 aa, Zea mays
  unsure (1)..(439): unsure at all Xaa locations
  Clone ID: ZEAMA-23APR03-C26615_1.p
MAAATAPPPAAVATTLSGLMRCQNIRSSRPRAFYARCASSNASAEAAESRKGGHGGTRLEEAVPVGEGRSRVDAWISARLGGGGVSRARVQASIRXGLVAVNGRPVSKVSHTVKGGDLVSCTVSELQPLRAEAEDIPLDIVYEDDHVLVVNKPAHMVVHPAPGNAKGTLVNAILHHCKISTFTCLARSSAGDECPDSSDEDTDVFHVDQFAAEDVSSEVRNALVRPGIVHRLDKGTSGLLVVAKDEHSHARLAEQFKLHTIRRVYISLTCGAPNPNSGRIEASIARDPNNRIRMTAIAGSGHRYARNAASRYKVREVFAGGGSALVEWRLETGRTHQIRAHAKYIGIPLLGDETYGGTQSMALSLLRPRSPSKYHSGLSNLLSKVDRPCLHAASLGFKHPRSGKVLEFSCPPPDDFLEVLGELRRVTSSDAPNGDGVFR

SEQ ID NO: 7791 - protein, 290 aa, Zea mays
  unsure (1)..(290): unsure at all Xaa locations
  Clone ID: ZEAMA-23APR03-C2667_1.p
MPGAMEPAEADAAAAAVAGRRPTASERRRMYRDLALSLRCGLRDAAAGFSFLRLRGLRALLRXLRSTSDADADADAGLFRDSQSIRDLQVIPVLFEHSLRKATGDAVLTVAQVLGMEPAAARLRNPATDSEVVLALRVLEGCCLLCPACAAAAHRYNAVKVVLNILMTRGILEQRACLDTLLALLVNCSGNLTDFKEQDGLNKIAVIVKDANRDDHVRLKCSEFLLLYSGNAKEKCGADSESNMREDLAKVFGEKCASFISSMNLFSSTLESQMRQSELSFLAEHVLDYM

SEQ ID NO: 7792 - protein, 524 aa, Zea mays
  unsure (1)..(524): unsure at all Xaa locations
  Clone ID: ZEAMA-23APR03-C2669_6.p
MEADAAAASGGLALLPAVLLLVALSTLVFSTWSNRNSRLPPXPMALPLIGHLHLIRPPPHRAFDRILARYGPLVYLRLGPSTHCVVAGTADXARDLLKHEASIPERPLTAVTRHLAYDDAGFAFAPYGPHWRFMKRLCMSELLGPRTVDQLRPVREAELAAVLEAARQAAAAREPIDVSRHLISMSNNAIMRMVASALPGHMTEAARDCAKHVAELVGAFNVEDYVGLCRGWDLQGLTRRTREVRDKFDALLEIMITGKEESRRRRHATTDTGGGTKDLLDILMDAAEDANAEVRLTRENIKAFVLDIFTAGSDTTATSVEWMLALLINHPACMDKLRAELDAVVGASRLVGEQDVPRLPYLQAVFKETLRLQPPAVFAQRETIEPVHVRGYVIPPKTSVFFNIFSIGRDPGXWEDPLQFRPERFMPGGAGAGXVDPKGQHMQLMPFGSGRRACPGMGLAMQAVPAFLAALVQCFHWEVPIPPGQSTAPPLYMEEAAGLVTARKNHLLLIPTPRLNPLPARAAT

SEQ ID NO: 7793 - protein, 379 aa, Zea mays
  unsure (1)..(379): unsure at all Xaa locations
  Clone ID: ZEAMA-23APR03-C26747_2.p
MRRWFCCTRFNASYREHENERPITPEEKEGNGFSVKSDPIKAPPSIEVPELSFEELKEKTDNFGSKALIGEGSYGRVYYAILDSGKHVAVKKLDASTDPELDNEFLTQVSIASKLKHDNFVEMLGYCVEGNQRLVVYEFATMGSLHDILHGRKGVPGAQPGPALDWMQRVKIAIDAAKGLEYLHEKVQPSIVHRDIRSSNILLFEDYRAKIADFNLSNQSPDMAARLHSTRVLGTFGYHAPEYAMTGQLTQKSDVYSFGVVLLELLTGRKPVDHTMPRGQQSLVTWATPRLTEDTVKQCVDPRLKGEYPPKGVAKXGFNPSIPCVRALPWLAAVAALCVQYESEFRPSMSIVVKALSPLLQHKPQPPAATTDATAPSDA

SEQ ID NO: 7794 - protein, 219 aa, Zea mays
  unsure (1)..(219): unsure at all Xaa locations
  Clone ID: ZEAMA-23APR03-C26767_1.p
PEGQLRSSSEAQATLPSSRPCASGEAAEPLQYTTTALRVSIHCEGWKKKVKKVLHNIEGVYKVTVDAAQHKXDGHREGGSRRARATKKRCRQAGGQDAEEEAGADKPGGGGGGKKGKKNKNPNKPLDCGGEAPAEKQASPGPESPHVHGGAFPYYAAHPVLSCYNVAHPSSSVSYYAPAAVVPYGGFPPMVPAEFMYGPPGMQESSMLNEDNANSCSLM

SEQ ID NO: 7795 - protein, 140 aa, Zea mays
  Clone ID: ZEAMA-23APR03-C2689_11.p
MADDDYNEIDMGYEDEPPEPEIEEGAEEELENNEDAPDDVIGGEGEDKEQEKTKRERKTTKYMTKYERARILGTRALQISMNAPVMAGTDDRPDDIAMKELRARKIPFTIRRYLPDGSYEDWGVDELIVEDSWKRQVGGD

SEQ ID NO: 7796 - protein, 422 aa, Zea mays
  Clone ID: ZEAMA-23APR03-C269434_1.p
MAAVLTRAGGRSKRSVSGFHLRSVLAGHGPFSSEAASTAVGDRVVAATGEHDGDDLRSRIFRLGLAKRSATAALEKWSSEGRDAPAAELRRIARDLTRVRRYKHALEVADWMKTHHESDLSENDYGMRIDLITKVFGASAAEDFFEKLPAGAKSLEAYTALLHSYGRSKMTDRAERLFERMKGASLPMDALVYNEMMTLYISVGELGKVEAVAEELKRQNVSPDLFTYNLRASAAAASMDLEGFRAVLDEMSRDPKSSTEGGWALYRDLASVYVDAGQLLGSVNSPPVEAGEARISQREWITYDFLVILHAGLGRPERIRDIWRSMVATSQSQSQSQQRMTSRNYVCVVSSYLACGRLEDAGEVVDQWQRSKAPEFDVSACNRLLDALLRAGLADAAGRFRELMLQKRCILTSSSSRAAVVE

SEQ ID NO: 7797 - protein, 374 aa, Zea mays
  Clone ID: ZEAMA-23APR03-C26946_1.p
PVRIKELEEIAAAGNSGHGATETRESASSSAELPWGSGDSSEDKRLGFVELARSMGISQDTHESMATDAANYLCHQLQHLLGPISSATSQSGPWEERSAMVRLTQKLQKYKRNKRWRQRRRKHVAELFQKERADYDRVDQEADEWRAKQIAKDIAKRRVESMQQIARKKTNEERKRLESELELALMVEKLQELRSIRVQKMKKQGHFLPEEDDKYLERVKAAVEEEERQAASAARTDAVKDAILTAEESRKPLQYTNSQEGGSEQPKSGPSEDEDQGDGGMSERNDQASQKTEHEDEGHRFEGKGHGHHDPVSNLPFEFYHYYHGSDYDMGTLIEVRRMWDSFISPGGSRIPGHWVQPPPPADEVWASYLVQHK

SEQ ID NO: 7798 - protein, 359 aa, Zea mays
  Clone ID: ZEAMA-23APR03-C27034_3.p
MSMAQVCCDSAVAVTAAPVVGAEAEARARARAERRSRAGESGAWKHAAAAGTADATRKRSLGSGELLLARKHGAASVAGRRREMEDAVSVRDAFCAEGTADGGRRDFYGVFDGHGCSHVAEACRDRMHELVAEELAATAADSSVSAAAAWTAAMERSFARMDAEVTSAGGRAAAARSSTCRCDAHRCDHVGSTAVVAVVEEHPPSVVANCGDSRAVLCRGDGAPPLPLSSDHKPDRPDELERIESAGGRVIFWEGARVLGVLAMSRAVGDGYLKPYVSSVPEVTVTDRSDGDECLILGSDGLWDVVSNEAACEVARACLRRGRAKWCAEAAALLTKLALARRSSDNVSVVVVDLRRRNH

SEQ ID NO: 7799 - protein, 294 aa, Zea mays
  Clone ID: ZEAMA-23APR03-C2704_3.p
MDFAGRVSFLLFFLVAGTVANDQIFTTSGLPFGRSSREPRYRVEFHPVDSPFHPDNGQESVPMASHEGKRYKCFLPVEETKTMKSMLPQNATNIIIESERRIKPKEPDELLEVLKDQCFYRHEGWWSYEFCYYGKIRQVHVEDSKVIQEFVLGEFDDDATAAYHENSTSELTDDDHHVKDISKRYHVHLYTNGTVCDLTDIPRETEVRFVCSEPTVLISSVKEISSCKYVVTIQSPMLCKNPLFQQEKRTLPIHCNELPAKAESGAEDGLLPKEAQISIIPDQDELHGFPAYAT

SEQ ID NO: 7800 - protein, 96 aa, Zea mays
  Clone ID: ZEAMA-23APR03-C270543_2.p
MPESRDGRSEDLADLSGGVGGGGFFIRRVASPGALAVRGVRKPLARRYISPSRNKENLLPVWALRVTPTKRSPLPGWYPRTPLRDITAIAKCILGW

SEQ ID NO: 7801 - protein, 527 aa, Zea mays
  unsure (1)..(527): unsure at all Xaa locations
  Clone ID: ZEAMA-23APR03-C2707_1.p
MATSRPLALALLLCALSACSHAAISYPPSAMSTAAPANNGFLSCLIKSVPPRLLHGKSSRAYGSIWESTVRNVKFVSDKTVKPVYIITPTEAAHIQATVACGRKHGLRVRVRSGGHDYEGLSYRSAKPETFAVVDLSMMRQVRIDGQGRXTAWVDSGAQLGELYYAVAKMTPSLGFPAGVCATIGVGGHFSGGGFGMLLRKYGTAGDNVIDAKVVDANGTLLDRKSMGEDYFWAIRGGGGESFGIMVSWQVQLVPVPPKVTVFQIHRGVKDGAIDLINKWQQVAPSLPDDLMIRIMAMEQDAMFEALYLGTCKDLLPLMASRFPELGVKQEDCNEMPWIQSVAFIPMGKSATVMDLLNRTSNIKAFGKYKSDYVKDPIPRDVWEKIYTWLAKPGAGVMIMDPYGARISSIPQDATPFPHRQGVLFNIQYVSYWFGEGDGAAPTQWSRDMYAFMEPYVSKNPRQAYANYRDLDLGVNEVVGDVSTYDSGRVWGEKYYNGNFERLARTKAKVDPCDYFRNEQSIPPLLK

SEQ ID NO: 7802 - protein, 795 aa, Zea mays
  unsure (1)..(795): unsure at all Xaa locations
  Clone ID: ZEAMA-23APR03-C27102_1.p
MSRGVSSGRRTCLELERIILNRHRSGSLGREDALNLFDELLPQARPASVHAFNSVLTVVARADSSPSPRHSAALAVSLFNTMARSGVNMMAAIIGIIIRCFCTVGRLDLAFAAFALFLKTGWRVQNVTLNQLIKGLCDGNRTDDAMDMVFRRMPELGYTPDVFSYNTLIKGLCVEKKSQEALELLIHMTADGGYNCSPNVVSYXTVIDGFFKEGEVDKAYFLFHEMIGQGLPPDVVTYNSLIDGMCKAQAMDKAEAILQHMFDKGVMPNTWTYSIMIHGYCSLGQLEEAVRLLKNMSGSGLQLDVVTYNLLIQYYSKIGRCAEARSVFDSMVRRGQKPNSTTYHILLHGYATKGALVDVRGLFDLMIRDGTPIEHRAFNILICAYAKHGAVDKAMAAFTEMRQNGLRPNVVNYNTVIHILCKTGRLEDAVYHFNQMVSEGLSPDTISYTSLIHGLCSIGEWKKVEELAFEMINRGIHPDAIFMNTIMDNLCKEGRVVEAQDFFDMVIHIGVKPNVVSYNTLIDGYCFVGKMDESIKQLDRMVSIGLRPDSWTYNSLLNGYFKNGRVEDALALYIEMFRKDVKFCAITSNIMLHGLFQAGRIVAARELYMKMVDRGIQLRIDTYNTVLGGLCENSCVDEALRMFEDLRSKEFELDVRTFNIVINALLKVGRIDEAKSLFSAMVLRGPVPDVITYSLMIKSHIEEGLLEESDDLFLSMEKNGCAAHSGMLNVIVRRLLEKGDVRRAGTYLTKIHEKNFSVEASTAALLIRIISEKKYQKEVKFLPEKYHSFMEPRDD

SEQ ID NO: 7803 - protein, 374 aa, Zea mays
  Clone ID: ZEAMA-23APR03-C27125_1.p
MAALINPIYRRLAAFACRRISAPAVEKPVLPLVYHRNLQQRHNSSLVDASGGFSEMLASTRRCYVFGGKGGVGKTSMAASLAVKFANHGEPTAIVSTEPSPSLGDLFEQDMGVGGKTVRITGFDSLFAVEAGQFKIKGEPEDLGSFINNLLGKMGLGTHSDIMSMIREMLDGMPPGLEEALVLSKVIKSIDVQEADILRRLVLDAPSTGHTLKLLSASDWIEMFLTLSIKGIKVASSMPSFNMYLEDVQFISARLEELRQQVRRVREILFDPQSTEFIVVTIPTMMAVTESSRFHESLKKDGAHTRRLVINQVLPPSASDCRFCAAKRREEARAFRAILEDRELGGLKLIQAPLLDMEVKGVPALRFLSDSVWK

SEQ ID NO: 7804 - protein, 163 aa, Zea mays
  unsure (1)..(163): unsure at all Xaa locations
  Clone ID: ZEAMA-23APR03-C27125_2.p
MMYIGQFHHILAPPSSDPGGNWSRCKSDPGGCSATQIATLQGLRSGMLTSLRQSESKPKAGVFINSCFAHCXSELQDTWFAPNSPSIYNKKIAEVVGDWYFERGADVEIDCAYPCDSQSCRNLIPIDKADHPRLNFKDRYPEPYRDSHPTAPVAVHGCQVSLL

SEQ ID NO: 7805 - protein, 580 aa, Zea mays
  unsure (1)..(580): unsure at all Xaa locations
  Clone ID: ZEAMA-23APR03-C2728_4.p
MITALDLYHVLTAVVPLYVAMTLAYGSVRWWRIFTPDQCSGINRFVALFAVPLLSFHFISTNDPFAMNLRFLAADTLQKVAVLALLALASRGLSSPRALGLDWSITLFSLSTLPNTLVMGIPLLRGMYGXSSAGTLMVQVVVLQCIIWYTLMLFLFEYRAARALVLDQFPDGAAASIVSFRVDSDVVSLARGDVELEAEPDGVAGAGAVSSRGGDAGRVRVTVRKSTSSRSEAACSHSHSQTMQPRVSNLSGVEIYSLQSSRNPTPRGSSFNHADFFNIVGAAAKGGGGAAGDEEKGACGGGGGGHSPQPQAVAVPAKRKDLHMLVWSSSASPVSERAAVHVFGAGGADHADVLAKGAQAYDEYGRDDYSSRTKNGSGGADKGGPTLSKLGSNSTAQLYPKDDGKGRAAAVAMPPASVMTRLILIMVWRKLIRNPNTYSSLIGVVWSLVSYRWGIEMPAIIARSISILSDAGLGMAMFSLGLFMALQPRIIACGNKLAAIAMGVRFVAGPAVMAAASIAVGLRGVLLHIAIVQAALPQGIVPFVFAKEYGVHPDILSTAVIFGMLIALPITLVYYILLGL

SEQ ID NO: 7806 - protein, 386 aa, Zea mays
  Clone ID: ZEAMA-23APR03-C272_1.p
MDATRVRVPLPPSLPAWLAVLLLLVQVTPGVGAAAAAGVGCDCGGGEAAAIKEEDARGALRLKLVAVASILASGAAGVLVPLLGRSASALRPDGDVFFAVKAFAAGVILATGMVHILPAAFDALAPPCGGGARAGGFPYAGLVAMCSAMATMMVDSAAAGYYQRAHIRKARPVDDDAVDGGQGRAAPADEEGAAAEPAGHVHAHTHAHGGHGHAGASPQDASAVAVSIRHRVISQVLELGILVHSVIIGVSLGASLRPSTIRPLVGALSFHQFFEGIGLGGCIVQAEFKARAAVVMAAFFSLTAPAGIALGIAIASGYSRHGATALVVEGVFNAAAAGILVYMSLVDLLAADFSNPRLQTNAKLQLAAYVALFLGAGLMSLLAKWA

SEQ ID NO: 7807 - protein, 326 aa, Zea mays
  Clone ID: ZEAMA-23APR03-C2735_1.p
MPRSSAGASCTAVDHSEQSRKDDEYERLVTRAQHATSDVGTTILSEQPKSRSFIWWMKVLLGCFLLILVGYVFVKWGVPFVFEKVLLPIMQWEASAFGRPVLAIVLVASLALFPVILVPSGPSMWLAGMIFGYGWGFLIIMAGSTIGMVVPYWIGSLFRERLHVWLTKWPQQIALIKLAGEGNWFQQFRVVALFRISPFPYTIFNYAVTVTEIKFNPYLCGSVAGMVPEAFIYIYSGRLIRTLADMKYGNYKMTPVEIAYNAISFVIAIALTVAFTVYAKRALGDIKSPDDGIGKDEEDHGPNGSGVRMNRRQERADARYIELDDM

SEQ ID NO: 7808 - protein, 918 aa, Zea mays
  Clone ID: ZEAMA-23APR03-C273_31.p
MQGLAVSCQLPPAAAAARWRPRASSSNREAVLQCWKYELSQDHYLGGPLRIGQSQGSLHRHRSTNFLRPAAAAISVEQDEVNTYLPKGDMWSVHKFGGTCMGTPKRIQCVANIVLGDSSERKLIIVSAMSKVTDMMYNLVQKAQSRDDSYAIALAEVFEKHMTAAKDLLDGEDLARFLSQLHSDVSNLRAMLRAIYIAGHATESFSDFVVGHGELWSAQMLSYAIKKSGAPCSWMDTREVLVVTPSGCNQVDPDYLECEKRLQKWFSRQPAEIIVATGFIASTAGNIPTTLKRDGSDFSAAIVGSLVRARQVTIWTDVDGVFSADPRKVSEAVILSTLSYQEAWEMSYFGANVLHPRTIIPVMKDNIPIVIRNMFNLSAPGTMICKQPANENGDLDACVKSFATVDNLALVNVEGTGMAGVPGTASAIFSAVKDVGANVIMISQASSEHSVCFAVPEKEVAVVSAELHDRFREALAAGRLSKVEVINGCSILAAVGLRMASTPGVSAILFDALAKANINVRAIAQGCSEYNITVVLKQQDCVRALRAAHSRFFLSKTTLAVGIIGPGLIGGALLNQLKNQTAVLKENMNIDLRVIGITGSSTMLLSDTGIDLTQWKQLLQKEAEPADIGSFVHHLSDNHVFPNKVLVDCTADTSVASHYYDWLKKGIHVITPNKKANSGPLDQYLKLRTMQRASYTHYFYEATVGAGLPIISTLRGLLETGDKILRIEGIFSGTLSYIFNNFEGTRAFSDVVAEAREAGYTEPDPRDDLSGTDVARKVVVLARESGLRLELSDIPVKSLVPETLAESCSSADEFMQKLPSFDEDWARQRSDAEAAGEVLRYVGALDAVNRSGQVELRRYRRDHPFAQLSGSDNIIAFTTSRYKEQPLIVRGPGAGAEVTAGGVFCDILRLASYLGAPS

SEQ ID NO: 7809 - protein, 428 aa, Zea mays
  Clone ID: ZEAMA-23APR03-C27499_1.p
MDARFVCAADSELQLARARCVALQDHLAASPDLPRHPALRSLLRLVNAELRFLSSLRLAPATPLSSNLPHLVALHLVLTHPAIRSPSRLSPLPGVDFSCAFRGRPAWVLVSASNPARLAWAPPGGLRARFAAALEAARGAPPATRPEKLLVVFSRGVGVDIARGLTEGFEAVEADLLEEFIGDSEEENEHGWVVISLDSSEELRNFRAFEIDVVEGASEVLLPSDVAVDEVSADEEELLGFWGSFAAFMEKMWKVSRELVNLDTTALVAIVSGISNGGVGKLMAAPEAETRARFKCNYKFVMDQAQYELQFPILIELRKAVEGKQCIICETVNLEFKEIVSMCGGPEENTRARHLLKQLTIVPDNPSARMMDLPTTRKLAMKNKIVFGTGDHWRAPTLTANMGFVRAVSQSGMSLLTIEHRPRALIGL

SEQ ID NO: 7810 - protein, 457 aa, Zea mays
  unsure (1)..(457): unsure at all Xaa locations
  Clone ID: ZEAMA-23APR03-C27512_1.p
MQKQTGKSGGTGGGTPAMQKHPFGSTTGGGAAAAAAAAAVVDPGAPAALXVGPSLQVLSALSDQNNKRIVLALQSGLKSEILWALNALTVLSFKEKDDLRRDATPLAKVPGLLDALLQVIDEWSDISMPKDHTKPPRLRTLGANTTLSGFGQENMEKVYSDTATTSNDQSKAEDSSVTKKRAASFWFDEDGLFNNDDEGRAERQQCAIAASNIIRNFSFMPENEIIMVQHRHCLETIFHCLENQNREDDELITNMLETLVNLAPVLDLRIFSSSKPSFIKMTEKGAIHAIMGMLSSSVKPWHCAAAELIGRLIINPDNEPFLLPIIPQIYKRLVDLLSVPAYDAQAAAVSALYNVAEVNMDCRLKLASERWAVDRLLKIVKTPHPVPEVCRKTSMILESLVSEPQNRMHLLVHENTFAEILTSEGKYSDTFARIVYELTARPSNKVTSGHAIWGNIN

SEQ ID NO: 7811 - protein, 357 aa, Zea mays
  Clone ID: ZEAMA-23APR03-C2757_1.p
MSAMAAAGEAEYGECVQKGSLQQHQAPQPSPGALFYTHDGVAVYRNPVMPAFYQQPAGSNVVVPAAPGPAHSPASSEPFKRKRGRPRKYAPADGAVPLAIVPPSQPPTARAPATSEASPTVPPGFSPSPQSGGVVSRQASPAPAPASGAPDVKKRGRPSGPSSKKQQPQAAAPGPGWTGLKPHIFTVQAGEDVASRAMSFSGNGWAVCILTANGTVSNVTLRQGESSGGTVTYEGRFEILSLAGSYLLSESTGMSSRTGGLSVSLASPDGHVLGGAVAGPLTAASPVQVVIGSFLADTKMELDPGSAPEKHVFSRFQTTSSPSRGTESSGGHASPPNTTGSFSTSTQPGFPSFPTWK

SEQ ID NO: 7812 - protein, 506 aa, Zea mays
  Clone ID: ZEAMA-23APR03-C27588_1.p
MDDDRDHDQDPDASSPAAPWRRSVKRKLGAEAGDEAGPAARVEAEDERAALREAAAAAQSTASALRVEVEEERLAAASAASEAMAMMLRLQRDKAEVQMELRQFRRFADEKMALDASEIDQLRALLAQRARRLLRLRSRLREYRLQCLHLGIPLPEGEDLVAQNAAEEEEEEDLLLLEGEEGYVVGDGGYYYPELRCNDGEYYYEDGREEEDAVALDLERRICLLEHDQEPRLLEPPHEKEEGTHLYTDEVLPDMSEHELGGLYADEMLSKEDVEARNNLHNDDEELPESPTAGHDDGEEASNADGADSVSGSGSGSDRVYTIDKVHQGAAMPIARVVDKYQGEAVEPDIKKLYMRLEALEADRESMRQALVAMRTEKAQLVLLREIAQQLAKDGVPVGPGAGAGPGVHHLPRKHTVGIVERRFTEDKKAILVKTFSMAALFKWILALLGKKKKLSQSRYTFGLTNNNVGLLILLDKCPRIQKTLTRTKLNLAERSSSSSSSSCTM

SEQ ID NO: 7813 - protein, 130 aa, Zea mays
  unsure (1)..(130): unsure at all Xaa locations
  Clone ID: ZEAMA-23APR03-C27602_2.p
GDGGVVHGVVEGLRLRHPRPQLAGLLLRQSPHELPARRGRVVVLRHHRGRGRGLKVVGLPRPPQXGAHHLPPSAAAAAARITAARGRTAEGARTGRAGKEETEAGAHGAIAIPVGLGRFGGVALGRWVLR

SEQ ID NO: 7814 - protein, 497 aa, Zea mays
  unsure (1)..(497): unsure at all Xaa locations
  Clone ID: ZEAMA-23APR03-C27647_2.p
MTGAAAVDPPVPRPRRLTVLPLIALIFYDVSGGPFGIEDSVRTGGGALLPILGFIVLPVLWSLPEALVTAELASAFPTNAGYVAWVSAAFGPAVAFLVGFSKWASGTLDNALYPVLFLDYLRSGGGLALPPPARSLAVLALTAALTYLNYRGLHIVGLSALALTAFSLSPFLALTVLAAPKIRPSRWLAIDARAVDLRGYFNSMFWNLNFWDKASTLAGEVEDPRKTFPKAVFGAVGLVVGAYLIPLLAGTGALXSETAAEWTDGFFSEVGQRIGGPWLRVWIQAAAAMSNMGLFEAEMSSDSFQLLGMAEMGMIPAIFARRSKYGTPTFSILCSATGVVILSFMSFQEIIEFLNFLYGLGMLAVFAAFVKLRVKNPDLARPYRVPVGTAGAAAMCAPPAVLIATVMCLASARTVLINAAVVVAGVALYYVVEQAKRRPWAEFLAPVPPADSSHGPATAPDDADAADLEDVRAGLLAGEPADEEGSKVEYSRLEIRA

SEQ ID NO: 7815 - protein, 440 aa, Zea mays
  Clone ID: ZEAMA-23APR03-C2766_1.p
MEPMTAAARAAHHEPRAAADRARALPCAAPRRAPEHGPELGPLVQRHDLVGAAEVPAVHEQPRRHGERAAAVLPPLAEKQRPELLPVGRELLKALSKDAEAVRARLRRRARASRQSAHNVLALAAALEIVAVGYAIMTTRSPDISWQMRAVRVLPMFLVPALAALIYSTITNLTKMLDNRDQQTLEKLRTERQAKIDELKERTNYYTTQQLIQRYDLDPAAKAAAATVLASKLGADSGLRVFLGDETSRDAAIGRSNDNNLGPTTGLRQRKGHVTNGAGRAQSLEPFDGSNVYDGSDEGPSPPNQTVEHFRGPSGNDGGWLARVAALLVGEDPTQCYALICGNCHMHNGLARKEDFAFVTYYCPHCNALNGSRQHDDHELVPDSGKESPDSQSGGIIGQAGASLATSGAASPVASSLPTLEELSAEEDSGEKASSDQPAN

SEQ ID NO: 7816 - protein, 160 aa, Zea mays
  Clone ID: ZEAMA-23APR03-C2771_2.p
MTTRFKKNRKKRGHVSAGHGRIGKHRKHPGARGKAGGGGSGGGGSGGGGSSGGGGGSGGGGSGGGGGSGGGPTSGRCPVDALKLGVCANLLNGLINATLGTPPRTPCCTLIQGLADLEAAVCLCTVLRANVLGINLNLPINLSLLVNYCGRRVPSGFQCF

SEQ ID NO: 7817 - protein, 96 aa, Zea mays
  Clone ID: ZEAMA-23APR03-C2774_8.p
MAYLSRTAAAVAVAVRSAVRSAPLTGRVLGAPLPSLASPSAARSARILRRTAAAASAGLETLMPLHSAVAAARLRSCIAVDSSCWSSLSQGLNKRI

SEQ ID NO: 7818 - protein, 355 aa, Zea mays
  unsure (1)..(355): unsure at all Xaa locations
  Clone ID: ZEAMA-23APR03-C27761_1.p
EREPPLNITDTTKARDSRGSGAELCGSVNGRNLSLTPPKHGKAEEAEQSFVGASMAGTWVKMEQKGAGPGARSSHAITLLGGTAYSFGGELTPRVPVDSTMYAFDLNTQTWSALDATGDVPPPRVGVTMAAAGGTVFTFGGRDLEHKELNELYAFDAATRAWTLLSXGCGDAGRLNDLWAYDVAAGQWEQLPPPGEACQPRGGPGLVVAGGKVWVVYGFSGDELDDVHCYDPATREWAAVQTTGDRPSPRSVFCAAGFGRHVVMFGGEVDPSDLGHLGAGKFSAEAFALDTETGAWTRLDDRAEAEHHPGPRGWCAFTAGEKDGQRGLLVYGGNSPTNDRLGDIYFFTPVLEATS

SEQ ID NO: 7819 - protein, 360 aa, Zea mays
  Clone ID: ZEAMA-23APR03-C2780_1.p
MEDLSDLGGHGHPGAAAWRPAAPSLASSSKVSVQVYTVPSSAATGREARGQGVAPMMHASSVAGHGGRAADLDPVKAKIVSHPSYHRLLAAFLDCHKVGCPPEAAEEIAAVAREREAWQRAAAGDVAHTRPDPELDQFMESYCELLVTWKEELTRPLREAEEFLTTVEAQLNSITNTGPTMGAFISSAAAADKTGVVDMSDDEQEEGSGMEAEVALGIDPCSDDKELKKQLLRKYSGCLGNLRKELCKKRKKDKLPKEARQKLLSWWELHYRWPYPSEMEKIALAESTGLEQKQINNWFINQRKRHWKPSEEMQFAVMDGFHPAPPNAAAFYVDARLVGATPAMFYARPDHGAHHGLWHN

SEQ ID NO: 7820 - protein, 314 aa, Zea mays
  Clone ID: ZEAMA-23APR03-C2783_2.p
MATLTVPSSVPAVAEDCEQLHKAFEGWGTNEKLIISILAHRNAAQARAIRRGYAEAYGKELLRALGDEIHGKFERAVILWTLDPAERDAVLANEEAKKSHPGGRALVEIACARTPAQLFAVKQAYHDRFKRSLEEDVAAHVTGDFRKLLVPLVSAYRYDGPEVNTSLAHSEAKILHEKIHKKAYSDEEIIRILTTRSKAQLLATFNSYKDQFTHAINKDLKADPKDEFLSTLRAIIRCFTCPDRYFEKVIRLALGGMGTDEDDLTRVVTTRAEVDLKLIKEAYQKRNSVPLERAVAKDTTRDYEDIMLALLGAE

SEQ ID NO: 7821 - protein, 329 aa, Zea mays
  Clone ID: ZEAMA-23APR03-C27949_2.p
MVPGIATKTAARPVAWAPQPRNMFVFGAGFVGRYVSERLLAQGWQVSGTCTTVTTKRELEMLGMNASVFDGTEDSLENIHSLRQATHLLISIPPIPGVGDPLLINLDEDLRRILGHGNLEWLCYLSSTSVYGDCGGVLVDEDHTVNPKSESAKLRYNAEKGWLNLIDDPKLSAFVFRLGGIYGPGRSALDTLAKSKSLSRKQKLRESKQYTARIHVADIYQAVLASMSIRCARKIFNVVDDDPAPRAEVFAFATSLIQRRYPDMITETIDAKPAGLDYQEMIVPAEKRVSNARMKQELGVNLLHPTYRSGLQSILDAWQIQPPLPNTSQ

SEQ ID NO: 7822 - protein, 466 aa, Zea mays
  unsure (1)..(466): unsure at all Xaa locations
  Clone ID: ZEAMA-23APR03-C27960_2.p
MAPPPPEDLQCAVNVKCAAPPALAAGDGELRWLRRCVEAAAKGFAIGAGLKGGLALFSVLVRIRSRRSPRSRKAGAMTNEEAVVLAVKETVRYGLFLGTFAGSYVSVDEYIAAVWGRKRTARWTSFLAGLIAGPSMLLTGPGTQHTSLAIYILMRAAVLASRCGIKSKRFGKICKPLTWSHGDVFLMCLSSAQILSAYILKQDSLPSSYKSFLNKHGGKDLTILQGVKDVVNHTAFSNLXGFEKYYKSVGVDIKLDPNMKVPCSIVHGNQSCTGHVFSFLLQAYGRAVPVYVPVYLVPALVVHRQHLMKRPYSIIGKSFLGVARSSLFLSVYCASAWAWTCLLFRIFRRANTPLVILGTFPTGLALLVEKKSRRIEISLYCLARAIESFFTWMTDAGLCPPILQIKRADVVVFSIATSIIMHCYAQEREVFRSKYLNVLDWVFGVPPPPDSEDKNCYLPDEAKKCQ

SEQ ID NO: 7823 - protein, 406 aa, Zea mays
  unsure (1)..(406): unsure at all Xaa locations
  Clone ID: ZEAMA-23APR03-C27999_1.p
NTNGVLAFHRTMARCLWVGKNAAASGAGAAIPKPPAPHPPAPRSLPAVDDCPTLAFLRPKPTAVGYATATVPLPAHCFPALPVGDHLFHRLQLDGLIPPVSTATRPPEHAGVTVEQARKVARAAEMEVARARLRSNAQSVVSGSEFAALCVDIAGGVEGGXRLVRALDESGVVIVLGDAVFLRPDMKSGSCDDKSERTAILEQTERERAKERKKETAAAARAMEAEKAEIDPAAAARVRRELWCGLTYLVIQTAGFMRLTFWELSWDVMEPICFYVTSMYFMAGYAFFLRTKKEPSFEGFFESRFAAKQKRVMRARGFDLRRYEELRRACGVAAAAAPGPDPLRERGRGAGERPLPLLLPLPLILASLGSFLSFFFLCCSCPFGGDDDSCIHLMRARMQKKKSILN

SEQ ID NO: 7824 - protein, 489 aa, Zea mays
  Clone ID: ZEAMA-23APR03-C27_8.p
MATQAAFLAGFSQLAAQPGRDRAVAVAVAPAPGPARVAVAAVGSAKLGVKAGTSRTAAVARLGVRCRASLIEPDGGRLVDLVAPEEGGRRAALRREAAELPHRLRLGRVDKEWVHVLSEGWASPLQGFMRDDEFLQTLHFNAIRGQDGRMVNMSVPIVLSVGDAQRRAIQADGATRVAVVDERDRPIAVLSDIEIYKHNKEERIARTWGTTAPGLPYVEEAITNAGDWLIGGDLEVIEPIKYNDGLDQYRLSPAQLREEFARRNADAVFAFQLRNPVHNGHALLMTDTRKRLLEMGYKNPVLLPHPLGGFTKADDVPLSWRMKQHEKVLEEGVLNPESTVVAIFPSPMHYAGPTEVQWHAKARINAGANFYIVGRDPAGMSHPTEKRDLYDADHGKKVLSMAPGLERLNILPFKVAAYDTKQKKMDFFDPSRKDDFLFISGTKMRTLAKNRESPPDGFMCPGGWKVLVEYYDSLVPSEGSSKLREPIAA

SEQ ID NO: 7825 - protein, 179 aa, Zea mays
  unsure (1)..(179): unsure at all Xaa locations
  Clone ID: ZEAMA-23APR03-C28056_2.p
HHTATAAPSSAPSKGKSSAPNPSGNHAATPAPSGTPSKGKSAAAQAAALGHGSSSHHHSAGGGGDXTNASATTLKRKRGVFQKDLQHMMYGFGDDPNPLPETVALVEDIVVEYVTDLVHKAQNVASKRGKLLTEDFLYLIRKDLRKLHRATELLSMNEELKQARKAFDVDEETLATTNI

SEQ ID NO: 7826 - protein, 289 aa, Zea mays
  Clone ID: ZEAMA-23APR03-C28070_1.p
DSSPSLLARLRFRTPAIADMGAPSSSQLAEVEGPSSSVHMVPPLGSTSLSGEHKDLAPENVGASVYGVQITEVPGSSSKQNKTHHTSTVGHSVEAQVELHVAVQACQPSNEMKDGGEAPPNATGPSNAQLVEARMGVNGNNNGSKRKPTGAGRGGKKLRVSEAPRQRPERVREQPLVCTICNAICDTRAVFDIHLVGKKHQSRLKRSQGPDVLFGPLVGHIPPNQSAAHMTGAPEPLYFGFKSMGASLVEQEAYLAGAMQHVLPVLPQAGPTIMAADYPAQPVASNRCC

SEQ ID NO: 7827 - protein, 466 aa, Zea mays
  unsure (1)..(466): unsure at all Xaa locations
  Clone ID: ZEAMA-23APR03-C28100_1.p
MVSLAGSQIPSPSPGQSXPCAAARPQRRQGHSMRTIRSALLQPDSSPGSPSPRDGGADAGDSDIENLTDSVIDFHLRELAATAGPAHPAAVAKSSSAINAAATELLDLSRDFSDYSSFNSDISGELERLAAAAGAAPRSDAPDAAAVDLNDLESMDLSADAAPLERVEPFVLACVRALGPDAGPDARRAAAARIRLLAKHRSDIRELIGVSGAIPALVPLLRSTDPVAQESAVTALLNLSLEERNRSAITAAGAIKPLVYALRTGTAPAKQNAACALLSLSGIEENRATIGACGAIAPLVALLSAGSTRGKKDALTTLYRLCSARRNKERAVSAGAIVPLVHLIGERGSGTCEKAMVVLGSLAGIAEGREAVVEAGGIPALVEAIEDGPAKEKEFAVVALLQMCSDSPHNRALLVREGAIPPLVALSQSGSARAKHKAETLLGYLREQRQGVACRAGAVAATSLAR

SEQ ID NO: 7828 - protein, 335 aa, Zea mays
  Clone ID: ZEAMA-23APR03-C281122_1.p
MAAAPSHPFVYIDAAALHSLLPFASLIPHLRAGLAHPELSAGIQCPQRVSIPLPTAPSAALLLMPSWCAHPSLPYLALKAVTSFPSNSPRLPSVHAAVSLFSAATGAPLASIDGSALTLLRTAAVSALAASLLASPSRPPSVLALAGAGALAPYLAEAHLAALPSVSRVLVWNRTRAKSAALVAKLRESHPGLTVEEVGSMDEAVAAADVVSCATGSREPIVRGELLRPGAHLDLVGSFTPAMRECDDDALRRGRVFIDFEAAMEEAGELVGAVQRGVLRREDVAGTLSELAAGTVVGPRRDDEITVFKSVGTAVVDLLAAQLAYETHLAATKDA

SEQ ID NO: 7829 - protein, 175 aa, Zea mays
  Clone ID: ZEAMA-23APR03-C281285_1.p
MSSMVSRAAAAAALRCHVRRPGPTFSRPASTSAATAEHHAGHSRAGGRLPRGDYVPVYVALGLIALSVTLGLHTARQQLAYAPNVWVDKKKRETVPEVAAPELALDEAEQFVDRSLFRKVANVQDDRSLAAGVADPVAEYPTKKAVTLKDVGVETPGIEQGREGLLHKIFKKNHA

SEQ ID NO: 7830 - protein, 370 aa, Zea mays
  Clone ID: ZEAMA-23APR03-C28163_1.p
MEMFFGSFLSESVSPQNLFGHPDVERCPFLRNINGATTFSLASALPVATQGGKGPIFEEGSGFESAFKLFHGRDGIVPLSERSYVSDENHNESIDVRTEPALPFNPLAARAATISLSAFGPFGFGFFNGKGKRQNKKPNNLDQSHQKPKTPDQSSMKQKGVNPPSHEAFSDEWLENGQCPLARSYRAMSGVLPLVAKALQPPAGMKLKCPPAVVAVRAALARTALVKSLRPQPLPSKMVAIALLGMAANIPLGVWREHTKKFSPQWFAAVHAAVPFIAMLRKSVVMPRTAMAFTIAASIVGQTIGSRAERIRLRNQAANGTGDSSTHTAMYPNKNGHCSDTEGKAWDPLATKITGSTARGSPAPTPTVCF

SEQ ID NO: 7831 - protein, 258 aa, Zea mays
  Clone ID: ZEAMA-23APR03-C281697_1.p
TQPPTRGQQEAKTPADLIRRPSGGGEEPPPKALDFSALSVFLCRTSAIVLLPPARRRYPLRRFGLQKSWLAVFISSRRRPGTLQIPCRALSLQCSSRSLTSCHGVHVCRGILAPRPGRHSALPLPQLPARHGDFFKLAPTPLLFPNRARRSVSLCARFSSVSSLDARSAACRSTLRRARVLCFLLAEPSPASWEPAETSLAVSLAPVRIYMSRPATCCRFGFSPVRAQLQLGVLCSCWLLRPLGSLSFNSQSRRRFRG

SEQ ID NO: 7832 - protein, 121 aa, Zea mays
  unsure (1)..(121): unsure at all Xaa locations
  Clone ID: ZEAMA-23APR03-C28176_3.p
MLDQEACEVQSPPSVTSVYRRGKKQKKSQVASVLDDYLEHKKKQTQKIVEVLLEKKSREEEYSIERCLDTVDAMEELTDEEKALAAEVFKNELNREMFVXKKNVNVRLIWLRRKISRIAST

SEQ ID NO: 7833 - protein, 84 aa, Zea mays
  Clone ID: ZEAMA-23APR03-C28193_7.p
MAAVARSFLRSSGSSSLRSAAARAASRAGPVPLPRRIPSSGPRVLLSVCLESLMPMHSATASALMTSLLAAPACKGLGWLSEDG

SEQ ID NO: 7834 - protein, 96 aa, Zea mays
  Clone ID: ZEAMA-23APR03-C28193_8.p
MAAAASAARSFLRSSGSSSLRSAVARAASRAGPGPAPLPRRMPTSAPRVLLRSPVEMSSVCLESLMPMHSATASALMTSLLAAPACKGFGWLSEDG

SEQ ID NO: 7835 - protein, 318 aa, Zea mays
  Clone ID: ZEAMA-23APR03-C281_62.p
MKPPASSTATSYLLLAPLAILLLVFVLPSLRPWSRVGSDSDGLGILCARRTGGFVDVAADAPAPPPGQTTRAAEFSLLVGVLTVPGRRERRDIVRTAYALQPAAEGARVDVRFVFCRVTDPVDAALLAVEARRHGDVLVLDGCAENMNDGKTYAYLSSVPRLFAAEPYDYVMKADDDTYLRVAALAGELRGKPRHDVYLGYGYAMGGQPMPFMHGMGYVVSWDVAAWVAGAREILERNDTLGPEDLMVGKWLNLAGRGRNRYDLKPRMYDLSWDMDNFRPDTVAVHTLKTNRRWAAAFRYFNVVTAGITPSSELYHLP

SEQ ID NO: 7836 - protein, 131 aa, Zea mays
  Clone ID: ZEAMA-23APR03-C2822_4.p
FAARQWWPSRFSPNKEARPLVSCRRRVQLRHRPAPPRRTRTTPPLAPRPAKPSAFPPPMYGGVTPGSLQPHECGGRCAGRCSATAYQKPCLFFCRKCCAACLCVPPGTYGNKNTCPCYNNWKTKRGGPKCP

SEQ ID NO: 7837 - protein, 425 aa, Zea mays
  unsure (1)..(425): unsure at all Xaa locations
  Clone ID: ZEAMA-23APR03-C2823_1.p
MGNSQASPASASSSRFVMASRAFXRQELDGLRELFASLAAQSRTGGRAISRPVFLEYYQVRGRLGDRLFQLVAKESGGSDGVTFEDLIISKATYGRGTRDEVDEFIYQLCDVTGDGALTRSDLESVLASVHETVFAIKKEVVEVSNNRPFEEFLNSAVFSKDVEGVSGKSMSLSDFRNWCTLLPSLRXFLGNLLMPPDSGRPGFEVPLLHHPENICTDTLLLNKEYAWHIGGGFSQHEVQEWKLLYHSSLHGQSFNTFLGKVTNGDAQTVLIVKDTEGSIYGGYASQPWERHSDFYGDMKTFLFKCYPQASIFRPTGANKNLQWCAVNFSSENIPNGIGFGGQPHHFGLFLSANFDQGHSFTCSTFTSPPLSKTNRFRPEVIECWGIQMRGAQDEKLELVKGTVLERFKEDRNMLKMVGLANASD

SEQ ID NO: 7838 - protein, 209 aa, Zea mays
  Clone ID: ZEAMA-23APR03-C2825_3.p
MAQPAFLSSLRSRLGSAPPPPPNHRLQPRRGYHVELGAREKALIRVRTGLEGRFQEPGLKGPLWEEVSARMAAAGYGRSAKRCKEKWENINKYFRKAKESGKKRPAHAKTCPYFDELDRLYSRLGQAKQASSELLDAVVKYPDVSYGPPGFGMDREQASGGGGNNNNTNNEGGQDGGAEDFDGEEDGIGKGRAGDGQDDEVESHGHEDE

SEQ ID NO: 7839 - protein, 188 aa, Zea mays
  Clone ID: ZEAMA-23APR03-C282_4.p
MAAASVSTPQGVAERRGIPAAAFVEDVEAYLRQVGLDVNSALAFLQERLQQYKIVEMKLLAQQRDLQAKIPDIEKCLDIVATLQAKKDLGEALIADFELSEGIYSRAKIEDTDSVCLWLGANVMLEYSCDEANALLKKNLENAKASLEVLVADLHFLRDQQTITQVTISRVFNWDVHHRRSKQAVKET

SEQ ID NO: 7840 - protein, 112 aa, Zea mays
  unsure (1)..(112): unsure at all Xaa locations
  Clone ID: ZEAMA-23APR03-C2830_23.p
MGRDELLRRSLVALAAAVALTGLATASLRKAAATYGFGILAIAGVLLPDWEFFDRDYSQWXTPMPASRRTAAAAAADREHDVWKFKPYPLRVAMLTTIYGFGLHKWWTYVSS

SEQ ID NO: 7841 - protein, 160 aa, Zea mays
  Clone ID: ZEAMA-23APR03-C28311_2.p
VVDCRICGDPNSVLRFAFIEFADDVAAQSALALGGTVLGFYPVKVLPSKTAILPVNPKFLPHTDDEKEMVSRTVYCTNIDKKIAEDEVKQFFEGTCGEVSRLRLLGDYVHSTCIAFVEFVQADSAILALNCSGIVLGTLPVRVSPSKTPVRSRSPRVTSY

SEQ ID NO: 7842 - protein, 254 aa, Zea mays
  Clone ID: ZEAMA-23APR03-C28320_1.p
MEQTRTGGAGEQPRGAPGEEAAKRIIVGGDAPASGTSGSGCFDCNICLECATEPVVTLCGHLYCWPCIYEWLRPDVAEAGARSSARRQCPVCKAAVSPDALVPLYGRGGSSSAKKPLASIPRPRRPALRQSTQDSGSGGHHHHHRHAETGTPARSLRHPAHAHAAQFDALLSAPFGDRGMLHSTSTTGGMLGGMAVAVLPLVLRGQARVPGMYYPSPYHLMSPRQRRWHVEVERSLHQIWFFLCVFVVLCLLLF

SEQ ID NO: 7843 - protein, 431 aa, Zea mays
  Clone ID: ZEAMA-23APR03-C28442_3.p
MAMALSPGTVPLGVLLRREVTKERMERPDVLCGEANLSRKGEDFTLLRADAGQRIPGDPSTSFSVFAIFDGHNGSGAAIYARENLLKNVLRAIPTCFCREEWLAVLPRALVAAFVKTDKDFQAVDETSGTTVTFVIIDEWVVTVASVGDSRCILESADGSIYFLSADHRFDSNPDEVKRVTACGSKVGKMDIVGGPEVGPLRCWPGGLCLSRSIGDLDVGECIIAVPHVKQVKLSNAGGRIIIASDGVWDDLTCEMALDCSRGFSSDVAANRIVNEATRPRGIRDDTTCIVIDILPPENIVPSPRKRPRRITFNNVFRKRHLDVPPETNRSEYAEPDVVEEIFEDGSPMLSKRLTTGYTLEKTFAPSSCAVCLVRLKSGQGISVHDNPLQYEKLQGWQGPFLCPSCHEKKEAMEGKRRPKGSSSNVFGHMC

SEQ ID NO: 7844 - protein, 120 aa, Zea mays
  unsure (1)..(120): unsure at all Xaa locations
  Clone ID: ZEAMA-23APR03-C2846_14.p
MRVLSVAVALVVVVAAACLAAPRGADGAGXECGATPPDTVALRLAPCASAAEDPGSAPSGSCCSAVHAIGKQSPRCLCAVMLSNTARSAGIKAEVAITIPKRCNLADRPVGYKCGDYTLP

SEQ ID NO: 7845 - protein, 426 aa, Zea mays
  Clone ID: ZEAMA-23APR03-C285800_1.p
MPVPHLLSPLPLPSPPPPLHRNGAPWRRPTQLRAALRVPPPLHLGLAAARGDGVRRFVGTLGSKRARAVGAIRVSAISGDGGGGAGGTGIAAAAAATVVFAVMNRVLYKLALVPMKNYPFFLAQFATFGYVLVYFSILFIRFRAGIVTREMLALPKPQFMLIGLLEALGAASGMAAAAMLPGPSIPVLSQSFLVWQLILSALILGRKYRANQILGCLLVTAGVILAVAGGASNGPILFEVKFFWPAVMMISAAFQAAASIIKEFVFIDGAKRLEGKKPDIFVVNSFGSGFQALFIFLLLPFLSNLKGIPFAELPAYLTRGAACFLNVGGNLKDCHGAPLLPLLYITLNMAFNISVLNLVKMSTAVVASLTSTLAVPLSIYILSLPLPYLPEGTNLSASFLIGVATLVLGLLLYNLPQESTNQVKED

SEQ ID NO: 7846 - protein, 330 aa, Zea mays
  Clone ID: ZEAMA-23APR03-C28599_1.p
MAFLKTLNPLIRRQATPIAIPRLLLSLHTVLDSSSPTTTAAATPFANAVHTHVPIRSGGPLFLSSAPWMLSQSATPLTAAAAALGAKLHRAQALPGGRALAVAAAVGWEHMRISRGEAEVATSSGIVGYGGERFLNAPNLVSIGRMVSGPVIGWMIVNEWYLPAFATLAISGASDWLDGFLARKMGINSVFGSYLDPLADKVLIGCVAVAMVEKDLLHPGLVGLVVVRDLLLVGGAFYKRASSLGWKWNSWSEFVNLDVIHREKVEPLFISKVNTVFQLMLVAAALLQPEFGTEETQNYIALLSWLVATTTITSTIGYGVKHYRIKPRSR

SEQ ID NO: 7847 - protein, 410 aa, Zea mays
  Clone ID: ZEAMA-23APR03-C285_30.p
KNLIFSPFARNAHTARSPISDPRSPRRSKMQIFVKTLTGKTITLEVESSDTIDNVKAKIQDKEGIPPDQQRLIFAGKQLEDGRTLADYNIQKESTLHLVLRLRGGMQIFVKTLTGKTITLEVESSDTIDNVKAKIQDKEGIPPDQQRLIFAGKQLEDGRTLADYNIQKESTLHLVLRLRGGMQIFVKTLTGKTITLEVESSDTIDNVKAKIQDKEGIPPDQQRLIFAGKQLEDGRTLADYNIQKESTLHLVLRLRGGMQIFVKTLTGKTITLEVESSDTIDNVKAKIQDKEGIPPDQQRLIFAGKQLEDGRTLADYNIQKESTLHLVVRLRGGMQIFVKTLTGKTITLEVESSDTIDNVKAKIQDKEGIPPDQQRLIFAGKQLEDGRTLADYNIQKESTLHLVLRLRGGQ

SEQ ID NO: 7848 - protein, 156 aa, Zea mays [sequence omitted]

SEQ ID NO: 7849 - protein, 106 aa, Zea mays
  Clone ID: ZEAMA-23APR03-C286_2.p
MATFELYRRSTIGMCLTETLDEMVSNGTLSPELAIQVLVQFDKSMTDALENQVKSKVTVKGHLHTYRFCDNVWTFILTDASFKNEEATEQVGKVKIVACDSKLLGQ

SEQ ID NO: 7850 - protein, 326 aa, Zea mays
  unsure (1)..(326): unsure at all Xaa locations
  Clone ID: ZEAMA-23APR03-C28720_1.p
MDAPEARSSASSSPEFEFWPLYPNPAASPSCADELFAGGVLLPLPILPPKPESRNKGSGISQCVPVAEPEPESQLGEASLLATAAAPTASMTSQAPSTGSGGGGSKRWTDIFSKKPAPGGEEKDREKDKEKRKDGACSRKNXGSGHTGGAGSELNINIWPFSRSRSAGGGSGSSKPRPPTRKVSSAPCSRSNSXAEAGAPPLRRWAASPGRSGGGVPVGRSSPVWQIRRPAGKPAPAPAPGPAPSASELFSDRRAPPRQHKDKPAGVANGRKPGLSGGVRGLNLSVNSCIGYRHQVSCRRVEVGAARGPGPGGLFGIKGLFSKKVH

SEQ ID NO: 7851 - protein, 460 aa, Zea mays
  unsure (1)..(460): unsure at all Xaa locations
  Clone ID: ZEAMA-23APR03-C28771_2.p
MPRTTVVESSGCPPLRALTTDILGLVKVVEAHARPAGAAKVVETWGAPDASRAIVAASLADRAADPVLAVARRNGVVELLNPLNGSALAAVKTXSAPNDSGAEGDPLAALHLFARQTSDSILGTFLACTEKGKASIRSITKENADSGSDVGPSATWDVCNGANVQFCSVDHGESYVIFGGKGIEVNLWDITSSSKTWSAKSPRANSLGIFTRPWFTAGTFLCKNDHRKIVACTNNHQVRLYDTALQRRPAVSVDFRESPIKAVAADPNGHDVYIGTGTGDLASFDMRTGKLLGCYIGKCSGSIRSIVRHPELPLIASCGLDSYLRIWDTNTRQLLSAVFLKQHLTTVVLDSHFSVEEPGEMKFKQLESLVEAEAEVRKEKKKKKSRPTEEDEEQVGVVDHSDNNGEMYARKEKKKKKKKKSRTIERDEEPDNDGEMCSPKRRKSVERSKCLKKSKKQQVA

SEQ ID NO: 7852 - protein, 497 aa, Zea mays
  unsure (1)..(497): unsure at all Xaa locations
  Clone ID: ZEAMA-23APR03-C2878_1.p
CAETWREAAAQLGWPCCCSCSRPSQCSSHPPWPTTCSPWTSTPRRARSWTASCAPPCRPPSGGRSRSPRASSASSSTTASRRAATRPCSSRATPRSRPWGPTPRCSRGRCSSSTTSAPRCTPPAGPPCPAPTSRRSPPAPPSSRRGDPPTPCPWASATASPRRPRTTSTRSRRPPPPASRSSWRRSGAGASATWPQPLVSRLATTEFIPLPPPSPPIGRTHRASSGADRVSSTAVKAYPTVNEDYLKAVDKAKRKLRGLIAEKNCAPXSWLRLAWHSAGTFDVATKTGGPFGXTMKNPAEQAHGANAGLQIAIRRPXKEQFPILSSAECXHLPGFAAVAATRWTGRSWPVEVTRRAPDVPFHPGQXRTKPEPPPEGRLPDATQGSDHLRQVFSTQMGLSDQDIVALSGGHTLGRCHKDRSGFEGAWTSNPLIFDNSYFKELLSGEKEGLLQLPSDKALLSDPSFRPLVDKYAADEDAFFADYAEAHLKLSELGFAEA

SEQ ID NO: 7853 - protein, 130 aa, Zea mays
  Clone ID: ZEAMA-23APR03-C2878_7.p
DKPEPPLEGRLPDATQGSDHLRQVFSTRMGLSDQDIVALSGGHTLGRCHKDRSRFEGAWTSNPLIFDNSYFKELLSGEKEGLLQLPSDKALLSDPSFRPLVDKYATDKDTFFADYAEAHLKLSELGFAEA

SEQ ID NO: 7854 - protein, 445 aa, Zea mays
  unsure (1)..(445): unsure at all Xaa locations
  Clone ID: ZEAMA-23APR03-C28850_1.p
EQPGPGNSSSSMDAPPPSQPDDAAPAPVLDLXSAPSPAPTSNPPTSAAAAAPAPDSAIANPNPNLGTVANPAQTLEAPGPSSAAARPPPPRMRTPYTHLAAPITMSSSSSAATAAASSASVPAASSSAPPIPRGGVVLGVPAPRSSQTPAGYTGFVPPPPLAHQFGSMHRGPDQPPPSSSQRPPSQSLMRPMTVSSPSLASQQTPQSSSSTFRPQQRPQVSQPRPQQSQLVTPPQQNTILTQQQQQQKQQQSASHQNQQIAAPKNQPQLSQHPTARTPISMTPKPDLPAIQNVAVLQSVDTAATDANASETGTRLLTKRSIHELVAQIDPNEKLDPEVEDVLIDIAEDFVESVTTFACSLAKHRKSSTLEAKDVLLHAERSWNITLPGFSGDEIKLYKKQHINDIHRERLALIKKSMATDTRNSAAQAAANQKNQTPKPPAPASP

SEQ ID NO: 7855 - protein, 326 aa, Zea mays
  Clone ID: ZEAMA-23APR03-C289709_1.p
MQAGMHHAPGQRASNYQQTHHTEARAHHGRAPAMSSSTPRERGGGRQFPVGRRRYAPVADAGCGGCRPTTSRLLRLPSFLKPCSQLLGGGGNSKAAATTTTRRRSGGGAAAVGEHYSCASTSTTASFSSYSSSSSAATRSTGGYAASSAAYSSSDCCYYYHCHPSRVVVYGAGPTAPMQQYQDPASSSLHKQQQQEQASPARAAPSAVGHNNKKKKMRRRAAEDGVGVGVAVEKESSDPRADFRDSMVQMVLETGLCDWDGLRGMLRRLLALNAPRHHAAILTAFAEVCAQLAAAPPPPAPSCQYRRCLMAHGSVHPPPYPARAVC

SEQ ID NO: 7856 - protein, 393 aa, Zea mays
  unsure (1)..(393): unsure at all Xaa locations
  Clone ID: ZEAMA-23APR03-C28_4.p
MALRLXDVAXCLXPPXXARRRRRSSGRFVAVASMTSAVSTKVENKKPFAPPREVHVQVTHSMPPHKIEIFKSLDDWARDNILTHLKPVEKCWQPQDFLPDPASEGFHDEVKELRERAKEIPDDYFVCLVGDMITEEALPTYQTMLNTLDGVRDETGASPTAWAVWTRAWTAEENRHGDLLNKYMYLTGRVDMRQIEKTIQYLIGSGMDPRTENNPYLGFIYTSFQERATFISHGNTARHAKDFGDLKLAQICGIIASDEKRHETAYTKIVEKLFEIDPDGTVVALADMMRKKISMPAHLMFDGQDDKLFEHFSMVAQRLGVYTARDYADILEFLVDRWKVASLTGLSGEGNKAQDYLCTLASRIRRLEERAQSRAKKAGTLPFSWVYGRDVQL

SEQ ID NO: 7857 - protein, 308 aa, Zea mays
  unsure (1)..(308): unsure at all Xaa locations
  Clone ID: ZEAMA-23APR03-C2910_2.p
MLLPHSSSASATATTRGLALAAAAAAPPRPTARPRRARLLPPRARAETHATGVGADRAAEALLQSGLRRESLPRHVAVVMDGNSRWARERGLTPADGHKAGGRNLERVVALSRAWGIRALTAFVCSRENLSRPKAXLDPCFSINSRTHRTTTLTRTGAQGIRLQVIGGRXKMPASLRSAAAQADEATRHNSQLHVMLAICYSGRWDMVQACRELAREAQANRLSPDDIDESVIAGKLATSAAGEFSCPDLVIRTSGEMRLSNFLLWQSAYSELFFTGKMWPDFGEAEYLEALRSFQGRDRRFGQSKLL

SEQ ID NO: 7858 - protein, 508 aa, Zea mays
  Clone ID: ZEAMA-23APR03-C2916_1.p
LASSAEQQDDHHQESAAARRRSPPASPHPELYEPASASLAQLWDPPPLPHLAFAPAADESSSSSSLRRRASAPLPRADEDFVVPSSAYSRPTVGVAHTHSVSAPPLRAIETRAVPSRLVTAGGKRPRLERKYSKIVDQYRSLDEVIEALAQAGLESSNLIIGIDFTKSNEWTGKNCFNGISLHNISDNPNPYEQAISIIGKTLSAFDEDNLIPCFGFGDASTHDQDVFAFYPDERPCNGFQEALARYREIVPHLRLSGPTSFAPIIDMATTIVEQSGGQYHVLVIIADGQVTRSVDTEFGQLSTQEQMTVDAIVQASQFPLSIILVGVGDGPWDMMKEFDDNIPARSFDNFQFVNFTAIMSKKISQSKKETEFALSALMEIPLQYKATLELGILGRRIGESPERIPLPPPFASYSTVSRAEPSRANSYRSVPSHPREEPAVNSTITASVTSPSAAESRVLEPQMCPVCLSKPRDMAFGCGHQTCSECGPQVTDCPICRRPIDTRVKLY

SEQ ID NO: 7859 - protein, 307 aa, Zea mays
  unsure (1)..(307): unsure at all Xaa locations
  Clone ID: ZEAMA-23APR03-C291_5.p
MSARDDPRKAPNVEDSYPERPGEPDCPYLLNNRCKFKSKCKFNHPKDMVNALGTGTNNESLIADSAVLPVRPSEPICVFYAKTGKCKFGAICKFNHPKDIKTSPLIAKETIYTATTDAADAPTEACNAKGLPIRQGEVDCSFYMKTXCKYGSICRFNHPDRPGPAADIAFMVPLVQATLPSSAPIVPAVVEPFSMIYPQRPGETVCDFYMKTGSCKYSQKCKFHHPISRFAPHSKENGDPQQPATLASLPRREDAEACAFYMRSGMCRFGAHCKFDHPPREEAISELQAAGKEGIEGPSLVQRDHDV

SEQ ID NO: 7860 - protein, 263 aa, Zea mays
  unsure (1)..(263): unsure at all Xaa locations
  Clone ID: ZEAMA-23APR03-C2920_29.p
RRQLEIQQASFGVRGTQRWPLPALSSSCSDSSRGRPLPAGWQSAHATFYGGGDASGTMGGACGYGNLYSTGYGTSTAALSTALFNDGAACGSCYELRCDNDGRWCLPGTSPSXATNFCPPNYGLPSDDGGWCNPPRPHFDMAQPAFLQIAQYRAGIVPVAYRRVPCVKKGGIRFTINGHSHFNLVLVTNVAGAGDVQSVSIKGSSTGWQPMSRNWGQNWQSNSLLDGQSLSFQVTASDGRTVTSNGVAPAGWQFGQTFEGAQF

SEQ ID NO: 7861 - protein, 276 aa, Zea mays
  unsure (1)..(276): unsure at all Xaa locations
  Clone ID: ZEAMA-23APR03-C2920_34.p
MAPRQAVLAVVVLAALLPFALSRGLRLGHHRAQPHPRPHGHAPLGGGAWSSAHATFYGGGDASGTMGGACGYGNLYSQGYGTNTAALSTALFNNGLSCGACFEVRCDAAGGGGRSCLPGSVVVTATNFCPPNNALXSDDGGWCNPPRAHFDMSQPVFQRIALYRAGIVPVSYRRVACNKKGGIRFTINGHSYFNLVLVTNVGGAGDVHAVAVKAERSPGWQALSRNWGQNWQSNTLLDGQALSFRVTTSDGRSVLSNNAAPRGWSFGQTFSGAQFN

SEQ ID NO: 7862 - protein, 276 aa, Zea mays
  unsure (1)..(276): unsure at all Xaa locations
  Clone ID: ZEAMA-23APR03-C2920_42.p
MAPRQAVLAVVVLXAALLPLALSRGLRLGHHRXPHPRPHGHAPLGGGAWSSAHATFYGGGDASGTMGGACGYGNLYSQGYGTNTAALSTALFNNGLSCGACFEVRCDAAGGGGRSCLPGSVVVTATNFCPPNNALPSDDGGWCNPPRAHFDMSQPVFQRIALYRAGIVPVSYRRVACNKKGGIRFTINGHSYFNLVLVTNVGGAGDVHAVAVKGDRSAGWQALSRNWGQNWQSNTLLDGQALSFRVTTSDGRSVVSSNAAPRGWGFGQTFSGAQFN

SEQ ID NO: 7863 - protein, 285 aa, Zea mays
  Clone ID: ZEAMA-23APR03-C29236_1.p
MPFRFQFPWLKNPTTNGGTSNIDTNPSPRFPNPFLPIQAHVTSFLSSFPRALPPPPPWARITSPASTSGALPTSEIEERLAGVPVYALANAAQEFVLVSSTRVGGQGGESVSPTQALGLLCFRKEDADALLEQMDGDMRAGSGVVPVALNKVIQMKSDGVAFRFLPDSSQVANAIKLMQDEGLYAGEGFPGVPVFQSRSLVLMSDNKRYRPVFFRKEDLDNSLHRTSRDQQKPNPAVRFGDTQVSSLEDIIKSMKDSSSSKWDDVVFIPPGFDLATGSTPSQLRK

SEQ ID NO: 7864 - protein, 263 aa, Zea mays
  Clone ID: ZEAMA-23APR03-C292717_1.p
MDEEGQRTPQPMVVARKRRQATPDHPPYCWMIGEATDALAEDGGSEEDSISAFIRARHPGVPPAHDRLLRHYLGKHVAEGFFVRTATGRFERSPQENADEEELPVEQADQAGSCKPASVGSSVVLVEAKPKRGRGRPRKDGSPSTLAVAAMSSVAVAGKDEIHAPSLKPKRRGRPRRQAGADHRDKEHEPPRELALVILGDSSAAPIMDKPCTTLVPPTTPPVDGGQPIDLALATTTEVPVPEPAATPAMDKDGADADASSIE

SEQ ID NO: 7865 - protein, 412 aa, Zea mays
  Clone ID: ZEAMA-23APR03-C2928_3.p
MNEASASAGVGTGSGGEVPLVYKAWKGNNVFLLKGRFIFGPDARSLFVTMFLIVAPVSIFCPLVAKELMDKFSYGLGLPVMIAAVLFTAYDLSLLLLTSGRDPGIIPRNAHPPEPEGFDDNAEVGANQTPPVRLPRVKDVVVNGITVKIKYCDTCMLYRPPRCSHCSICNNCVERFDHHCPWVGQCIGLRNYRFFYMFVFSTTLLCLYVFGFCWVFVVKIRNAEQITIWKAMTKTPASVALIIYTFIAVWFVGGLSVFHLYLMSTNQTTYENFRYRYDQRANPYNRGIMVNIKQILFTTIPPSKNNFCGRVQQEHGLRPRPTNGFMSPNMGRAVGDIEMGRKPVAWDEPRMAAEIGDLGAGLSNLLEDKDGRFRSASPDLSRDALAVGGGLEEEGSSAMNAGRSSWGVEAGR

SEQ ID NO: 7866 - protein, 284 aa, Zea mays
  unsure (1)..(284): unsure at all Xaa locations
  Clone ID: ZEAMA-23APR03-C2930_1.p
MASSRVIPSSSPSHTASDLARLRQAASRPGRRGAAGRVSMNVXEELLLRXIYSDMPTPGAARVGXGLPKPPPPASRDMPTPTAEEVWKEITGGGGSGEAVAPVAAQAVAPDGGAGTGGPEETVAPVAAQAAVPAGGAGGPEMTLEDFLAREEGAVKEDGVRVSGPSAPAMGFLGGAEGVGVPGGGGGRGRKRQLMDPVDRAAMQRQKRMIKNRESAARSRERKQAYIAELESLVTHLEEENAELLREQEERHQKRLKELLERVTPVILRKKPSGDLRRTNSMQW

SEQ ID NO: 7867 - protein, 295 aa, Zea mays
  Clone ID: ZEAMA-23APR03-C29408_1.p
MAKYYWGMLGAATTTTRAGTGSSLIRSTWPPPAAHGGGRSGEPSWEELAFAQDAAGQLGGCVWPPRSYTCTFCRREFRSAQALGGHMNVHRRDRARLRQCAPPDHDQEPIAAPLPAPELADHQQQLLQLHGSPMTKAAVLFSGRPAAACCTHQQTYCNNNREGEGEDSPARYISTTTTIIKESKSKVLISIPAATTAAGSKKAATTIAIIGEEEEEEEEEEEIMVTGRRTKRRRLVHQPFYDLRRLPPASSSPNKGGVEDDDAKVPKLSSPISLSHHLAGRQEEVDLELRLGTSC

SEQ ID NO: 7868 - protein, 552 aa, Zea mays
  Clone ID: ZEAMA-23APR03-C29442_2.p
MAAAGTQLGRLLGGLWFLAALLGRPGATAAAPAVAAVDGRRAVAATGEDFVCATLDWWPPDKCDYGTCAWGRAGLLNLDLSNKVLLNAVRAFSPPLLLRLGGSLQDKVVYGYGAGRPCAPFVRNASEMHGFSQGCLPLRRWDDLNAFFRRSGAKVVFGLNALNGRVPLPDGSMGGPWDYTNAASLIRYTANKGYRIHGWELGNELSGTGVGARVGADQYAADVIALKALVDDVYRSEPSKPLVLAPGGFFDQAWFTELVVKTGPDLLSVVTHHVYNLGPGRDTHLIDKILDPSTLDGMVSTFSDLQRLLKSTGTSAVAWVGEAGGAYNSGRHLVTDAFVFSFWFLDQLGMAARFDTKSYCRQSLVGGNYGLLNTTTFQPNPDYYSALLWHRLMGTEVLAVTFSGTNKIRAYAHCARDSPGITLLLINLSGNATARVSVTAQGAAAAHAHRHGARKHGGGRKFRHVHVPGFAGAGEAAAGAVRHEYHLTPKDGDLTSQVVMLNGRALATDAAGNIPALEAVEVDAARPIAVTPYSIVFARVPHFSAPACRVDR

SEQ ID NO: 7869 - protein, 216 aa, Zea mays
  Clone ID: ZEAMA-23APR03-C2957_3.p
MAASLLVLAVAFLVGAGHGGIDGGAAAHMEVEGSEVTYGSVIKLLHEKTKHRLHSHDVPYGSGSGQQSVTGFPEGDDSNSYWIIKPTPDSSSKQGDSIQTGGIIKLQHMKTRRWLHSHLHASPLSGNLEVSCFGGDELSDTGDYWRLEIEGSGKVWKRDQKVRLRHVDTGGYLHSHSKKYNRLGGGQQEVCGVREKRAENIWLAAEGVYLPVNGSK

SEQ ID NO: 7870 - protein, 349 aa, Zea mays
  unsure (1)..(349): unsure at all Xaa locations
  Clone ID: ZEAMA-23APR03-C295_28.p
MATATESGSAPPVDGEVRQRGRPRGSGRGRGRGRGRGRERSQSARRSKRPRKPRPWRSASPPALEPLVPLPPGTEVEVRIDDDGFHGTWFEATVLDFAPARGYRNPARYTVKYVHLLADDEGALSEPFAPSQIRPRPPPLSSPPRFQLHDIVEAFHNEGWWSGIVVSAPDATGAGVTVSFPITREVIEFPSSLVRPRRDYVAGDWIPSXRDDDSMEWFEDKVRTVSLLEANGFSVQSIQSVLTELIEIKSERARYHGEIGKLSSKLAENTASSSRVGALLDEKDGAAAQLEQELGRIRQESQKMAQEKEKIDAEGVSIKTACSGYEDLCSDAERKFKEVLAQLRRKSAR

SEQ ID NO: 7871 - protein, 363 aa, Zea mays
  Clone ID: ZEAMA-23APR03-C297395_1.p
MASRTTGGAWSMEAVTLPASMVLVQVFTMVAVLLSKLALNVGMEPFVLLAYRNLIGAIIVAPLAFYFDRAMVRKVTLKAFGWMSISALLGIVLAMGLYYYGLRATNAAISINFLNLIPVVTFLMAVLLRVEKLAAGTRAGRAKLAGTAVCVGGTMVASLYRGPLLHPWPTHLLHHAAATAPHHHRNMPLGTVFLCASCLAYALWFIVQARVGREFPCKYMSTLLACVSGTVQALAIAAVIRGGDRDSWLLSWDLRLLTVVYSGVFNTAATFCLISWAIARRGPIYPSMFNSLSLVATTVLDSLLLGTDVSVGSLLGALLIVLGLYAFLWGKSTEMRHLKQQQQQQPNANGTTTTTTNAAEDHV

SEQ ID NO: 7872 - protein, 540 aa, Zea mays
  Clone ID: ZEAMA-23APR03-C297915_1.p
MKTKFGAQNPPMYTGMHGTDNAFVTRTNLPQALSFQQHHIIDTQPQTYAPCYQQMDYKFKRHDIDAETNFFMQPQYPYQQYPQAADVHWINSNQYGVINSSDKYAAAPHRGVPTVRHLGHGSPDIYRNGAVIPNGSNRRGLTHVNNCPFISYPDCLCETCEYCQIHLSENLKRSFALRHTPKCSSDDCISDKAKSSPSSLDSVAMKSAQLPYSSVDEVVGELYHLAKDQNGCRFLQRIFIEGSREDARKVFDGVIEHIDELMVDPFGNYLIQKIFEKCNDNQKMHILYEITKIPGQLIEVACNMHGTRVVQKVIESISTSDEVSMVVSALSHGAITLMMDSNGCHVAERCLLKLSPEGKAFLVNAATKYCVELAKDRQGCCIIQKCIAHASKEQRNRLLYSITTRALELAEDEYGNYVIQFVLGLGVAWATNEVLDKLEGSYGYLSTQKCSSNVVEKCLREAPERERARIILELIHDPRLLNVLVDKYGNYVIQTALRESEGTAVEAALIRAIKPHAGALRNNMYGKRVLSKACLKSRKP

SEQ ID NO: 7873 - protein, 193 aa, Zea mays
  Clone ID: ZEAMA-23APR03-C2982_28.p
MAASPRGLGGAALAPPSAAALLPPRAAASVARLLLLRRRAHQLARPPAPRWWTRGEGAHDRRRPGLLAAARAARPLALSRARARAGARLGRRRRRHAEAAVRAAGHGRALADHPGASAVTTAQGEELRKQIGAAAYIECSSKTQQNVKSVFDTAIKVVLQPPRRREAVPARKKNRRGSGCSIMNLVCGSTCAA

SEQ ID NO: 7874 - protein, 658 aa, Zea mays
  Clone ID: ZEAMA-23APR03-C29878_1.p
MVVAAASRHIPTPQAHWQMTGSSYACTCTAFRSISTKLAARSSGGRRSAVAPSAGGPPLPPPPPVVMAGAVASPGKRIPPSPIGCTSRAASGVAVSASATVAAPASSSRQAKEDDGASRNVSGFEPSIWGDFFLTYSSPLATSSLHKAWMVHRAEQLKEQVAAKLVAASSSACSLHRRIHLIHVLERLCLDHLFEDEISDMLARMNDVDVSGCDLQTVAMWFYLLRKHGYSVSSDVFAEFRDEQGGGFTANSARDLLSLHCAACLATRGETILDEAISFTAKSLKSTAPYTGAASLACEIKRALEIPLPRRVRIYEAKSRIAEYGREAEADELVMELAKLNYNLVQLQYQQELKIITRWWNGLELQSRLSFARDRVVECYFWIVGVYFEPSYSRARIILTKVIAIVSLLDDTYDVYGTPQECELFTECIESWDPAVAGGLPENMKFIFGKILDTYQSIEEELAPEEKYRMPYIKNFIIDLVRAYNKEVRWREQGYVPATVEEHLQVSARSGACHLLSCASFVGMGDVAGEEAFEWVCSVPKLVQALCIILRLSDDLKSYEREKMAPHVASTIESCMREHEVPLEVARVKIQEMIDETWKDFNEEWLNMNKHQPAELLERIFNLTRTMVYMYKNDDAYTNCHVIKDTINSLFVEPVFIA

SEQ ID NO: 7875 - protein, 420 aa, Zea mays
  Clone ID: ZEAMA-23APR03-C2987_2.p
ELKRHLNSLEEQILESMAWEKGSSLYNSLIVARPSVASEINRFGLLAESMPSLDDLVARQNIHIEGLPATPSKKRAAGRDDNADPRSPKRPCNESRSTVVEHNLQTPPPKQCHMVLTSLKAKCHPLQSTFASPTVSNPVGGNEKCADVTIQIFFSKILKLAAIRIRNLCERIQYMEQTERVYNVFKQILDQQTTLFFNRHMHQLILCCLYGVAKVCQLELSFREILNNYKKEAQCKPEVFLSIYIGSRNHNGVLISRHVDIITFYNEVFVPAAKPFLVSLISSGTRPEDKKNASGQVPGSPKLSPFPNLPDMSPKKVSASHNVYVSPLRQTKMDLLLSPSSRSFYACIGEGTHAYQSPSKDLAAINSRLNYNGRRVNSRLNFDMVSDSVVAGSLGQPNGGSTSLDPAAAFSPLSKRKPDT

SEQ ID NO: 7876 - protein, 473 aa, Zea mays
  Clone ID: ZEAMA-23APR03-C2987_7.p
MGSTSATGTTSSSSSAAHGGGAAHVLLLPYPGAQGHTNPLLQFGRCLAYHGLRPTLVTSRYVLSTTPPPGEPFRVAAISDGFDDGGAAACPDLDVYWRQLEAVGSETLAELIRSEAADGRPVRVLVYDPHLPWARRVAQAAGLAAAAFLSQPCAVDVVYGEVCAGRLPLPVVDGKELFARGLLGVELGPDDVPPFAAKPDWCPVFLRASLRQFEGLEDADDVLVNSFHEIEPKEADYMALTWHAKTIGPTLPSFYLDDDRLPLNKTYGFNLFNSSESCLAWLDKQLPCSVVLVSYGTVSDYDEAQLEELGNGLYNSGKPFIWVVRSNEEHKLSNELRDKCKERGLIVSWCPQLEVLAHKATGCFFTHCGWNSTLEAIVNGVPMVAIPHWADQPTISKYMESMWGLGVRVRKDEKGLVTRDEVERCIKDVMDGDSKDKYRKSATMWMQKAKAAMQNGGSSAKNITEFAAKYSLS

SEQ ID NO: 7877 - protein, 357 aa, Zea mays
  Clone ID: ZEAMA-23APR03-C298922_1.p
MYTVRPHAAATVTLNCTEAPLDCLPLCPGGGDACFEYVLPPPPPIPVIPRAPVADRHAPVRLILVISLLSIFLSLSLGLSTLLLYRRRRRLILRRRRSLAAATAEGPDDEEEGGGGGGVVHHVWYIRTVGLDEATIASIAAVEYRRGVGRSGDCAVCLGEFSDGELVRLLPRCAHPFHAPCIDTWLRAHVNCPICRSPVVVIPSDLPVDAAEAEAGGAQLGEHYVHEEMSLSQSESETEGSEDSEASSASATQSEGTSTAEENGRDTPKPIRRSASMDSPLFAVALPEANDDVVRYNCKLPNPREMKVFRAKEKEAAGISSSSCQSGRFKIGRSMSSSGQGFFFSRNGRSSGAVLPL

SEQ ID NO: 7878 - protein, 344 aa, Zea mays
  unsure (1)..(344): unsure at all Xaa locations
  Clone ID: ZEAMA-23APR03-C29892_1.p
MPAAAGDGPRAXRVGFYDTSCPNAEALVRQAVAAAFAKDAGIAAGLIRLHFHDCFVRGCDGSVLLTVNPGGGQTERDALPNNPSLRGFDVIDAAKTAVEQSCPRTVSCADIVAFAARDSISLTGSVSYQVPAGRRDGRVSNATETVDLPPPTSTAQSLTDLFKAKELSVEDMVVLSGAHTVGRSFCASFFKRVWNTSTNPATAIVDAGLSPSYAQLLRALCPSNTTQTTPITTAMDPGTPNVLDNNYYKLLPRGMGLFFSDNQLRVNPQMAALVSSFASNETLWKEKFAAAMVKMGRIQVQTGTCGEVRLNCGVVNPSSYSSSSAVELGSSAPAAVGEEGYAAS

SEQ ID NO: 7879 - protein, 126 aa, Zea mays
  Clone ID: ZEAMA-23APR03-C29917_1.p
VPASRRSPTARTHRDASGRCYPPVNKILHCSVECTAQRRNFEDAMARGSNRVVVQGADNVGSPQGRGSYIAIFFPFVSPMFGYFFLLNFSDGESRVRDNMLLNLRKLKQKMRGLFPFDHGVVFIHE

SEQ ID NO: 7880 - protein, 912 aa, Zea mays
  Clone ID: ZEAMA-23APR03-C29927_2.p
MAPSSPSPAAPTRVSGRKRAAKAEEIHQNKEEEEEVAAASSAKRSRKAASSGKKPKSPPKQAKPGRKKKGDAEMKEPVEDDVCAEEPDEEELAMGEEEAEEQAMQEEVVAVAAGSPGKKRVGRRNAAAAAGDHEPEFIGSPVAADEARSNWPKRYGRSTAAKKPDEEEELKARCHYRSAKVDNVVYCLGDDVYVKAGENEADYIGRITEFFEGTDQCHYFTCRWFFRAEDTVINSLVSISVDGHKHDPRRVFLSEEKNDNVLDCIISKVKIVHVDPNMDPKAKAQLIESCDLYYDMSYSVAYSTFANISSENGQSGSDTASGISSDDVDLETSSSMPTRTATLLDLYSGCGGMSTGLCLGAALSGLKLETRWAVDFNSFACQSLKYNHPQTEVRNEKADEFLALLKEWAVLCKKYVQDVDSNLASSEDQADEDSPLDKDEFVVEKLVGICYGGSDRENGIYFKVQWEGYGPEEDTWEPIDNLSDCPQKIREFVQEGHKRKILPLPGDVDVICGGPPCQGISGFNRYRNRDEPLKDEKNKQMVTFMDIVAYLKPKYVLMENVVDILKFADGYLGKYALSCLVAMKYQARLGMMVAGCYGLPQFRMRVFLWGALSSMVLPKYPLPTYDVVVRGGAPNAFSQCMVAYDETQKPSLKKALLLGDAISDLPKVQNHQPNDVMEYGGSPKTEFQRYIRLSRKDMLDWSFGEGAGPDEGKLLDHQPLRLNNDDYERVQQIPVKKGANFRDLKGVRVGANNIVEWDPEIERVKLSSGKPLVPDYAMSFIKGKSLKPFGRLWWDETVPTVVTRAEPHNQVIIHPTQARVLTIRENARLQGFPDYYRLFGPIKEKYIQVGNAVAVPVARALGYCLGQAYLGESEGSDPLYQLPPSFTSVGGRTAGQARASPVGTPAGEVVEQ

SEQ ID NO: 7881 - protein, 183 aa, Zea mays
  unsure (1)..(183): unsure at all Xaa locations
  Clone ID: ZEAMA-23APR03-C2992_2.p
MDQRQVVSENYANPITCFFHVLFKAGALAFYILFSLFVKSFVIIFVITVLLAALDFWVVKNVSGRILVGLRWWNEIDDDGNSVWKFECLDGESLARMNKKDSWLXWWTLYLTAAAWIVLGIFSLIRLEADYLLVVGVCLSLSIANIVGFTKCNKDAKKNIQTFAQNALASRVTSSLQSAFGVI

SEQ ID NO: 7882 - protein, 249 aa, Zea mays
  Clone ID: ZEAMA-23APR03-C29963_1.p
MGKLTLGHRGEASEPDFFRGVLGELVLTFLFVFIGVGAAMTDGATTKGSTAGGDLTAVALGQALVVAVIATAGFHISGGHVNPAVTLSLAVGGHVTLFRSSLYIAAQMLASSAACFLLRWLTGGLATPVHALAEGVGPLQGVVAEAVFTFSLLFVIYATILDPRKLLPGAGPLLTGLLVGANSVAGAALSGASMNPARSFGPAVASGVWTHHWVYWVGPLAGGPLAVLVYECCFMAAAPTHDLLPQQDP

SEQ ID NO: 7883 - protein, 397 aa, Zea mays
  unsure (1)..(397): unsure at all Xaa locations
  Clone ID: ZEAMA-23APR03-C299_38.p
MGEGDDDRRDELLGAGRDHEPEPADAEEAKKPAPGEAEAGNGAGAEAATCDYCGTAAAAVYCRADSARLCLPCDRLVHGANGXCSRHARAPXCAGCCAAGAXXRRASTSAFLCSNXXFGRHRDXGDPPLHDXCAVQPYSGCPPASDLAALLAVPLFDKPAAEDGAWWNIWEEPQVLSLEDLIVPTTPCHGFEPLLTPPSPKNRSISPDRKVNEEILRQLGELAESDGGMQASAGREEAEQAGGDQFPSWASPQYATGHGNFGTEDNHENGRWNNSEYHDLNDACKLEVTYDQAPVNSAEPCLSSFAPLSEICPSMSNGSSKEDNHQANPGIGMPMQGLPKRSGFDVVPCPDRDSVISRYKAKRKTRRFDRQVRYESRKVRADGRLRIKGRFAKANQT

SEQ ID NO: 7884 - protein, 419 aa, Zea mays
  Clone ID: ZEAMA-23APR03-C30033_2.p
MMMETPQIEMGGFKVNSPQVPNGVLRPTVYSSWNSRGPVERALKSIRIVIFTSKLNLLMPFGPASIILHFTTRRHGLIFLFSMLGITPLAERLGYATEQLAIYTVPTVGGLLNATFGNATEMIIAVYALKNGMIRVVQQSLLGSILSNMLLVMGCAFFAGGVVHRNKDQIFSKATAVVNSGLLLMAVMGLIFPAVLHFTHSEVRQGASEVALSRFSSCIMLVAYASYLYFQLSGRSTSYSPIGSEEAPIEDTAEEDEEAEIGMWEAVTWLAVLTLWVSFLSEYLVNAIEGASDSLNLPVAFISVILLPIVGNAAEHASAIMFAMKDKLDITLGVAIGSSTQISMFVIPFCVVIGWMMGQRMDLNFQLFETATLFITVLVVAFMLQDGTANYLKGLMLILCYLIVAASFFVHVDPQSSDG

SEQ ID NO: 7885 - protein, 810 aa, Zea mays
  unsure (1)..(810): unsure at all Xaa locations
  Clone ID: ZEAMA-23APR03-C30079_2.p
MDVAATPSRSKSKPRSSLVNPVAAPAESRMDLCTPSKPTPRRNSKSTASPAPMSPSTPYTVRRSRRLLETPTKAALEVQVKATLTPTSKGKRAAPSPKTPAQHEPKRQKRHPRKRAYYRKVVYDGGEFEVGDDVYVKRREAAESDAEDPEEEECRVCFRTGGGVMVECDACLGGFHLRCVRPPLRRVPEGDWACPYCEAERAGKVVERPRPPEGKRIVRTAKEKLLSSDLWAARIESLWREPDGTFWAKVRWYIIPEETAAGRQLHNLRRELYRTNDLADIEMETILRHCSIMCPKDFRDANDGGDDVFYCEYEYDIHWHNFKRLADIGDEPETKEDPSDEPYNASDDYNSDTDEDSEYDEVEEPTSSFSARGNQSHELAANSRKGRIYGLQKIGIRKIPEHVRCHQKTELEKAKATLLLATLPKSLPCRDKEMEEISIFVKDAICNDQCLGRCLYIHGVPGTGKTMSVLAVMRRLRSEFDSGTLRPYCFIEINGLKLASPENIYKVVYEQLSGHRVGWKKALHYLTEHFSGGTKIGKQANQPIILLIDELDLLLTRNQSVLYNILDWPTKPYSNLVVIGIANTMDXPEKLLPRISSRMGIQRLCFGPYNYRQLQEIITSRLKGIDAFEEQAIEFASRKVAAMSGDARRALEICRRAAEFADYRVKQSRQSAQNTVSANKGDGVVSMGDIEAAIQEVFQAPHIQVMKNCPKFGKVILVAIVHELYKSGLGEIMFDKLATTVFSWCRAHRELLPGYDTLLKICCKLGESKIILCEEGTKHKLQKVQLNYPSDDVTFALKESPDLPWLSKYL

SEQ ID NO: 7886 - protein, 323 aa, Zea mays
  unsure (1)..(323): unsure at all Xaa locations
  Clone ID: ZEAMA-23APR03-C30155_1.p
MAAYQQAPALLCACLMLVLMAGAASGGRVDVEDMLMMDRFRAWQATYNRSYLTAAERLRRFEVYRQNMELIEATNRRAELSYQLGETPFTDLTSEEFLATHTMSTRLHASEAARRHRELITTHAGPVSDGGRQWNRRNYTTDLDVPESVDWRTKGAVAPVKDQGACGGCWSFATVAAIEGLHKIRTGQLVSLSEQEGKCKLDKARNHVAKIRGRKLVDQNNEAALEVAVAQQPVAVGMNVHPIQQHYKSGVFHGPCDPEDLNHAVTMVGYGAESGGRKYWIVKNSWGEKWGEKGYFXRFRLERAVKDVRGTCGIAEWANYPVM

SEQ ID NO: 7887 - protein, 425 aa, Zea mays
  unsure (1)..(425): unsure at all Xaa locations
  Clone ID: ZEAMA-23APR03-C30264_1.p
HELEVPASPPMNSESCKTPKARSLVKSPSSMMLLSYLNKAPSNQGYSPQKAYGSRPRPRSKSPLPSIAPSEVFREAKSTSKRFASPPPQRRGSEKSIYGKSFARQVSDIGQSPDWCSTPVVSGKHKSQKNSAWSRKSSGGRRISAVNPADDRRAQMVRMNQAVQTTFDWTLDPSKLLVGHRFASGACSRLYKGFYDEKPVAIKFIRQPDDDDNGKTAAKLEKQYNSEINSLSHLYHRNVIKLVAAYKCPPVFYIITEFLPGGSLRSYLNNTENHPIPLEKTISIALDIARGLEYVHSQGIVHRDIKPXNILFDEDSCVKVADFRIACEETLCDVLVEDEGTYRGMAPEMIKQKAFNRKVDVYSFGLVMWEMVSGRVPYENLTPFQVXFAXANRNLXXXXXPXCXXPXRXVKLCXXFXXXRXXFWF

SEQ ID NO: 7888 - protein, 513 aa, Zea mays
  Clone ID: ZEAMA-23APR03-C3026_1.p
MAGGFAVSKSGADGREFKGRITWYVWMCGIVAATSGLMFGYDVGISGGVTAMDDFLELFFPSVYARKHRARENNYCKFDDQRLQLFTSSLYLAALVASFVASRACSRFGRKRTMQAASVFFLAGTALCASATNIAMLIVGRVCLVVGVGFGNQAAPLFLSEIAPAHVRGALNILFQLNVTVGILIASVVNYFASRAHPLGWRYALGGAAAPAAVLFLGSLAITETPTSLVERGRTDAGRRTLEKIRGTADVGAEFDEIRAACDLARALGEEEKPYRRLMRPESRPPLVIAIAMQVFQQFTGINALMFYAPVLFQTMGFETDGSLLSAVVTGSVNVVSTVVSIVLVDRVGRRKLLLEACAQMLVAQTAVGAIMLVHVRANNNPSQSWAVAIVVLICVYVSSFAWSWGPLGWLIPSETFPLETRTAGFSFAVSSNMLFTFLIAQAFLSMMCSMRAFIFFFFAAWIVVMAIFVLTLLPETKGVSIDEMVDRVWRRHWFWKRCFADDYDAARVYDNC

SEQ ID NO: 7889 - protein, 331 aa, Zea mays
  Clone ID: ZEAMA-23APR03-C30290_2.p
MAASSRRASQLLGSAASRLLLGRGFAAAAAAAPSPAVFVDKSTRVICQGITGKNGTFHTEQAIEYGTNMVGGVTPKKGGTEHLGLPVFNSVAEAKAETKANASVIYVPPPFAAAAIMEAMEAELDLVVCITEGIPQHDMVKVKAALNRQSKTRLIGPNCPGIIKPGECKIGIMPGYIHKPGRIGIVSRSGTLTYEAVFQTTAVGLGQSTCVGIGGDPFNGTNFVDCLEKFVDDPQTEGIVLIGEIGGTAEEDAATFIQESKTQKPVVAFIAGLTAPPGRRMGHAGAIVAGGKGTAQDKIKALREAGVTVVESPAKIGSTMFEIFKQRGMVE

SEQ ID NO: 7890 - protein, 115 aa, Zea mays
  Clone ID: ZEAMA-23APR03-C302954_3.p
RCKLSQLLGNRTAAFTKQMLSEVITLLITPSISTGLQGLLKANTPSLQVASKDDVGALLEEARMRSDVVGYLLAVIESRSARQPSSSSDPTPRVPTQPRSLPCTQQAAPPGREIF

SEQ ID NO: 7891 - protein, 435 aa, Zea mays
  unsure (1)..(435): unsure at all Xaa locations
  Clone ID: ZEAMA-23APR03-C3031_1.p
MAAFASAILFTVHLALAFPFRLSSAEAPPLLGAVVGEQQPLLEEARTPRFVTWLRGVRRRIHQRPELAFQEHRTSELVRAELDAIGVPYRWPVAQTGVVATIAGSAGPTVALRXADMDALPVQEMVDWAYKSQESGKMHACGHDAHTTMLLGAAKLLQARKGDLKGAVKLVFQPSEEGYGGAYYVLQEGALDGVSAIFGLHVDPALPVGVVASRPGPFTATAGRFSATIRGKGGHAAVPHESVDPVVVAATAILSLQQIVAREVDPLHGAVVSITFVKGGEAFNVIPESVTFGGTMRSMTDEGLSYLMKRVKEIVEGHSSVHHCTASLDFMEEEMRPYPAVANDERMYAHARAVGESLLGENHVKVAPQVMGAEDFGFYARRMAGAFFTIGVGNESTMVTVQQPHSPYFVIDEDALPVGAAFHAAVAIDFLKKHS

SEQ ID NO: 7892 - protein, 399 aa, Zea mays
  Clone ID: ZEAMA-23APR03-C30339_1.p
MMNLSAAANGRDEFPPYVVPSNAAAPPPSLLPTMEQQQESSIHREHHQLLGYNLEANSLALLPPSNAAAAHHHTTFAGGHSPHDILHFYTPPPSAASHYLAAAAGNPYSHLVSAPGTTFHQTSSSYYPPAAAAQAAPEYYFPTLVSSAEENMASFAATQLGLNLGYRTYFPPRGGYTYGHHPPRCQAEGCKADLSSAKRYHRRHKVCEHHSKAPVVVTAGGLHQRFCQQCSRFHLLDEFDDAKKSCRKRLADHNRRRRKSKPSDADAGDKKRAHANKAAAAKDKAESSSKNMDIGDGLGAQILGSALLSKEQDQTMDLGEVVKEAVDPKGKASMQQHYGFPFHSSSAGSCFPQTQAVSSDTTSNIGQVQEPSLGFHHQHHQHSNILQLGQAMFDLDFDH

SEQ ID NO: 7893 - protein, 352 aa, Zea mays
  Clone ID: ZEAMA-23APR03-C30346_1.p
MVMAKQQHDKGLPKQARNEPAPFRLEQCCRCDDAHRQADDESMDAAGSAGPLHLTLGPLGSAAGPRCSCGVAPAPAPALAAPATVAVLRGSRYMRPAQELLGEVVRVADLAAADDEDEDQATERLEGGGHRAARRAAGNDGDGVQAKLLYLLSELESRRERYFGELERVVSSFEPALGGGAAAAYTTLMARAMGRHFGNLRRAILRRLRLQAAAAARRSLRRGGEDQDDDDDDDGDSDGEVTEELVDRLARRTKLAAAARAEQAWRPLRGLPDGSVAVLRAWLFDHFLHPYPNDGEKLRLAVTTGLSRRQISNWFINARVRLWKPMIEEMYKDEFSDGSAVSSYDDASASSS

SEQ ID NO: 7894 - protein, 282 aa, Zea mays
  Clone ID: ZEAMA-23APR03-C303639_1.p
MTAVALALPTDDDKDGGRRGVDHSPTAPAPPPPPPPPQELVMVARAVQRLVARNDAVVPPAPDGRGGGRRLGMRAFEAAEGAAAPRIGVPEYLERVHRYAALDPECYVVAYAYVDMAAHRRPAAAVASRNVHRLLLASLLVASKVLDDFHHSNAFFARVGGVSNAEMNRLELELLDVLDFAVAVDHRVYRRYREHLEKETTLMMLRRDDGHGPPVPVPGSGAAPTKSRTAASSVVKPPLTEDRRRPAEAGDADGGGEHDDRRKLPNSATAAASLRELWAFDY

SEQ ID NO: 7895 - protein, 364 aa, Zea mays
  Clone ID: ZEAMA-23APR03-C3038_47.p
MSPLRRARSTLLLLHYVAASHFLLCAPIQRTAAATLPDPAPLDPALILPSATSVQPTATTIPGGTIPAFPEQSDSLAGSSSACPLAPSPVLLPAVRSSCATDDGALPPRLRCCPALAAWLFAAYAPTALAERPPAAAAATVDMPLPPDDSETCAGAVDRALRAAGAALPRPPGAGGNGTCDVAFCYCGVRLRRLACGSPPAEGGMWSPADAAARELEKDCAQPGVPGCSKCLLALTTIKATNPGCGAGVEAAGKKKQQIYRWTASDRDCELMGLMWLLQRNATRYGAAATAVIRALMAVDEAFTAGVAVAADTGAAVACSLPVDDDMPLPAEYAQVSRASDAPRLCCFLLVLLSILSFCFVYSL

SEQ ID NO: 7896 - protein, 109 aa, Zea mays
  unsure (1)..(109): unsure at all Xaa locations
  Clone ID: ZEAMA-23APR03-C3038_48.p
MGIGYVVGVLGGAILAHAAYATIQLHXHRAVLKITEEEFSRPPMDVMMELLLGLVLCMWAGLAVPTKFLSVLPHSDENRIVSLPANLDFMIFNHRGRVLPSDSDLKLRT

SEQ ID NO: 7897 - protein, 307 aa, Zea mays
  unsure (1)..(307): unsure at all Xaa locations
  Clone ID: ZEAMA-23APR03-C3038_62.p
DHQRTPPRPVSPPLSPAKRGKLSHLAPIHGSYPIPWPKTVNPPHNSHHIYRSRQTLNAQKPASGQMVRRPPPPTCPSSAPLTTISRAPKNAHRSQEHPTKTRPMRPRTQEAFTQTERVSPPYPTPPLNFPLPPRPHPTLFHTSPPPPSTLPTXRATPQSKPTTNPGRTHPPRIHTTSAFPIKHHPTERQLKPSRTKSSPPTPAQCYKMNTQHXPPPLAPNLPTLTCAPPPTKALPTPPHSSYIKHTPRXYTLPASTTPPHSXFSQRPPPPAPSQTPQPRSRTLSPSPTRQTRPVDLLIHVHVNSIRT

SEQ ID NO: 7898 - protein, 245 aa, Zea mays
  Clone ID: ZEAMA-23APR03-C30402_25.p
HGGAAPDRMRQGGGERDGAENQRWPPWLKPLLGTSFFGQCKLHADAHKSECNMYCLACMNGALCSQCLAYHRDHHAIQIRRSSYHDVIRVSEIQKVLDISGVQTYIINSARVVFLNERPQPRPGKGVTNTCEVCQRSLLDTFRFCSLGCKIVGTSGDLRVRKKQAVVKKNKKKKQAQQQQQHRGAALDSEDDSSSTSTSRGSDRSSVVQSFTPSTPPATPNSFRTGKRRKGVPHRSPFGSLVLEF

SEQ ID NO: 7899 - protein, 252 aa, Zea mays
  Clone ID: ZEAMA-23APR03-C30402_30.p
MAIDHGTPLGLKRRGAMGGGGECCDDGSETRRLPPWLRPLLSASFFVQCRVHADAHKSECNMYCLDCMGDALCALCLAARHRDHHSIQIRRSSYHDVIRVSEIQKVLDIAGVQTYIINSARVVFLNERPQPRPGKGVTNTYEVCERSLLDCFRFCSLGCKIVGTARGYRPGKKKHGGGGGNKKRAAPAPALKDVRSDSEDSCTSTSGASSDKSSVVQSSPPPPTSASHRPPGNKRRKGVPHRSPLGSLIVEL

SEQ ID NO: 7900 - protein, 193 aa, Zea mays
  unsure (1)..(193): unsure at all Xaa locations
  Clone ID: ZEAMA-23APR03-C3041_2.p
CCCKCLCREVGDCVLMRASDSDNQPYVARVEKMEGDGRGSVRVQVRWYYRPEESKGGRRQFHGAKELFLSDHFDLQSAHTIEGKCVVHSFKNYTRLDNVGPEDFFCRFEYKAATXYCKCEMPYNPDDLMVQCDACKHWFHPSCVAMTIEQAKKLDHFVCSDCFKENGSKRLSNAYATSPNFEPKQAEPKRQRR

SEQ ID NO: 7901 - protein, 201 aa, Zea mays
  unsure (1)..(201): unsure at all Xaa locations
  Clone ID: ZEAMA-23APR03-C3041_5.p
MLLQCLCWEVGDCVLMRASDSDKQPYVARVEKMEADGRGXAXVQVRWYYRPEESKGGRRXFHGAKELFLSDHFDLQSAHTIEGKCVVHSFKNYTKLDNVGPEDFFSRFEYNAATGSFTPDRVAVYCKCEMPYNPDDLMVQCDACKHWFHPSCVAMTIEQAKKLDHFVCSDCFKENGSKRLSNAYATSPNFEPKAEPKRQRR

SEQ ID NO: 7902 - protein, 693 aa, Zea mays
  unsure (1)..(693): unsure at all Xaa locations
  Clone ID: ZEAMA-23APR03-C304_1.p
MGDSSVAGALVPSVPKPEPAPSGDTSAAAAATTAALAMPEEAGMRAASASPQGPAEEGEGPADRDLLCPICMAVIKDAFLTACGHSFCYMCIVTHLSNKSDCPCCGHYLTKAQLYPNFLLDKVLKXXSAQQIAKTASPIDQFRCALQQGNEMGVKELDSLMTLIAEKKRQMEQQESETNMQILLVFLHCLRKQKLEELNEIQTDLQYIKEDISSVERHRAELYRTKERYSMKLRMLLDEPTAQKMWPSSIDKASCRFLPNSRTPLSGSCPGTLQNKKLDLKAQVSHQGFQRRDALTSSDPPNSPIQSGNVIARKRRVQAQFNELQEYYLQRRRTGAQARRQEERDIVAMNREGYHAGLQDFQSVLTTFTRYSRLRVIAELRHGDLFHSANIVSSIEFDRDDELFATAGVSKRIKVFEFSTVVNEPSDVHCPVVEMATRSKLSCLSWNKYSKNIIASSDYEGIVTVWDVQTRQSVMEYEEHEKRAWSVDFSRTDSSMLVSGSDDCKVKVWCTNQEASVINIDMKANICSVKYNPGSSFYVAVGSADHHIHYFDLRNPSSPVHIFGGHKKAVSYVKFLSNNELASASTDSTLRLWDVKDNCPVRTFRGHKNEKNFVGLSVNNEYIACGSETNEVFVYHKAISKPAASHRFVSSDPDDADDDPGSYFISAVCWKSDSPTMLTANSQGTIKVLVLAP

SEQ ID NO: 7903 - protein, 992 aa, Zea mays
  Clone ID: ZEAMA-23APR03-C305_3.p
ILPLPDPHPLLSPPPLDADILKSKPPQPARPALLSAVACAMSSRHDKEKSVNVQVLLRCRPFSDDELRNNAPQVITCNDYQREVAVTQNIAGKQFDRVYAFDKVFGPTAKQKELYDQAIIPIVNEVLEGFNCTIFAYGQTGTGKTYTMEGECRRAKSGPKGQLPADAGVIPRAVKQIFDTLERQNTEYSVKITFLELYNEEITDLLAPEEISKAAFEDKQKKALPLNLMEDGKGGVLVRGLEEEIVTNASEIFSLLERGSAKRRTAETLLNKQSSRSHSLFSITIHIKEATPEGEELIKCGKLNLVDLAGSENISRSGAKEGRAREAGEINKSLLTLGRVITALVEHLGHVPYRDSKLTRLLRDSLGGRTKTCIIATVSPSVHCLEETLSTLDYAHRAKSIKNRPEVNQKMMKSTLIKDLYWEIDRLKAEVYAAREKVGVYIPKDRYQQEENERKAMADQIEQMNASLEANQKLISDLQEKYDSELRHSADLSKKLEVTEKCMDHTSNLLSATKEDLKQAQYNLKEKDYIISEQKKAENALTHQACVLRSDLKNILAIILSLYSKIARGDKLSATNRSVVNTFQTDLASKLDTLSNTLNASIDQQNMHLKAVEDLCQSCVDSHDRATSELKKKILASKSLYMSHMEAFQNVVLLHKASANATLEDISSLSATSCCSLDQLLVCVEGEAQNIFNDIHKLLTTHRSEMTHFTQQLRESFQISLDRTKEMSTYIIGLFDKYVEETSKLQSHSNNTHEAQMKSIEDFQMVYEEQSKSEEQKLLADISSLVSKHITRQRELVGVRLSSLGDAARGNKAFLDEHTSAMEFVTKDAKRKWETFAEQAENDCKAGSSSSAVKHCRMETMLQECACTVDSAVQQWKKSHAAVNDLSRKQVAEVEALVRTAIENNEQHEVEVASSRAVAEEDTTNSSKDIAQGVENLLEKAQKSSSRGVSMVEAHFAELQKLQESHSTPGYRYQHARRQVFPNQLQGLRADG

SEQ ID NO: 7904 - protein, 119 aa, Zea mays
  Clone ID: ZEAMA-23APR03-C3063_3.p
TRRGRCGHRRSPPHPIACPWAAAATPGTGSTPLHSWRSGSDGRCTGWTDPFTSGGAAAWWARVDKVRELFSVMSLLKSPMGLMVGFMVLMVFVMPKMMENIHISECYFGHMNNKICRYT

SEQ ID NO: 7905 - protein, 171 aa, Zea mays
  Clone ID: ZEAMA-23APR03-C30680_3.p
MDTAAPLQLKACAGDAAEKLLLAVAAEGPICGVPDFKMRGKKSDELEPVDAGDEDDDGGDDGDEDGDFGEEGEEDVSEGEGYDNPKGNETKKQRGDPEENGEEDEEEPEDQEGGGDDDDDDDDDDENGDDEDDDNGDDDEEGVDEEDDDQDEDEEEDDDEDSLQPPKKRKK

SEQ ID NO: 7906 - protein, 136 aa, Zea mays
  unsure (1)..(136): unsure at all Xaa locations
  Clone ID: ZEAMA-23APR03-C30750_7.p
RLRKQILCSLTSFGSKTEKNNIMSFFVLEQKKKGADGRSLXTPMPSLLSCMQCPAXRSSAFXAAAARGTLHRWNGHVRLVDVVDDGGAXEEGGDDDDXRPREGRGPPRHPPAAEPLATXHPPGSXTPVPNGHQNIL

SEQ ID NO: 7907 - protein, 142 aa, Zea mays
  unsure (1)..(142): unsure at all Xaa locations
  Clone ID: ZEAMA-23APR03-C30756_4.p
MSKLQSDSLRDAIASITNDSREKQRKFVETIELQIGLKNYDPQKDKRFSGSVKLPHIPRPKMKVCMLGDAQHVEXEAERMGIDDMDVEAQEQNIKYKTKFVTXIFQNVQMSVNFLVSLLKKNWHNVTCLYLKSTMGKVYRLF

SEQ ID NO: 7908 - protein, 469 aa, Zea mays
  Clone ID: ZEAMA-23APR03-C3076_2.p
MAHRGHLDGLTAQAPALMRHGSFAAGSLSSHSPLESSSTLEMLENKLAMQTAEVEKLIMENQRLASSHVVLRQDIVDTEKEMQIIRTHLGEVQTETDLHIRDLLERIRLMEADIHSGDAVKKELHQVHMEAKRLITERQMLTLETEDVTKELQKLSASGDSKSLPELLAELDGLRKEHLNLRSQFEFEKNTNIKQVEQMRTMEMNLMTMTKQAEKLRGDVANAERRAQAAVAKATGHAAGAQVTASQPGTAQATAVPAAATDPYAGAYASYPPAYQQGAQAGAYQQGAQAGTYQQGAGTQAGAYQQGAQAGAYQQGAQAGAYQQGAQSGAYQQGAQAGAYQQGAQDGAYQQGAQDGAYQQGAQAGAYNYAYDAGTAYAYAGYSGYPVAGYAQSAVPNYSYAAPPQPTSSGAATNAAGGQYGAVGSAGYPTGQVQPSSGTANAAQAPPPPPPPAAPYPPSTYDQTRGAQR

SEQ ID NO: 7909 - protein, 153 aa, Zea mays
  Clone ID: ZEAMA-23APR03-C30814_2.p
PYGHGARQQAHLPLRGHALLGAAARPGTPCFRPPSRTDGSAYPAGDCPYPCLPPPAVTANCPPPPPAAASYSYPPPPGAYIPYFQPAAGGGGGGGSGGYGGYPAPPPPNPILPWYPWYYKTPPSSSAATSGRGSRVLLGPAAMVAAAALLIMA

SEQ ID NO: 7910 - protein, 300 aa, Zea mays
  Clone ID: ZEAMA-23APR03-C3083_2.p
MDLWERARAFAGEAANWSQELSAEATKRSSALVSETAKKSKEIFSETASKSLEIAAEATKQADLLAGQIKHLASDIPVPSIPPIPAIPPIAATASSEPDAAELERYGITDDLREFVKDMTISTFREFPLQDEPEMSDVPTVSNVRQDLSEWQARHATLVLSAVKEISKFRYELCPRYMKERKFWRVYFLLVNSYVATPKKSLEELKVKAEEEKRDSQKQASQAYTTFEPKDTKAPIKTSSTNPEHDLDVFLLGDLGSDDEGPVDDDDGLDEDFDKIDVTTGLESDDDDKKIATGKAEDAK

SEQ ID NO: 7911 - protein, 449 aa, Zea mays
  unsure (1)..(449): unsure at all Xaa locations
  Clone ID: ZEAMA-23APR03-C30887_2.p
MAESSAAAEVGSPASLPPLVAEEADAAAMEEAAAVAKRWPGWPGDSVFRLVVPVLKVGSIIGRKGELIKRLVEXETKARVRILEGPVGATERIVLVSGKEDPDLELPPAMDALMRVFKRVTGITDGAAEGTQAAATPDVCAARLLVPGAQAINLIGKQGATIKAIQESTSATIRVISVDEHERPFYVTDDERIVEIQGDTEKVLKALQAVSNHLRKFLVDHSVLPLFEKTNTTVSQDRNGDGWSDMSRPSIGSAQVNQLPSVLDDYILQVKRDPLYLERESLVDHNIHRSGVSLYGRDPALSTLRPSAVHGAGSLLTQITQTMQIPLTYAEDIIGVKGANIAYIRANSGAVVTIQESLGSPDDITVEIKGTSSQVQAAQQLIQDSLAAHREPVRSSYVGAGLDSVYRSSYSQYGSSIYPSSSLPSYSSIDDVSRYPSSGLGGYGSSYRY

SEQ ID NO: 7912 - protein, 510 aa, Zea mays
  unsure (1)..(510): unsure at all Xaa locations
  Clone ID: ZEAMA-23APR03-C308_3.p
MIKQILGRLPRKPGKAGDSREAAAAGNGTEPSNSYSVARSMDPGNKRAGNGDYPVPSGVIPNPVMNGAVVYHSNEPLPAFKDVPMSEKQNLFVKKVNLCCAVYDFVDPTKNLKEKEVKRQTLMELVDYVTSANGKFSEVVMLEITKMVSINLFRSSSPTPRENKAIEGVDLEEDEPLMDPAWSHLQIVYEVFLRFVASQETDAKLAKRYIDHSFILRLLDLFDSEDPRERDYLKTILHRIYGKFMVHRPFIRKAINNIFYRFIFETEKHNGVAELLEILGSIINGFALPLKEEHKLFLVRALIPLHKPKCVSMYHQQLSYCITQFVEKDCKLADTVIRGLLKYWPVTNSSKEVMFLGELEEVLEATQLAEFQRCMVPLFRQISRSMNSSHFQVAERALFLWNNDHIETLIKQNYKVLLPIXYPXLXXNSXDPWNQAVXSLTLXVXXIXXDXDXAFFGEXVXRFSDEELKQEEFDXKRXALWMRLEEMAXLKPXENSPLXAPNGKPSQAAX

SEQ ID NO: 7913 - protein, 320 aa, Zea mays
  unsure (1)..(320): unsure at all Xaa locations
  Clone ID: ZEAMA-23APR03-C3095_1.p
LHDSLVFSSDFSATARINPLFIDGPKLFDEENQKVAVTSDIASLGELDVVQPDNAVANSIVRDFRGGXQVIAAENRVAAFQGSKGKVLAVSTNTTEAQVXFLEALEQGLDGVVLKVDDMDDIIKLXRNEAKSQLPLTKATVTKVEVVGMGDRVCVDLCSIMRPGEGLLVGSYARGMFLVHSECLETNYIASRPFRVNAGPVHAYVTVPGGKTSYLSELGSGKEVIVINQSGLWRTAIVGRVKIESRPLILVEAKDNSGDETYSIFLQNAETVALITPNTGSSGRTAIPVTSLKVGDEVLVRKQGAARHTGIEIQEFIVER

SEQ ID NO: 7914 - protein, 278 aa, Zea mays
  Clone ID: ZEAMA-23APR03-C31002_1.p
MAAPAMLQVVILAALPLLLFLTVLGVEAQANAVVLTEFAIASQACAILPPTSPEHHHHHHDDEDNDEDNDEDEDEDEDNDEDEDEDNDDDSGGGGDRRRHPRDQAKKSDVVSKPTVSSASKPAVSSMITVEAVTDDDDRNGTTGHSSVAVVGNGNHTHGGGSVRHHRSRSRRRRRRRHRHGRLRDGDEDNDEDEDEDEDNDEDEDEDDDEDDDEDDDDDDDEDDHRAYRDCCRWLKEVEPDCVCEALLRLPPFLVKPQHKYTVKVGNSCKFTYRCGGV

SEQ ID NO: 7915 - protein, 165 aa, Zea mays
  Clone ID: ZEAMA-23APR03-C3108_10.p
LPRWFSDLSDAAAVVSGISRDSMHKRRATGGKQKAWRKKRKYELGRQPANTKLSSNKTVRRVRVRGGNVKWRALRLDTGNYSWGSEAVTRKTRILDVVYNASNNELVRTQTLVKSAIVQVDAAPFKQWYLTHYGVDIGRKKKTPAAKKDNAEVFFLGTQLLTIYH

SEQ ID NO: 7916 - protein, 235 aa, Zea mays
  unsure (1)..(235): unsure at all Xaa locations
  Clone ID: ZEAMA-23APR03-C3108_11.p
DANGCLCGWFGCIRAGISRDSMHKRRATGGKQKAWRKKRKYELGRQPANTKLSSNKTVRRVRVRGGNVKWRALRLDTGNYSWGSEAVTRKTRILDVVYNASNNELVRTQTLVKXAIVQVDAAPFKQWYLTHYGVDIGRKKKTPAAKKDNAEGQEVEAAAEETKKSNHITRKLEKRKEGRTLDPHIEEQFGSGRLPACISSRPGQCGRADGYILEGKELEFYMKKLQRKKGKSAVA

SEQ ID NO: 7917 - protein, 221 aa, Zea mays
  Clone ID: ZEAMA-23APR03-C3108_18.p
MGISRDSMHKRRATGGKQKAWRKKRKYELGRQPANTKLSSNKTVRRVRVRGGNVKWRALRLDTGNYSWGSEAVTRKTRILDVVYNASNNELVRTQTLVKSAIVQVDAAPFKQWYLTHYGVDIGRKKKTPAAKKDNAEGQEVEAAAEETKKSNHVTRKLEKRKEGRTLDPHIEEQFGSGRLLACISSRPGQCGRADGYILEGKELEFYMKKLQRKKGKSAVA

SEQ ID NO: 7918 - protein, 410 aa, Zea mays
  Clone ID: ZEAMA-23APR03-C31126_2.p
MASASRALLLSRALQAGASRRVPALLRPVAAAASLLPAVAGPAGAALGARVRCFATQPATSSLRDSSPNWSNRPPKETILLDGCDFEHWLVIMEPPPGDASNPDITRDEIIDSYIKTLAQVVGSEEEARQKIYSVSTRHYFGFGALVSEELSYKLKEIPKVRWVLPDSYLDVKNKDYGGEPFINGQAVPYDPKYHEEWVRNNARANDRNRRNDRPRNFDRSRNFDRRRENMQNYQNRDGPPAQGFNGPPPPPGQNQMPSHHSQGNMSPQPPHAGGGQPNYQPQMQNPQTGYNPGGAPHYQQGAAPGYQGGPPGYQGGYQGNPGPAYQGGNTGYQGGNPPPPYQGSNPPPPYQGGSPPGPPPPYRGGSPPGPPPPYRGGNPNVPPYSGGGNPGYPGGSPGYQGQGGNSNFQ

SEQ ID NO: 7919 - protein, 172 aa, Zea mays
  unsure (1)..(172): unsure at all Xaa locations
  Clone ID: ZEAMA-23APR03-C31139_17.p
MSPLPRIVLLAVRRRRRRSGSRRPRSLSGAAKTYSPSYGLPXGAHPGTPXASYSFDKATGAFREXHLAGTCYVHFGSHLVYYERTITGKLSKGAISDLSGVQAKKLFLWVYVTGMVAHPDQGTIEFQAGFVSESLSASMFDEVRTCGSSAGAQLRGAAGVIGELGLLPVAQA

SEQ ID NO: 7920 - protein, 242 aa, Zea mays
  Clone ID: ZEAMA-23APR03-C31205_2.p
MRPRLVLFGDSITELSFASGGWGAALTDRFARQADVVLRGLSGYNTRWALKVLPRAMEGAAGAGAGADPAAVTVFFGANDASLPDQVQAHQHVPLKEYQSNLRAICAYFKERWPSTAVILITPPPIYEPARIRDMYGDDEPSRQPERSNEAAGAYAQACIDVATELNHPVIDIWTKMQEFPDWQTSALSDGLHFTPVGNKILFEEVVKTLETSIGFSQERLPSDLPLFHEIDPKDPMKAFGA

SEQ ID NO: 7921 - protein, 114 aa, Zea mays
  unsure (1)..(114): unsure at all Xaa locations
  Clone ID: ZEAMA-23APR03-C3122_2.p
CQEFYAPWCGHCKKLAPILDEAATTLQSDEEVVIAKMDATANDVPSEFDVQGYPTLYFVTPSGKVTSYDSGRTADDIVDFIKKSKETAAXRRHHHPGATGIREGSXAEPVKDEL

SEQ ID NO: 7922 - protein, 148 aa, Zea mays [sequence omitted]

SEQ ID NO: 7923 - protein, 91 aa, Zea mays
  Clone ID: ZEAMA-23APR03-C31292_3.p
MEHVVGGKFKLGKKIGSGSFGELYLGVNMQSDEEVAVKLVFHEHLPRDFCVHYPCLGEQFCVRPSPTAPPKPPLTLAIATDLLCTMGGSIF

SEQ ID NO: 7924 - protein, 722 aa, Zea mays
  unsure (1)..(722): unsure at all Xaa locations
  Clone ID: ZEAMA-23APR03-C31319_1.p
MDTAFLSPPLARNLVYDEFAVLHPTSYPFHTLRYLRCNPMYSRPLLTIAPASPSRGLIQRVAALPDVDDFFWEKDPTPILDTIDAPIHLKNLSSKELKQLADEVRSEIAFIMSRKCQPCGADRSVVELTIAIHYVFNAPMDKILWDAGQHAYAHKILTGRRSLFHTITQKNGLSGFTSRFESEYDPFGAGHGCNSLSAGLGMAVARDINGRKNRIVTVISNWTTMAGQVYEAMGHAGFLDSNMVVILNDSCHTLLPKADGGAKMSVNAFSSALSKIQSSKGFRRFREAAKGLAKWFGKGMHEFAAKVDEYARGMIGPHGATLFEELGLYYIGPIDGRNIDDLICVLKEVASLDSTGPVLVHVITGTENDTGGIIGSAINAVEEGPSNSSPDLLKFLGTGLSRTYNDCFVEALTAEAENDKRIVVVHGGMGIDRSLRLFQSRFPDRFFDLGIAEQHAVTFSAGLACGGLKPFCIIPSTFLQRAYDQIIEDVDMQKIPVRFAITNAGLVGSEGPTNSGPFDITFMSCLPNMIVMSPSNEDELIDMVAHXSPPPPRPLRFRYPRGAIVGTSGSVTYGNPFEIGKGEILVEGKEIAFLGYGEVVQRCLIARSLLSNFGIQATVANARFCKPLDIDLIRTLCQQHSFLITVEEGTVGGFGSHVSQFISLDGLLDGRTKWRPIVLPDRYIEHASLAEQLDLAGLTAHHIAATALTLLGRHRDALLLMK

SEQ ID NO: 7925 - protein, 315 aa, Zea mays
  Clone ID: ZEAMA-23APR03-C3131_2.p
MAIVAVLVAPTASYVGPRRRWRAAAASSSAASGVDLKALQAAIDKKSSDDVRQALDQLRESGWAKRWGSQPYVSRRTTSLRELTTLGIKNAENLAIPSVRNDAAFLFTVVGTTGFLAVLAGQLPGDWGFFVPYLIGSISLIVLAVGSVAPGLLQAAIGAFSTVFPDYQERIARHEAAHFLVAYLIGLPILGYSLDIGKEHVNLIDEQLQKLIYSGQLDGKELDRLAVVSMAGLAAEGLEYDKVVGQSADLFTLQRFMNRTKPQLSKDQQQNLTRWAVLFAASLLKNNKAAHEALMSAMSQKASVLGCIEAIENAS

SEQ ID NO: 7926 - protein, 351 aa, Zea mays
  unsure (1)..(351): unsure at all Xaa locations
  Clone ID: ZEAMA-23APR03-C3136_2.p
MAYARTVMAAAASALLMAVGVRFLGPAAAAFVEEELPRARAVAATWLTPPYLYLVINAIIISIAASSRFQSSGGAGGRPSAPSYAPAADPDADAIGGEGAGEEIAAAGWXQPAVASLQVPAAVPVVAAKAAEVAAVVEEPVVVEIHTVAVAPEGEVDEDYSVSRSTWTPRRRGAEPEVAAEVPPFADLTNSRKKPLVSARFSRKATKPSPEGSRALRVARPRKEETLESTWKAITEGRGPTLARHLKKSDTWDTXVPGRRPSGGGSSGEVDPAAVAPAGTMRKAETFNDGGAGRSRPAPAALVRREPSLGQDELNRRVEAFIHKFNMEMRLQRQESLKHYNDMIGRGRGSR

SEQ ID NO: 7927 - protein, 310 aa, Zea mays
  Clone ID: ZEAMA-23APR03-C31482_1.p
MSSPPRGQPATAAVPAVAAATSPQLPAASSTLPRAFLATASPRATVAAPVPPLFTGRPLNPNPPAHGSSVPHGILYPVLKSASTSNSAAAAVTAQLRRVPPMAVGYPRTHAVAIPIAQQQQPLVHAQPRSFAAVPRALVTGVSTGSEQPPRGVPIGSQPKVNPVPPVGPSNEQSNPKDREKSREEPTVVVINDRKVNLLDSESGSFYALCRSWVRNGVPHESQPSFGNGEPLLPRPLPASVVDSRISDKDDNDVAGEDSDEEPQKNANGEYNTSDLLKQHVKRAKRIRAGLQKDRLRRIERYKQRLALLL

SEQ ID NO: 7928 - protein, 543 aa, Zea mays
  Clone ID: ZEAMA-23APR03-C31513_2.p
MAYAAPPMASSLTASHPPLSPSHLITHPHRCPARPNPTTGLLRLTPSRRRGRPPVAVRLAISASSTSAPPPSADRSEAASSLERYLSATVTGAVMGTGAAPPASAPPRAPPAMKGGRKQYSALGAVTLEKAKLDLSQRRKNIMPELATGGGGGDIGKRIGHGGGDGGDDDGDDDDYFDDFDEGEEEGGLFRRRIVVQELFNREFVEAVLQEWYKTMSDLPTGLRQACEMGLVSSAQMVRYLSIFARPTNARSFSRALPGWLSRGLVGRTLADPSFPHKMSLEFIATIASSIWCEMNIRKERFKQEWDLVIVNALTAACCNLMVLGLLAPCRSYASTSRFDFQNAIEKLPNNIFEKSYPLREFDLAKRISAFFYKAAELSLVGFVAGSVQGGMSIVLSARKERRLSVTIPSISTNALGYGAFLGLYANLRYQLLCGVDQYMVKRFDVLGVAIFFSTAARLMNIQIGEASRRTWLGEEADPQYSDRLLRAYKRPVEVDADQSRWFISKDAIVSGLGLLGIKQGGPEATFSKSRRKRVIRKKVTSG

SEQ ID NO: 7929 - protein, 122 aa, Zea mays
  unsure (1)..(122): unsure at all Xaa locations
  Clone ID: ZEAMA-23APR03-C31621_4.p
MHHHNYSSHNHLHSLTLFDHCTEDTMAKSTAMFVAALALVVVMATTSTGGGRAAAACDPKPLVVCDPAFMDGAKPAAACCSTLRAQEACLCVYAKDPKFAKYINNPNTAXTFTSCGIAIPKC

SEQ ID NO: 7930 - protein, 249 aa, Zea mays
  Clone ID: ZEAMA-23APR03-C3166_22.p
MSSIGTGYDLSVTTFSPDGRVFQVEYATKAVDNSGTVVGIKCKDGIVLGVEKLVTSKMMLEGSNRRIHSVHRLSGLVVAGLAADGRQIVSRAKSEAASYEKVYGEPIPVKDLADRVASYVHLCTLYWWLRPFGCGVILGGYDRDGPQLYMIEPSGVSYKYFGAALGKGRQAAKTEIEKLKLSELTCREGIVEVAKIIYGVHDESKDKAFELELSWICDESNRQHQKVPNELLEQAKAAAQAALEEMDAD

SEQ ID NO: 7931 - protein, 268 aa, Zea mays
  Clone ID: ZEAMA-23APR03-C3167_3.p
CRGHHRRRSEMDGAFAHERQCWEARRPQQGKRRPGASPSPRLSPKKTPAQCQARAPGQKQATSAAAALTHKPRSRRWGHCCPLVVATHHHRGARSDDRPRRTHEKATAHLTSSAPHCRTTMGSSPAGAPQPALASGMANPATGPPDLTAAPRPTCCGHRPPRPGPPAAANSMSHHAPRIEAAPTLAWPTSHGARAPPDLVPSAAAKPSRGRGGEVPRPWPRCRHPRICTDSRLSALATARLEEGGSGGCCGGGGVAARVTRGVAAFSL

SEQ ID NO: 7932 - protein, 807 aa, Zea mays
  Clone ID: ZEAMA-23APR03-C31899_1.p
MHSNEMEDIQEAYAGRAAALWVLFSRVFCSRPRPRKVQNPEPSLPPRSRFLKAAMAMTRRSASHLLSAFRPFSLLLQPHLVDSSPAAASARRAMSSASALRARDEKDVARWRESMGRMRNIGISAHIDSGKTTLTERVLYYTGRIHEIHEVRGRDGVGAKMDSMDLEREKGITIQSAATYCTWKDYQINIIDTPGHVDFTIEVERALRVLDGAILVLCSVGGVQSQSITVDRQMRRYEIPRVAFINKLDRMGADPWKVLNQARSKLRHHNAAVQVPIGLEEEFEGLVDLVEMKAYKFEGSSGQNVTASDVPLNMEDLVTEKRRELIEVVSEVDDQLAEAFLNDEPITANQLKAAIRRATVARKFIPVYMGSAFKNKGVQPLLDGVLDYLPCPLEVYNYALDQNKSEEKVLLAGTPAEPLVALAFKLEEGRFGQLTYLRIYDGVIRKGDFIYNVNTGKKIKVPRLVRMHSNEMEDIQEAYAGQIVAVFGVDCASGDTFTDGTVKYTMTSMNVPEPVMSLAVSPISKDSGGQFSKALNRFQKEDPTFRVGLDAESGQTIISGMGELHLDIYVERIKREYKVDAKVGKPRVNFRETITQRAEFDYLHKKQSGGQGQYGRVCGYIEPLPSGSDGKFEFDNMIIGQAIPSNFIPAIEKGFKEACNSGSLIGHPVENLRIVLTDGASHQVDSSELAFKLAAIYAFRQCYTSAKPVILEPVMKVELKFPTEFQGTVTGDMNKRKGIIVGNEQEGDDTIVVCHVPLNNMFGYATAIRSATQGKGEFTMEYLEHNVVSQDVQMQLVTSYQAAKGTE

SEQ ID NO: 7933 - protein, 193 aa, Zea mays
  unsure (1)..(193): unsure at all Xaa locations
  Clone ID: ZEAMA-23APR03-C31936_3.p
MAATVMASMSPLASATPGARRAFPVRLLLQASALAPRRRALAVTVRAQSDDAEAEPKEAAAAATTPAPXSPRRAAAASPGLWDALAFSGPAPERINGRLAMVGFVSALAVEASRGGGLLSQAGSGSGLAWFAATAAVLSVASLVPLLRGDSAEARSGAVMSANAELWNGRFAMLGLVALAFTEYLTGAPFINA

SEQ ID NO: 7934 - protein, 86 aa, Zea mays
  Clone ID: ZEAMA-23APR03-C3193_8.p
SANRGDTKEMRVAATVGIHRLNMKPLTNSFITRVFGCLLAIVQAEHVILHEEGPSCRQQMECLQRQSIISWKRRILVLEEEHKEPT

SEQ ID NO: 7935 - protein, 398 aa, Zea mays
  Clone ID: ZEAMA-23APR03-C31966_2.p
MKGKGGAMDRRSSARWRVLLLCAFSFGLGMLFTDRFWTAPDSSNHIMSQSRRQEQELQLVSEDCSTKRKHGEDKDIMGEVTKTHEAIQSLDKSISTLQMELAAKRSTLELLRSSGSPVTFETSQPRKKAFVVIGVNTAFSSRKRRDSVRETWMPQGEKLQQLEEQKGIVIRFTIGHSATSDSILDKAIDSEDAQHHDFLRLDHVEGYHELSAKTKIFFSTALGIWDADFYVKVDDDVHVNLGMLATTLARHKLKPRTYIGCMKSGPVLADKNVKYHEPEYWKFGEEGNKYFRHATGQIYAISKDLATYISINQPILHKYANEDVSLGSWFIGLEVNHIDERNMCCGTPPDCEWKGQAGNVCVASFDWSCSGICKSVERIKDVHARCGEGDSAVWSALF

SEQ ID NO: 7936 - protein, 131 aa, Zea mays
  unsure (1)..(131): unsure at all Xaa locations
  Clone ID: ZEAMA-23APR03-C31989_1.p
MAPSLASTAGLPSCAARRGGRCVARRASAVAAPATATATARTHYEVLGVGAGASRCEIKAAYRRLAREVHPDGRGDEGFIRLHAAYATLADPDERARYDRAAAVRSRXQGGAVIXSGAGFRPRRWETDQCW

SEQ ID NO: 7937 - protein, 258 aa, Zea mays
  Clone ID: ZEAMA-23APR03-C320158_1.p
VREKDIEVPLDLQSDQLFADFLPLKCDACSGIFCADHVAYAQHHCGSAYQKDIQVPVCPLCNVPVPVARGEPPDRAVGEHIDRDCRSDPAQQKRKIFTNKCERAGCRQREMMKLTCERCSRNFCIKHRHPLDHDCSGEGHPTSRAGLAAISRAQAVASTSTVPSPSQTMPSCTSPSRATTRSPSWTAPPVIALQNGLSEDEALQRALEMSLAETKPQVPSCQEEEDLALAQALSASEAEYQRQQAQSRSSKPSNCSLC

SEQ ID NO: 7938 - protein, 240 aa, Zea mays
  Clone ID: ZEAMA-23APR03-C3202_18.p
MAAKIFAILALLALSASVATATIIPQCSQQYLSPVTAARFEYPTIQSYRLQEAIAASILRSLALTVQQPYALLQQPSLMNLYLQRIAAQQLQQQLLPIINQVVAANLAAYLQQQQFLPFNQLAGVNPAIYLQAQQLLPFNQLVGSPYAFLLQQQLLPFHLQAVANIVAFLRQQHLLPFYPQVVGNINAFLQQQQLLPFYPQNVANIVAFLQQQQLLPFSQHALTNPTTLLQPPTIGGAIF

SEQ ID NO: 7939 - protein, 150 aa, Zea mays
  Clone ID: ZEAMA-23APR03-C3204_16.p
ESLLLRNETNSRMMERFLQFWHSIHRTSDYWHHEDSNCSVGIIIMHPLNTWHPPVLIVICCCVRPITPLAFSVFELQSPCTLVQALPRSLVGQRFLCSWTNLEFLRSSSVKLAVILVMMKPVMANPVRKGQLRFHSRRKKTGHGSNVFIY

SEQ ID NO: 7940 - protein, 398 aa, Zea mays
  Clone ID: ZEAMA-23APR03-C32089_2.p
MRSVEWSQLEMESPRSPEAEIGHRVEDLWEVAEPQLSPSEKLNSCFEDIPVASFPRTHPSQVIEIPSDASLAETVEILSKNKILSAPIRNVEAPEDASWMDKYIGIVEFAGIAMWLLSQSDAAVNGTVGSGPGSPVSSLVSRLGSFTFRRTSSGRLETATDSESDEAASVGGSFFETLTSSEFYKNTKVGDISGSFRWAPFLALQTSDTFLTMLLLLSKYRMKSLPVVEVGGDKIENIITQSSVVHMLAECVGLSWFENWGKGVGGLPVMDTSGANAIGNISIRDVQYLLTAPKIYKEHRSITTKDFLSAVRHHLQEQREASPLLHDVITCKKDDTIKDIILKLDSEKIHRIYVVDDKGNTEGVITLRDIISKLVHEPRHYFGDFFDGVVPLPANSTV

SEQ ID NO: 7941 - protein, 163 aa, Zea mays
  Clone ID: ZEAMA-23APR03-C32116_3.p
MSDTQSSFSSTTAAVSSTTALPLSQAIHSVNIKSLVSYILDTQVHNYGKWSQLFTIILGRFDLLHHITTSDVFSDDPAWVRENLTVLSWIFATIYEDLVDMVDKMEEADATTSDKMEEVDATLPDKMEETNVTLPDKMEEANAMSPDKMEEKNSDPKDKMDEE

SEQ ID NO: 7942 - protein, 110 aa, Zea mays
  Clone ID: ZEAMA-23APR03-C3211_13.p
MAMATQASAATRHLVAAAASAIMREGPNLLKLARKEQCLALGTRLRSKYKITYQFYRVFPNGEVQYLHPKDGVYPEKVNPGREGVGQNFRSIGKNVNPIDVKFTGKSTFD

SEQ ID NO: 7943 - protein, 817 aa, Zea mays
  Clone ID: ZEAMA-23APR03-C321421_1.p
MTRFQISHKISAPARPDPGRLYASSAAASRAHLPLDVMRHRPAAGCIVHLPAALAGFVRARAAGTASASCRFSYGKALAACATASAPFAFAEQLYCAAWKDGLSRDAYICSTMVDLLAKHGRLGDALRAFEDGEYRGSVVCWNTAISGAVRNGEHALGVEMFLDMVRGSTCEPNSFTYSGVLSACAAGEELGVGRAVHGMVLRRDSEYDVFVGTSIVNMYVKCGQMGAAMNEFWRMPIRNVVSWTTAIAGFVQQEDPVNAMLLLTEMLRSGVSINKYTATSILLACSQTSMIREANQVHGMIIKSELYLDHVVKEALISTYANAGAVQLCEKVFQEVDTVSNRSIWSAFISGVSRHSVQRSIQLLRRMLFQCLRPNDKCYASVFSSVDSSELGRQLHPLVIKDGFIHVVLVASALSTMYSRCNDLKDSYKVFEEMQEQDEVSWTSMIAGFATHGHSVEAFQVLRNMIAEGFTPNDVSLSAILSACNIPECLLKGKEVHGHVLRAYGRTTSINHCLVSMYSKCKDLQTARKLFDATPCKDQIMLSSMISGYATNGYSEETLSLFQLMLAAGFHIDRFLCSSIISICANMARPFCGKLLHGYASKVGILSDLSVSSSLVKLYSKSGNLDDSRKVFDEIDVPDLVTWTAIIDGYAQHGSSQDALALFDLMIRCGVKPDTVILVSVLSACGRNGLVEEGFKHFNSMRTVYGVEPVLHHYCCMVDLLGRSGRLVEAKSFIESMPVKPNSMVWSTLLAACRVHDDVVLGRFVENKIHEENCDSGCFATMSNIRANSGDWEGVMEIRKSVKDVEKEPGWSFLEE

SEQ ID NO: 7944 - protein, 515 aa, Zea mays
  Clone ID: ZEAMA-23APR03-C3232_1.p
MAQGEESSWCMASSDHASFAQAVACGTQRRASAAQPANFLELQPAAAAPYYFGELEEALIHGTRTSVDHGMIGSDVDTERKTAGYLAARPPTLEIFPSWPMSHLQQPYSGNSHSVGSTTESSSGQNSMPQTELVSPGSMRADSGQRQELLMVTVDDYNYEQGLGAAATTAPIFQQHAAGQDKGKHGSTRKDGRLLDAKTERRLAQNREAARKSRLRKKAYVQQLETSRIRLQQIEQELHGARSQGLFPGGGGAPGDLSSGAVIFDMEYARWLEDDTKHMTELQAVLQPQIIDANLGAIVEDCMRHYDELFHLRAMLARSDVFHLMTGLWATTAERCFLWMGGFRPSEILKMLIPQLDPLAEPQLLGMYNLQRSSEQTEEALVQGLQQLHQSLADAVGASPLSDGANVANYTALMALALDRLDTLESFYRQADSLRQQTLHQMRRILTIRQTARCFVSISEYHRRLRALSSVWASSRPPTPPSEGVVAAAENVSPTGTTSEQALPPYHHSQPFPGF

SEQ ID NO: 7945 - protein, 112 aa, Zea mays
  Clone ID: ZEAMA-23APR03-C32362_6.p
KLSAPLRLSVSATDGATRSALRREACSAARDAFYACIEKHADKKPTEIATMGLLYPADCKKSRADFVSNCRPTWVKHFDRQYCAKKRVQRLLDGDGDRRGPMSLPQPYTFKQ

SEQ ID NO: 7946 - protein, 461 aa, Zea mays
  Clone ID: ZEAMA-23APR03-C323_4.p
MPPPLRRLGKSARLQSYDNRAPLLLPVKIMDAAADDKPEISDDTAHQISVDPWYQVGFVLTTGVNSAYVLGYSGSIMVPLGWIGGTCGLLLAAAISMYANALLARLHEVGGKRHIRYRDLAGHIYGPKIYGLTWALQYINLFMINTGFIILAGQALKATYGLFSDDGVLKLPYCIAISGFVCALFAIGIPYLSALRIWLGFSTLFSLMYIVIAVVLSSRDGITAPARDYSIPKSSQSTRVFTTIGSIADLVFAYNTGMLPEIQATIRPPVVKNMEKALWFQFTIGSLPLYAVVFVGYWAYGSSTSGYLLNSVTGPVWVKAVANLSAFFQTVIALHIFASPMYEFLDTKYGSGRGGPFEIHNVAFRVAVRGGYLTVNTLVAAVLPFLGDFMSLTGALSTFPLTFVLANHMYLMVKGPKLGAIQKSWHWLNVLGFTALAVAAAVSAIRLIMRDSSTYHFFADL

SEQ ID NO: 7947 - protein, 284 aa, Zea mays
  unsure (1)..(284): unsure at all Xaa locations
  Clone ID: ZEAMA-23APR03-C3244_2.p
KEREKPCHDPSIPDTEIPYLHYPMPNTYDRKECACTGVRFFAILSMQRSGSGWVETLLNSHPNISSNGEIFSVKERRSNITAITKTLDRLYNLDWYSSAAKNECTAAVGLKWMLNXGLMKHHQEIVEYFNRRGVSAIFLLRRNLLRRYVSILANAHDSAMKQLNGTHKAHVHSKHEAEILAQYKPTIDKKTLITELKRSDKLAADALVNFKNTRHVVLYYEDVVSNRTMLMDVLDFLRLPKRKLFSRHVKIHTKRLCDHIDNWADVTDFLKGTPFESFLNGSRR

SEQ ID NO: 7948 - protein, 208 aa, Zea mays
  Clone ID: ZEAMA-23APR03-C3245_3.p
CGIWYLLCNCSRLGIEGIHGDACGFEQSNLGKRGRDEPCSSGPTSKACREKMRRDKLNDRFLELSSVMSHGKEAKLDKANILSDAARMVAQLRGEAEKLKESNEKLRENIKDLKEEKNELREEKVRLKVEKDRLEQQVKAMSVAPTGYVPHLPHPASYHPAAFTPFAPPPANKSAPIPAPFPGMAMWQWLPPTIVDTTQDPKLWPPNA

SEQ ID NO: 7949 - protein, 208 aa, Zea mays
  Clone ID: ZEAMA-23APR03-C324_4.p
MAPSLLGGFTKSLAMTVLSEVGDKTFFAAAILAMRHPRKLVLAGCLTALIVMTALSASLGWVAPNLISRKWTHHVTTLLFFVFGIWSLWEGFKEDGDSEELAEVEAELDAVFKSNKGESKTKTKAFSITFFGEWGDKSQIATIGLAADENPFGVVLGGIIAQALCTTAAVLGGKSLASQISEKMVELSSGVLFLLFGIMSLLSGPGEL

SEQ ID NO: 7950 - protein, 397 aa, Zea mays
  Clone ID: ZEAMA-23APR03-C3262_1.p
MFMENNGSTEDMGPRSFPVKEVHKIAVLDIRLANADRHAGNILVCKEGEGGNYKLIPIDHGYCLPEKFEDVTFEWLYLPREVMKMINLTIAGLEKGHLPVMSAEGSGGVYFMRDATGQKNVAVFKPIDEEPMAKNNPRGLPLSTDGEGMKRGTIVGGGAFREVAAYILDHPVSDSKSGHSFGFSGVPPTTLVRTSHRGKNFKIGSLQMFMDNNGSTEDMGPRPFPVKEVHKIAVLDIRLANADRHAGNILVCKEGEGGNYKLIPIDHGYCLPEKFEDVTFEWLYWPQAREPFSDETIEYIKSLDAEEDIKLLKFHGWELPPRCARVLRISTMLLKKGAARGFTPYDIGRILCRETVNRESEIEDIIQEAEDAVLPGSSENMFLETVSEIMDRHLDKE

SEQ ID NO: 7951 - protein, 211 aa, Zea mays
  Clone ID: ZEAMA-23APR03-C326_3.p
MSGIVFCSRHPEVKWAQRIDKVYITVQLPDAKDAKVNLDPDGVFTFSGSAGTNLYELKLDLNDKVNVEASKISVGVRSIFCIVEKAEAKWWKKLVRDDQRAPHFVKVDWDKWVDEDDDGADINMDGMDFSNFGGMGGMGGMGGMGDMAGMGGLGGMGGMGDLGGMGGMGMDDFEDESDDEEEVSKPQAADKAVEAEETESAETKIEAAQSS

SEQ ID NO: 7952 - protein, 223 aa, Zea mays
  Clone ID: ZEAMA-23APR03-C32748_1.p
MAAVAGVSEPPMVEQVITEFFAKSLHVILESRSPYDSSRNFTRPSPPSSPLAGSQPRDRWFNLALRDCPAALENFDLWRQSNLEPLVIDIVLLQRDNTRIASVEASRIIERWVIKYETSRSGNVIKNTDKNARSSCSQDHSLYRRAYIGSTVLFRSLYLVVRLLPAYHLFEELNSSGRICPLSLSHRISSFVEPFTRADAEMKHFAFAPIETLLSLSVVFAVT

SEQ ID NO: 7953 - protein, 559 aa, Zea mays
  Clone ID: ZEAMA-23APR03-C3283_23.p
MVWSAGMATMRGASAAALLVLALAAAVARAEDPYHFFEWKVTYGTRTIMGTAQQVILINDMFPGPTINCSSNNNILVNVFNMLDQPLLFTWHGIQQRKNSWQDGMPGTMCPIQPNTNFTYHWQPKDQIGSFFYYPSTGMQRAAGAYGLISVHSRDLIPVPFDTPADDFPVLIGDWYTKDHAVLAKNLDAGKGIGRPAGLVINGKNEKDASNPPMYNVEAGKTYRFRVCNVGIKASFNVRIQDHIMKLVEMEGSHTMQNDYDSLDLHIGQCLSFLVTADQKPGDYLLVASTRFIKEKSSTTAVIRYKGSSAPPPAKLPEGPSGWAWSINQCRSFRWNLTASAARPNPQGSYHYGQINITRTIKLAMGRGKVDGKERFAFNGVSHVDPETPVKLAEYFNASDGVFKYNLIGDVPPSNTAPTKMAPNVISAEFRTFIEVVFENPEKSIDTIHIDGYAFFAVGMGPGKWTPASRSTYNLLDTVSRHTIQVYPRSWTAVMMTFDNAGMWSVRSNIWERQYLGEQLYVSVISPERSLRDEYNMPETSLRCGKVVGLPMPPSYRAV

SEQ ID NO: 7954 - protein, 265 aa, Zea mays
  unsure (1)..(265): unsure at all Xaa locations
  Clone ID: ZEAMA-23APR03-C32845_1.p
MRDMPVVRRQEPTVVRTEDDVVSGGEDSDGEFEFPSVSRESAAGXWRAPRLADELFAGGHARAFYPVFGRVLDEAAAPAPRAPLGRLFQLEQARTSSVASTSSSSSSSSASTAAGTGADLDGVGASPDSYCVWTPGSSPASSPSRPPRKSGSTGSIARWRRIGELVVGRSRSDGKDKFLFLSAPPSPARDREHAPASKAKAKLPPKGSKAAATELDTVSAGRRLSYGGGGAKASTGGRRTFLPYRQDLVGLFASVHGLSRSPHPL

SEQ ID NO: 7955 - protein, 228 aa, Zea mays
  Clone ID: ZEAMA-23APR03-C3285_12.p
MMLFVSPPFNDCIGNAGPVSAMIGNRLESRPISASPSFSSSLVAYKGSAKTFNLVEMERATLGFDESRIIGEGGFGRVVLRGLEDTTPLPVDVDDKQAISPGRRQQQHAMALDTCSYDDCWVLPPLDCWDWASELLFHTLEGAGAAAVFPETPGVQSSSEASSGYQHDAIAPVSDRRNKRQRMAAATTTPPSRRPATVCEDPQCLLAVSVTVLHPIQMAMVCIPAAGY

SEQ ID NO: 7956 - protein, 515 aa, Zea mays
  Clone ID: ZEAMA-23APR03-C3285_4.p
MASGGSAARDAYDEEAAVRRPLELDSRDAAASSSDHWPGGNAMPRYQVGLTKDDSSSRHSEWRQPSTDDVRKSKLGPRYFTAFGVDLSPDNMAVAIVYFVQGVLGLARLAVSFYLKDDLHLDPAETAVVSGFSSLPWLIKPLYGFISDSIPLFGYRRRSYLFLSGLLGALSWSLMATVVSSKYSAASSILLGSLSVAFSDVVVDSMVVERARGESQSTSGSLQSLCWGSSAFGGIVSAYFSGSLVDTYGVRFVFGVTAFLPLMTSAVAVLVNEHRISSGERTTLHSGSGFVESSKQHVRQLWTSVKQPNILLPTLFIFLWQATPQSDSAMFFFITNKLGFTPEFLGRVKLVTSFASLLGVGLYNYFLKEVPLRKIFLVTTIIGSALGMTQVLLVTGLNRKFGISDEWFSIGDSLIITVLGQASFMPVLVLAAKLCPPGMEATLFATLMSISNAGSVTGGLVGAGLTRIFGVTRDTFGNLPLLIVVCNLSSLLPLPLLSLLPEESGDTDNGETKNI

SEQ ID NO: 7957 - protein, 310 aa, Zea mays
  Clone ID: ZEAMA-23APR03-C32915_1.p
MQRGGDQAGASLGMEMGVGYAGGGGGGECSSSSAAAAAAAAAEGEERQLLKGEIAVHPLCEQLVAAHVGCLRVATPIDHLPLIDAQLAQSSGLLHSYAAHHRPFLSPHDKHDLDSFLAQYLMLLCSFREQLQQHVRVHAVEAVMACREIEQSLQDLTGATLEEGTGATMSEDEDEAPMLEVGLDMGSDGHDMMGFGPLMPTDSERSLMERVRQELKMELKQGFKSRIEDVREEILRKRRAGKLPGDTTSILKQWWQEHSKWPYPTEDDKAKLVEETGLQLKQINNWFINQRKRNWHNNSQTSTLKSKRKR

SEQ ID NO: 7958 - protein, 315 aa, Zea mays
  Clone ID: ZEAMA-23APR03-C32915_2.p
MQGGGGDQAGGSLGMGMGVGYAGGGGAECSSSSVAAAAAAAAAAAEAEERQLLKGEIAVHPLCEQLVAAHVGCLRVATPIDHLPLIDAQLAQSSGLLHSYAAHHSPFLSPHDKHDLDSFLAQYLMLLCSFREQLQQHVRVHAVEAVMACREIEQSLQDLTGVTLEEGTGATMSEEDEDEAPMLEVGLVDMGSDGHDMMGFGPLLPTDSERSLMDRVRQELKIELKQGFKSRIEDVREEILRKRRAGKLPGDTTSILKQWWQQHSKWPYPTEDDKARLVEETGLQLKQINNWFINQRKRNWHNNSQTSTLKSKRKR

SEQ ID NO: 7959 - protein, 437 aa, Zea mays
  Clone ID: ZEAMA-23APR03-C32952_2.p
PLDSPPPQASSMIGCAKPLAAPLQAWARPPSPAGRRLPPSFCAPDTSPALTRAVESPGQSQSDDAPPPRSGDAASSLAPRASSHLDRWSRSRALRSGHRPALNRAALSSASVSAPPVIKSPRPEDAAVAVEDGEDDDVCEAERDAAAGKAIYIVSDGTGWTAEHSVNAALGQFENCLADRGCAVNTHLFSLIDDMDRLIEVIKQAAKEGALVLYTLADPSMAEATKKACDFWGVPCTDVLRPTVEAIASHIGVAPSGIPRSSPSRNGRLSEDYFQRIDAIDFTIKQDDGALPQNLYRADIVLAGVSRTGKTPLSIYLAQKGYKVANVPIVMGVDLPKSLFEINQDKVFGLTINPAILQAIRKTRAKTLGFDGRQSNYAEMDHVRQELVHANQIFAQNPSWPVIAVTGKAIEETAAVILGILHDRKQKCSMPRISKRY

SEQ ID NO: 7960 - protein, 106 aa, Zea mays
  unsure (1)..(106): unsure at all Xaa locations
  Clone ID: ZEAMA-23APR03-C32966_6.p
MASAAKTLARVGSSLFGRILASPSSSIPRAGLPLARLQPHVPPPAPXGLDAYEAETVARLSSLPGEISFPCGLPSLRFFIDDXKSTKGGRKVIARRIAKGRHRISV

SEQ ID NO: 7961 - protein, 101 aa, Zea mays
  Clone ID: ZEAMA-23APR03-C3303_2.p
QEPDRKRKKAAKKTCYESSDAPPSSDQQEKRCAHCLSSKTPQWRAEPLGPKTLCNACGVRFKSGRLLPEYRPANSPTFVSCLHSNSHKKVMQMRQAVAQQQ

SEQ ID NO: 7962 - protein, 279 aa, Zea mays
  unsure (1)..(279): unsure at all Xaa locations
  Clone ID: ZEAMA-23APR03-C3308_1.p
LGEQTKPALATASNERVGEGKGLGGYVKSLTDEQMEVLRKQISXYATICEQLXEMHRVLTEHQDIXAGMSVXNLYCDPLIIPGGHKITARQRWQPTPMQLQILESIFDQGNGTPSKQKIKEITAELSQHGQISETNVYNWFQNRRARSKRKQAAASLPNNAESEAEADEEPLADKKPKSDRPPPPPPPIQDNTKATGALSADRVSGGTRHLDTGHDQTSGVMYGCNDSGLLRSSGSSGQMSLYENFMSNPRIDRFPAKVESSRSFPHLQQHGEGFGMFG

SEQ ID NO: 7963 - protein, 296 aa, Zea mays
  Clone ID: ZEAMA-23APR03-C33157_2.p
RNNGDGHGQARPSHGPRGRQLQRRQRVGAADEPPPDADGAGRPVEVAKERLQEDYVVSAAAPLIHALRPLLGSAGDLGRRAGVPCDSWRLAVETYNKRDWTTVPASCERYVGHYMLGGHYRRDSRVVIDEAIAYAEGLKLGGNGKEVWVFDIDETSLSNLPYYATHGFGTKLYNATSFNEYVLEGSAPVLPETQRLFKKLVSLGIKPVFLTGRTEDQRAITVTNLRRQGYSGWMTLLLKPVGLKATAIAYKSGERQKLQDAGYVIVGNIGDQWSDILGAPEGARTFKLPDPLYYIG

SEQ ID NO: 7964 - protein, 317 aa, Zea mays
  Clone ID: ZEAMA-23APR03-C33206_3.p
MSSSSSSSSSSAASAATVFPRSPQLPPPVLVENGLTPLHQLTPVAAAAPAAEQLCYVHCYFCDTVLVVSVPTSSLFKTVTVRCGHCSSLLTVDMRGLLFPGTPTDTVAGAAPPPAADTSTTTTTITTAPPPANSVNNGQFHLPHSLNHPHHQSLLVDEISSAANPSLQLQMEQHGGLGGLILGGSRNTAAPPPPQPPAAGKGAKEPSPRTNPAVNRPPEKRQRVPSAYNRFIKDEIQRIKAGNPNISHREAFSAAAKNWAHFPHIHFGLMPDHQGLKTTSLLPQGHQRKDGLLKEGLYAAAAAAAAHAAANMGIAPY

SEQ ID NO: 7965 - protein, 459 aa, Zea mays
  Clone ID: ZEAMA-23APR03-C33219_1.p
MAAPCGGRVVVFPFPFQGHFNPVMRLARALHARGVGITVFHTAGARAPDPADYPADYRFVPVPVEVAPELMASEDIAAIVTALNAACEAPFRDRLSALLSAADGEAGEAGGRVRCVLTDVSWDAVLSAARGLGVPALGVMTASAATFRVYMAYRTLVDKGYLPVREERKDDAVAELPPYRVKDLLRHETCDLEEFADLLGRVVAAARLSSGLIFHTFPFIEAGTLGEIRDDMSVPVYAVAPLNKLVPAATASLHGEVQADRGCLRWLDAQRARSVLYVSFGSMAAMDPHEFVELAWGLADAGRPFVWVVRPNLIRGFESGALPDGVEDRVRGRGVVVSWAPQEEVLAHPAVGGFFTHCGWNSTVEAVSEGVPMICHPRHGDQYGNARYVCHVWKVGTEVAGDQLERGEIKAAIDRLMGGSEEGEGIRKRMNELKIAADKGIDESAGSDLTNLVHLINSY

SEQ ID NO: 7966 - protein, 198 aa, Zea mays
  unsure (1)..(198): unsure at all Xaa locations
  Clone ID: ZEAMA-23APR03-C332207_1.p
HKLERWPGRTSRQWRGAAAPTNMRRAVVRLGLGNAVQIGEGVYGEDGGDGERSVGDTADEAVGARGGARRRRRAGVHPPTSPELQRHCNTTSSMLPPNSSSSIREKNDTAAGKGHRRVEARRRARHVAWGVRVEVEGWMDEHHATRAPSSCTQARWRRAWGRESRRAEGGGVPGASVIRGRRKTRAGAKITXGGTVRW

SEQ ID NO: 7967 - protein, 192 aa, Zea mays
  Clone ID: ZEAMA-23APR03-C33283_4.p
QRPMQVSAYAVALIPCRFLGTNSRALESSTARPAQPNRCDDCAGEAGAEVRGDAGRYPRQERGGAQGQGQGQRRHEWARQGPRAATPAAPAARVAEAELPAALPGASAAHAGLGVVRPAVVGAVHVLGHRDHHHGGRPFFFFLSIIKSRSRCALFSSLSFLNLSYNLKFPSEHMDNKTESTEGSSSACEQRN

SEQ ID NO: 7968 - protein, 202 aa, Zea mays
  Clone ID: ZEAMA-23APR03-C3329_3.p
MSDDGDRTCPLCAEEMDTTDQQLKPCKCGYDICVWCWHHIIDMAEKEETVGRCPACRTCYDKDRIVKMAATCDRTVADKNVEKKHKTQKVKPKAAPTAAATSTVESKKHLASVRVIQRNLVYIIGLPAHLCNESVLECREYFGQYGKVLKVSVSRPTGPPSQQASANSSISVRYTWSVRIICASTRTVTTILHQVDVHTSQI

SEQ ID NO: 7969 - protein, 84 aa, Zea mays
  Clone ID: ZEAMA-23APR03-C33329_1.p
MSYYGQQPPVGVPPQQGYPGKDGYPPAGYPPAGYPPPAQGYPPQGYPPQYAQPPPPQQQQSSGPSFMEGCLAALCCCCLLDACF

SEQ ID NO: 7970 - protein, 234 aa, Zea mays
  Clone ID: ZEAMA-23APR03-C3332_3.p
MEVGRAPRRRVSPAAAAAAVPSLLLFAVLFAGRAAAFGHLQAAGAGATALYKHASFFDRDGDGVVSFSETYGAFRALGFGFGLSSVSAALINGALGSKCRPQNATSSKLDIYIEDIQKGKHGSDSGSYDAEGRFVPDKFEEIFAKHAKTVPDALTSDEIDQLLQANREPGDYSGWAGAEAEWKTLYSLGKDKDGLLRKDVARSVYDGTLFHMLAPNWKSPDEEEEQELSVIRES

SEQ ID NO: 7971 - protein, 233 aa, Zea mays
  unsure (1)..(233): unsure at all Xaa locations
  Clone ID: ZEAMA-23APR03-C33413_2.p
MGKAEARSRGRGGGGGGGGGGGGGGASGNPGKIFVGGLPRDTTDATFVRHFGQYGEIVDSVIMKDRHTSQPRGFGFITYSDPAVVDKVIEDNHVINGKQVEIKRTIPKGSVQSSSKDFKTKKIFVGGLPSTLTEDEFKSFFAXYGTVVDHQIMFDHETKRSRGFGFIVFASEQVVDDLLANGNMVDLAGSKVSLKFIIEMTPMVVSSIVDLWCKICKVVFCILLFQVRLWWGI

SEQ ID NO: 7972 - protein, 118 aa, Zea mays
  unsure (1)..(118): unsure at all Xaa locations
  Clone ID: ZEAMA-23APR03-C33436_2.p
MSGVQEQFEIKFRLPDGIDIGPQXFPPASTVATLKETIIAQWPKDKEKGPRTVNDLKLINAGKILENNKTLSECKSPICDFSGMTTMHVVVRAPTSSKQSGKRAATKAKGFRCGCAIM

SEQ ID NO: 7973 - protein, 171 aa, Zea mays
  Clone ID: ZEAMA-23APR03-C3343_26.p
PPSSTVSPSALSGPNSASNSISSFLLALSTSSLVLYNSPTAPSLILEPSPFRFSMLYVASAGVSAGVELLVSSLRFRFFFPSSTTIPLAANSAAKASLAACSSRYSLFIFLPDNLFYIVFLPHCEGTNQPLHRRCQKGFLDQHCLHNFHLPLQDPSVAQSHLWSCRSCRSC

SEQ ID NO: 7974 - protein, 456 aa, Zea mays
  Clone ID: ZEAMA-23APR03-C334_4.p
MMLYNSMIKLYISKKKRTVRAYIKLRINGCQWTTYAWTGKLVIPLNREAPNFRSMIGMIDGRTELKPLPASGGPEDRRLQVVGVSAAAGSGGDDYYLDVESGSAAVPLVQQQYVNGRLVRLRTFSVFEVSMMAAKIAYENAAYIENVVNNVWKFHFVGFYNCWNKFVGDHTTQAFVFTDKAEDASVVVVSFRGTEPFNMRDWSTDVNLSWLGMGELGHVHVGFLKALGLQEEDGKDATRAFPKAAPNAVPGKPLAYYALREEVQKQLQKHPNANVVVTGHSLGAALATIFPALLAFHGERGVLDRLLSVVTYGQPRVGDKVFAGYVRANVPVEPLRVVYRYDVVPRVPFDAPPVADFAHGGTCVYFDGWYKGREIAKGGDAPNKNYFDPRYLLSMYGNAWGDLFKGAFLWAKEGKDYREGAVSLLYRATGLLVPGIASHSPRDYVNAVRLGSVASA

SEQ ID NO: 7975 - protein, 193 aa, Zea mays
  Clone ID: ZEAMA-23APR03-C33552_2.p
MGGLSVIAPPARDTASPQHRRARRAFLVSNYLILGCASGCGFLTLSLRLVPSVDGFLLILLHALTVAAAVAGCAVIAAPDPPRGRCYTAHMSATAVVSILQGAAAVLAFSRTSEFLAGGLRSYVREEDGAVILRMVGGLGVAIFCLEWVALALAFVLRYYAYVDRECGGNPLRRSAKVGGEDGAGTWPWPFQV

SEQ ID NO: 7976 - protein, 180 aa, Zea mays
  Clone ID: ZEAMA-23APR03-C33589_1.p
MGEQENNKIGGSGNDNAMAVDEAGAGAAANKGKSLGAADPRLQAISDAIRVVPHFPKPGIMFNDITELLLRPGVFRDAVDMFVERYRGMSIAAVAGIESYVLEYGMDCLEMHVGAIEPGERVVVVDDLVATGGTLSAAIRLLERAGANVVECACLIGLPKFKDFYKLNGKPVYILVESRK

SEQ ID NO: 7977 - protein, 265 aa, Zea mays
  unsure (1)..(265): unsure at all Xaa locations
  Clone ID: ZEAMA-23APR03-C3370_23.p
MAPLGDGGAAAAAASNNLVVSFGEMLIDFVPDVAGLSLAESGGFVKAPGGAPANVACAIAKLGGXDLGLVRRARVFHYGSISLISEPCRSAHMAAMRAAKAAGVLCSYDPNVRLPLWPSPDAAREGILSIWKEADFIKVSDDEVAFLTRGDANDEKNVLSLWFDGLKLLVVTDGDKGCRYFTKDFKGSVPGFKVDTVDTTGAGDAFVGSLLVNVAKDDSIFHNEEKLREALKFSNACGAICTTKKGAIPALPTVATAQDLIAKAN

SEQ ID NO: 7978 - protein, 335 aa, Zea mays
  unsure (1)..(335): unsure at all Xaa locations
  Clone ID: ZEAMA-23APR03-C3370_25.p
MAPLGDGGAVAAAASNNLVVSFGEMLIDFVPDVAGLSLAESGGFVKAPGGAPANVACAIAKLGGSSAFVGKFGDDEFGHMLVNILKQNNVNSEGCLFDKHARTALAFVTLKHDGEREFMFYRNPSADMLLTEAELDLGLVRRDRVXHYGSISLISEPCRSAHMAAMRAAKAAGVLCSYDPNVRLPLWPSPDAAREGILSIWKEADFIKVSDDEVAFLTRGDANDEKNVLSLWFDGLKLLVVTDGDKGCRYFTKDFKGSVPGFKVDTVDTTGAGDAFVGSLLVNVAKDDSIFHNEEKLREALKFSNACGAICTTKKGAIPALPTDATAQDLIAKAN

SEQ ID NO: 7979 - protein, 335 aa, Zea mays
  Clone ID: ZEAMA-23APR03-C3370_34.p
MAPLGDGGAAAAAASNNLVVSFGEMLIDFVPDVAGLSLAESGGFVKAPGGAPANVACAIAKLGGSSAFVGKFGDDEFGHMLVNILKQNNVNSEGCLFDKHARTALAFVTLKHDGEREFMFYRNPSADMLLTEAELDLGLVRRARVFHYGSISLISDPCRSAHMAAMRAAKSAGVLCSYDPNVRLPLWPSPDAAREGILSIWKEADFIKVSDDEVAFLTRGDANDEKNVLSLWFDGLKLLVVTDGDKGCRYFTKDFKGSVSGFKVDTVDTTGAGDAFVGSLLVNVAKDDSIFHNEEKLREALKFSNACGAICTTKKGAVPALPTVATAQDLIAKAN

SEQ ID NO: 7980 - protein, 336 aa, Zea mays
  unsure (1)..(336): unsure at all Xaa locations
  Clone ID: ZEAMA-23APR03-C3370_38.p
MAPLGDGGAAAAAASNNLVVSFGEMLIDFVPDVAGLSLAESGGFVKAPGGAPANVACAIAKLGGSSAFVGKFGDDEFGHMLVNILKQNNVNSEGCLFDKHARTALAFVTLKHDGEREFMFYRNPSADMLLTEAELDLGLVRRARVFHYGSISLISEPCRSAHMAAMRAAKAAGVLCSYDPNVRLPLWPSPDAAREGILSIWKEADFIKVSDDEVAFLTRGDANDEKNVLSLWFDGLKLLVVTDGDKGCRYFTKDFKGSVSGFKVDTVDTTGAGDAFXVGSLLVNVAKDDSIFHNEEKLREALKFSNACGAICTTKKGAIPALPTVATAQDLIAKAN

SEQ ID NO: 7981 - protein, 89 aa, Zea mays
  Clone ID: ZEAMA-23APR03-C33846_115.p
PNPRTHRRPGTPGDPPRRLLLFLYLSIDCIKGNLVFCESKGEYTSTYSANVPFGCSGLALCGVKVKQLLLVGQVIITSREPGFSINPSC

SEQ ID NO: 7982 - protein, 375 aa, Zea mays
  Clone ID: ZEAMA-23APR03-C33846_121.p
PCLHLVTLGVSTNFGLHRSEMNHSQGSRIIRGRGRNKRMWTSDEDDELVKALCEISADPRYKVEGGAFKNCYSQGIENILSQKLPGRGIKASPHVDSRLKVMKRKYYSIKDMIASTGFSWDDTRKMIQCEKQRYDEYCRDHPRAKGLYGVPFVYFDTFDAIYGKDSSAGEGLEGSEAAIANMENENINEVGDDEVEEDRMSTGISGRSLAATLSFKSQKKYNYDGKTNRTESNCPSLDKFKDVNVQFQNAIQHASTMAAAMELFKDVRDRFQNVVQHASEMAAAVELFNDAHSRFQSALQNVNTSAVIEQFKDALDHFQSITHNGKMVAAVEYGTEMQEKSMCEEPQRKAKVIAIAEVLKLGFSGIEVVTVTPGF

SEQ ID NO: 7983 - protein, 131 aa, Zea mays
  Clone ID: ZEAMA-23APR03-C33865_3.p
MTFKRRNGGRNKHGRGHVKYIRCSNCAKCCPKDKAIKRFQVRNIVEQAAIRDVQEACVYDGYVLPKLYAKVHHCVSCAIHAHIVRVRSREKRRDRKPPERFRRREDTPAGGTKEAPALVPGGCCSSSSSST

SEQ ID NO: 7984 - protein, 304 aa, Zea mays
  Clone ID: ZEAMA-23APR03-C33877_2.p
RTLPPLHLRWRRSTGGRPPFHGTATTRQHHPFLRRCGVGIVGFGNFGQFIAGGVQRQGHTVLAASRSDYSAYCAQHGIRFFRSVDALCEEQPDVLLICSSILSTESVVRAIPFHKLRPDTIVADVLSVKEFPRNLLLEVLPPGFGIICTHPMFGPESGKHGWGKLPFVFDKVRVADDGDQAATCDRFLSIFEQEGCRMVEMSCAEHDRYAAGSQFITHTIGRVLSQLNLRSTPINTKGYETLLQLTQNTVSDSFDLYYGLFMYNINATEQLDRLEMAFEKVRQMLSGRLHDFIRKQIVERADPS

SEQ ID NO: 7985 - protein, 109 aa, Zea mays
  Clone ID: ZEAMA-23APR03-C339395_1.p
RGGAGRRPLGARQGGVGHQGGWRRCPHASRLEPPRRLLRATPWDPTLGSPVYLDINNAVTMMQWEVEAITLRQASSALPRPTEVSSTSTFLAIPSVDLGAVTSQFSSQG

SEQ ID NO: 7986 - protein, 129 aa, Zea mays
  Clone ID: ZEAMA-23APR03-C3395_5.p
PVPKVEKGKRRAQHSTAQHKHAFRFGKARRGEPRPRESCGEGIGGGGDGGAGEARVPGQACRAGGAVRRACQVAKQAFDEALTEIIAGEGVYKDSTLMMQLLKDNLALWTSELTGGEASKGSDDVDMEG

SEQ ID NO: 7987 - protein, 378 aa, Zea mays
  Clone ID: ZEAMA-23APR03-C3402_2.p
MSFRTEATGEGSEAFSVSELRPAGDAFDGIKKQSSMLSIYQQQRQFGHNSSQATAQQQYPAAAHRQRSQVADYGAAAPHRLPGGGGGGCRLVQPVSVRHPVPFHQANLMVRSSVSQSFHNQQPFTMSNNGFGGSTAGVYGARNPRNQASTQLTIFYNGSVNVFDNVPVDKAKELMMLASRASVPGATPSSEPDSPPVPAPAPAKVNVAEVFPGARQIAVQKPEPCVPHLSSAATASPVRIVVPQAVAPSRSTSHCATEACGSKPAAAPTSQTVSSSRQLAAASAAAAVTPRAVPQARKASLARFLEKRKERVASVEPYLTSNSKSPLESSDAVGSASAPTKSSSTDVAPASSHNGGGAELVRHGGYPRSISFSTNLQI

SEQ ID NO: 7988 - protein, 383 aa, Zea mays
  unsure (1)..(383): unsure at all Xaa locations
  Clone ID: ZEAMA-23APR03-C340_71.p
MATPRSPSPRAEAPLDSAPLLGGASGGGSRRRGGALRRPSLRGAARLLRRGGRRAMREPSVLVREAXXEHLEERQADWAYSRPVVALDLLWNLAFITVAAVVLVLSRXEDSPMPLRTWVAGYALQCXVIHMVCVAIXSNRMXHGQRGGAGAAPADEXRGSDGSSSSSDEDDRELDRHGRRTDYASIAKHLESANTMFSFIWWIIGFYWISAGGEEVIRDAPQLYWLCIVFLAFDVFFVVFCVALACIIGIAVCCCLPCIIAILYAVSDQEGASEDDIRQIPRYKFRRTDEPEKQDVDPMGPFGGIMTECGXPNQPIEKVLAAEDAECCICLSAYDDGAELRELPCGHHFHCTCIDKWLHINATCPLCKYNIRKSNSSSGSEEV

SEQ ID NO: 7989 - protein, 191 aa, Zea mays
  Clone ID: ZEAMA-23APR03-C34131_1.p
MSGRRQAWQFAAALIFFHGSEYVLAAAFHGRQNVTATSLLISKQYVLAMGFAMLEHLTEILILPEVKEFWFVSNIGLLMVIIGEIIRKLAVVTAGRAFTHVIRTYYEDQHQLITHGLYRFMRHPGYSGFLIWAVGTQVMLCNPLSTVAFTLVLWRFFSKRIPYEEFFLKQFFGSEYDEYAQRVHSGIPFIK

SEQ ID NO: 7990 - protein, 393 aa, Zea mays
  Clone ID: ZEAMA-23APR03-C34138_2.p
MGGCGLGRGRRTACLLLLLPPLLLFAVADAAASGKEKQGVSGKLRFRRESGTFKVVQVADMHYADGRSTACEDVLPSQVAGCTDLNTTAFLYRVFRAEDPDLVVFTGDNIYGADSTDAAKSMDAAIAPAIDMKLPWAAVIGNHDQEGTLSREGVMRHLVGMKNTLASFNPEGIEIDGYGNYNLEVSGVEGTSMDEKSVLNLYFLDSGDYSTVPSINGYGWIKASQQVWFQQTSSSLQAKYMNKNPKQKEPAPGLVFFHIPLPEFSSFTASNFTGVKQEGISSASINSGFFASMVEAGDVRAAFVGHDHINDFCGKLSGIQLCYAGGFGYHAYGKAGWSRRARVLSVQLEKTDSGEWRGVKSIKTWKRLDDKHLSTIDSEVLWNRGSNDRNGAP

SEQ ID NO: 7991 - protein, 228 aa, Zea mays
  Clone ID: ZEAMA-23APR03-C34165_1.p
CCIENEHQQSSFDLFDYDQPTTGRLGNSLSLNSTRMMNLIVTRMMNLIVTRMMNLIVTDTSREGEGGGDERVDARIYLLGRRRRRGPAQKRLLLQLEVVELLLPVHLDDQRHHQHQEGCPRDPRRLPRAPQQLLRHGRRLSPVRRHLRTGEGGQDAVPAVAAALAESRRRRHSRERDLGFSGRHGGKGNERCSAAASSPRPPPLARAPPPANGRGRPGCRPRRRRRAC

SEQ ID NO: 7992 - protein, 148 aa, Zea mays
  Clone ID: ZEAMA-23APR03-C34191_8.p
MALLAVQGMAMSTAAAALPSHNHGAVSSYVSTSSYALAASAAFPRARAAFAVGTVLSATVTPVLDVLNFIWSCSVYCGRGDKKTKRGKRFNHSYGNARPRNKKKGTGPARLFAPPAPPRKVAPPAPPRKDQFDDGEIISIEIDEDILE

SEQ ID NO: 7993 - protein, 132 aa, Zea mays
  Clone ID: ZEAMA-23APR03-C34287_10.p
LPSPLRHAHCAIASEPSVCSPFKHLDVLSRSPSSLQNNYHIALLQYQAMEVADHNSFPWPHLPGIPHHVATAAASSLWPAKDSSRPASLAVRRRHKIAIRFQASRNRQSSFGDQVIKFVEFYEIEDPEHLFW

SEQ ID NO: 7994 - protein, 114 aa, Zea mays
  Clone ID: ZEAMA-23APR03-C3437_2.p
MASTAGYLARRAAQKERVRLLYRRALKDTLNWAVHRHLFYQDASDLRDKFEANRHVDNLDVVDRLIDDAEAQYRNFQHPDPYIVPWAPGGWEVPCANCETVYCDLQILLLECPE

SEQ ID NO: 7995 - protein, 249 aa, Zea mays
  unsure (1)..(249): unsure at all Xaa locations
  Clone ID: ZEAMA-23APR03-C3437_5.p
LAIYIASRAGFLFPVQTVQRRRAGTTTRXNAFFTSLARGLDDLGRAGGLSSLSALLRAAALLRGLHSQXTLMVGQLHLPPGGRWLDEYMDETARLWDACLALKLGLASVERYCAAASCAAAALDDWLQDPSPLSTRQVMPGXIPVSRREAMAXARRRTRALADARIAPLSLHLDERLLLRATDARLAGFNGFRGLLYALHNASSLLLLILASGAVSCAAAAGGPCAAADDAGSDGFTASIAMLQQRLAE

SEQ ID NO: 7996 - protein, 102 aa, Zea mays
  unsure (1)..(102): unsure at all Xaa locations
  Clone ID: ZEAMA-23APR03-C34439_1.p
MKASNAAALVALLLVGVAAGAAGAIKLCGVDRSAVDACTPXCVSGSAQAAPGQLCCDKVKSARWSCLCDYRSALPSGIDAARVMDLATKCKCDYPPASCDAN

SEQ ID NO: 7997 - protein, 137 aa, Zea mays
  Clone ID: ZEAMA-23APR03-C3443_11.p
MADSKATSAVTSALGKFMTNRLLARKQFVLEVIHPGRANVSKAELKERLAKMYEVKDPNTIFVFKFRTHFGGGKSTGFGLIYDNLESAKKFEPKYRLIRNGLATKVEKSRKQMKERKNRAKKIRGVKKTKAGDAKKK

SEQ ID NO: 7998 - protein, 201 aa, Zea mays
  Clone ID: ZEAMA-23APR03-C34537_1.p
PFFLFRDQAGLPQGTKGALPGESPPKLGQNRTRPPAPWPPIAVSAPFFPASPVQLTSRPPSAADTAKCESKPPPRTNHGTGGGGAAPAEGVGARGARRLRRRLPHPHLAKVRLRVRACRMRVVLAAGRSQTTLPARPVSSSRLASDGLLASPNCGRLMKCASAWNRVRACSAGLANRRAGGRNLASRVAGCFRLPSEEVCG

SEQ ID NO: 7999 - protein, 463 aa, Zea mays
  Clone ID: ZEAMA-23APR03-C34551_1.p
MAEDGGKAAAATAAEAGGGGAKEGGEERTVKLFVGQVPKHMAEADLLALFREVAAVDEVTVIKDKATKVSRGCCFVICPSREEADKAVNAYHNKQTLSGVCEHTTNLVLAASPLQVKYADGELERLEHKLFIGMLPKNVTDTELTDLFSKYGNVTDLQILRGSQQTNKAGCAFIKYQTKDQALAAIEALNGKHKIEGSSVPLVVKWADTEKERQARKAQKAQSQLSHIPNASPMQQHSSVFGALQMGYMPQYNGFGYQPTGTYGLMQYPLSPMQNQGPFQNMVQPLNQGNSIRGVNPEVSPSSVQRSFNAMQLGSPYPAMPGMQYPGSYPGGPMGNRHLGNSHNPIKVPNSNANSTVSSSPSSNAGGQVEGPPGANLFIYHIPQEYGDQELSSAFQSFGRVVSAKVFVDKATGVSKCFGFVSYDSPASAQAAINRMNGYQLGGKKLKVQLKRENNTKHSSKPF

SEQ ID NO: 8000 - protein, 378 aa, Zea mays
  Clone ID: ZEAMA-23APR03-C34610_2.p
MERMVMRLVRNKQSLRQLQGAAAGGLASSSSASSTAGAAASSFSTLQQQQEDHPGVLNIRDTAAHLIGRTPLVYLNKVTEGCGARVAAKLEFLQPSFSVKDRPAISMIEDAEKKGLITPGKTTLIEPTSGNMGIGLAFMAALKGYELVLTMPSYTSLERRVVMKAFGAQLVLTDPAKGMGGTVRKATQLYENHPSAFMLQQFENPANVQVHYETTGPEIWEDTLGQVDIFVMGIGSGGTVTGVGKYLKEKNPNAKIYGVEPAEANVLNGGKPGPHLITGNGVGFKPDILDMDIMEKVLEVKSEDAVTMAQQLALQEGLLVGISSGANTVAAIELAKRPENKGKLIVTVHPSAGERYLSSALFEGLRKEAEAMQPVPVD

SEQ ID NO: 8001 - protein, 355 aa, Zea mays
  unsure (1)..(355): unsure at all Xaa locations
  Clone ID: ZEAMA-23APR03-C34639_1.p
MESEHHLFEIAAARLERSSAFLDEDYSSWSPCIQGYHWRCVCSADPAAGTASFTVSLPYSSTREPLNASFKLSLLDRGGLPVPSRTRATLFQNCLIQQMWQLECPGFLTRDDLERQEYYLDNDGGRCFHVRCDIAIKPFAAATAGDGDGDVAVPPSDDLHRHLGDLLARKDGADVTFQLVDAGETFSAHRCVLAARSPVFRAQLFGEMMESNKGTGVVIPVEDMEAQVFSALLAFIYTDSLPPETDSDDDDDEXEAMVHYQLLLAAADRYGVDRMKLVCQEKLCKHIRADSVATMLVLADRHHCPALKEACFRFLSSSANLASFTETTDGFEVLNASCPAVLKELLAKLATVLIF

SEQ ID NO: 8002 - protein, 346 aa, Zea mays
  unsure (1)..(346): unsure at all Xaa locations
  Clone ID: ZEAMA-23APR03-C346769_1.p
MSIYYPAKSPKGPVAAFPLRSALVFFVTSFGFYVCYFSSRQIIALETEAETTASGGGAEPTETRCTNRPAIIPHGPQTRYVHFPRPATYDRGECVCNPVRFFVIVSTQRSGSGWVEALLNSHPNVSSNGEVFSMRERRQNLSSVLGTLDRLYGMDWLTSAAKNECTAAFGFKWMLNQGLMENHRDIVNYLNRKGAMVVFLFRRNTLRRLISVVANNYDRRARQLNGVHKSHVHSKEEAEVLARFRPELDAPALIPSIRTAQRAVRACLRRFGSTRHMVLYYEDVVRDSRKALSRVQEFLGVPARELSSKHVKIHTRPLPDLVGNWEEVRRTLXGTEYSRFLDDDAE

SEQ ID NO: 8003 - protein, 142 aa, Zea mays
  unsure (1)..(142): unsure at all Xaa locations
  Clone ID: ZEAMA-23APR03-C34703_1.p
MRHMSSXTTPSAASAADLRGAGTSGSQSSGPSDPEPNPLFQLHRPPPSPPPEPPRPGPSLPEKXSPASAGGLDRPVRGRVRARRRTVAVADEDGRRRMVVEEDVAGWGDDEANGRRTSGLAGGEEAAGAAEAEISMGGPEGW

SEQ ID NO: 8004 - protein, 312 aa, Zea mays
  unsure (1)..(312): unsure at all Xaa locations
  Clone ID: ZEAMA-23APR03-C34706_1.p
MEGVISTSPGARIAVVTGGNKGIGLEVCRQLAGNGITVVLTARDETRGAAALEELRALGLSDVVFHLLDITDASSIARLAGFLKARFGRLDILINNAAFGGVEYARGPAAAAAGSVTSEEELSGMDRDQRLECLWRNTRETYDAAKXGLLTNYYGTKHVIEALLPLLRASSDGRIVNVSSDFGLLRFFRNEELKQELHNVEKLTEGRLDELLDAFLEDFEAGEADARGWPAAFAAYKVGKAAMNAYSRILAAEQPTLRVNCVHPGYIKTDITLRSGLLTPEEGAGNVVKVALLPGGGVTGAFFEDGQETSFV

SEQ ID NO: 8005 - protein, 268 aa, Zea mays
  Clone ID: ZEAMA-23APR03-C3473_1.p
MVRKPIHADDAGAKSTEASKERKGLWSPEEDERLFTHITYHVVSTWSSVAQLAGLRRSGKSCRLRWLNYLRPDLKKEPISKREEETIISLQQSLGNRWSTIAARMPGRTDNEIKNYWNSRIRKRLNAAASRAAGCGDGGDSAAEPSGAAAAGGKEDSANAAPPPAAQPTPIPARFPVFGCQLPDGAGGGISSPGSGKSPQSSTTASMRQNAGDESDASDGGGGDSDMVHFLSFDDLDYPGDLLIDVPGAMDAWESQLCYANPMMSSLC

SEQ ID NO: 8006 - protein, 425 aa, Zea mays
  Clone ID: ZEAMA-23APR03-C34835_1.p
MDASAATPAPGPSFSGAESSAAAAQPPAEAPQLRVHGAGSGSGVARACRHHAYSRKQKSLGLLCSNFVALYDREDVEVIGLDDAAKRLGVERRRIYDIVNVLESVGILVRRAKNRYTWLGFGGVPAALKELKERALRKMSGSPVLLSMEDSSTANLSDDEDDEKLGDADEDAESEKLSQPVDNTSDKPDAPSCRLRSDHRKEKSLGLLTQNFVKLFLNMEVGTISLDEAARLLLGEGHADSNMRTKVRRLYDIANVLSSLNLIEKTQQADTRKPAFRWLGQAKRKQDNNVMVSVPPSMKAMPNKRAFGTDLTNIDNKRGKLDSAAENKVKLMQGAGNIVKTFERQLVQGKRSDFVYGPFHPAGAKKHETDDQTVKQQERKNIQDWENLAVSFRPQYQNQALNDLFGHYVEAWKSWYVDLTQETAS

SEQ ID NO: 8007 - protein, 143 aa, Zea mays
  Clone ID: ZEAMA-23APR03-C3495_3.p
MALAAIYNLFIINKSGGLIYYKDYGSAGRMDTNDSLRLASLWHSMHAISQQLSPTPGCTGIDLLQAHNFDLHCFQSLTGTKFFVVCETGAPNMEMLLKVIYELYTDFVLKNPFYEMEMPIRCELFDHNLAQMIQKDRVALLGR

SEQ ID NO: 8008 - protein, 62 aa, Zea mays
  Clone ID: ZEAMA-23APR03-C34991_3.p
MGKVHGSLARAGKVRGQTPKVAKQDKKKKPRGRAYKRMQYNRRFVTAVVGFGKKRGPNSSEK

SEQ ID NO: 8009 - protein, 155 aa, Zea mays
  Clone ID: ZEAMA-23APR03-C350024_1.p
LFLRRNSSLKNIIGRNNFVTSRICGTEVIATTAAVNEALTVSGAASTAAEHFRAHAQSSAAASMEPRTGDSEARVTDQAKLGNDVANLTAQVTWMRMGEWGEGGRGGEEKPRWGIRGGGGRRRTNPRADGANGRRRGGTDEDHSQGQEANQRAAN

SEQ ID NO: 8010 - protein, 114 aa, Zea mays
  Clone ID: ZEAMA-23APR03-C35010_1.p
MDEGATTSDSSAAETFDPDLVHAIFKLVWRRRAGKGAAGGGGIEDIDAERAPETSRRNRSTTANANALKVSCELLRIFVTEAIQRSAFIAEAEDGAVIEPTHLERVLPQLLLDF

SEQ ID NO: 8011 - protein, 241 aa, Zea mays
  unsure (1)..(241): unsure at all Xaa locations
  Clone ID: ZEAMA-23APR03-C3504_1.p
MLLRMNGGGGEGSDYGSSDAGSYEYDEEGEDYEEELEHHLRVHHHEHPSGDGDGEGEGEGAEGSDYDGRSTXEDEEGEPEVDPAEFENDEAYARALQDAEEREVAARLMALAGLSDWRTVDVEHEEDHVNDPQEAWQEVDPDEYSYEELVALGEVVGTENRGLSADALASLPSVTYKMQSVQDGNTEQCVICRVELEEGESLIALPCKHLYHPECINQWLQINKVCPMCSAEVSTSSNKEP

SEQ ID NO: 8012 - protein, 280 aa, Zea mays
  Clone ID: ZEAMA-23APR03-C350638_1.p
MDVGAKEEEMGQVWWGHRAWSLLSAVRARAPLVQCITNLVSMDIAANVLLAAGASPAMVHSLREVPDFTPRCDAVYVNVGTLSEDWLPSMRAAASAGRPWVLDPVAAAASGFRMKACLELLSLCPAVVRGNASEILALASRSTAASSNFKGVDSSHCSVDAIEAAKALALSSSAVVAVSGAVDFVTDGKQVISVSNGVPMMQKITATGCAVTALIAAFVAMEPSDAIVAAACALAIFGLVGEIGMESAKGPASLRMHLIDALYCLNEETVTSRVRISLRP

SEQ ID NO: 8013 - protein, 481 aa, Zea mays
  Clone ID: ZEAMA-23APR03-C3508_2.p
MAADALRGLLPGVYAVLMVIAVTSAASSDASSVVVGLAKCADCTRKNLKAEAAFKGLEVAIKCKNSKGEYESKAMGKLDGFGAFSIPLSTDLHGADCVAQLHSAAGNPCPGQEPSRIVPQSSKGNFVVVPGKTDYPSKECASATLCGSIKKHLLDHFHKKPVPPKPKPEPKPELEPKPEPKPEPENHPPTPTYGSSTPIYHPPSRQLFDKKHMFDNFHKHHDYHHFFDHFHKKPVPPKPKPEPKPEPKPKPQPEYHSPTPTYGSPTPIYHPPARHLFDKKPLLDHFHKDHDYHHFLDHFHKKPVPQKPKLEPKPQPKPEYHPPTPTYVSPTPIYHPPAETEMKYDKKHFDHFHKDHDYHHFFDHFHKKPVPPKPKPEPEPKPKPQPKPEYKPPMPTYGSPTPIYHPPAKKEVAFDKKHFLDHFHKDHDYHHFFDHFHKKPVPPKPKPEPKPEPKPQPEPEYHPPTPTYGSPTPIYHPPAKH

SEQ ID NO: 8014 - protein, 423 aa, Zea mays
  Clone ID: ZEAMA-23APR03-C35120_1.p
MSTGLSQLSGGVGGDRGSSSSAGPHHQHSHHPPPPPPPKILLAKPPLPHASSSGADDDGGTGVAGGRARQAPQPGSLSLVSDAWEAHTDKILPYLTENNDFMVIGVIGPPGVGKSTIMNELYGYDASSPGMLPPFPTQTEETRLMGKHCTTGIDIRISNERVILLDAQPVYSPSVLIDMMRPDGSSTIPVLNGEPLSADLAHELMGIQIGVFLASVCNIVLVVSEGMNDLSMWELMLTVDLLKHGIPDPSVLTSSASQDKENKNEDQTGCEDYISDLCFVHTRLQGQDFSPSKFMLLRRTLEKHFNSSTFRVGSSNATGHASDSLVPSSTKVEDLTSSRQDIFLLPLRGHDDSTKFEYGTYSCMLGMIRDQILSWPARSFSKNLSERDWLRSSARIWDMVKKSPVISEYCKALQSSGWFRKQP

SEQ ID NO: 8015 - protein, 886 aa, Zea mays
  Clone ID: ZEAMA-23APR03-C3514_1.p
METGAAAAPASRADGVRRCKILVPWRFQPGFVRQPLKQAANDAAVNGDGGNTAGAPDAKSCRADGAASDGGETNVFRDAKKFGSGRATRGKNGEVDGGEEHSERCTSSQSLKSPDVENGGRPGPGDACNLGESVRGGWVKSSPLEGTGNSRGANGGVEAGEDYNLGSSNCDASWKDARTQEFRGAGDGAACDPEVIESNVGAEKCFAKGLKKPFMDQTGSKSNGSSAPGLESEDPEGNVGLEDSSYQAAKGCSMGDGAAKENEATANGCSSATPGSIGNGTYVRKGRKAAVPWRFQARYKRSFSDAFGSNNESPDLPAYMFDSSSTQCTPATRSTVRCYASAHSGVRVSAMNNFSVKGDTECKKRKTNNDYQDESMLNNGGVVVRERIMRSLQDLRLIYRDLLDEEDNSREKVLNVRPDLKAYRIFRERFCTDFDDEKYIGSVPGIYPGDIFHLRVELCVVGLHRPHRVGIDCTKKDDGTTVAVSIVSCAQSHDIKYNLDAFVYTGLVAVAVNQRIEGTNLALKKSMDTNTPVRVIHGFTTFNGKKKFPAYIYGGLYLVEKYWREKEHGDRYVYMFRLRRMEGQKHIDIQEILQTGNSGSNDNVIIKDLSRGLERVPLPVVNKISDERPMPYCYISHLRYPRNYRPTPPAGCNCVGGCSDSNKCACAVKNGGEIPFNDKGRIVEAKPLVYECGPSCKCPPTCHNRVGQHGLKFRLQIFKTKSMGWGVRTLEFIPSGSFVCEYIGEVLEDEEAQKRTNDEYLFAIGHNYYDKSLWEGLSRSIPSLQKGPGKDDENETGFAVDASEMGNFAKFINHNCTPNIYAQNVLYDHEDISVPHIMFFACDDIRPNQELAYHYNYKIDQVHDANGNIKKKKCLCGSVECDGWLY

SEQ ID NO: 8016 - protein, 385 aa, Zea mays
  unsure (1)..(385): unsure at all Xaa locations
  Clone ID: ZEAMA-23APR03-C3518_5.p
MSDRYFHRLLDLHLHANDDLFFPFPTPASSCPYITASSAHHRFLLDDHPFYPTSCPLGITSRSPIDDTFDFDPFLLDTLGHRISVLERALALAPPRRKYTYAAEANGRKLKWTAEDRPAGGRNLKWEAELRTPHTDGFDRKWKWESKESATGSTKVKWAKEIKGKGCLEPWSNSYSVEETYGEDDHADDDREKKKPTGVQKKVKGENKQQQKKQGNVEIVEIEDXNTAGCVAIRKAFEMXHCKGKRKELSPXQDAALLIQMNYRAHLAHRSQVLRCLRDLAVAKAKLKEIRSFFYNITYRRRIAYDNEELQRFAEKIIVLLLTVDALEGPDYMVRNARRSMLEELEGMLEIVEPQPPGKPRTLSRRRFDLPEGGAIEKETREAGK

SEQ ID NO: 8017 - protein, 213 aa, Zea mays
  unsure (1)..(213): unsure at all Xaa locations
  Clone ID: ZEAMA-23APR03-C35193_1.p
ARDHYLEHPNQKQRGSPLPQQGPPRESLKPWRPRRPXNPPPHSSPFSPHRXPPRSATFLQPALSVSLSHSLPDCRNHRLAAASKDTASSKGQEQDQEPAPSAPQEGGPEKVTEVGAASPGEKSPEAVAAELKEVLRARKEAEAAEGRGGWWAGVAQEMTEIEWPAPGKVLGTTGVVLGVIAGSTVALLSVNALLAELSDTVFAGRGLQDFFSG

SEQ ID NO: 8018 - protein, 250 aa, Zea mays
  Clone ID: ZEAMA-23APR03-C352962_1.p
MYFRPPPKGPEWYASDAETGQAARPLYPMMLEDPRLRWAFIRKVYSILSIQMLLTVAVAAVVVFVRPVALFFVSTPGGFGLYIFLLILPFIVLCPLYYYYQHHPVNLLLLGLFTVAISFAVGLTCAFTKGEVILESAVLTAAVVLSLTAYTFWAAKRGHDFSFLGPFLFAAVMILMLFALIQLFFPLGRISLMIYGGLAALVFCGYIIYDTDNLIKRYSYDEYVWAAVALYLDVINLFLSLLTLFRAADS

SEQ ID NO: 8019 - protein, 240 aa, Zea mays
  Clone ID: ZEAMA-23APR03-C35328_1.p
MEYDFRGGRSSSGPGPYGAPPGGAPGGGSSLYPRVGQPSHGGGGASTASPRAAPYHHGSGSGSGSGSSAPVVTPLAPTSFSSSSSSSSKVGIQVAIKPEFRITPPPQLPPEMVEIPRSTFNFDFEYERMILAEAEKENPNWTKFVVERQAAPLVPQQARPASSGSGDPVVDKYVSMGLGRQAVSFAVLNYGDNPTKVKEFVKSYSILHEMGFTSPNVPELLAIHDNDPDKVIQRLLSSPS

SEQ ID NO: 8020 - protein, 313 aa, Zea mays
  Clone ID: ZEAMA-23APR03-C35358_1.p
MDSCGIISILLTSCRKPLLTIKTSTYHFCKMSLVKSSFTHATESGSSSSASDVEPQIVPTENAECHGVNPTIGPQEHDQCTTSNGHNMLAIAGQESSQVELWDITSTRKIVTLPQTCSANATDHPTKKKGLCMAVQAFIPHESAGYVNILSSYEDGSTLWWDVRKPGLPLSSVKYHSESALSIAIDGFCNGGISGGADDKVVMFTLDHPKGTFILRKEIELERPGIAGTAIRPDNKIAATAGWDHRIRVYNYNKGNALAVLKYHSASCNAVTFSSDCKLMASCSADTTVALWDLYPPKPQSKADITETDEASC

SEQ ID NO: 8021 - protein, 175 aa, Zea mays
  Clone ID: ZEAMA-23APR03-C3539_1.p
MKFVAAYLLAVLAGNASPSADDLTAILESVGCEVDNEKMELLLSQLSGKDITELIAAGREKFASVPCGGGGVAVAAAAPAAGGAAPAAEAKKEAKLNCKSRQTLVLQESAHLKAVLDNPQFQLDPFAAIHQHLLATQPPAAAKKDDTAGNQGKVFKDKKSRRKKGTSSISQAMDI

SEQ ID NO: 8022 - protein, 852 aa, Zea mays
  unsure (1)..(852): unsure at all Xaa locations
  Clone ID: ZEAMA-23APR03-C353_2.p
MASSRGRLRLSPRAAAPQLDAGKYVRYTAEQVDALELAYGECPKPSSLRRQQLIRDCAVLTNVEPRQIKVWFQNRRCREKQRRESSRLQTVNRKLGAMNKLLMEENDRLQKQVSRLVFDNGYMKNRLHSPSVATTDTSCESVVTSGQHKQQQNPAVLHPPQRDANNPAGLLAIAEETLAEFMSKATGTAVNWVQMVGMKPGPDSVGIIAVSHNCSGVAARACGLVSLEPTKVAEILKDRASWYRDCRRVDILHVIPTGNGGTIELIYMQTYALTTLAEPRDFWTLRYTSGLDDGSLVICERSLTHSTGGPSGPKTPDFIRAEVLPSGYLIRPCDGGGSMIYIVDHVDLNACSVPEVLRPLYESPKILAQKMTAAALRHIRQIAHESSGETPYGAGRQPAVLRTFSQRLSRGFNDAVSGFPDDGWSSLLSSDGAEDISITINSSPNKLIGSDVSPSPFFSAMGGGIMCAKASMLLQNVPPALLVRFLREHRSEWADPGVDAYSAASLRANPYNVPGLRAGGFMGNQVILPLARTVEHEECLEVIRLQGHGFSHDEVLMSPDMFLLQLCSGIDEDAPGACAQLVFAPIDESFADDAPLLPSGFRVIPLDAKTDVPSATRTLDLCARGRIXGGLCALSDSGSGTRSTRSVLTIAFQFSFENHLRESVAAMARQYVRAVMAIVQRVAMAISPSRLGPHVELKHPPGSPEALALASWIGRSYRAHTGTEIRWSDTEDAAGSPLTLFWKHSDAIICCSLKPAFTLKFANSAGFDILETTVANVQDLQLEAVLDDGGQKALVAQLPKIMLQGLAYLPGGVCRSSMGRQASYEQAVAWKVVGDDGAPQCLALMFVNWTFI

SEQ ID NO: 8023 - protein, 473 aa, Zea mays
  Clone ID: ZEAMA-23APR03-C354657_1.p
MAASESVPFCVKGGGGGAPRPHGHLVLPAGRVREGLAFAAGAVVAALVLLSSASVLTPPPVPNIVSLPLSSSPANANAAISSSPAVAVGEGPRTFYDDRELSYAVGGQRVTGWDAKRAAWLRTRGLDGAAVAGRVVMVTGSQPEPCKGPGGDHALLRFLKNKLDYCRLHGIELLYNTALLEPSMVAYWAKIPSVRAAMLAHPDAEWVWWVDADAVFTDMDFSLPLERYRESSLVVYGWEREVYEERSWVGLNAGVFLIRNCQWSLDLMDAWARMGPASPEYARWGKTLREELEGKPNDESDDQSALVYLLSRHLERERWANATFLESGYYFQGYWAEIVDRLDGVATRYEAVERGRAGGRAGLRRRHAEREHLLYAAARREAVRQQRGTGGGVPGPDGGGQKGWRRPFVTHFTGCQPCGGAPNRMYTRRRCAEGIRRALAFADDQVLRSYGFRHAAPLSDSVTPLPFDYPAAH

SEQ ID NO: 8024 - protein, 98 aa, Zea mays
  Clone ID: ZEAMA-23APR03-C35514_1.p
MASRCLAAASEAAVVFLIRPILAIVFVFTLILLGWYVAWTTVLVHVPLVQEIAGLRPKKPSKPKPANRGRVAKFYRNQAEAAQRHSWELDTWIGMEEK

SEQ ID NO: 8025 - protein, 575 aa, Zea mays
  Clone ID: ZEAMA-23APR03-C35578_1.p
GQRLTLCSAASAGVYLMSDTSGLSHGPYLGTTTFCSLASLLILLIKASVYSPAQDIGPELSPSLPDHKLNLKNLWGMPVLFLSSLVFALGHVIVAYRTSGRARRKLLMWGIDPESILAYKNAFSGCYKVPRSPTPYSGKLFTRSESETKRKSLIQDDRDLPISFLADSDSMFIACQGITIHYKVSDPAASLPSSPGFFSERDTHHDVISSSISPRRQRHESPPSASSNTRRVLNRSFSHQYHNTSLYAPLLVEPVASPTLLDDIPLMCIDDGNADGCLSHVGFDLEAGGQGKFAVVLVHGFGGGVFSWRHVSNLLARQLGCTVMAFDRPGWGLTSRPRRKDWEDKKLPNPYELESQVDLLISFCSEMGLHSVVLVGHDDGGLLALKAAEKLRTYGGDREVEVKGVVLIGVSLSREVIPAFARILLHTPLRKKHMVRPLLRTEIVQVINRRAWYDATKLTTEILNLYKAPLFVEGWDEALHEVGRLSFSTVLPSKRAADLLRSVEDLPVLVVAGSEDALVSLKSAQAMASKFVNSRIVIISGCGHLPHEECPKALLSALAPFISTLVPSEDLLQRL

SEQ ID NO: 8026 - protein, 157 aa, Zea mays
  unsure (1)..(157): unsure at all Xaa locations
  Clone ID: ZEAMA-23APR03-C3559_6.p
MAARTAALAEGEGEFYLRYYVGHKGKFGHEFLEFEFRPDGKLRYANNSNYKNDTMIRXEVFVSPSVLREXRRIIQESDIMKEDDSNWPEPDRIGRQXLEIVMGNEHISFTTSKIGSLVDVQSSKDPEXRIFYYLVQDLKCFVFSLINLHFKIKPIQS

SEQ ID NO: 8027 - protein, 314 aa, Zea mays
  unsure (1)..(314): unsure at all Xaa locations
  Clone ID: ZEAMA-23APR03-C35600_2.p
MGGGVMRTAAKVSIAGGAAAAKSGRFRNAAPVFATAPAAAGSEAAPLVSVSSGEVPPAAAQWAASWELDDWEFADWRDDAAAAAAVVEREATAAAAKPRLVFAPPSREEAEEATTELRDAVERAYFNESPVEVVKEQDKEFNKLATDAXDSFYPGHVVQAFTLLKSSTEAQSVVASLASDRNVWDAVLKNEKVMEFYKTHQTTLVQTSPNEAVTVELPGKLEDAASENTSSGELPAGSGPSFSDFVDNAKKTVMDVVHNITDFFKDLFDDSAKTQTGAGPSAAEKGPSTADMAVGGSFMALAIAVILVVMFKRA

SEQ ID NO: 8028 - protein, 385 aa, Zea mays
  Clone ID: ZEAMA-23APR03-C35636_1.p
MGRKPSSAAAAAAMDHEFLAAAMPADLLAAADCGGIHGHALFFDALVQLIPPRFYLPSGDEDRPWHQGLSKAAKAALKAKSRANTKAARRARLNPSTPPASTLDLLKKSVAGQAAEEEEEKSEEESGASGDEESSEDDIDEEAGDQEDEMPIAPAAVVSEDRSVTYEELRERLQRRITVLRGNRCTRPEFLNKPRKEKGKKSKAKNEKKGKGEGMKRKRDDGTEDVDVKDGKKVKKEAEEKPDIMYANVFVDPKEARRRKKRRVKNKKKALEQAKRLQEAKKDPEKASKIAWDVARRRAAGEKVHDDPKLIKESLKKEEKRQQKHAAQWKERQKTVDKQRKDKQKKRTENIRDRAQQKKMRKIEKREKKLMRPGFEGRKDGYVNE

SEQ ID NO: 8029 - protein, 124 aa, Zea mays
  unsure (1)..(124): unsure at all Xaa locations
  Clone ID: ZEAMA-23APR03-C356_13.p
MAATASLSAVAAPLSVPGLRKPLGASSLRPLQPRAARMTTTAVRASASPSSTSIKEKAAAGLTXXAALAAALVLPDVAGGRAVRRGSRRRSSNFLLSIVSGGVVLVGIVGAVVAVSNFDPVKRA

SEQ ID NO: 8030 - protein, 419 aa, Zea mays
  Clone ID: ZEAMA-23APR03-C357013_1.p
MTSTVSASQLHITATATGTSAVITTPSSNQNPINARSCHHSASSSPRSSTTTGGTGGGGGSGSGSTNQACAACKYQRRKCSPDCPLAPYFPADQQRRFLNAHRLFGVSNILKTLKKLKPELCADAMGTLIYQSDMRAQDPVGGCYRLVLSLERQLEIDTAELTAVLHHLAFCRQATTTTTVMAPQQQGGGMADLDVTSSNQPLLPNEQQEVVDALYVNHEAHTAILQTDEVVHRHGGGHSPTDDHHGEQQQQQLFDYFYYDATASDDASSKPTIDINLDNMQQFDFDDSCAAAEKVDLAPAAGDGEIRHHQHLDMNCQIDHKDYFEIKAASLVDAFDIRQDLQPVADVNAEVDIDIKTVDMNAGIGIDMKAMDMNANVDVNADLQGDDAAVNVSTCEAEAAKMAAESSHCRLGLGFSSF

SEQ ID NO: 8031 - protein, 328 aa, Zea mays
  Clone ID: ZEAMA-23APR03-C35731_1.p
DPPTSLADEQTASVPSRRRQLESEAERPVTVIPLLHSPTSKRPPFRAVGGSWRARPSDQLQLPAGTVGHLVPGHGRATATAGPRRRFLRPVLLHDGRRLSGSGKHADGGKQDREAIQLPGLFPPAFGGGVQPPHLRATPPTQVFHAQQPKQGGAAVGPQPPAPRPKVRARRGQATDPHSIAERLRRERIAERMRALQELVPNTNKTDRAAMLDEILDYVKFLRLQVKVLSMSRLGGAGAVAQLVADIPLSVKGEASDSGSKQQIWEKWSTDGTERQVAKLMEEDIGAAMQFLQSKALCMMPISLAMAIYDTQHSQDGQPVKPEPNTPS

SEQ ID NO: 8032 - protein, 759 aa, Zea mays
  unsure (1)..(759): unsure at all Xaa locations
  Clone ID: ZEAMA-23APR03-C3574_1.p
MHRCAHEITHAAHPVFAGEADGERLAGARPQPALSAPRRRPLPALQPPPRAPPPPPPSGAPPSRSNPPPRHPSNSPRDSSDRDRVRDRDRDRDRDRDRGRERRRGEESRRDRDPERGRGPDRQRDXDDSARRHRDRGRDRRRRGRDRDRDMEREPDPDRERGDRGDRGKDRLXEKLAEREREKELDAIKEQYLGSKKPKKRVIKPSEKFRFSFDWENTEDTSRDMNALYQSPHEARLLFGRGFLAGIDRREQKKAAAAHEKETRAELRRKAGVEDRPEDDAVDKKKAAAAEMYDAFDMRVDRHWSEKALEEMTERDWRIFREDFNISYKGSRIPRPMRKWSESKLGTELLRAIDKAGYEKPSPIQMAAIPLGLQQRDVIGIAETGSGKTAAFVLPMLSYITRLPPISEENEAEGPYAVVMAPTRELAQQIEEETVKFATYLGIKVVSIVGGQSIEEQGFKIRQGCEIVIATPGRLLDCLERRYAVLNQCNYVVLDEADRMIDMGFEPQVVGVLDAMPSSNLKPENEDEELDEKRIYRTTYMFSATMPPAVERLARKYLRNPVVVTIGTAGKATDLITQNVIMVKESEKMPRLQKILTDLGDKTAIVFCNTKKTADMRAKDLDKSGFRVTTLHGGKSQDQREISLDGFRNRRFNVLVATDVAGRGIDIPDVAHVINYEMPSSVDTYTHRIGRTGRAGKKGVATSFLTLENTDIFFDLKQMLIQSNSPVPPELARHEASKFKPGSIPDRPPRRNDTVFANH

SEQ ID NO: 8033 - protein, 269 aa, Zea mays
  Clone ID: ZEAMA-23APR03-C3578_3.p
MQCRGAAKCPDPVPVRPPPPPPPPFRPSRPSVSCPRPWSDHESPGLRSPLPFVHPCTHSLPLLSRACDNNWATAAAAAAALRQVRRSSSDPSPARRRAPTRTGVLPWLQAKIVDPVLQVIRRGAEPKQLAFSAALGVTIGIFPICGTTVILGAVVVAMLGSRCNAVTLMVLNLAATPIELSLIVPFLRLGEAVTGSGHFPLTADALKNVLTGHASKDVLMSIVHAMLGWLIAAPIVLVVLYAVSFPCFKVLVNRFGGIPSSPRTPIKAV

SEQ ID NO: 8034 - protein, 175 aa, Zea mays
  Clone ID: ZEAMA-23APR03-C35822_1.p
MPCAATELVHGEGGTVKVGTTGTIGSLMTRELDSTKVAAPQAAAAAAAGAPPLRRQGGPVSVPCGATTPRKLMLRKSSSDVSSSSNSNRTGRVGTVEACKPRRASRTNTFSPMLRPDGGALVDRAPSAGRAKKKGTSVGVHGGGVQVVDVKCGNPMSMSSRLRKLGFSKLSQTFA

SEQ ID NO: 8035 - protein, 140 aa, Zea mays
  Clone ID: ZEAMA-23APR03-C3589_2.p
FLTGLGVRRGTALRPSKLLKPFWLAHWTEGDAQKAQAEDAKQKLALLEAQLDGRRFFGGDTIGYVDIAACVLAPWLSVVEEVTGVAVVDEGEFPALRRWSREYSSCEAFKQCVPDRDQLVAFYTERKEAYKVFANAWLQQ

SEQ ID NO: 8036 - protein, 122 aa, Zea mays
  Clone ID: ZEAMA-23APR03-C3591_1.p
MGRRQKRQALMAAFALALLMGTAVYFRIWARQSSDPYFTADDREELRRQFEQANLEAMDESAEWRMQYDKEVEKNRHLHDELSKVKASLAGTARRLELLQKDNELQKRQTESLRQQCNCTLH

SEQ ID NO: 8037 - protein, 129 aa, Zea mays
  Clone ID: ZEAMA-23APR03-C3591_4.p
MVGERGGMGRRQERQAMMVTFALALLMGIAVYFRIWARQSSDPSFTADDREELRRQFEQANLEAMDESAEWRMKYDKEIEKNRQLHDELSKVKASLAGAAKRLELLQKNNELHKRQTESLRQQCNCTLH

SEQ ID NO: 8038 - protein, 370 aa, Zea mays
  unsure (1)..(370): unsure at all Xaa locations
  Clone ID: ZEAMA-23APR03-C35984_1.p
MEYTGTPPARLAFQRRRRMSTITATVTCRRDAAMTAPEKADVLRSLDGWAESNLLPLLKPVERAWQPHDLLLPDSAAAGXREAVDELRARAREIPDDYYVCLVGNMVTEEALPTYHAALNSFVGYDSPSSADAWARWSRGWTAEENRHGDLLNRYLYLCGRVDVRRVEQTIHHLINAGMRLASDKCPYRGFIYTAFQERATAVSHGNTARRAMALGDASLARICGAIASDEKRHEAAYTRVVDQLFALTPDAAVRALEYMMRERILMPAYYMFDGRDPDLFRHYAAVAQRLGVYTTADYADLVQFFVDRWGVADLGPGLTGEGRQAQDYVCRLPERVRRMDQLDARRRLQPQTRQVPFSWLFDRHVELLT

SEQ ID NO: 8039 - protein, 356 aa, Zea mays
  unsure (1)..(356): unsure at all Xaa locations
  Clone ID: ZEAMA-23APR03-C359_32.p
MACLTDLVNLNLSDTTEKIIAEYIWIGGSGMDLRSKARTLPGPVTDPSKLPKWNYDGSSTGQAPGEYSEVILYPQAIFKDPFRRGNNILVMCDCYTPAGEPIPTNKRYSAAKIFSSPELAAEEPWYGIEQEYTLLQKDTNWPLGWPIGGFPGPQGPYYCGIGAEKSFGRDIVDAHYKACLYAGINISGINGEVMPXQWEFQVGPSVGISSGDQVWVARYILERITEIAGVVVTFDPKPIPGDWNGAGAHTNYSTESMRKEGGYEVIKAAIEKLKLRHKEHIAAYGEGNERRLTGRHETADINTFSWGVANRGASVRVGRETEQNGKGYFEDRRPASNMDPYVVTSMIAETTIVWKP

SEQ ID NO: 8040 - protein, 301 aa, Zea mays
  unsure (1)..(301): unsure at all Xaa locations
  Clone ID: ZEAMA-23APR03-C359_37.p
MAAAAGRKVAVAAVQFACTDVEAENVATAERLIREAHKKGAKIVLVQELFEGHYFCQAQRLDFFRRAKPYKGNPTIIRMQQLAKELEVVIPVSFFEEANNAHYNSVAIIDXADGADLGLYRKSHIPDGPGYQEKFYFNPGDTGFKAFKTKYATIGVGICWDQWFPECAIAMALLGAEILFYPTAIGSEPQDCNLDSREHWKRVMQGHAGANLVPLVASNRIGRETVDTEHGKSSITFYGNSFIAGPTGEIVKLANDKDEEVLVAEFDLDEIKSIRHGWGIFRDRRPELYKVLLTLDGEKQS

SEQ ID NO: 8041 - protein, 357 aa, Zea mays
  Clone ID: ZEAMA-23APR03-C359_41.p
MASLTDLVNLDLSDCTDRIIAEYIWIGGTGIDLRSKARTVKGPITDPSQLPKWNYDGSSTGQAPGEDSEVILYPQAIFKDPFRKGNHILVMCDCYTPQGEPIPTNKRYSAAKVFSHPDVAAEVPWYGIEQEYTLLQKDVSWPLGWPVGGYPGPQGPYYCAAGADKAFGRDVVDAHYKACLYAGINISGINGEVMPGQWEFQVGPSVGISAGDEIWVARYILERITEMAGIVLSLDPKPIKGDWNGAGAHTNYSTKSMREAGGYEVIKAAIDKLGKRHKEHIAAYGEGNERRLTGRHETADINTFKWGVANRGASIRVGRDTEREGKGYFEDRRPASNMDPYVVTGMIAETTILWNGN

SEQ ID NO: 8042 - protein, 469 aa, Zea mays
  Clone ID: ZEAMA-23APR03-C36074_1.p
MDVGKKKKKKTQGGARHNPTHVAEKPTQQTRGSKRVVAPGVHGQQIRFTRQRSAAINQQSFLSLTTTTQAGSRATTNQESTQNLAAATQFTSSVATEQDYTAGLTTTAQPTSPTQAEVTDHNRDEELVPRQRSRGKQLESLSRGLGTKIPIQIYDGKRRPEPPIQVAKFASEGGIILRQHIPIFPHWKEYKKQENEGKITDYIGKLAGQFTMDVESNAVKDACVDMLKGGQRQMRYRLKKKYFTGVPANQVRTTSPVSCMTDDQWRELVQMWSSPNHKNNCVKNKLNREKVQFPQCTGSQSYVAKAYVVRQEKYKDVEPSAIDLFKEMHCSKKKGFSEVVQKAIGDMEAMVATPAEDGQLAKSATEVVSNVLPGSSKFLHNAGLLPSSKRSNTGTVSARMQELQSQLDNERREKDGLREDMDTLKAKSQSSEATIANQSTEIADLKKSLAENSILLRQILSISRDQLNP

SEQ ID NO: 8043 - protein, 363 aa, Zea mays
  Clone ID: ZEAMA-23APR03-C3607_5.p
MEGYDREFYQFSDQLRLQTAAFSGLSLGDSIWSPAGRRNNSNDVLFAASASPADAAAKTNAVVGLKLNDGGPGLIGSGKLAFGGGGTKADRYNNNNLSNTDNKTVYNSSSSFMGNGSSYAKNNNNAGMLAFDEMGSYGYNSNNGGGNTNNNSNGVEVKSYFNKSAGRAASNNNNNNNSHAGGGNKKGGAGEYGRKKHAKSEGAAAAAATDKQRFKTLPASEALPRGQAIGGYIFVCNNDTMDENLRRELFGLPSRYRDSVRAIRPGLPLFLYNYSTHQLHGIFEAASFGGTNIDPTAWEDKKCPGESRFPAQVRVATRKIYDPLEEDAFRPILHHYDGPKFRLELSVTEALALLDIFADKDDA

SEQ ID NO: 8044 - protein, 487 aa, Zea mays
  Clone ID: ZEAMA-23APR03-C36083_2.p
MSSGGGGGQQFRYTQTPSKVLHLRNLPWECAEEELVELCKPFGRIVNTKSGVGANHNQAFVEFTDVNQAISMVSYFASSSEPAQIRGKTVYIQYSNRQEIINNKSPGETAGNVLLVTIEGVQSSDVTIDVIHMVFSAFGYVHKIATFEKAAGFQALIQYTDAATASAAKESLDGRSIPSYLLPEHVTSCCLRISFSAHKDLNIKFQSNRSRDYNNPYLPINYSAMDGTLQPAVGADGRQVEAQGNVLLASIENMQYAVTVDVLHTVFSSFGSVQKIAIFEKNGGTQALIQYPDVSTAAVAKESLEGHCIYDGGYCKLHLSYSRHTDLNVKAHGDKSRDYTIPAGVIQGVPPGVQATSSGWQGNVQAAGAYAAPPGAPSQSHGANGHVQNWNPGNSVYPPAPGPGTYPGQMYSSPSQYAASGGFPNTPSTAPPHYAASGGFPNTPLPALPGAPTQQLHASQQMLPQHGNQSGGASGTSQPAPPASYYR

SEQ ID NO: 8045 - protein, 528 aa, Zea mays
  Clone ID: ZEAMA-23APR03-C36083_8.p
MERTNSIEMDRERLTAEMAFRDSSSAVIRIRRRLPDLLTSVKLKYVKLGLHNSCNVTTILFFLIILPLTRTVLVQLTGLTFDTFSELWSNQAVQLDTATRLTCLVFLSFVLTLYVANRSKPVYLVDFSCYKPEDERKISVDSFLTMTEENGSFTDDTVQFQQRISNRAGLGDETYLPRGITSTPPKLNMSEARAEAEAVMFGALDSLFEKTGIKPAEVGILIVNCSLFNPTPSLSAMIVNHYKMREDIKSYNLGGMGCSAGLISIDLANNLLKANPNSYAVVVSTENITLNWYFGNDRSMLLCNCIFRMGGAAILLSNRRQDRKKSKYSLVNVVRTHKGSDDKNYNCVYQKEDERGTIGVSLARELMSVAGDALKTNITTLGPMVLPLSEQLMFLISLVKRKMFKLKVKPYIPDFKLAFEHFCIHAGGRAVLDEVQKNLDLKDWHMEPSRMTLHRFGNTSSSSLWYEMAYTEAKGRVKAGDRLWQIAFGSGFKCNSAVWKALRPVSTEEMTGNAWAGSIDQYPVKVVQ

SEQ ID NO: 8046 - protein, 135 aa, Zea mays
  unsure (1)..(135): unsure at all Xaa locations
  Clone ID: ZEAMA-23APR03-C36102_1.p
MFPSSSATGPRFLRPFTATAPRRAMAACTGAPSDPPMQQSSPTKAVRVVVKGRVQGVFFRDWTVEMARSLGLAGWVRNRRDGTVEALLSGDPDKXDEMVSRRIPVGPPAAVVTAVVPSPAEPVSPDDGFHRKPTA

SEQ ID NO: 8047 - protein, 228 aa, Zea mays
  unsure (1)..(228): unsure at all Xaa locations
  Clone ID: ZEAMA-23APR03-C36129_3.p
MARGGGDRSREDDPFSDGGTTETDSDESSPRGVGARGPGSTSNPILTRLAVSRNSSPLAAATAAPGVCLLRFAWESAAGSLVGAVVGYGKGLVMMKGIKGSFADAASSAKIFAVLAGVQSLVACSLRKLXGKDDGINXGVAGCCTGLALSFPGAPQTLIXSCLTFWTFSYIIEKLNKQQPALALLPATGVMDPKAGQSVLPPFTLPPLDTMDEFSKFQNFLSSKFRGN

SEQ ID NO: 8048 - protein, 119 aa, Zea mays
  Clone ID: ZEAMA-23APR03-C361574_1.p
NILIEKSAIGPRRSPPPARLLPTCGCTDHPGRDRAARRSNSDDRPAMSYQAPPPGTAAYPPPGQQAYPPPAYGAPPPMAAGGYPPPPPPQPQDSKRSNDGFLKGCLAALCCCCMLDMCF

SEQ ID NO: 8049 - protein, 1352 aa, Zea mays
  unsure (1)..(1352): unsure at all Xaa locations
  Clone ID: ZEAMA-23APR03-C36294_1.p
TESTKMIMRYLAYMGGKAASEGRTVEKQVLQSNPVLEAFGNAKTVRNNNSSRFGKLGLHGYQQKGKITXRTLPSSFYRISASEVLEHFMLLDILSDHLLICCIFFGSFLPHVPFFSYLIXFELAFVKIHIGICXGWDGIPPLQLEKALSFKAGQKXIFQVNAAILHLGNVEFAEGDDGDSSKPKDEISLSHLRTAAELLMCDEKALKDSLCQRIIVTRDENIVKTLDPEAAKGSRDALAKTVYSRLFDWLVNKINNSIGQDPNSKCLIGVLDIYGFESFKTNSFEQFCINLTNEKLQQHFNQHVFKMEQEEYTKEEINWSYIEFIDNQDVLDLIEKKPGGIIALLDEACMLPRSTHETFAQKLYQTYSVHKRFAKPKLSRSDFTICHYAGDVTYQTELFLDKNKDYVVAEHQALLSASKCAFVSGLFPFLSEDSSKSSKFSSIGSRFKQQFQSLLETLSATEPHYIRCVKPNNLLKPAIFENQNVLQQLRCGGVMEAIRISCAGYPTRRTFYEFIDRFGILAPDVLSGSSDEVSAVRRLLDKIDLQGYQIGKTKVFLRAGQMAELDARRNEVLGRSASMIQRKVRSFLAQKNFIALRRSALQIQTVCRGELARRVYHNLQREAASLKIQTLYRMYTARKAYNELSASAVTIQSGLRGMCARKELHFRRQTRAAIIIQSRCRQFLARLHYSRTKKAAITTQCAWRGKAARKELRKLKMAARETGALQAAKNKLEKQVEELTWRLQLEKRMAADLEETKSQENAKLQAALQEVQQQYKETKEILVQEREAAKKAREIAPVIKEVPVIDTELMNKLRDENDKLKTMVSSLEKKIDDTEKKYQETSKISEDRLKQAMDAETKIVDLNMAMLRLQEKISTMESEEKVQRQALLSTPVKSMSEHLSIPIAPKAHHLENGFHEVEGLKEPQSAPPAIKEYGNGDPKMKKSIVDRQLENVDALIECVGTNLGYCAGKPVAAITIYKCLLHWKSFEADKTSVFDRLIQLIGSAIENEDDNDNLAYWLSNTSSLLFLLQRSLKAAGAPGSVSRKKPPQPTSLFGRMAQGLRSASFANMHVEATDVVRQVEAKYPALLFKQQLTAYVEKIYGIVRDNIKKELSSLISLCIQAPRTMKASMLRVSGRLSSQSQSQSNHWQKIIESLDKLLKILQDNHVPPVLAQKIFTQIFSYINVQLFNSLLLRRECCSFSNGEYVKAGLAELELWCAKATTEYAASSWDELKHIRQAVGFLVIFQKFRISYDEIVNDLCPILSVQQLYRICTQYWDDKYNTQSVSSDVLSNMRVLMTEDSNSDESGSFLLDDNSSIPFSVDDILSDHLLICCIFFGSFLPHVPFFSYLILLS

SEQ ID NO: 8050 - protein, 469 aa, Zea mays
  unsure (1)..(469): unsure at all Xaa locations
  Clone ID: ZEAMA-23APR03-C362_3.p
MAADAARTPAPHALLLPYPAQGHVIPFMELADRLLDRGFAVTFVNTEFNHRRVVVAAAGGRAPDGRXRLVGVADGMGDGEDRDNFVRLNACMKEAMPLRLDALLDADDERLGRVTCVVVDVGMSWALDAVKRRGLPAAALWPASAAVLAVLFGAKKLIRDGVIDDDGAPVKLENHSFRLAESMPPMDAVFLAWNYMGNRDVERMVFHYLTTTAWAAVAKADVVLCNTFEDLEPDIFGAHSPAAASILPIGPLRTWQRRTSEAPAGHFWRADDEACASFLDAQPRGSVTYVAFGSLTVMSPAQLQELALALLASARPFLWVFRPGLAAELPPAFTDLLPRHARGKVVEWAPQEKVLAHPAVGCFLTHCGWNSTLEGVRHGVPLLCWPYFSDQFTNQAYICDIWKVGLRVVPDGGDGIVAKERIMERLTSLMGDSGVKERVKRLKELAERSMGPEGKSLKNINAFMESMTK

SEQ ID NO: 8051 - protein, 474 aa, Zea mays
  unsure (1)..(474): unsure at all Xaa locations
  Clone ID: ZEAMA-23APR03-C3641_1.p
MAMGGAFPFQWPEGPADPVLDDVTLPPLPTAAPDAGVAAYYADAADVHAMHMALPDFAAALAAMRREEEEAAGIRLVHLLMSCAGAVEAADHAGASAHLADAHAALAAVSPTSGIGRVXAVHFTAALSRRLFPPTPSPSPPPPAPHAADADRAFLYHRFYEAGPYLKFAHFTANQAILEAVQGCKHVHIIDFSIMQGLQWPALIQALALRPGGPPSVRLTGIGPPSPPGRDDLRDVGVRLADLARSVRVHFSFRGVAANRLDEVRPWMLQVSQGEAVAVNSVLQLHRLLADAPSSGDARAPIDAVLECVASVRPRVFTVVEQEADHNKSGFLDRFTEALFYYSAVFDSLDAASGGAGDAAAEAYLEREICDIVCGEGAERRERHEPLWRWRDRLGRTGLAAVPLGANALRQARMLVGLFSGEGHCVEEAEGCLTLGXHGRPLFSASAWRAEENNQSDSRSRSSGSEESNISCSS

SEQ ID NO: 8052 - protein, 975 aa, Zea mays
  Clone ID: ZEAMA-23APR03-C36527_1.p
MWRRLPTRRLASALLSSSPLQRATATHAPPLERHFPTTASGLLPPSLLPPWQQEPRWFSSSAAAEAVSSEDAEELHHAIEEIVRPQPSPNLPQPQAVAEEYQAPGRDHRSRHRRSGRGRHAEVLAAEHGMTYHRYTSLRRRQIRIETEAWEQAANEYRELLADMCEQKLAPNLPYVKSLFLGWFEPLRDQIATEQELVADPGSRASHGPFFSMLPADMMAVITMHKLMGLLMTGSGDGSVRVIQAACQIGEAIEHEVRINRFLEKTRKKNNKEMENEEEAGDTNIAVEQQRLRKKVTDLMKKQKLRQVRNIVKNQDKSRPWGQDAHAKVGSRLIDLFIGTAHIQPPASQSSDGLPDIRPAFRHEMRTMVKEQQKSSRRYGVIKCDPLVRQGLDRTAKHMVIPYMPMLIPPICWTGYDKGAHLFLPSYVMRTHGARQQRDAVKRAPREQMQFVFEALNTLGSTKWRVNKRVLSIVDRIWSNGGRLADLVDRTDVPVPEKPDTEDETLLKNWKWHLRAAKKKNSERHSQRCDVELKLAVARKMKDEEGFYYPHNLDFRGRAYPMHPYLNHLGSDLCRGVLEFAEGRPLGKSGLRWLKIHLANLYAAGVDKLSYDGRIAFAENHLEEIFDSADRPLEGRRWRLGAEDPFQCLAVCMNLTEALRSSSPETTISHIPVHQDGSCNGLQHYAALGKDKLGAIAVNLVAGEKPADVYTGIANRVMEIMRMDAQKDPSVEPDAARARLIVDQVDRKLVKQTVMTSVYGVTYIGAREQIRRRLKERGVIPNDSELFGASCYAAKVTLTALGEMFQAARSIMNWLGDCAKVIACENEPVRWTTPLGLPVVQPYRKLGRHLIKTSLQVLTLQRETDKVMVKRQKTAFPPNFVHSLDGSHMMMTAVACKRQGLNFAGVHDSYWTHASDVDTMNKILREKFVELYDTPILENLLESFEKSFPKLKFPPLPERGDFDMKEVLESTYFFN

SEQ ID NO: 8053 - protein, 179 aa, Zea mays
  Clone ID: ZEAMA-23APR03-C3653_10.p
KHRAHTTVPSLSLSLSLSLSLQTPRLHRSSVLSPVPTTSLYPSSPSGRRNPTRARCQDLAADAYSDSDAAVVMYADRTSGRKRSVMDRLGSGGGGSLGAQFLTLRASVHSPPSGRDDEQAEEWEWPEEGEARGRRRRWARRGAEEAGGQALHHPGVRHHAPLLPRLIPLTMPFAVLPGH

SEQ ID NO: 8054 - protein, 195 aa, Zea mays
  Clone ID: ZEAMA-23APR03-C3653_9.p
RELATSCSAGRQEGRGSKQQTHAAPAPGSGTAAVLDDRFWSSARFSRRSALALSRSLSFSAMMHRFSRYSFRFTISMASAPPARNLLSLNLLLLLLTASVFFSCRSRLTTTRDGRFSLPPPPPLLQNQEPEHMLLWTADGVGGLLLARFFRARRLNLEMKCSKGFKAIYKDRSRLASPQGLGGRFRFLFGGACTH

SEQ ID NO: 8055 - protein, 235 aa, Zea mays
  Clone ID: ZEAMA-23APR03-C36560_5.p
MRQWGQRGRRGAMPFVSECERRGGGSGSSSGSSLSARRGSDSRAGVLQWDEVEEIDGEVQSSYRGPFDTMDALQDALPNKRKGASKFYNGKTNSVADAAQPAKGTADPVNPSPKKRKGFLSFGFSWTKSWSRRGATSSSENFGKTLSAALTGSAQGNSRGGSNEHQGCQDPAAHCLHLHRRSNTPGVSASPPGPGALRPQLISVQMQSVSVAGVEDVAESTASVSPREKRRRSLQ

SEQ ID NO: 8056 - protein, 375 aa, Zea mays
  Clone ID: ZEAMA-23APR03-C3656_2.p
MITALQVSGGGLPLLFARRRRRAFRPPQAVASDAAAAAEGTAREDGGKVALGGSGVSVTKLGVGAWSWGDTTYWNEFRWDDTKLKAAKGAFDASIDCGITFFDTAEVYGAGVSGAINSESLLGRFIKERQRKEQVDVAVATKFAALPWRFGRGSVICALKASLDRLGVSSVELYQLHWPGIWGNEDYLDGLGDAVEQGLVKAVGVSNYSEKRLRDAYERLRKRGVPLASNQVNYSLIYRNPEENGVKAACDELGVTLIAYSPIAQDALTGKYTPESPPKGPRGRIYTPEFLTKLQPLINRIKEIGGSYGRTSTQVVLNWLVCQGNVVPIPGAKNAEQAREFAGALGWSLAPDEVEELRSMARQVKPVIGFPVEKL

SEQ ID NO: 8057 - protein, 273 aa, Zea mays
  Clone ID: ZEAMA-23APR03-C36703_1.p
MMEAGGAGAGAGGRDERVPQWGAQETRELIMARGEMERETVAARRSAKTMWEAVAARLRERGYRRTAEQCKCKWKNLVNRYKGKETSDPENGRQCPFFEELHGVFTERARNMQQQLLESESGVSVKTKLKRPGGDRSSGESDDKDDGGEESDDEKPMHNRKRKADDKKQQHQRMSEKSRTGISSIHELLQDFLVQQQHIDVRWREMIERRAQERVVFEQQWRLTMQRLEQERLLLEHSWMEREERRRMREEARAEKRDALLTTLLNKLLQEDL

SEQ ID NO: 8058 - protein, 163 aa, Zea mays
  Clone ID: ZEAMA-23APR03-C36739_1.p
MARILAAVWPIVKGCITGGVFGITIADWSASYVTLHGASMHPTFDPQQAERALVDKRCLHRYHFSRGDVVVFRSPRDHRELVVKRLIALPGDWIQIPEKQEIQQIPQGRCWVEGDNAATSFDSRSYGPVPMGLLRGRVTHIIWPPHRIGRVDRKMPEGRIVPL

SEQ ID NO: 8059 - protein, 357 aa, Zea mays
  Clone ID: ZEAMA-23APR03-C3680_1.p
MERFGLDGGGGGGELPPGFRFHPTDEELITYYLLRKAVDGSFCGRAIAEIDLNKCEPWELPDKAKMGEKEWYFYSLRDRKYPTGLRTNRATVAGYWKATGKDREIRSGRTGALVGMKKTLVFYRGRAPKGQKTHWVMHEYRLEGAYAYHFLPSSTRDEWVIARVFQKPGEVPPAARKHRLGALSSTTGTAAGDSCFSDSTSASIGGASSSSTPGPLFASAAAAVANAGAADGDTSSYCGGAANHGNLVTGRELVPCFSTATINGPLVAAALGIGQPYNAAPLPFEQQPPPPAFLPSLRSLQDNLQLPPFLSAGGLGGGGALHWLPAGGMEVKVEGRSAPPQMAVGPGQLDGAFGWSF

SEQ ID NO: 8060 - protein, 221 aa, Zea mays
  Clone ID: ZEAMA-23APR03-C3689_20.p
TAKSRVILPCTRARDYPATRARRSPGAWALAAAAACARPHSLAFSGSSGAAASASAAGSWGPAGAGAGASGSSAASSSGAAASASATGSAAAGSSAPAGGAAAASSSAAASCSTAGVSSGPAGAAASASAAGSAATGSSAPAGAAASASAAACCSAAGSSSGSAGAAASASASASAGADSSGTTAGGGVSTTGASSAATTVGVWTCTRERRVKIKACTPPS

SEQ ID NO: 8061 - protein, 139 aa, Zea mays
  unsure (1)..(139): unsure at all Xaa locations
  Clone ID: ZEAMA-23APR03-C368_69.p
CDPGRGGSAGNKFRMSLGLPVAATVNCADNTGAKNLYIISVKGIKGRLNRLPSACVGDMVMATVKKGKPDLRKKVMPAVIVRQRXXWRRKDGVYMYFEDNAGVIVNPXGEMKGSAITGPIRKECADLWPRIASAANAIV

SEQ ID NO: 8062 - protein, 162 aa, Zea mays
  unsure (1)..(162): unsure at all Xaa locations
  Clone ID: ZEAMA-23APR03-C368_71.p
MAPKGGERKPAAKKPAEEEPATXKGGEXAPGGGKKPKAEKRPPGGKVPKEGAARGKKGKXKXEKIPWRTYKIXXXFXXVXKQVHPDIRAFSSXRPWSIMNSFINDILRXSWPAEAPKLGGYNKKPPIRSREIQTPVGLVLPGELPKHPVSKGTKAVPKFPSN

SEQ ID NO: 8063 - protein, 117 aa, Zea mays
  Clone ID: ZEAMA-23APR03-C368_77.p
MAPKAEKKPAEKKPAAEEKAEKTTAGKKPKSEKRLPASKSSGKEGGEKKGKMVMEFKEGEQLRARVTAHRDAAAVAWKDGGSSRAAFGLFLSDVDNHVHKAKTWSSANGRDGKLGQS

SEQ ID NO: 8064 - protein, 172 aa, Zea mays
  Clone ID: ZEAMA-23APR03-C36962_1.p
MMMACALAVAQPAASLAPPSGKRTLSGGRPPRLPPPRLSGKLALATPCCARGAGKLIRSRAVVAKAAQDGSESSGTGSIVKYVTSPFSTAKHFSTAEDIFALAGIGFAAVAALWASVNLIEIIDKLPVLPLLFELVGILVAWLFIYNNLLFKPKRKEFLENIKSSGSRILGQ

SEQ ID NO: 8065 - protein, 378 aa, Zea mays
  unsure (1)..(378): unsure at all Xaa locations
  Clone ID: ZEAMA-23APR03-C37048_1.p
MAHSNGAAATATAGGGDVDDETAPVPRALAPARKVALITGITGQDGSYLTELLLSKGYEVHGLIRRSSNFNTQRLDHIYHDPHAVPSAPRPPMRLHYADLSDSSSLRRALDAISPDEVYNLAAQSHVAVSFEIPDYTADVTATGALRLLEAVRLSRKPMRYYQAGSSEMFGSTPPPQREDTPFHPRSPYAAAKVAAHWYTVNYREAYGVFACNGVLFNHESPRRXGENFVTRKITRAVGRIKVGLQTRVFLGNLSAARDWGFAGDYVEAMWLMLQQEQPGDYVVATEESHTVEEFLQAAFGYAGLSWKDHVVIDKKYFRPAEVDSLKGDATKARKVLKWKPKVGFQELVEMMVDHDIELAKKEKVLVDAGYRDPKQQP

SEQ ID NO: 8066 - protein, 164 aa, Zea mays
  Clone ID: ZEAMA-23APR03-C37085_3.p
HRRSTPRLRPRTAAPPSAPTNILTPRHHLRRPSTLLLNPTTPPPPRCSQTALQSPSPSFSRNPAHPCARGRPPTRSRSSRPSRRTGRSTGDFPWQTTSPPRCGAASAWGTASAPRRSPGGCARSATGTTTPLSASNAARSRRRTATSPSTGSPSSSGRARAGGG

SEQ ID NO: 8067 - protein, 252 aa, Zea mays
  unsure (1)..(252): unsure at all Xaa locations
  Clone ID: ZEAMA-23APR03-C370_10.p
MVRGKTQMKRIENPTSRQVTFSKRRNGLLKKAFELSVLCDAEVALVVFSPRGKLYEFASGSAQKTIERYRTYTKDNVSNKTAHQDIEQVKADAEGLAKKLEALEAYKRKLLGERLEECSFEELHSLEVKLEKSLHCIRGRKTQLLEEQLHKLKEKEMNLRKSNEDLREKVMGAKTFCRRCTAASGMPTTQENXCKKQPPPPPPMLMAPPPPPAPAAIDHTGPKDVGMDVETELYIGLPGRDYRSNNKDMTAQ

SEQ ID NO: 8068 - protein, 228 aa, Zea mays
  Clone ID: ZEAMA-23APR03-C370_4.p
MVRGKTQMKRIENPASRQVTFSKRRNGLLKKAFELSVLCDAEVALVVFSPRGKLYEFASGSAQKTIERYRTYTKDNVSNKTAHQDIEQVKADAEGLAKKLEALEAYKRKLLGERLEECSFEELHSLEVKLEKSLHCIRGRKTQLLEEQLHKLKEKEMNLRKSNEDLREKCKKQPPPPPPMLMAPPPPPAPAAIDHTGPKDVGMDVETELYIGLPGRDYRSNNKDMTAQ

SEQ ID NO: 8069 - protein, 253 aa, Zea mays
  Clone ID: ZEAMA-23APR03-C3711_2.p
MPSQSTHTSSSLSSSTAPILPCSSAAALFRSVMAAVATETPFHVLAVDDSLPDRKLIERLLKTSSFQGKLSHRMIIPVSFASALMTTVDSGSKALQFLGLHDQDSTVPPVHTHQLDVAANQDVAVNLIITDYCMPGMTGYDLLKKIKESSSLRDIPVVIMSSENIPSRINRCLEEGADEFFLKPVRLSDMNKLKPHILKSRCNQEQHQQSDSHSGERRNPTIGSSSDSINNRKRKGAGTEEILPQLANRSRHS

SEQ ID NO: 8070 - protein, 239 aa, Zea mays
  unsure (1)..(239): unsure at all Xaa locations
  Clone ID: ZEAMA-23APR03-C371652_1.p
GRLNMKSRGLHYDIKKSGPMSAEISGTTKEGKTWRYGVDLAKRECGCGXWELSGKPCTHAIYLFGTVKQRMRQLNIEDFVHDYYSVERFKMVYQFXINPMSDKSGWPKVDAGRPRKQRIKASGEPGKRGPHQCKRCFQFGHVEKGCNATQAELEQELPPPRPKKGKKPRKSKHEDEAVEASRNDAQASMSVVEPSPMPHSSAGVTPRRMASLSPTSPSVTTRKMATISPGGISQRLIIE

SEQ ID NO: 8071 - protein, 471 aa, Zea mays
  Clone ID: ZEAMA-23APR03-C3717_1.p
MAPHVLVVPFPGQGHMNPMVQFAKRLASKGVATTLVTTRFIQRTADVDAHPAMVEAISDGHDEGGFASAAGVAEYLEKQAAAASASLASLVEARASSADAFTCVVYDSYEDWVLPVARRMGLPAVPFSTQSCAVSAVYYHFSQGRLAVPPGAAADGSDGGAGAAALSEAFLGLPEMERSELPSFVFDHGPYPTIAMQAIKQFAHAGKDDWVLFNSFEELETEVLAGLTKYLKARAIGPCVPLPTAGRTAGANGRITYGANLVKPEDACTKWLDTKPDRSVAYVSFGSLASLGNAQKEELARGLLAAGKPFLWVVRASDEHQVPRYLLAEATATGAAMVVPWCPQLDVLAHPAVGCFVTHCGWNSTLEALSFGVPMVAMALWTDQPTNARNVELAWGAGVRARRDAGAGVFLRGEVERCVRAVMDGGEAASAARKAAGEWRDRARAAVAPGGSSDRNLDEFVQFVRAGATEK

SEQ ID NO: 8072 - protein, 190 aa, Zea mays
  unsure (1)..(190): unsure at all Xaa locations
  Clone ID: ZEAMA-23APR03-C37187_1.p
QMKQMSEDNQQLNYLKNKMVKTEQRSKXVEETLGVITQKLRETMEENVFVKRKAKEKHLEYEEEMKHQEEFFHSQIEGIHKATEDKEKRFEKLLQEERSKARRFDVDSGTTEEDRKLRKEHVQKFIDCQVKNVAEFEAERDELIKGHEEKKMKLKKQYMEKELELERDHDAALTALMEKHKPDTFEASSS

SEQ ID NO: 8073 - protein, 236 aa, Zea mays
  Clone ID: ZEAMA-23APR03-C3724_2.p
MALLQPTLLTPPPLCCCSHGLLYPGFLKLPPKFSNGACCSTARASDRSELAGKSGGLAWRAAGRKGRLLGVTGAGRGPFFGGGGRRMDKGTSRVVGNLAFAAVVTYLAVTGQLRWVIDAIVSLWLLTILLPVLALGAFFFFAGQDILQGDCPNCGKSFQILKSALKDGPQLCPYCTQPFSVQGNKFVRESARFSSGRAATATNGPVFNEIFNRNMRGTAAPSETIVDVEAEVKDVE

SEQ ID NO: 8074 - protein, 317 aa, Zea mays
  unsure (1)..(317): unsure at all Xaa locations
  Clone ID: ZEAMA-23APR03-C372521_1.p
MSSLQTIDQRVRALAVDDAAPPTEHSFAXAAEEYYQKRPQLLALLADLHXRYLCLXADRYCHHQHKREQPSLPASASSDCGSSEVDDRCSDAGSSLSFQAQHAPPRAGLPADEEEELLVAELVAAWVERDVLAHEAARRAPESARRIQLQGSLVEVLESERLVLLGENARLGFRATAAEDEAXAAAADLGYARRRAAEMARLVLRLREDHRACVLGRRAEALQARVYALELRNRECCEATAAWEAEVQRLSAENRRLADQAMMARRKRKAGGGGWWARVRMAAAGWTPCAPAVTVAEQTKGKEDGKYHHYGGGCFCV

SEQ ID NO: 8075 - protein, 270 aa, Zea mays
  Clone ID: ZEAMA-23APR03-C3730_2.p
TNRGKEKGNPNPFPPRALKPFTWAWACQLLPLRPRPCLLAGWSALSRPSYSYEESTVETEVRAAHNVLEACAQTDAMERVVFTSSVTAVVWSGAGAGVGAHREEVADERSWSDLAFCRKFKLWHALAKTLSEKTAWALAMDRGVDMVAINAGLLLSAPGPGLGLTAAHPYLKGAPDMYDGGVLATVDVGFLADAHVAAYESPTAYGRYLCFSDAVCRPEDAVKLAQMLSPAAPRSPPPSDELKVIPQRIQGKKLNKLMLEFASGVYGELD

SEQ ID NO: 8076 - protein, 109 aa, Zea mays
  Clone ID: ZEAMA-23APR03-C37375_8.p
VRNLDGAVQGMRCSMRKKGLHPEIYEDAKVYCNGELVLVTGGTKPEYTVDVWSGNHPYYVGDTSALVVMDSQIEKFRKKWGHVKEYWPEDQWREMHPDGDPEFEPEGDN

SEQ ID NO: 8077 - protein, 488 aa, Zea mays
  Clone ID: ZEAMA-23APR03-C373834_1.p
MAASRRLARKLPSLISRYERLISPETDAPELTEAPTTSASIPFDPSLPVLPLAVSHLSPPNPLPVLPSAHASSPASLFRLLRRARHHPRLVALDLHILLAAADASSAFRPDHSLTSLVAARLAASRRLPSLQRLLELVLTRPCPCADDSIFACPELLPTFRKAIVAFAASGDIPSASHALASLRRVADSPLPAEFYNIILQALSRLRRHDDAIRFYGEMTSVYRVAPDVHTFNILISSSCRVEGVDAAMRWFGEMQRRSCAPTVVSFNTLMRGFIREGRYKEGTKVAREMLELGVGLSVASMEILIGGLCRGSKALEAAELFVEFLGDGVVPEGFDCFEVVEALCRGGKVDRAVEAVDMVLERNTKCCMSAPAGATVLECLMEAGKLDEVYRLMWRMIDQGIVPDSISCNCIFEALCEAGRTADANQLRVFAKEKGFEADGETYRMLVQGFGRQGKRKEGKAVLDEMLDLGFIPNIASYNRLLGGLHK

SEQ ID NO: 8078 - protein, 258 aa, Zea mays
  Clone ID: ZEAMA-23APR03-C37450_1.p
MAGAAEGAGAEAVERAHGLYRGGRHREALELYSAALAAARSPAQRIALHSNRAACYLKLHDFHKAAQECTSVLELDTEHAGALMLRAQTLVTLKDYQSALFDVNRLIEINPSSEVYRNLQARLKTQLSLAPIPECEEESLCREEEEEELPPRVQKTDTSSIAKPDQPATKLVLENKPSAGPILHRKPATEPLKAVVPSTSPSKPQGWEAIPKPKSHSGLDYSKWDKIEEDSSEDEDDEEDELPQYKFKVRSVGVRSVK

SEQ ID NO: 8079 - protein, 319 aa, Zea mays
  Clone ID: ZEAMA-23APR03-C375565_1.p
MAARAIVVLVSLILAVVAGGASAQLSSGFYSRSCPGMLKAVRSALRPAIARERRVGASIVRLFFHDCFVQGCDASLLLDDAPGLSGEKNAKPNKNSVRGFDVIDAIKTAVEKECPGVVSCADILAIAAEESVVLLGGPSWEVKMGRRDSTTASFNGAENNIPPPTSGLANLTSLFAAQGLSQKDMVALSGAHTIGQARCTFFRDHIYNDTNIDSGFARSRQSGCPRTAGSGDNNLAPLDLQTPTTFENDYYKNLVQKRGILHSDQELFNGGAADALVRQYIGSQSTFFKDFVVGMVKMGDITPLTGSNGQIRKNCRRIN

SEQ ID NO: 8080 - protein, 240 aa, Zea mays
  unsure (1)..(240): unsure at all Xaa locations
  Clone ID: ZEAMA-23APR03-C37565_1.p
MNDLMTKSFMSYVDLKKAAMKDLEAGGDGIELPESGAGGVTDERLRGFFQEAEAVKAEMAAIRDALDRLHAANEEGKSLHQVDALRAHRGRXYKETVERRYYTLTGEVPEEEVIERIISDGRGEELLGAAVAEHGKGAVLAAVHEIQDRRDAAREVERSLLELHQVFLDMAVMVETQGEKLDDIESHVANASHYVQGGNKELGKAKEYQRSSRKCLCIGIIILLLLVLLVIVPIATSLRR

SEQ ID NO: 8081 - protein, 473 aa, Zea mays
  Clone ID: ZEAMA-23APR03-C3759_2.p
MIAGGGYFDGSHDHILMEGSMIHDSSQSSIYDNTDVEQQNFRFAPFIIEDHSNPANLTSEAARVIDQIQHQLGIDIEQDHSDHMMQEVPPAETENLVPAVYGVQDHILSHQIEGPHNITVEQQVLGYDPASYRNGTYAAAHDLLNSLHIQRCSLIPEFPSTEHIFSDPAQNMVNRLDITNDLPGVANHESGMMFSDSTVPLGYHATQSHMLKDLYHSLPQNYGLFTSDDERDGMVGVPGVSGNIFQEIDGRQFDSPILGSRKQKGGFGKGKGKANFATERERREQFNVKYGALRSLFPNPTKNDRASIVGDAIEYINELNRTVKELKILLEKKRNSADRRKILKLDEEAADDGESSSMQPVSDDQNNQMNGTIRSSWVQRRSKECDVDVRIVDDEINIKFTEKKRANSLLCAAKVLEEFHLELIHVVGGIIGDHHIFMFNTKIPKGSSVYACAVAKKLLEAVEIKKQAYNIFN

SEQ ID NO: 8082 - protein, 160 aa, Zea mays
  Clone ID: ZEAMA-23APR03-C377742_1.p
MEFGCAAMAIMQPVVATVVLRIGSTGLHCDGCMNRIRRKLYKIKGVEQVRMDLGKNQVTVTGTMDAKALPEKLRKKLRRPVDVVAPGSGNKDVKDKDGGGGGGKEKEKEKDGKDGKDAAITKALSAELEAWKAAFYDQQSLSNAEFMLSDENPNAACAVM

SEQ ID NO: 8083 - protein, 324 aa, Zea mays
  unsure (1)..(324): unsure at all Xaa locations
  Clone ID: ZEAMA-23APR03-C3778_2.p
MTIDLGLQAAPPPPSSGGGGAGAGVPSSCTALPPGFRFHPTDEELIVHYLRKRAAAAPCPAPVIAXEVDIYKFDPWDLPAKAVFGEAEWYFFSPRDRKYPNGVRPNRAAGSGYWKATGTDKPITLSSSSSAAAAAGMIGVKKALVFYRGRPPKGVKTSWIMHEYRLAEALHAVVNAYRPTRFKNNASSSMRLDDWVLCRIYKKTTPQLAYSMSPPPHEEVEASSTSFMDGGGGFDLSRLHPPDDGGGGDDIMALAAATSYYAARPLPRPASISDYLLDYSAVSELFEATPLPETRCSPGRRRTQHAGSTTTSVTAAASLLQPPP

SEQ ID NO: 8084 - protein, 464 aa, Zea mays
  Clone ID: ZEAMA-23APR03-C3782_1.p
MRAARRLARVRREALAACMTCPLCRGLLREATAIALCLHTFCRDCIVEKINDDDADCCPVCNIDLGCDPEEKLRPDHNLQDIRNKVFPIKKINADSPKSLTTLPAKRKQRSLSSLVVDTPRSVVKRTGLTGKRTKAKRKTVASSAASPINNGTMQLPTKFENRDQKTDKSCASQSTNVASAANKTENQDLKKTRKTSAKQSTRAATSANRKQQNTDVDVSSKPSSENRNNGTTADKDELRKYSKIPRSTPKIHAVNEEQIKKKEDELPTRKAEADNKVVIPGTTVREHSNNSNLKEKDNGSSPESSPLKDKTTADDDSYQCLLGSASDVRDPITTPVWFLLISLPNQKEDPQLPQLSKSYMRIKDRSLQISSVQRYIMKKLDLANENEVEIICHCEPICPSSTLHGLMELWHRRQPAEPVEALVGAPAKEFVMELGFRRRRPPYLAPGTVARGASGALLISLQG

SEQ ID NO: 8085 - protein, 217 aa, Zea mays
  Clone ID: ZEAMA-23APR03-C378506_1.p
LVWLSSSLRTGPHRRPRVRQQWRAVETTAAASSRCQRGRRRRRRRERDTGFSLGRRLLPVGRPQRSSPPPSVSCYTCGYCRREFRSAQALGGHMNVHRRDRARLRQCCSASAAAHPSASLPSPALTARHQHSRAPIPNLNFSPQHCAAGGSMAAADPVIYSLFSTTTSSSTAVATKAAVEVSLELGIGVCGRSSGRGGGVVEDDGLDLELRLGCAWE

SEQ ID NO: 8086 - protein, 114 aa, Zea mays
  Clone ID: ZEAMA-23APR03-C37974_1.p
MKAVVAATMLLLVLVAAATVASADHRDDDGHHHQRHRGQSWHRHSGGGRDGRRSTPLAGLTQCVTSCGSGVTSCMLDCYQPLVDLDPVELPVCLLKCTNDAMVCATGCPVTGNV

SEQ ID NO: 8087 - protein, 330 aa, Zea mays
  Clone ID: ZEAMA-23APR03-C380318_1.p
AVSCLSSPSVSSSWFARTSHLLRPVATPGRRSSSAYGTVDHRILSPTIWRWRCAAQRTRNRTLILTMLNKAYSEEGGLLDLFLESLREGDGTEQLIDHVLFVAMDQQAFRRCRSLGGLKCYLLRPPTDSADDLSSEQLYMSDGFIRMMWRRIRFLGDVLKHGYSFVFTDMDVMWLRNPFPKLDRGEGEDLLISADKFNGMPHDYAGNELNTGFFFVVSNDRTVALFDEWHAARQVSAGMKEQDVLNRMKRRGAFRRLRVGARVLDTARFSGFCQDSRDAAQVATVHANCCRTKRAKVADLKAVLRAAEGLNRTRMEIKWPAHSECVKSWL

SEQ ID NO: 8088 - protein, 374 aa, Zea mays
  Clone ID: ZEAMA-23APR03-C38130_1.p
MLSSASSAAGAAMGMGGGGYAHQPPPQRAVFTAAQWAELEQQALIYKYLMAGVPVPPDLLLPVRPGPAAAFSFAGPAAASPFYHQHHPSLSYYAYYGKKLDPEPWRCRRTDGKKWRCSKEAHPDSKYCERHMHRGRNRSRKPVESKTASSSSPAHPSPPQLSTVTTTAPLEPLAAAGGKVHGLSLGGGAAGSSHLGVDASNAHYRYGSNRYPLGAKPDGGELSFFSGASSGNNSRGGFTIDSPSDNNSWHSALASSVPPFTLSTKSGDSGLLPGAYASYSQSHSHMEPPRELGQVTIASLAQEQERQQPFSGGMLGNVKQENQNQPLRPFFDEWPGTRADSWPPEMDGAPRAGRTSFSSSTTQLSISIPMPRCD

SEQ ID NO: 8089 - protein, 400 aa, Zea mays
  Clone ID: ZEAMA-23APR03-C38136_1.p
MTVIKAAGAEPCGDGGAYGARRRQSLRARYAYGFVFFATNLLAWFVRDYGARALRGLHHVPVCGAGDSKCFQSGGVLRVSLGCFIFFWVMFATTFGTRKLHEARNSWHSGCWILKSLVYAMSIGIPFIIPNIFIQFYGEVARLGAGIFLLLQLISMLHFISWCNKRWMPDPGSNQCGLFGLFLSTISYIASFVGIGVLYVLYVPNSSCAFNIFTITWMAILVTIMMAVSLHSKVNEGLLSSGIMSSYIVFLCWSALHSEPQTGKCHSHMKIAQDGDSATIVSFIIAICSIVMATFSTGIDTKSFQFRNDKVQLDEDIPYSYEIFHIVFAMGAMYFAMLFISWELNHPTRKWSIDVGWASTWVKIINEWFAASIYLWRLISPVVLRNQLANEELMPHRPTV

SEQ ID NO: 8090 - protein, 363 aa, Zea mays
  Clone ID: ZEAMA-23APR03-C3813_2.p
MKPMATNGMAPSFYPANFLLQMQQALPHHYQQQEQHHEGHDDEDHEAAHHLLAPPPAALVSPFLHDFGGAMAAAPPPPMLAGGFGGKRMYPDVGGMAGDDSHHLHAEPQQQQEQQASDDEEEGSAAVGGGERKRRLSVDQVRTLERSFEVANKLEPERKAQLARALGLQPRQVAIWFQNRRARWKTKQLEKDYDALRRQLDAARAENDALLSHNKKLQAEIMALKGGGGGGGRQEAASELINLNVRETEASCSENNSSEINGLDVSRPDPAAGESPAMNSYRGGLPFYASAAARADIHHQLLHSGGQPSPAAAAPPKMELAPGSPPATAGGGGGTFGSLLCGAAVDEQPPFWSWADGHHTCFQ

SEQ ID NO: 8091 - protein, 103 aa, Zea mays
  unsure (1)..(103): unsure at all Xaa locations
  Clone ID: ZEAMA-23APR03-C38179_1.p
FAGAGMLGIPGGSGAASXHALSALRYAAGLGENLQVQGLPFGARAEHDAMEMKPAATDRLLSLDWYSETSRAPESAISSLGALGLWSGMLGGAHQHHGSSAAI

SEQ ID NO: 8092 - protein, 320 aa, Zea mays
  Clone ID: ZEAMA-23APR03-C381868_1.p
MSTTVSPPPDSFGDAPTAPGTPSSNFTLLYIIIAVLTGVILYVAIRHGQSVLAEWQRLQGGGQGEAEASGTRLGLSVEDIAALPTFTYQARAASASPQGGGMSRSKGRTPGRAVVECVVCLQEMEDGDVVRALPACRHFFHGGCIDAWLSAHSTCPVCRAHPKPERARLAEAPMSPPLPQLRRCGVSPERSTASRVLVDILARSPLRNSCSCSTSGSKSKETIVSKSPSPRLHFGSRIPSPKPQLSGRVEDRCSMSPPSGLSEIVVVPSKSPSPMRFSTSRQLTTARSVATLERIEVIASASPSPLPIREDGGGSLSKSQ

SEQ ID NO: 8093 - protein, 318 aa, Zea mays
  Clone ID: ZEAMA-23APR03-C3821_1.p
MATVAARRLLQPRWVAGGRCRLLGTAAEASPGGEGARGGGGGSGDAIFVKKPAAAAAVMTRDETSVAMPTSFMTGSVVGKRFYRDATVRRADDGNGWTVMLDYRTLKSPAKRVLKLPSRALAMAIAAEWEYQESDGIRPFTMPLMKLACTALERVPLTRRKVIDNLMKKFHQDLVFCRSPADSELTIGVHQKQKEKIDPILEWVDTEFGFKPVVYTSFFGGKQDEGLAKAVETVLKKATDCELASIDAMAAAAHSLVIPLAIFRERLGIEEAIELIRLEEDHQVDRWGLVEGGHDVDIADLKVQMSSAVVFLGLSRGL

SEQ ID NO: 8094 - protein, 345 aa, Zea mays
  Clone ID: ZEAMA-23APR03-C3822_1.p
MEEEKAAAYYDELNRKGEGARRFKQGLGFSSSSATAFPSKPTASSFLSGFVRAGAAPGPAKQPLPHSRTPSSPHHRSSSPPLSRPRIRSRSRSRSPSRSSRRQSRSRSRSRERRRRSRSRERDRRASCRRSRSRGSRSPSRRSGRSLHLEARRERHGDQRRRHDDGHQSSKGRSDRDGGKMDYSRLIKGYDKMTPAERVKAKMKFQLSETAAKDSTLGTATVGWERFQFNKDAPLDEDNDDVEVANDDASLVKNIGKSFRLSAVESKREDKIRDAHDEAIFGVPTTSFVDVEIGGDELKTNHEDGKVEDTESDEPSSSLISDKVLAMQKGSWRDRAQKLRKNLNT

SEQ ID NO: 8095 - protein, 300 aa, Zea mays
  Clone ID: ZEAMA-23APR03-C38278_1.p
MEAGLRALGHRYFGGGGGGLGGFAAARATRLRRQRQRRMAAFCSREWQGIPPLPPSTSYRSGVSVYLTSLPTLANVSAVAVNGDGNGAAGGPVGSGVEVARARRMLHVVLVSPLIPGNTGSIARTCAASAVGLHLVGPLGYKVDDTKLKRAGLDYWPYVVVKIHDSWDHFCDYFMKQEGDKRLLAFTKRGTHIHSYILAVATMKTVADFSYRPGDWLVFGSETKGLPQQALEDCCREGLGGGTLRIPMVETYVRCLNLSVSVGVALYEAARQLNYEQLQYQPDELPEEAQELFPAEDIYA

SEQ ID NO: 8096 - protein, 441 aa, Zea mays
  unsure (1)..(441): unsure at all Xaa locations
  Clone ID: ZEAMA-23APR03-C38284_1.p
MMMNTNAMSPTASTDADFSFGPLQPYVGFDVXGMGMPSVVVERSSSLLQHNTSSSSHNNNLGLYDSFDFAAAAGLPFQESGLLPPASLPLAPSPQSMAAMAMPPSSLLLTLPGVPAAADVVYNPFGGGGAGGFLKREDGGPLVDAAGGGGRIGLNLGRRTYFSPADVLAVDRLLTRSRLAGGGVGVGLGMGLGMGVLGLGAAHHQQPPPRCQAEGCKADLSAAKHYHRRHKVCEYHAKASAVAAAGKQQRFCQQCSRFHVLAEFDEAKRSCRKRLTEHNRRRRKPSSAQDEDSSPPPPKKLDTCITNTASYNDDLKTGASNTAAAAISPNGSGVSCLDVMDNGQTSSAAAPTALSLAAPPPPPLHEKDGSLDSMLMQRVLQGRREDDDDEQRRHFITSLVMQTTQQQHSGGGGAGNILSCSSVSDQHNGGGCNGFFEVDFI

SEQ ID NO: 8097 - protein, 639 aa, Zea mays
  unsure (1)..(639): unsure at all Xaa locations
  Clone ID: ZEAMA-23APR03-C38338_1.p
MASDSVTSTTVEDGGAHESKQEHLNGAVGTPTVGQEEEIIGPGPAPAKQRRKRPLQFEQAFLDALPSAAMYEKSYMHRDVVTHVAVSPADFFITGSADGHLKFWKKKPVGVEFAKHFRSHLSPIEGLAVSVDGLLCCTISNDRSVKIYDVVNYDMMFMIRLSFVPGAIEWVHREGDVKPKLAVSDRNTPFVHIFDTHSGSNDPIMSKEIHGGPVKVMKYNHIHDVVISADAKGLLEYWSPSTLMFPENEVRFRLKSDTNLFEIAKCKTTVSAIEVSNDGTQFAVTSPDRRIRVFWFKTGKLRRVYDESLDVAQDLQRSDVPLYHLDAIDFGRRMAVEKEIEKTENVPQPNAVFDESCNFLIYATLLGVKIVNLHTNKVSRILGKVENNERFLRIALYQGDKGNKKVRKIPSVAANVNDSKEPLSDPTLLCCAFKKHRIYLFSRREPEEPEDATKGRDVFNEKPPPEELLSASDLGKTATTSLPDNLVLHTSMGDIHLRLYPEECPKTVENFTTHCRXGYYDNLIFHRVIKGFMIQTGDPLGDGTGGQSIWGTEFEDEFHKSLRHDRPFTLSMANAGPNTNGSQFFFTTVATPWLDNKHTVFGRVVKGMDVVQQIEKVKTDKNDKPYQDVKILNVTVPKT

SEQ ID NO: 8098 - protein, 187 aa, Zea mays
  unsure (1)..(187): unsure at all Xaa locations
  Clone ID: ZEAMA-23APR03-C38339_1.p
RESFSTAVGAMDPSSGKPEEVAAYQSKEAKQARLQSMLAALLDDPILADVPRKPSLADVDTLINLELGSAMRLTVVKLDNTSFDVAVLNSATVKDLKXAIRKKINEIEQEKMGHRHISWKHVWDNYCLTHHNEKLIEDNSTLSSYGVRNNSKVCFSPHVMSRVHRKHSRRRKHRFFHGLSRKANPTL

SEQ ID NO: 8099 - protein, 278 aa, Zea mays
  Clone ID: ZEAMA-23APR03-C383795_1.p
MAPNTSLLVLLFLLPAAATAAAPATGNTAFNVTEILGRYPEFKLFNLLLSKTRVAREVNSRSPVTVLVPGNSAVDWLLRRSARLPRAALVELVSVHVALDYIDAAKLASLPRGQPTVVTTLFQTTGSALGRTGFLNVTAAGRGGASAVFVSAAPGSLVSATLKRAVTAKPYNISVLQISNLVVPPGIITRPRLPLPPSPSPPAPRMTQMAVAPSPPPTLTSPRQSPSTLLPASVGDTAEAPDTAEAPVPSHGHVAQVASWWTAAAVGMAMACILIGYL

SEQ ID NO: 8100 - protein, 133 aa, Zea mays
  Clone ID: ZEAMA-23APR03-C38403_1.p
MSGYEEKRIRSYRLQLQKRIEMAQARKEELQKLPEKVILSEVRQAVQKMQAVNQQLDEAEAAIDEYFKPIDKNAKIIADMQLEKEEKQTKEMTKLMQEQMKMRREIMMTRAEAASVESSDTKAGGKVANIPPK

SEQ ID NO: 8101 - protein, 243 aa, Zea mays
  Clone ID: ZEAMA-23APR03-C3846_2.p
MASADLLRKEEEFYSSLFDSAKGDGVKSRSQVIERKIESLEDMATKVSNRRSRRWLNDRLLIELVPRLHVEEIKGLFAPPPWGEELPLSAFCRTSVSDWEAFRSIDMDAEARLMQHMKRSSEKQRTHVDEDELIALNAWRRIGRQTREAIKKKFLPDLLQIYEEQVRAFIEGTGDSDVLVLNVQDPFQRLLLHGVCEFYNVTSMTTSSVRDGKPWKSTTIKKRHVTGLPPRITLVSFLRMRKN

SEQ ID NO: 8102 - protein, 256 aa, Zea mays
  unsure (1)..(256): unsure at all Xaa locations
  Clone ID: ZEAMA-23APR03-C38521_1.p
MAEREQQEQVASDDAAEWKQVAELRAVTQAQDPSCKDEDDYTLRRFLRARDHNIGKASAMLLKYLKWKPAAKPHGAIAAAEVAREAAQGKLYLQGHDREGRPLIYGFGARHHPARRDLDEFKRYVVHVLDATVARLXPSSPPGDGRQEKFAAVADLAGWGYANCDIRGYLAALDIMQSYYPERLARVFLVHVPYVFMAAWKIVYPFIDDNTKKKFVFVPDKDLDRTLREAIDDSQLPEIYGGKLKLVTPAAKLPSH

SEQ ID NO: 8103 - protein, 517 aa, Zea mays
  unsure (1)..(517): unsure at all Xaa locations
  Clone ID: ZEAMA-23APR03-C38541_1.p
MVSESNRGGADRTTAAGEERGQLLFDVPEIRFTKLFINGSFVDAVSXRTFETRDPRTGGVIASVAEADKEDVDLAVRAARAAFDHGEWPRMSGSERGRIMARLADLVEERADELAALESLDAGKHPAVTRAVDVGNAAGSLRYFAGAADKIHGETLKMPGQFQGHTLREPLGVAGVIIPWNFPSTMFAVKVAPALAAXGCALVVKPXEQTPLSALYLAQLAKQAGVPDGVINVVPGFXXTAGAALXSHMDVDMVSFTGSTEVGRLIMKASXESNXXPXYLELGGKSPLIXXXDADLDMXVEXXVGASFFNKGEACVAASRVYVQERVYDRFEERLPERMRSWVVGDPFSDPSADQGPQVDKAQYERVLSYIDHGKREGATLLTGGRPCGPEGKGYYIEPTVFTNVKEDMIIAKEEIFGPVMCLMKFKTVEEAIARANDTRYGLGAGVVTRDLDVANRVVRSVRAGVVWVNCYFAMGSDCPFGGRKMSGFGKDEGMHALDKYLAVKSVVTPLRASPWI

SEQ ID NO: 8104 - protein, 227 aa, Zea mays
  Clone ID: ZEAMA-23APR03-C38583_1.p
MANPRRAIALHIQTQPPPLPSTAAALPPHTLASSLLHFLKRPASFPFLLSLFVLLTWLSLRFHHPSPPPSLGGRPSVVHEPQANLVRFPAELYPTPIARDGRGWLLDPVAAARDAGLPGGALVCLLLHVGQIQPGGLRGNHRHHTCNETFVIWGAKTKFRLENAGIKDEGYGEAMIAADEVAIVASARSTAHALINMDVRPTFFLGCQDTPINPNSSNTDYKVWKDL

SEQ ID NO: 8105 - protein, 290 aa, Zea mays
  Clone ID: ZEAMA-23APR03-C38585_2.p
MPAPPHPTPLLPPAGEPFRVFVGYDPREHEAYEVCRRSLLRRSSIPLDVRPIRQAELRAAGLYTRARGPTESTEFSFTRFLTPYLAGYRGWALFVDCDFLYLADLADLLAAAAAADRAAGAGRIAVACVKHEYQPAEATKMDGAIQTVYPRENWSSMVLYNCGHPKNVAALTPEAVSTQTGAFLHRFAWLDDDEIGEVPFAWNFLVGHNRVDPADPDTRPRAIHYTSGGPWFERYRDCEFADLWLKEAEELRADKDKEKDKLKLLKEMDDANGKQEVEEEAAQEKEEKGK

SEQ ID NO: 8106 - protein, 363 aa, Zea mays
  unsure (1)..(363): unsure at all Xaa locations
  Clone ID: ZEAMA-23APR03-C386102_1.p
MDSFGDLGGGGSSSSRAASAPFLQLPLPASTSSSXTTTTGVSAAGRAAAAALSPQLAHPVATVTVTGRPVVGSXHSHRKADMATVQGEMSSPAADGDADAIKARIMSHPQYSALLAAYLNCQKVGAPPDVSDRLSAMAAANLDAQPGPISRRRGPTTTRADDPELDQFMEAYCNMLVKFHEEMARPIQEATEFFNSMERQLGSTISDSNCEVAGSSEDEQDASCPEEIDPCAEDKELKHQLLRKYGGYLGGLRQEFSKRKKKGKLPKEARQKLLHWWELHYKWPYPSETEKMALAETTGLDPKQINNWFINQRKRHWKPASEDMPFAMMEGGFHVAQGTAALYMDRPAPPFMADDGGMYRLGS

SEQ ID NO: 8107 - protein, 180 aa, Zea mays
  Clone ID: ZEAMA-23APR03-C38713_1.p
VTDATTPPVVLPRQSDSAASPVASCGKPSTTARDAGSRRVASLTRRARASTRLRSASSESVSSPPTAIRKGRVACRAGARRSNPLSMSPPTSPTSSSLVASSTASTGPWKPPTGGPESRVNPFSMSTIPSSSSSAVSSSTAPRSNSDPTPPRAFREIISSSSSSSPEVSSTSCDAGKRWG

SEQ ID NO: 8108 - protein, 312 aa, Zea mays
  Clone ID: ZEAMA-23APR03-C38812_1.p
MDFDEHDDGDEEMTPMPVSSSYDAPMQPGLGLGGGGGETPKHGDSAGAGSFRTPPAGGFGGGGARAGAGAGAGAGGGGATRYRECLKNHAVGIGGHAVDGCGEFMAAGEEGSIDALRCAACGCHRNFHRKESDNSPAGGGGVAPPDPAAALSPAAITAYGAAVAAHHHQFSPYYRTPAGYFLHQQLAAAAGHMQRPLALPSTSHSLGREEGDDVSGLIGPMVVAPMMGMSLGPGGGPSGGSSGGSGSGKKRFRTKFTQEQKDRMLAFAERLGWRIQKHDEAAVQQFCEEVCVKRHVLKVWMHNNKHTLGKKP

SEQ ID NO: 8109 - protein, 150 aa, Zea mays
  unsure (1)..(150): unsure at all Xaa locations
  Clone ID: ZEAMA-23APR03-C3890_6.p
IQNLPGMWQLDVPPNQIVAVANRLFSSGDCLTSWKGHVEVYDGELNIXSIMDHSALPDLSLLASLPSSAQRLYLTMAVVGTQLYFLAGYQVPSGDDSFRTVSLVHSFDTSAAPGLAPAWSSFRPKMSPEDAEDGDKELLFSQCCTVQLSN

SEQ ID NO: 8110 - protein, 126 aa, Zea mays
  Clone ID: ZEAMA-23APR03-C389192_1.p
NIVESEDDVSYGYGFFHFAFAAGSMYVRMVFVGWDTHHTMKQWSVDIGWMSTWVHIANEALVVVFYIAILVARIFGIGLLRHLLAKIFGTGDRLHSGESQTTTTHLMRCTQRRRLFHHSTEQLRRR

SEQ ID NO: 8111 - protein, 187 aa, Zea mays
  Clone ID: ZEAMA-23APR03-C389238_1.p
MDVTFVCSGEEAFKMEVGYFDTVQDVKEKLQSRRGWPAAATTLLHNGAVLEDVDGGGGGIERHGVVEGSVIHVALLDGQHLQQPQDKRTEKRRGEGPAPPLRVIVVSGCAEGRVEMAVGARAAVSMLRAELERARGAGARFPLPRDGAYFFIHEQSVMDESRSFEWHGVAAGDEIVVFNGSVTRNQA

SEQ ID NO: 8112 - protein, 484 aa, Zea mays
  Clone ID: ZEAMA-23APR03-C38933_1.p
MAGDDGRAPSGLRVVMFPFPFWSHINQMLQLGKLLRARGLGVTMLHTDFNAPDPALHPDITFVSIRESLPAEVVANPDMVEQMMQLNAVCEAPFQAALAGELLARGTTTGGPREVACVVVDGQWYKMLGAATRVAVPALVLRADGAATLLSMLATPRLRADGYLPIKGTRSTTLFSSPSPQERLDEVVPGLEPLRVRDLIRVDGSDDETVLRFITRNAEAVRASSSGVVLNTFEGIEGAALAKIRRELSGRPVFAVGPLHLASPDPAAAAAAGYQDAPDPTCLAWLDARPPRSVLYVSMGSVARVDRAVFEETAWALAGSGVPFLWVLRRGSVRGADADEEDVPPVPEELRETVRHRGKIVAWAPQREVLAHPAVGGFWTHCGWKSMVEAISEGVPMLVQPCFAEQIVNARYVTHQWGIGYEVGKPLERTAMAKAARKLMAGELGPQGPRERARLLKAQAKQCVAEGGGISLALDGLVDYICSL

SEQ ID NO: 8113 - protein, 217 aa, Zea mays
  Clone ID: ZEAMA-23APR03-C38937_4.p
MDKMTKVAVCVAAAHNLLSMMAVIIASRKRKRNARSAQITYAPLHDDKSDADCLNKPFEHFDEMQTIFGNTMATCKFAKDSSAGLGEDDETENEEVTARAFTKRQFACDDNVATSSASKSNKKAKKRDSEEELIAAFKSVADKLSNAIEKVATWDTDVPDDLFDNLLNLPGFEQTHISLYFNYLVAHPHIARAFNKLPFDHKLIWARNFASEKFSRV

SEQ ID NO: 8114 - protein, 285 aa, Zea mays
  Clone ID: ZEAMA-23APR03-C3893_2.p
LPSPATFLGGASRIRDRRNPKLLHRPEGRSSSTKEQTQQREVTLQEENAAYEKAISECKQKIQEKQMEATQLLSNLEEMEVTEHNLKTQLENALKELEAAQHKASTATSGTAENALLEAKSVTDLKSKDLEEKKRELELLDNKVQTLEKEWSVVEEESLKKPTPAQREKVLERQLHSLIEQLTAKQAQAEILATDVHSKEKELERLNHLHRNLYGGANETGAPRSRLSRGLLSGPEDYYYDPKAGRKPYQAGVRTEGQNRLMILRSAIVLYVLLLHVIVFIKISV

SEQ ID NO: 8115 - protein, 308 aa, Zea mays
  Clone ID: ZEAMA-23APR03-C38978_1.p
MDLYSIRGTFLVVAPKRILNSRLLFFSNAYRGATPQQPMADAAADLRRRMKEQRAAIQRRFIDSRNWAAAASSAFSAALLEARSIANQTVSNRAKLSEQKQHLRKLESDLAQALSVQTSRRSKHNLMTESILKTTATNEQLTHLVTGRRATRDECMNAISIQLKDIESLESESDLGFQVVGGEGVKFMFNKIDVQSPDKECYFCVKLVEGRYTLVQCVPSVDGAEELVKDLNCNNDLYKFVRVVRDRLQAAIISGNMLSSSFCADLSSITSSSFSASSLDSTSENNINRSQSKNQECPVKGLAKSLAM

SEQ ID NO: 8116 - protein, 348 aa, Zea mays
  Clone ID: ZEAMA-23APR03-C3899_2.p
MAPSPRCRPSTTRRRRTTGRAPRSSGSALSSSAHPSFISTIAQYVCRSPIATPVFSSVGRTILLRPRRETKKTVNYLISIFFRKLHHALNPDPFRGAFGSDGEKYARDVQEIIEFGTTGRVGGFISEAIQGVGGIVELAPGYLPVAYSMVRKAGGLCIADEVQAGVARTGSHFWGFEGHGVIPDIVTMAKGIGNGIPIGAVVTTPEIAQVLTRKSYFNRSTFDGNPVSTAGGHAVLKVLEKEKLQENAFVVGSYLKEQLNNLKDKHEIIGDVRGKGFLLGVELVTDREKKTPAKAEISRVMNHMKDMGVLVGKGGFYGNVFRITPPLCFTKEDSDFFIEVMDIALSKL

SEQ ID NO: 8117 - protein, 276 aa, Zea mays
  Clone ID: ZEAMA-23APR03-C39010_1.p
MPRKPKRKAPASPARHDPSPEPYPSHASPCSAQCLVVRDALLAFHGFPEEFAAFRVLRLGGLSPNRDPRPSSPTVLDGLVTTLLSQNTTDAISRRAFASLKAAFPSWDQVVDEEGKRLEDAIRCGGLAATKAARIRSMLRDVRERRGKICLEYLRELSVDEVKKELSRFKGIGPKTVACVLMFYLQKDDFPVDTHVLRITKAMGWVPATASREKAYIHLNNKIPDDLKFDLNCLFVTHGKLCQSCTKKVGSDKRKSSNSACPLAGYCCIGEKLQQL

SEQ ID NO: 8118 - protein, 173 aa, Zea mays
  Clone ID: ZEAMA-23APR03-C39023_1.p
MNVAEEEVSMEREEKGGNVRDGEVRTTAAAAAAVSLETLRKRMADFATERDWEQFHSPRNLLLALVGEVGELSEIFQWKGEVPKGLPGWDDAEKEHLGEELADVLLYLVRLSDMCGVDLGKAALRKMEINARKYPVGQCKGSSKKHTHYGSTNNVGDSDKANAANKEQHSCGV

SEQ ID NO: 8119 - protein, 474 aa, Zea mays
  Clone ID: ZEAMA-23APR03-C390884_1.p
MAAAVSTVGAINRAPLSLNGSGSGAVSAPASTFLGKKVVTVSRFAQSNKKSNGSFKVLAVKEDKQTDGDRWRGLAYDTSDDQQDITRGKGMVDSVFQAPMGTGTHHAVLSSYEYVSQGLRQYNLDNMMDGFYIAPAFMDKLVVHITKNFLTLPNIKVPLILGIWGGKGQGKSFQCELVMAKMGINPIMMSAGELESGNAGEPAKLIRQRYREAADLIKKGKMCCLFINDLDAGAGRMGGTTQYTVNNQMVNATLMNIADNPTNVQLPGMYNKEENARVPIICTGNDFSTLYAPLIRDGRMEKFYWAPTREDRIGVCKGIFRTDKIKDEDIVTLVDQFPGQSIDFFGALRARVYDDEVRKFVESLGVEKIGKRLVNSREGPPVFEQPEMTYEKLMEYGNMLVMEQENVKRVQLAETYLSQAALGDANADAIGRGTFYGKGAQQVNLPVPEGCTDPVAENFDPTARSDDGTCVYNF

SEQ ID NO: 8120 - protein, 156 aa, Zea mays
  Clone ID: ZEAMA-23APR03-C39219_2.p
PPPLSYAAFVGSIFGYGQGLITKKGFKGSFSNAGSSAKTFAILSGVQSLVLCLLRRLRGKDDIVNAGIAGCCTGVALGFPGAPQALLQSCATFAAFSCIMEGLNKQQAAMARTLGGTAVTVVHEKGGVLPPFTLPPILDASDALASCCLALVKPKH

SEQ ID NO: 8121 - protein, 331 aa, Zea mays
  Clone ID: ZEAMA-23APR03-C39272_2.p
MDLSGTQGELPMATMHAGGSPYLGLHHGHPQQHNHGANGRHMSPPDVVAEEAKNRQLAVVPVGTGGGGGAGVRYRECLKNHAAAIGGSATDGCGEFMPAGEEGSLDALRCSACGCHRNFHRKEPPGGDGRQLYGHHHHHPLSPLAAVHPHHHRGLLVAALPPAPTRMVMPLSAAMHHHQQPPQQHHSSASADSDDAHVPGVRGGEVQQQQQAPARKRFRTKFTAEQKARMLGFAEDAGWRLQKLDEAAVQRFCQEVGVKRRVLKVWMHNNKHTLARRGHAGLPGDPELLGPHDGQLGMPLPEPAAEPAVAAAAAAGLGVTDQAMSFGTGRH

SEQ ID NO: 8122 - protein, 389 aa, Zea mays
  unsure (1)..(389): unsure at all Xaa locations
  Clone ID: ZEAMA-23APR03-C39285_4.p
NPTRHHSHRVLSQIPVPHFLRPAAGVQMVAARPCISASPGILTARVAVSRTDCMLSXTTATFPKISCSWPLRFKRNDVVVRAISEECGPQGLPIDLRGKRAFIAGVADDNGYGWAIAKALAAAGAEILVGTWVPALNIFETSLRRGKFDESRKLPDGSLMDIVKVYPLDAVYDSPDDVPEDVKSNKRYAGASNWTVKEVVESVRNDFGSIDILVHSLANGPEVTKPLLETSRRGYLAAISASSYSYVSLLQHFLPIMNPGGASISLTYIASERAIPGYGGGMSSAKAALESDTRVLAFEAGRKGKIRVNTISAGPLGSRAAKAIGFIEKMIEYSYVNAPLQKELLADEVGNTAAFLVSSLASAITGSTVYVDNGLNTMGLAIDSPTITS

SEQ ID NO: 8123 - protein, 740 aa, Zea mays
  Clone ID: ZEAMA-23APR03-C392965_1.p
MEHRAAAPDVIVQVNSAAVAAVDERISTCQITEEEGGIVGHEQVPVGCLARRTFSQSYRTRPRNPLEFTGWQLALLAYQSLGVVYGDIGTSPLYTFSSFALPDPGTADILGILSLILWTLTLVSLVKYVFIVLHADDHGEGGTFALYSLLRQHVNFSGKSVPVPVTRLASDANLRFHSRKSSQQPRMLEFLEGSAMAQAVITYLVLVGTCMVMGDGALTPSISVLSAVQGIQSRSSSIKQGHVVLLCVVILVILFLFQQYGTSKVGFTFSPIMLVWFALIASTGLYNIIKHYPPVLKAISPHYIYLFFARNKRAGWEQFGTVVLCITGAEAMFADLGHFNKKSIQMAYSCLVYPSLILAYAGQAAFLIKNPSKLSTTFYSSVPEPLFWPVFVVATLAAIVASQALISASFSIVRQSVALGCFPRVTMKHTSKKYEGRVYSPEINYFLMVACILITVGFKGGPEIGQAYGVAVIWVMLITTHLITVVMVIIWQLHSAIAWSFYVIFAAIEGLMTISLLYKIAQGGWVPFAITAFFLIITLSWTYGRSKKQEYEVSNLMDRQEFIKTVNTSNRVPGICIFCTDLMNGIPPIVRHYVEHMGCLRELMVFVTVRHLPVTSVLPEERFLFDRLEPFGVYRCIVQYGYMDTQNMEDDEYVVSIVASLKEIAQSGAEILMMDSALANGTTFVLGRVILNMSPQRNNCFKRFVINNLYRFLQKNFRSNISSLKIAPSKTLQVGMQYEI

SEQ ID NO: 8124 - protein, 409 aa, Zea mays
  Clone ID: ZEAMA-23APR03-C394158_1.p
MAAARPGNLSELEQKWHNGGGPACVLGVGTANPANCVRQDEYTDWYFRITKSDHLTHTKAIMRKTCEKMMVKKRYLQVNEELFSVHPEFLDPAAPSLQGKLAVVAGAMPGLVAAAAEKAIADWGRPAGDITHLVFATSSSAQLPHIDLRIAALLGLSTTVQRTVIGFHACSGSSAALRVAKYIAENNRSARVLVACADMWSVMDSYVVPNVDHRYGIIGHAFIGDGAGAVVVGSRPQEPVERPIFEMVSASQATVPGSERAVAVELTNCGLEYRLEFGDVAAEVGGNIERCLLDALSPLGIGSVGWNNLFWVVHPGGPRIMDTFTAALKLQPEKLSASRRVLREYGNITGPTLIFVLDEAIRRRQLDHEEGSCEWGLMVGLGPGFTIDVMALRACSGKSTPTPRIKSSL

SEQ ID NO: 8125 - protein, 208 aa, Zea mays
  Clone ID: ZEAMA-23APR03-C39467_1.p
MVPANGAAGNGAPKPRVRARRGQATDPHSIAERLRREKISDRMKNLQELVPNSNRTDKASMLDEIIEYVKFLQLQVKVLSMSRLGATEAVVPLLTQSQAESSGGGLLLSPRSGSGRQQQARGGSLPPSSSEVRDGAAFEQEVAQLMESDMTTAMQYLQSKGLCLMPVALASAISGQKGASSAAVQPENGGAKEMLRAVKPLASPIHGR

SEQ ID NO: 8126 - protein, 265 aa, Zea mays
  Clone ID: ZEAMA-23APR03-C395102_2.p
MTPVTAVAIASEACVLSASAVASSSSTAGTAAARAEVPAAGSTDETGSGGGGAAERRSRFRRICVYCGSAKGKKASYQDAAIDLGNQLVERGIDLVYGGGSIGLMGLVSHAVHAGGRHVMGIIPKSLMPIEVTGEPVGEVRAVSGMHERKAEMARFADAFVALPGGYGTLEELLEIITWAQLGIHKKPVGLLNVDGFYDPLLSFIDLAVREGFVSEAARRIIISAPTAKELVMKLEDYVPEYDVGLVWEEQKPNSLVPAAGITSS

SEQ ID NO: 8127 - protein, 182 aa, Zea mays
  unsure (1)..(182): unsure at all Xaa locations
  Clone ID: ZEAMA-23APR03-C395244_1.p
MIAKLMECFYKRKAPEPNSNATGGSPEDDINWEEEIKYDPGLRKLIDEYHPNQRERVRRKYIDECHQLSLYINDVQDDDRFSNIQTIVELSKXMVETGKQRCYHLVYRLLKLVLVLPVATATVERCFSAMKVVKTYLRNRIGDEHLSNMLIGYVEKEEMMKVTNGAVVDQFIKMSERRYDID

SEQ ID NO: 8128 - protein, 100 aa, Zea mays
  unsure (1)..(100): unsure at all Xaa locations
  Clone ID: ZEAMA-23APR03-C395707_1.p
LKQLKXQLXDMQXYICLTIVKKMLLSNFFNNMNXICYILGXTGFRNCQMXLVFYSFFQTFQPMFNVKLVXVSDFIISHLSCSLGCSLYQTSCVQLVLFCH

SEQ ID NO: 8129 - protein, 231 aa, Zea mays
  Clone ID: ZEAMA-23APR03-C39589_1.p
PQKLGLPVGRHVYVCASIGGKLCMRAYTPTSPVDEVGHFDLLIKIYFKDEDPKYPNGGLMSQYLDSLPLGATIDIKGPHRHIEYTGRRRFVVNGKQRHARRLAMIQAGRGTTPDDDTEQAVLRDQPDDDTEMHLVYANRTDHDMLLREEIDRAWLPRTRRLKVWYVVSKVPEDGWEYGVGRVDEHVMREHLPLGDSETIALVCGPPAMIECTVRPGLEKMGYDLDKACLVF

SEQ ID NO: 8130 - protein, 450 aa, Zea mays
  Clone ID: ZEAMA-23APR03-C3962_2.p
MAKPKPSSAGAKPTAPAPPASPPSAPLTYTSMLALLSLCPPFVILLWYTMVHADGSVVRTYEHLRDHGVLEGLKAIWPMPTLVAWKIIFGFGLFEAVLQLLLPGKRFEGPISPAGNVPVYKANGLQAYAVTLITYLGLWWFGIFNPAIVYDHLGEIYSALVFGSFVFCIFLYIKGHVFPSSSDSGSSGNVIIDFYWGMELYPRIGKYFDIKVFTNCRFGMMSWAVLAVTYCIKQYEMNGRVADSMLVNTALMLIYITKFFWWESGYWCTMDIAHDRAGFYICWGCLVWVPSIYTSPGMYLVNHPLNLGPQLALSILLAGMLCIYINYDCDRQRQEFRRTNGKCSVWGKAPSKIVASYQTTKGETKTSLLLTSGWWGLSRHFHYAPEILSAFFWTVPALFNHFLPYFYVIFLTILLFDRAKRDDDRCSSKYGKYWKIYCNKVPYRVIPGIY

SEQ ID NO: 8131 - protein, 359 aa, Zea mays
  Clone ID: ZEAMA-23APR03-C396693_1.p
MKRTTDCAVAARAKAITAMSSSPSLICCSMSLGLLSLLLLLFSACYTAPTYATDCDPADRAALLRVKAQLGDPAQLSSWLPSTNCCAWDPAVFCNAAGRVTGLALYALPDVSARVPPALGDLAALEILQVDSVPGLAGPVPASFANLTRLLDLDIDGTSISGPIPGCLLAAAVNLRTLVIANSKLAGPIPSSLAALPGLRYLDLSGNMLSGAIPPELLHGSSRFLILSNNRLTGEIPGDYGDGDVDTIDLSHNQLTGDPSSFLFGITKPAVKIDLSWNQLEFDLTEVRFPHHLRFLDLSHNRVRGRVAKSLMDVRLEHFDVSYNELCGELPAGRFMSMHGAECYAHNKCLCGTPLPPCN

SEQ ID NO: 8132 - protein, 372 aa, Zea mays
  unsure (1)..(372): unsure at all Xaa locations
  Clone ID: ZEAMA-23APR03-C39734_1.p
MDPNDAFSAAHPFRWDLGPPAHAAPAPAPPPPPLAPLLLPPHAPRELEDLVAGYGVRPSTVARISELGFTASTLLGMTERELDDMMAALAGLFRWDVLLGERFGLRAALRAERGRVTALXRAAATSGAARGARDAGRRRVGGTAGKKVKGGDVGARKGKKARRKKELRPLDVLDDENDGDEDGGGSESTESSAGGSGGGERQREHPFVVTEPGEVARAKKNGLDYLFHLYEQCRVFLLQVQSLAKLGGHKSPTKVTNQVFRYANKCGASYINKPKMRHYVHCYALHCLDEEASNALRRAYKSRGENVGAWRQACYAPLVEIAARHGFDIDAVFAAHPRLAVWYVPTRLRQLCHQARGSHAHAAAGLPPPPMF

SEQ ID NO: 8133 - protein, 128 aa, Zea mays
  unsure (1)..(128): unsure at all Xaa locations
  Clone ID: ZEAMA-23APR03-C39785_5.p
MLKLAKEASRXNILFDYLIPLMGMDKCSANSVDSDNVNKASMVINGLPISVYASETLGVCSGHVHIRLMSNMLGGIGDSPLIRFDTYTCGACAVSCTLKWDVATVMEYKGLPLQQVVDYYVRGTMQNI

SEQ ID NO: 8134 - protein, 249 aa, Zea mays
  Clone ID: ZEAMA-23APR03-C397975_1.p
WNAEEVLDRLPPRRLVRRGAVLHEARASGLDFRPHGSAVVLLFPYFLLVEFTFYIAPIIQEEYGMFVWQCSLILAEYVWHHRSRFIASRVVELGAGTSLPGLVAAKVGADVTLTDIAQNAEVLNNIRSICALNDANCTVSGLTWGDWDESVFDLHPDIILGADVLYDSANFDDLFATVTFLLENSSGAVFITTYHNRSGHHLIEFLMVKWGLKCLKLLDGFSFLPPCKAALLQGNIQLVEIALDKEKHK

SEQ ID NO: 8135 - protein, 204 aa, Zea mays
  unsure (1)..(204): unsure at all Xaa locations
  Clone ID: ZEAMA-23APR03-C397975_2.p
AHHDLRVDIVENIQEDYGMFVWPXCSVILAEYVWQHRSRFSASRVVELGAGTSLPGLVAAKVGADVTLTDIAQNAEVLNNIRSICALNDANCTVSGLTWGDWDESVFDLHPDIILGADVLYDSANFDDLFATVTFLLENSSGAVFITTYHNRSGHHLIEFLMVKWGLKCLKLLDGFSFLPPCKAALLQGNIQLVEIALDKEKHK

SEQ ID NO: 8136 - protein, 656 aa, Zea mays
  Clone ID: ZEAMA-23APR03-C39805_1.p
MGGFPEATGNLLDAAAQEFHPTVCAPYPLQPLPQQLYCPHPYPAMPVPPPPQIAMLQPVPPMAMAMAPQPGYTLPTTTPVVNGPSSRVVVLGLVPPHAQEADVAQAMAPFGAIRSVDACAVASEGVATVHFFDIRAAELALTCVREQHMRQQSRLGQLYAAAAVAPAWAPAPTPQAWDWPHPNDDGRGLVLGHAVWAHFATGADDGDNRGSLVVLSPLPGVSVADLRQVFQAFGDLKDVRESAQRPSHKFVDFFDTRDAARALAELNGQELFGRRLVVEFTRPSGPGPRRRGYAPHQHRPTAPTPPRLQATWRPSQPTSSQPPASSSSSGSVRAREGVVLLRRSSCKSSAGSDQSSKGGNAGTSHERKTKGGKIVVAAAAASSSTPTASGKQTQKGVGSSGGGSWKGRKSGWEARFLFKEPEAGGGADTQATPASEMDTRTTVMIRNIPNKYSQKLLLNMLDNHCIQSNEWIVASGEEQPFSAYDFVYLPIDFNNKCNVGYGFVNLTSPEARVRLYKAFHKQPWEVYNSRKICQVTYARVQGLEALKEHFKNSKFPCDSDEYLPVAFSPARDGKELTDPVPIVGRSPAASSASSPPKSRAASVDRLGQELMPAPSSSADGASSTTTSTHAPSEHDEEEEEGDIRLAGELRRLGYDD

SEQ ID NO: 8137 - protein, 396 aa, Zea mays
  unsure (1)..(396): unsure at all Xaa locations
  Clone ID: ZEAMA-23APR03-C398236_1.p
MASRGGASVVLVVLCSSLLGFAPRPGAAGKPLVPAMFVFGDSLVDVGNNNHLASVNDSCKANYRPYGVDYHPGQSPTGRFSNGYNLADHLARWLGFAGSPPPFLSLANARARHTRRTTVSTGINFASGGSGLLPTTGDSVCGGAVVSMAEQVGNFTSLVRTTTWEGSKRRERTAPGLVSESLVFISVGSNDLFEYSDFFADPKNRNVSRNDTAFLGGLVALYATYVKDLYAAGATMFSVVSPSLVGCCPSQRKIAEDTHDVDGFGCXSGTANNLSRQLYPMIGSMLESLSQDELPGMKYSLGDAVAMAQWIFTHASTPPNNFTTPDRACCGSGDFGSGACNSSAPLCPNRSSFFFWDRFHPTETLAAVTAQQLFSDNGTFVHPINVQQLVAPSSRP

SEQ ID NO: 8138 - protein, 155 aa, Zea mays
  Clone ID: ZEAMA-23APR03-C398312_1.p
MREQQDSGDVTGRRGGVIRSLLGVERRLAEGDADAEGALGASSEKQHLAADSGEERKAVVRVVAADMPPALQRRAFRCARDELAAMPHFPRRLEPKRLALALKKEFDTAYGPAWHCIVGTSFGSYVTHARGGFLYFSVDKVYILLFRTAVEPSNH

SEQ ID NO: 8139 - protein, 181 aa, Zea mays
  Clone ID: ZEAMA-23APR03-C399099_1.p
MASSMLSSAAVVTSPAQATMVAPFTGLKSSASFPVTRKANNDITSITSNGGRVSCMKVWPPIGKKKFETLSYLPDLTDVELAKEVDYLLRNKWIPCVEFELEHGFVYREHGNTPGYYDGRYWTMWKLPLFGCTDSAQVLKEVEECKKEYPGAFIRIIGFDNTRQVQCISFIAYKPPSFTDA

SEQ ID NO: 8140 - protein, 336 aa, Zea mays
  Clone ID: ZEAMA-23APR03-C3991_1.p
MHASLASYAAAAMPALDLRPEIAHAHQPVMSPSHHGWDGNGATAVPTPMPKRLDGKVAIVTGGARGIGEAIVRLFAKHGARVVIADIDDAAGEALASALGPQVSFVRCDVSVEDDVRRAVDWALSRHGGRLDVYCNNAGVLGRQTRAARSILSFDAAEFDRVLRVNALGAALGMKHAARAMAPRRAGSIVSVASVAAVLGGLGPHAYTASKHAIVGLTKNAACELGAHGVRVNCVSPFGVATPMLINAWRQGHDDATADADRDLDLDLDVTVPSDQEVEKMEEVVRGLATLKGPTLRPRDIAEAVLFLASDEARYISGHNLVVDGGVTTSRNLIGL

SEQ ID NO: 8141 - protein, 226 aa, Zea mays
  Clone ID: ZEAMA-23APR03-C399320_1.p
APPPPPPELPGGPVNAEQSSLNNASQDRTRIPSMSMGNQVAREYAGNPQHMTPSITMQCDTRSLIPGGQFSGGSSVQTQTSRSSNMLALRPTQQPQNLDFSGLGQSTQPSGTNPFADWSRLQESSVDEYLMDEIRARSHELLENDEMQHMLRFLSVGGAPTGLNNVDGFLSYPSPAPAFGFDEDDRARSSGKAVVGWLKIKAAMRWGIFVRRKAAERRAQLVELED

SEQ ID NO: 8142 - protein, 952 aa, Zea mays
  Clone ID: ZEAMA-23APR03-C39950_1.p
MPLLLYPFSACVPPPRALLRRLSPPPPMAVVAPLPSAVRIIPSVGTLDLPALPPPPTDDFHWLDLFAFLNSPADTYHQIPAQGEEELEAGLELELELELEKHAEVERQRGRARRAQLRRLRQRQVKAETEAWARAAEEYREIEREMLDRRLAPALPYVKALFVGWFEPLRDAIARDQDVQRRKRVKHVYAKYLLLLPADKVAVIVMHKMMGLLMSSKDGTGSVRVVQAAHCIGEAVEREFKVQSFFQKSRKKKIQGENDPALEKEQAKCRKRVKSLVKRRKMSEAQRLVQQELELEEWGTEAQVKLGSRLIELLLDSAFVQPPADQTPDSSPDIRPAFKHVLRQPIIENGRLKKKHWVIECDHLVHEGFESTARHVDIPYLPMLVPPKKWKGYDKGGHLFLPSYIMRTHGVKDQKDAINSVPRKQLRKVFEALDILGSTKWRVNRRVHDVVETIWSQGGGIAGLVDKANIPLPERPESEDPDEMQKWKWSLKKAKKTNRELHAERCDTELKLSVARKMREEDGFYYPHNLDFRGRAYPMHPHLSHLGSDLCRGVLEYAEGRPLGKSGLCWLKIHLANKYGGGIEKLSHEGKLAFVENQLFDIFDSAANPVDGNCWWTNAEDPFQCLAACMDLSDALRSPSPYHAVSHLPIHQDGSCNGLQHYAALGRDYMGAVAVNLVPGEKPADIYSEIASRVLNVVCEDSMKDPATNPTASLARALVDQVDRKLVKQTVMTSVYGVTYIGARQQITKRLQEKGLITDDKLLYDVSCYATRVTLDALGQMFQSARGIMAWLGDCAKMIASKNQPVKWTSPVGLPVVQPYKKYKNYMIRTSLQCLALRREGDAIAIQRQKAAFPPNFVHSLDSSHMMMTAIACKESGLHFAGVHDSFWVHACDVDQMNQILRQQFVELYSMPILENLLEEFQTSFPTLEFPPCPPQGNFDVREVLTSTYFFN

SEQ ID NO: 8143 - protein, 173 aa, Zea mays
  Clone ID: ZEAMA-23APR03-C399_1.p
MDGDEENVGPFRRTSARTRRMATRMASALASSDNRAQAALARLEALESDNGGVEVVDLNDDEYGSTDEEDPVLMQKKQSKIMKRKTRQGKALEKRAARSLMDVLQEANLESVPPHVPTYSRAAVGPPSTSSRRHYCSVCGSSATYTCVRCGTRFCSCRCQVIHNDTRCLKFVA

SEQ ID NO: 8144 - protein, 398 aa, Zea mays
  Clone ID: ZEAMA-23APR03-C40062_1.p
MRPTRSAVSATALLLLAVALALAATAAARHSYTTTTTRVPAPAERADEEVRRMYEAWKSKHGRGGSSNDDCDMAPGDDEQEEEDRRLRLEVFRDNLRYIDAHNAEADAGLHTFRLGLTPFADLTLEEYRGRVLGFRARGRRSGARYGSGYSVRGGDLPDAIDWRQLGAVTEVKDQQQCGGCWAFSAVAAIEGVNAIATGNLVSLSEQEIIDCDAQDSGCDGGQMENAFRFVIGNGGIDTEADYPFIGTDGTCDASKEKNEKVATIDGLVEVASNNETALQEAVAIQPVSVAIDASGRAFQHYSSGIFNGPCGTSLDHGVTAVGYGSESGKDYWIVKNSWSASWGEAGYIRMRRNVPRPTGKCGIAMDASYPVKDTYHPGTGTATARAAAMDVIKMVLA

SEQ ID NO: 8145 - protein, 529 aa, Zea mays
  Clone ID: ZEAMA-23APR03-C4007_1.p
MLLHAKDSVRKMHSVAKNYFVSDLTHPPRSLNRASRHVVPFKTRFFTHCSLESRSVDQEIVIAMGSNVCDRVSTFNRALQLMKSSDVNITRHACLYETAPAYLTDQPRFLNSAIRGTTRLSPHELLKLLKEIEKDIGRTGGIRYGPRPIDLDILLYGNSQIHSETLIVPHERIHERSFVLAPLVDLLGASSDNGIETSWHSLSKCSGGFFELWNNLGGESIIGTESIKRVLPVGDRLLDWCERTLVMGVLNLTPDSFSDGGKFLEVGAAISQAKSLISEGADIIDIGAQSTRPFAKRLSPNEELERLVPVLDEITKIPEMEGKLLSVDTFYAEVASEAVKRGAHMINDVSSGQLDPIILKVAAELGVPYVAMHMRGDPGDPSTMQSEQNVHYDNVCKEVALELYTQVREAELSGIPLWRLVLDPGIGFSKKSGHNLEVIMGLESIRREMGKMSIGASHVPILLGPSRKSFLGEICNRANPVERDVATVAAVTAGILNGANIVRVHNAGYGVDAAKVCDALRKRKGSCRN

SEQ ID NO: 8146 - protein, 436 aa, Zea mays
  unsure (1)..(436): unsure at all Xaa locations
  Clone ID: ZEAMA-23APR03-C40084_1.p
MATGGGSSRSDDVRGLKFGKKIYFEQDGGSGSGAGAVGGRKGKGVATGGARPASAASAAQPPRCQVDGCGVDLSAVKQYYCRHKVCNMHSKEPRVFVAGIEQRFCQQCSRFHQLHEFDQGKRSCRRRLIGHNERRRKPPPGPLTSRYGRLAASLQEPGRFRSFLLDFSYPRVPSSVRDAWPGIQHGGDRMLGTVQWHGHQEPPHPHRSAAAGYGNHAAYNCHGGLVAGGAPMLSSAAFELPPGGCVAGVAADSSCALSLLSTQPWDTTXPRPPVPSNARGRRLRRHPGGAVRHGEQLRGVERLDGLAGPRCRRRQERAASRRCSAPGPPRLRGGPLLRRARARPAGKRRAATPAARRPWRLRRRHLQPFHHQRDELVPVAALPAFIRSPRHEMWREHFCIGHHPGFVRLTLPFSFFQGGETGIPNHSRSTVNSLPV

SEQ ID NO: 8147 - protein, 458 aa, Zea mays
  Clone ID: ZEAMA-23APR03-C4010_3.p
MGEALIGRLEAAVSRLEALSAGARGGLSYTASAQEDPAIVAFDDLIASALGRVSAAAGKIGADVAEVTRLVENAFLVGKDLLARTSQTQKPTMESVTTFMGPLNEAILEANALVERTSSIYANHLKAAAGSLAALAWIGYTGKGCGMPLPIAHVEESWQMAEFYSNKVLVEYKNKDPDHVEWAKALKELYIPNLRDYVKRYYPLGPSWQPPGSAANKAPSAPSVPPPCLSISSASSSQPKSGMSAVFAEISSGKPVTQGLRKVTDDMKSKNRTDRTGVVAAEGKETRNSPPFSSTKGPAKLELQMGRKWVVEHHVGNKSLTIEGCDTKQSVYVYGCKDCVLQVKGKVNNITIDKCTKVGVLFKGVVAACEIVNCSSAEVQCEGSVPTISIDNTSGCQLYLSKESLEASITTAKSSEINALVPDANSDGDWAEHSLPQQYIHAFKDGQFTTSPVSHSGA

SEQ ID NO: 8148 - protein, 340 aa, Zea mays
  Clone ID: ZEAMA-23APR03-C401392_1.p
MAPPRRYLAALLALLCACTTTTAPAGSVVAAANVPITTCRSFCGNITVDYPFALHEGCGHAGLRDLLFCINGALMLHLPSGSYRVVDVDYAYRGLTLHDPAMSDCRALDLAPAGRGNGFVIEPWREPYLSPDSDNVFLLLGCRATSPLFQGFPDRHLPCRNVSGMGCGDYLGCLAWDDYYAGGGGRRGPSSGDAAGQPPECCALPWGAIRAVNVSRLECEGYSSAYSLAPVRAEGAAAGWAYGIRVSWTLPESNRGFCGACRATGGACGHDTESHADLCLCGDWNSTSNCDSSADASTVGRRHAARCRRASLGHPRLRIDVTMVLRVDDIKYVMDGGFML

SEQ ID NO: 8149 - protein, 150 aa, Zea mays
  Clone ID: ZEAMA-23APR03-C4016_6.p
MDFDLGWRKQHSSIEGLRHRPQPLRSPARLLHRPLVTPNQNEAAGLRRQQQRAEMLQFPALMRQWPSPPLIPASTLLPVPATSQEDEVLLAMAESDLEDKLNEIRKTNSHLIIIGKPTGDTKEEYDAEVEDDDADNVEESDGDDFDQETG

SEQ ID NO: 8150 - protein, 318 aa, Zea mays
  unsure (1)..(318): unsure at all Xaa locations
  Clone ID: ZEAMA-23APR03-C401736_1.p
MCGCALPSVCSFLRLQRSHTAHLSGSPWSVPTQQFYTMACLSPSPSGRRLSELLEEKQEPFVLDWHLLEKGCCSSRLLDGYDSALCWPAAGNDAAAALRRMASKKNKAAKLKPARQQAAGGLLQLLLSKILRGSRAAAQRQRKPAAAALHFSGSFKLPAAVAPASCYVELGAVKTPPPTSSSSSSRRRTPPPRGATTTPTATTMRSSSXAPSLSWTTRSRAPPSTPPCCPRRPRTPPPWTTSGTSWTRRRTAPRCSPCPSTSTSGTPTRTATTAATAPAPRAAATTGPPPPPTGTGTRTRGSWHGRLSWWRPSSRPPG

SEQ ID NO: 8151 - protein, 195 aa, Zea mays
  unsure (1)..(195): unsure at all Xaa locations
  Clone ID: ZEAMA-23APR03-C4017_5.p
MTSSSSTNTSDGAKPSSCRRGHWRPGEDEKLKQLVNKYGAQKWKSIAEKLEGRSGRSDXKSCRLRWFNQLDPRINKRPFTEVEEERLLNAHRAHGNKWALIARHLPGRTDNAVKNHWHVVMARRCRDRSRHHARAASSSSPLSMNLSPRETLHVDIGDRVRHKHRRKDYHAGDSADEPLKKDVPFIDFLGVGMSS

SEQ ID NO: 8152 - protein, 418 aa, Zea mays
  Clone ID: ZEAMA-23APR03-C4018_1.p
MDRRNRPAPLVDSSACFCRVDRSSAAAAARRIPVSKACVQPSLRASIHPLKPRPGAERSRGGACPLLPGLPDDLAIACLIRVPRADHWKLRLVCRKWCRLLAGNYFYGLRRRLGLAEQWLYAVKRDGRDGRVSWDVLDPSRGEWRALPPVPGEYAEADGFGCAVLGGCHLYLLGGRDPRRGSAMRRVVFYSARSNRWHRAPDMLRRRQFFDVCVMGNRLYVAGGEGGGGGLRSAEVFDPAKNRWSFVAEMAAPMAPFVSAVHGGRWFVKGIGAQQQVLSQAYSPVSDSWSIVLDGMVTGWRSPSACLNGRLYAAECMDGCRLRAYDEAVDAWSTCADSKQHRGSSQAAAIVALHGRLFVVRNDMSVSAVQVAAEAGKQRWQTLAGKAHTKSFVTGLLSNLSGRSRAKNNILHCQVLEV

SEQ ID NO: 8153 - protein, 262 aa, Zea mays
  unsure (1)..(262): unsure at all Xaa locations
  Clone ID: ZEAMA-23APR03-C403847_1.p
MAASKMAKTSTAFAGNAVNLSPAASEVLGSGRVAMRNTVAKPKGTAGGPWYGTDPVKXLGPFSGETHSYLSSNWALAQLRIRTKLPDEFPGDYAWGTGGASEVTXSSGSMLGALGYVFPGLVARNGGQDEAGFGFQGRFTDLQRREDSTTWVNPSLVHAQSILAHLXGYRVPGNGPLGEAEDLLYPGGSFRPIGXLATDPEAFXQFKVKELKNGRFVMFFLFGIFVPAIVTGKGPIENLAHHLADPVNSNAWAFATNFVPGK

SEQ ID NO: 8154 - protein, 384 aa, Zea mays
  Clone ID: ZEAMA-23APR03-C4039_2.p
MEFLEPKDIDWSRVVSQYVRDETYEGIEAPHWADLSDPNAGRAAVDDEAWFCRPDCQHPKTAEDFFKLSPSPKGKLLRSVSAMLPFAERDANATSLRDGSSNLKWRGGGAVAASTPPKPKAAPKKRFQEDSENHDPALATPPPRQAPSRPPFGAPRWNKNAKEAIKSSAEKRPDNAEKEALLNKHVPPRQLKSTLSARNLFSGKDILGQISEFYDELKRMVGGGVGRPVTDTQEEHSSDPVNPSYLMEKVAPDETVKEEARQETVKKSPSPMKGKKVGLKVEPGKQRSPSVLKEVRATPPTPQRFLSPSPNRIKNVKPGGITAGSPLKKAPKEKGTPSKDLESKKDAVRQPFGVKDMNNTRACDAEGSSSSMFWFLKPCTFLVE

SEQ ID NO: 8155 - protein, 267 aa, Zea mays
  Clone ID: ZEAMA-23APR03-C403_3.p
MDASLRGVQKYLSEKAAAAVQALLPESAGGELSTVCPWADQVRWHYHWASPLHYANTPQVCNFKYSRVCHNSRGQQGMCVVGAINNYTDQLYSYGQKTSYNLTESLMFLAHFVGDVHQPLHVGFQDDEGGNTITVHWYRRKANLHHVWDVSIIDTAIKDFYNKSMDTMVEALKMNLTDGWSDDIVHWENCKNKHATCANDYAIESIHYSCNYAYKDVEQDITLGDDYFFSRYPIVEKRLAQAGIRLALVLNRIFGGGEADDIPLQVQ

SEQ ID NO: 8156 - protein, 175 aa, Zea mays
  Clone ID: ZEAMA-23APR03-C404050_1.p
MAALIKLGSLLRQSAVASSASTGSAPALFNAARFMCAGQPADGSKLFVGGLAWATDDHSLKEAFQSFGEVVEARVITDRETGRSRGFGFVSFASGEDAKSAAENMDGKELAGRNVRVNFANERPSGGGGGGFSRGGGGYGGGGGGYGGGGYGGGGGYGGGRGGGGGGYGGDHESY

SEQ ID NO: 8157 - protein, 120 aa, Zea mays
  Clone ID: ZEAMA-23APR03-C404059_1.p
LQKQSFSFCSLLWFLPHLRRMGLWGEKGCYDEKERFKRECNTSYERPSKSCCDTVRSVDMACVRRTMTSEEEKGLSVQKISFLSMACNNSVRVVGNKYGEIPKRPMWQSFSPPPPHRAHP

SEQ ID NO: 8158 - protein, 395 aa, Zea mays
  unsure (1)..(395): unsure at all Xaa locations
  Clone ID: ZEAMA-23APR03-C404145_1.p
MKVSVKTLKGSKFEIEVNPADKVSDVKKLIETSQGQNVYPADQQMLIYQGSVLKDETTLEENKVVENNFLVIMLRQNKGSSSAAPAKSKEPSNQAPPTQTVPATPASQAPATPAPQAVAAPAPIVPVSAPGPAATASPAPAVAVSTEAETYGQAASNLVAGGTLEATIQSILEMGGGTWDRDTVLRALRAAFNNPERAVEYLYSGIPEPMEIPAPPPSAQPADPALASQAAQPAVASSGPNASPLDLFPQALPNASANAAGEGNLDVLRNNAQFRSLLSLVQANPQILQPLLQELGKQNPQILQLIQDNQAEFLRLINEPAEGDEDENLLEQFXEGVPQTIAVTPEENEAILRLEGMGFDRALVLEVYFACNKDETLAANYLLDHMNEFDDGAPQ

SEQ ID NO: 8159 - protein, 313 aa, Zea mays
  Clone ID: ZEAMA-23APR03-C404462_1.p
MASVAGEGRSRVLVIGGTGYIGRFIVAASAREGHPTAVLVRDAAPADPAKAAVLQGFRDAGVTIVKGDMYDHESLVTAIKSADVVISAVGYQQLPDQTLIISAIKEVGHVKRFFPSEYGNDVDRNHAVEPAKTVFGGKAHIRRAIEAEGIPYTYVSSNFFAGRFLRSLAQIGVTEPPTEKVLIMGDGNVKGIFAAEEDVGTYTIKAVDDPRTLNKILYLRPPSNTLSHNELVSLWEKKLGKTLERVYLPEDELLKKIRESSAPLNVALAISHSVWLKGDHTNFEIDPSFGVEATQLYPDVPYITVDEYLNRFL

SEQ ID NO: 8160 - protein, 67 aa, Zea mays
  Clone ID: ZEAMA-23APR03-C405_4.p
MAGFRSLAPKTRNLVVAGGLSAFVLGVYYYTMRAVGGTDELQVAIDKFEETKKQDAARNSSSSAGGS

SEQ ID NO: 8161 - protein, 443 aa, Zea mays
  Clone ID: ZEAMA-23APR03-C4064_8.p
MAKLGPGQGLGCEAAEGSLVPSRKREYKPCGKHTEGKRPLYAIGFNFMDARYYDVFATVGGNRVTTYRCLENGSFALLQAYVDEDKDESFYTLSARDHVDGSPLLVAAARDHYLEHPNRKRAKCNLNGRHKTEKQVGSRRSCLLWMSCVCCCCRACVSPDGPGPRLPPPAAAFSFVGDRMQRVVVMRHGDRLDHSEPMWPANKPRPWDPPLDDAGLLRAWTVGKCIRAAAAKQGWALHRVLVSPFLRCRQTAARAVAALCAVPDDDALLAVGDPANVPLDTSRVKVSIEYGLSEMMNTQAMGITVSKLAPNVSKWFPDLPELEADFPAGTIDHSAEPIYPELPKWEESIMEARSRYASIIKALADKYPHENLLLVTHGEGVGASISYFEMGLEIYDVEYCAYSVLERQVTAEPGDEHGGFTFTADSFKVMTKSGSTGIRYAPV

SEQ ID NO: 8162 - protein, 200 aa, Zea mays
  Clone ID: ZEAMA-23APR03-C407056_1.p
MDMAMSQHSSDTSSTSSYSSDPSSTSSTTSGKKRPRPHAAAAPAYRGVRMRAWGKWVSEIREPRKKSRIWLGTFPRPEMAARAHDAAALSVKGARAVLNFPALARHLPRPASLAPRDVQAAAARAAVMHEPEPQQPDEPGRQPVEEVALAAELVFDDLAPLWVEDVVELGPCPSQHSSWTPCDGLDAAACLHSLPLLWDY

SEQ ID NO: 8163 - protein, 281 aa, Zea mays
  unsure (1)..(281): unsure at all Xaa locations
  Clone ID: ZEAMA-23APR03-C4079_12.p
MARRSLALLLASSLALMAAAVASADSWLYDKFNTDGTVRTQYDASGQEVAMLSLDRSSGAGFNSKEQYLYGEFSVQMKLIPGNSAGTVSCFYLSSGDGDGHDEIDMEFMGNASGQPVVLNTNVWASGDGKKEHQFDLWFDPSADYHTYTIIWNPANILFKVDGDVIRCFKRYADLPYPSARPMALHATLWXDGSYWATEKGKVPVDWSAAPFVVSYRGYSANACVSGGACGGGGDDGWMSKQPDDAEWGTIRWAESNYMRYNYCDDGWRFPQGLPPECSRS

SEQ ID NO: 8164 - protein, 281 aa, Zea mays
  unsure (1)..(281): unsure at all Xaa locations
  Clone ID: ZEAMA-23APR03-C4079_14.p
MAPRSLLAVLAVAALALLHAASAKSSWLDRRFTTDGTVRTGYDDSGQQVVMLRLDQHSGAAGFNSKEQYLYGEFSVEMKLIRGNSAGTVSCFYLSSGDGDGXDEIDMEFMGNSSGXPVVLNTNVWASGDGKKEHQFDLWFDPSADYHTYTIIWNPTNILFKVDDLFIRSFKRYADLPYPSSRPMTLHATLWDGSYWATEKGRVGIDWSDAPFVVSYRSYYASACVSGGACRAAGSGGWMNRQLDSAEWGTVRWAERNFMRYNYCQDGWRFPQGLPAECARH

SEQ ID NO: 8165 - protein, 126 aa, Zea mays
  Clone ID: ZEAMA-23APR03-C40888_1.p
MPVAASLMAIELEKDQLAWAEQQRQQNRRQTMVVCRKSAAAVAKGQQRQNASPPSPKPPPAGGLSAEAFLVLACVAVSLIVLPLVLPPLPPPPPLLLLVPVCLLLLLAALATFMPSDVRSMPSSNL

SEQ ID NO: 8166 - protein, 490 aa, Zea mays
  unsure (1)..(490): unsure at all Xaa locations
  Clone ID: ZEAMA-23APR03-C4093_1.p
MGYQCAPGGGGKPSLASVRFAGPRARAGRGGYKELLVMALPQDDGLDGATVAPAGGGKLPLVGGAVRTVVESREAREFASGALAGAMSKAILAPLETIRTRMVVGVGSRHIFGTSVPALERRHGKGFGQEIQSTCSALFQHKQGGGGYKELLVMALPQDDGLDGAKVAEAIGVRLPDVGGAVRTILNSREAREFASGALAGAMSKAILAPLXTIRTRMIVGVGPRHIFGSLVDIIQQNGWQGLWAGNTINMLRIIPTQAVELGTFECVKRSMAEAQEKWKEDGCPKIQLGNMKIELPLHLLSPVAIAGAAAGIAGTLACHPLEVIKDRLTINREVYPSISLAFSKIYQTDGLGGLYAGLCPTLIGMLPYSTCYYFMYDSVKTSYCRFHKKSSLSRPELLLIGALSGLTASTISFPLEVARKRLMVGALQGKCPPNMIAALSEVIREEGFLGLYRGWGASCLKVMPNSGMTWVFYEAWKDILLSDRDRQHA

SEQ ID NO: 8167 - protein, 218 aa, Zea mays
  Clone ID: ZEAMA-23APR03-C409742_1.p
MAVTFSDLHTADGLKALEAHLAGKTYISGDGITKDDVKVFAAVPVKPSAEFLNAARWYDAVAAAVSSRFPGQASGVSASSAPAAAAPAASKDEDDDDDMDLFGDETEEDKKAAAEREAAKPAKKKESGKSSVLMDIKPWDDETDMKKLEEAVRSVQMEGLTWGASKLMPVGYGIKKLQIMLTIIDDLVSVDTLIEEVLCEAPINEYVQSCDIVAFNKI

SEQ ID NO: 8168 - protein, 200 aa, Zea mays
  Clone ID: ZEAMA-23APR03-C409858_1.p
MAVAEPVPGGDVKLFNRWTFEDVQVTDISLNDYLAVTSMKHYTFLPHSAGRYSAKRFRKAQCPIIERLTNSLMMHGRNNGKKIMAVRIIKHTMEIIHLLTDANPIQIIVDAIINSGPREDATRIGSAGVVRRQAVDISPLRRVNQAIYLLTTGARESAFRNVKTIAECLADELINAAKGSSNSYAIKKKDEIERVAKANR

SEQ ID NO: 8169 - protein, 370 aa, Zea mays
  unsure (1)..(370): unsure at all Xaa locations
  Clone ID: ZEAMA-23APR03-C4117_5.p
MPRDGAQAAPPPERGEMDEVVEADPDTEAEDQEERWARLLPELLSDVVRRVEASGGERWPARKDVVSCACVCRRWREAAVSVVRPPAESGKITFPSSLKQVDXGFPYMASSAPGPRERPMQCFIKRNKNNSTFYLYLGFTSSPVDKGKFLMAARRFRRGPHTEYIISLDAEDLSQGSNAYMGKLRSDFWGTNFKIYDSKPPYDGAKASSSRSSRRFGSRRISPQVSAGNYEVGQVSYKYNLLKSRGPRRMYCTLECPSAQETWENSLKTKFRRPLGPTTLRNKAPRWHEHLQCWCLNFHGRVTVASVKNFQLVAAADPSEPTTNVDDETVLLQFGKVDSDMFTMDYRQPLSAFQAFAISLSSFGTKLACE

SEQ ID NO: 8170 - protein, 156 aa, Zea mays
  Clone ID: ZEAMA-23APR03-C411817_1.p
MATRAALVAGRRAAGQDGLALLSSGCRREGARPSSPHKSSSATEREGHGDATAAQVEAALNRKNADVVDVDRSGSATLVPADARRGAGDEWVPDQETGVFVPADEESSGPGDGGVADVGGARGQAPSVLDQAVFVREEHMEDVERPAVGVDDAGAA

SEQ ID NO: 8171 - protein, 730 aa, Zea mays
  unsure (1)..(730): unsure at all Xaa locations
  Clone ID: ZEAMA-23APR03-C4124_4.p
MSSASGLGGKEVPSAFSVDLAAAARRLLLFLRAAPAGVGPRSVRRYEELWMPLAAEKAGVGGEAAMLVPPPDVHLVWLCHCFHHESYSAYCTSRFGRLINRPSIFDMENEEYAEDLCRDVWATHFPSEPFDLDSNEIDGNSVDNITCDSVNGEIVKMVRQYAGLADRFASLFVQEGVYHVAARRRYVRFLDLMKKVACATQECTRLVPSLDILLMWLAHQSFPVCYATDMVAMGISDNVAKVGVCYGEVVSNEAVRRTKELWEDAYDEPYDMAGSEVDVGAVSTAREAFYWVPAASEEDANRLYKSLQPRFLIEVYVFLKGEFDKEPTSKEFLRLRTQRCHRSLKLNISMSNLSCKSWQKVWHLYCEFATRGLFIEFRRTLSGCFRKSKFLKNISFSWSDVLHEKALALTEQLDVRMRAMASITPPVQAPYLLKCVPDRVTDDGGAMISDVILRMRNYRPQEGRWLTRTVLDHSGRECFVIRMRVGRGIWRRGAETPMAVKWEDRSIEVREGSWSYIASTSSVGYAPXVGTGTVMKDQLENKVVWSLSTGDTLTISLGDELSFQLKNDSSEEEARLLVGRRLSYRVNTDNASSNLVEEEQYLTLVRKSPYHHGDRATVLLNWKLLAVEFLPEEDAVFVLLLCMVIARTMTEIRREDVAGLLVRRRISEARAGQRDWGSVMLPGSLSPDPHLQPWYRNATQVLSSAETGPMLTKYSPADGKDMLYRQALIP

SEQ ID NO: 8172 - protein, 82 aa, Zea mays
  Clone ID: ZEAMA-23APR03-C413428_1.p
FIFSCKKKKKKKKKKKKKKKKRKKKKKVGEPRQPPGGGRPPGGGGGAGTPAARPRRRGGPDITGAVFNGGGCFFTKTRERGE

SEQ ID NO: 8173 - protein, 202 aa, Zea mays
  unsure (1)..(202): unsure at all Xaa locations
  Clone ID: ZEAMA-23APR03-C41381_1.p
MSTRGSGSLSPAAGASAAAPEVEGHWAPHGAVLTACVVGSNVLVILLVFGFFWRFFSGKGGPSTSHGADDDDDEDSLPVASPWASXATVSRATAHGRRRWKNVVSSLXPVSVYSSAGAEEGRKARPECAVCIVELRDGDSVRVLPRCGHRFHADCVGTWLRRRTTCPLFRGRVVPTAAAALTDKSRDAKDDVAVAVAADCPV

SEQ ID NO: 8174 - protein, 192 aa, Zea mays
  Clone ID: ZEAMA-23APR03-C4138_5.p
MNAFRFLGDMTHLFSVLVLLLKIYATKSCSGVSRKTQELYMLVFVASSAAIVWCMRRHPQVRRTYDKEQDTFRHAVLVAAAFLLALMFHDRFTFREICWAFSIYLEAVAILPQLVLLQRSRNVDNLTGQYVFFLGAYRAFYILNWIYRYFTEGHHSRWIPWLAGLVQTALYADFFYYYFLSWKNNVKLELPA

SEQ ID NO: 8175 - protein, 513 aa, Zea mays
  Clone ID: ZEAMA-23APR03-C413_6.p
MVMAILTRQSRRKHLRVYNPPQQAAEVRYTPSATNSSAVPPVAVPPKPTADTILGKQYEDVRSVYSFGKELGRGQFGVTYLCTEIASGRQYACKSISKRKLVSKADREDIRREIQIMQHLSGQPNIVEFRGAYEDKSNVHVVMELCAGGELFDRIIAKGHYTERAAATICRAVVNVVNICHFMGVMHRDLKPENFLLATMEENAMLKATDFGLSVFIEEGKMYRDIVGSAYYVAPEVLRRSYGKEIDVWSAGVILYILLSGVPPFWAEIEKGIFDAILHEEIDFESQPWPSISESAKDLVRKMLTRDPKKRLTSAQVLQHQWLREGGEASDKPIDSAVLSRMKQFRAMNKLKKMALKVIASNLNEEEIKGLKQMFMNMDTDNSGTITYEELKAGLAKLGSKLSEAEVKQLMEAADVDGNGSIDYVEFITATMHRHKLERDEHLFKAFQYFDKDNSGFITRDELESALIEHEMGDTSTIREIISEVDTDNDGRINYEEFCAMMRGGMQQPMRLK

SEQ ID NO: 8176 - protein, 500 aa, Zea mays
  Clone ID: ZEAMA-23APR03-C41481_1.p
MDRFITQTEGRRDRKHIPSVSREFAGASAARASPGMERSIAKSEVRWDRFVETGKGEMVQDPLTTETGGKMEHDLLMYSPRSAARATATGIPIGDQGVAVLRGPLIVGAGPAGLACAAMLTMGLVPYVILERDMCIASTWHRRTYDRLCLHLPKRYCQLPLMPFPHSYPTYPVRQQFLAYLDEYKRKHGIRPFFNMEVVSAEYDGEYWCVRTKDTSDNVGGSMLSSCTMEYRSKWLIVATGENAEPVVPEIKGMRSFKGEVFHSSDYRNGEEFQGKNVLVIGCGNSGMEVSLDLANYNVHTSMVVRDSGHVLPREILGISTFTLSLWLQTFFNIKVVDQILLVLAWFILGDTRRIGIPRPNLGPMELKQLSGKTPVLDVGTIAKIKSGDIKVFPGIKSFQEDGVEFIDGRIESFDVVIFATGYKSNVPYWLKENEFFSRKDGFPCRPNEWKGKNGLYAAGFSRRGLLGVSMDATKIANDIIQSYNNIIFHPMDIQRSQDD

SEQ ID NO: 8177 - protein, 352 aa, Zea mays
  unsure (1)..(352): unsure at all Xaa locations
  Clone ID: ZEAMA-23APR03-C41520_1.p
GLGRERRGEVRSGRPWRRGGRSXREPRKPRRRPRSQGRVNLSVPMWEKNFCIDACAIPWAKLCETKRLMSLYKSVVDWDDSAALEAFNDAKARFCAVYHGQHYDIPXPDPDMFIDIINPDEYVDPELVADLERSRRRVPRKDNGVSDVWDSFIFSDKTVPVTGWGDTETSFTDGQQVPVNWGNQLKHSVEANHKQMSANWDYSVKRPAQTTGQQNSGKQQDQTSSHGEQTNSCISLSIMRDGSQNAWKHDYGWDPAAIQADILQSHQGSYEVPDGHGVPYEHWTHWRTRNSHSGRRHTRDSGGPISSKPMKSKHQTDEHNVAINGWRNCRVRNDVYYYSYGQADYTKQSHAM

SEQ ID NO: 8178 - protein, 440 aa, Zea mays
  unsure (1)..(440): unsure at all Xaa locations
  Clone ID: ZEAMA-23APR03-C41536_1.p
MATGETAVDRRKDPLGPRDMHLSGEEHVPKARKPYTITKQREKWTEDEHRRFLEALQLHGRAWRHIQEHIGTKTAVQIRSHAQKFFTKVVRESSSGCNASAGAAPAIQVPPPRPKRKPAHPYPRKVDGAAKNPAPELKLLEKLPPRDRDEGSPTSVLASARTASRAEVLGSAFANSSSASRSLALSASGLDERGDGGGSLVSSVAGEHGCASPRTRAPYTKVLVEANEVSHLGPEAPVLKLFGKKVVVKDLKTDYSPAAASVAKASRDHNPTGAAGASSWSPWAGXVQVQQLMYFVPQHDGLAAQPVAPWFGYSGSVPCAVFYPQAVGSAQEHQQASEPLDHKRAQRERSLTGSNMASSAASAAQNSDTAQSRHGPGQENTGDGCAALRAAIPRLAKCASSASFSGRGFVPYKRCAAESEAPRSVAPGEEDDGELTRLCL

SEQ ID NO: 8179 - protein, 450 aa, Zea mays
  unsure (1)..(450): unsure at all Xaa locations
  Clone ID: ZEAMA-23APR03-C41536_2.p
MATGETAVDRREDPRDMDLSGEEHVRPKVQRRLQIPWRSACSHSFLPRLPDQARKPYTITKRRERWTEEEHGRFLEALQLHGRAWRRIQEHIGTKTAVQIRSHAQKFFTKVVRESSPGSNASAGAAPAIQIPPPRPKRKPAHPYPRKADGAAKKPAPELKRLEMTSLRDRVRDEGSPTSVLASARTASRAEVSGSVVANSSSASMSPALSDAGSDERGDGDGGGSLASSVDREDGCASPRTRAPCTKVLCDAHEVSRLGSGAPVVKLFGNKVVVVKDLETDTPPASVAEAAINGSPTNGAAGASSWKPWPELTCLVPRRDGFAAQPAVSPPCAVFYYPQXASAQEHQQASEPLDHRRAQREGSSPTGSSVASSAAAESRHGPVQENASDGYAALRAAIPRPTKRVSSASFGGRGFVPYKRCAAESEAARPVALALAPGEEADGELTRLCL

SEQ ID NO: 8180 - protein, 226 aa, Zea mays
  Clone ID: ZEAMA-23APR03-C41557_1.p
MASSSFYLLSVLLIVIASGAWATDPSPLQDFCVADKESPVLVNGFACKDAKDVKVDDFFLAADLDKPRDTTMSKVKSNVTLINVMKLAGLNTLGISMARIDYAPQGQNPPHTHPRATEILTVLEGSLYVGFVTSNPDNKFISKLLNKGDVFVFPQGLIHFQFNPSHDKPAVAIAALNSQNPGAITISNAVFGSKPPIADDVLAKAFQVDKKVVDWLQAQFWEDNHN

SEQ ID NO: 8181 - protein, 144 aa, Zea mays
  Clone ID: ZEAMA-23APR03-C4164_1.p
MPPSASMPATHTAVYVAAVPLRAPKGPAQLLMSAGYSLGMWDLQHFMVLLRPDPALAQALVFDFQPRDPEDVLAALAVLSRREIPGVVRRRTLRRVPDGRCWLVGHCCDAVGAATRFSERWTTGLVVGEHDCRDYTNGNLSALS

SEQ ID NO: 8182 - protein, 428 aa, Zea mays
  Clone ID: ZEAMA-23APR03-C41839_1.p
MTFGSADMEAGGGEHRHAQQEEQSSSDERRARFAEDWGCCACACAGLFLGPNPMVARYLYALIFLVTNLLAWTLRDYGDSALAELQRLKVCQGARYCLGAEGVLRVSLGCFVFFFVMFLSTVNARKVHDCRNSWHSEWWPAKLALWLGLTAVTFLAPSPLVQLYGKVAHFGAGAFLVIQLISVTRFIMWLNDWCRAEMTQKRYHLQIQAVSIVTYVGSLLGIVLMYVWYAPSPACKLNILFITVTLALVQLMTFVSMSSKVKAGYVAPGLMGIYVVFLCWSAIRSEPHTEVCNRKAEVATSADWVNIASFVIAVVVIVAATFSTGIDSKCLQFKQAEGESESEEEDDIPYGLGFFHLVFSMGAMYFAMIFVGWNANASHTMERWTIDVGWASTWVRVGNEWLAAIVYIWMMIAPVIWKTRQVGSAAET

SEQ ID NO: 8183 - protein, 94 aa, Zea mays
  Clone ID: ZEAMA-23APR03-C4196_8.p
MSEERPVPRRESPWGLPEGDTRQPKAHRCNDRAEDVVQACFEGNPFKTVPGPFKLFWQCMRSKPGEEPTEPYTYLQLDPPRRVEVNLEQTGSEP

SEQ ID NO: 8184 - protein, 262 aa, Zea mays
  unsure (1)..(262): unsure at all Xaa locations
  Clone ID: ZEAMA-23APR03-C41987_1.p
MSASTRATLSLPAAPPMASRLRLVGPTPSIDADSAQNPGISGKAAGEGERVGEAKTPQPRQPDVTDLGGGSEVVYIPRFVAREKAWEWFDYLDNAIPWTRPEIRVFGRSAIQPRDVCYVADEGLTDLRYSGHQHLPHSWDEFPVLKDILKXYKTGSDYVSWHADDEPLYGPTPEIASVTFGCERDFLLRKKPTKSQATSGSGEAGRKRLKVDAPQKPHHFLLKHGSLLVMRGYTQRDWQHSVPKRAKVSSPRINLTFRHVLR

SEQ ID NO: 8185 - protein, 471 aa, Zea mays
  unsure (1)..(471): unsure at all Xaa locations
  Clone ID: ZEAMA-23APR03-C419_4.p
MALGEGGDHGAALPLIADQAKHAAAGGIVRSGSMWTAAAHVITAVIGSGVLSLAWSIAQLGWVAGPAAMLVFAAVTALQSTLFADCYRSPDPEHGPSPQPHLRQSRWTAXLGSSSSWVCMLLQHTALFGYGIAYTITASISCRAILKANCYHEHGHDAHCDYDGNYYMLIFGGVQLLLSFIPDFHDMAWLSVVAAAMSFSYAFIGLGLGLARTIANGTIKGSITGVRMRTPMQKVWRVSQAIGDIAFAYPYSLILLEIQDTLKSPPAENKTMKRASMISILVTTFFYLCCGCLGYAAFGSDAPGNLLTGFGLYGPYWLIDFANACIILHLLGGYQVYSQPIFQFAERLLAERFPDSGFVNGGSYTVRFACLRACRVNPLRVCLRTLYVASTTAVAVALPYFNEVLALLGALSFWPLAIYFPVEMYFIQRNVRRWSXPRWVVLQTFSVVCXLLVSAFALVGSIEGLISKKLG

SEQ ID NO: 8186 - protein, 258 aa, Zea mays
  Clone ID: ZEAMA-23APR03-C4225_19.p
MATTATEAAPAQEQQANGNGEQKTRHSEVGHKSLLKSDDLYQYILDTSVYPREPESMKELREVTAKHPWNLMTTSADEGQFLNMLIKLIGAKKTMEIGVYTGYSLLATALALPEDGTILAMDINRENYELGLPCIEKAGVAHKIDFREGPALPVLDDLIAEEKNHGSFDFVFVDADKDNYLNYHERLLKLVKLGGLIGYDNTLWNGSVVLPDDAPMRKYIRFYRDFVLVLNKALAADDRVEICQLPVGDGVTLCRRVK

SEQ ID NO: 8187 - protein, 372 aa, Zea mays
  unsure (1)..(372): unsure at all Xaa locations
  Clone ID: ZEAMA-23APR03-C42389_1.p
MNMDKTPIAGDGGGDAGGGGGGSGNGPEMQSSLDAVAPSPTPHTELDISSMPDTPLRKPGHRRALSEIIGLPDDLDLGGPGAGDAPALSDENEEELFSMFLDVDKLNSRCGASESEPSCAMAGGPGEATETSAAASGAAQGQMHHHNRHSMDASSSIDAEHLFGTTVTEGVSPAEAKKAMSAANLAELALIDPKKAKRIINNRQSAARSKERKMRYIAELERKVQFMQREATALXQLALLQRDTAGLTVENGDLKIRLESTEQQIHLQDAXLKMATGQAGNQMMNFAEPPHTFGGANQQVFHHPGQAVPPFLVAMQQQQQLLLPHMNQPLHPLQSQQLHQAATLSIDMEGLPAAPPGQWQWGGDTWSESSSS

SEQ ID NO: 8188 - protein, 172 aa, Zea mays
  Clone ID: ZEAMA-23APR03-C4248_2.p
RTCRWHLADRQVHLVPRAWLIDPAEVEEVEEEEVCVGDWVKVKDSVGTPVYQWGDVNHSSIGVVHRADDGELWIAFCFCERLWLCKAWEVEKVRPFRQGDKVRIRPGLVSPRWGWGMETYASKGEVVGVDANGKLRIKFRWRDRLWIGDPADIVLDDVHLLTEASNGLAFCS

SEQ ID NO: 8189 - protein, 168 aa, Zea mays
  Clone ID: ZEAMA-23APR03-C42739_1.p
TEADACSDLYASRAVTLGPKLSDTVKGKLSLGAKILRAGGSVEKLFRQWFSADKDEKLLRASQCHLWTTAGPIAGVLFVSTARVAFRSDRSLSLAVSTPRGDCSFRAPYKVAVPLRKVGAVRPSENRHRPEQRYVRLATTDGFEFWFMGFVSYNKSLQHLERAVACAR

SEQ ID NO: 8190 - protein, 121 aa, Zea mays
  unsure (1)..(121): unsure at all Xaa locations
  Clone ID: ZEAMA-23APR03-C4278_11.p
MGVYTFVCRSAGGGEWTAKQHSGEMEASAATPYELQRRLVAAASAADSASGVQSSFSMVTPSSAVFQVIVGGGAMMVSGGGGGGAAAAASGGAAAEAPKXEEKKEEEKEESDDDMGFSLFD

SEQ ID NO: 8191 - protein, 267 aa, Zea mays
  Clone ID: ZEAMA-23APR03-C4292_2.p
MFPSLIHHASHGRPDVAVAEDAPRSGCGLGLPGHGGGPSVVLTADPKPRLRWTADLHDRFVDAVAQLGGPDKATPKAIMRTMGVKGLTLFHLKSHLQKYRLGRQSGKELTEQSKDASYLMEAQSGTTLSPRGSTPDVKESQEVKEALRAQMEVQRRLHEQVEVQKHMQIRMEANQKYIDTILDKAFKIVSEQLSGFSISDQDLPILTSARAMLSPADHLSSSVFPQLSVSSVSLHNPGPGGGKGLPHVADSHVFSQRPPEQFKRKSR

SEQ ID NO: 8192 - protein, 187 aa, Zea mays
  unsure (1)..(187): unsure at all Xaa locations
  Clone ID: ZEAMA-23APR03-C42_40.p
MAFYYGVGGQSSAWAAPGGSRPWTKAEDKVFEGALVMFPEHLPNRWALVASRLYDRTPQEAWDHYQALVTDVDLIERGMVEAPDSWDDDAAAAGGGRSGRGRGGGSGSGXXEERRRGXPWTEDEHRLFLEGLEKYGRGDWRNISRWSVKTRTPTQVASHAQKYFIRQASAASRGDTKRKSIHDITTP

SEQ ID NO: 8193 - protein, 190 aa, Zea mays
  Clone ID: ZEAMA-23APR03-C42_42.p
MDFHHGCYSSSIHAAGPPPARPWSKEENKMFESALVMFPEHTPERWALVAAQLHGRTPREAWEHYEALVADIDLIERGGVDVPACWNDDNQVRGGCGSEGGTGNSRRAGADRACREGRRPGKPWSEEEHRLFLQGLEKYGRGDWRNISRFTVRTRTPAQVASHAQKYFNRQLNPASRNSKRKSIHDITTP

SEQ ID NO: 8194 - protein, 295 aa, Zea mays
  unsure (1)..(295): unsure at all Xaa locations
  Clone ID: ZEAMA-23APR03-C42_46.p
PLWRRTRRSWTREEDKAFEXNAVAAAAAPPADGPPDDGWFTALVASVPARTXEEVRLHYEALVEDVAAIEAGRIPLPRYAGEESSAATPXGSGAAGPSTPKDGGGGSGHRREERKGGVGADAGKSCSKAEQERRKGVPWTEEEHRLFLLGLDKFGKGDWRSISRNFVISRTPTQVASHAQKYFIRLNSMNRDRRRSSIHDITSVTAGEVAAAGAPITGXXARPRRGQMPMGPGGMKHHHPVPPMGMYGHAPMGHPVAGHMVAPAAVGTPVMFPPGHHSPYVLPVGYPAPPTKMHQ

SEQ ID NO: 8195 - protein, 400 aa, Zea mays
  unsure (1)..(400): unsure at all Xaa locations
  Clone ID: ZEAMA-23APR03-C432310_1.p
MDDDGGASRSPSPSPSRSPSPLPVADPVTVAAAPPGHVAVAIPLRKHSPSSGGGGGGREDAWSDGATSTLIDAWGERFVALGRGSLRHPQWQEVAEVVSSRDSYSKAPKSDVQCKNRIDTLKKKYKVEKAKHDSDWRYFDRLDDLLAPVLLKPNSSSSSAAAAAAAAARSAGPMVPPRINFPQRTRTPLXPPRGQSGGCRLPLLQPSASSXSSDGFPPSAVANGKRQRVEEPAAAAAAADNGAESSVSRAQGLRELAQAIRRLGEVYERVESAKRDQELRMERERLDSARQLEEQRVQFFLKMQMELSKATGGAATATPTPMAVPIPTDGNGTRRAGVTAEVATSSNHRVRYRIKGSRHQHAPQQAHYQNSTSPTGGDDNGSDSDKEAQEDAEDEDEESQ

SEQ ID NO: 8196 - protein, 467 aa, Zea mays
  unsure (1)..(467): unsure at all Xaa locations
  Clone ID: ZEAMA-23APR03-C432311_1.p
MKITVQSSKLVTGSSSGGRPSSADAAEAVPLTVFDKLHYDLYVHALYFFHPPAPPSSVLEAGLAAALAEYPEXAGRLGVDARGNRAILLNGAGARLVEATAAAADVCSLDSVVPPEPATPATMSLHPSAEDAVDGEVLLLQVTRFACGSFVVGTAVQHVVGDGAAFHCFVSAWGQASRGAAVDPAPVHDRVSFFVPRHPPLVEFEHRGAEYKRPPRPREGEEKAGGSESGAKAKANADVGEKQLVTRRVNFSREFVAELKTRASAGAPLPRRYSTLQCVAAHLWRCVTRARRLDARARTTLRIAVNGRSRMRNPRVPEAYAGNVVLWARATAAAGGLVRSPLPEAVRLVSEAVAAVDDAYFRSVIDFASSGALEEEGLVPAADPLETVFSPDVEVYSLLGASFQDFDFGGGPPFFFMPSYSPVEGAVFVVSSFSGDGSIDAYVPLFSHAMDIFDKCCHSLPAADARL

SEQ ID NO: 8197 - protein, 484 aa, Zea mays
  Clone ID: ZEAMA-23APR03-C432480_1.p
MSASATLRLAIIAMAVAVSHSLAASAPAPRDARDREGPPASTTVRAGFYLAAAARLRPLDRLDASLYTHLYYSALAVHPTTHKLVLPTDPNQAGLLATFCPTLKSKNRALKTMLSVGTPGIAAGADSRADPAFAAMAADPASRAAFGAAAVALASDSGFDGLDVAWWFPASAVEMANFGFLVSEWRAAAPPGFLLTATVYFSNHVFDAPRPGVDYPSEAVARCLDWVNVVAFGLHPLAAGAANATAFDAPLYDRASHFSASYGVVSWIDAGVPASKVVMGLPLYARSWFLRNKANSGVGAPVVAAGPKQRGSNATGVMSYAEVQKIAAAGGGGRRAVTTTFDNASVASYLSIGDVWVAFDGAAVVAEKLAFAAQRGLLGYFLWPVNYDDANLAVSRSALDAWMKNEISSNLKNDTGLRQTQGPVRLPPALQSPAGTPGPAPAPTSGSRSWLPWTKLDAFLRFGCANSCVLLVVTSLIWSCIWDY

SEQ ID NO: 8198 - protein, 101 aa, Zea mays
  unsure (1)..(101): unsure at all Xaa locations
  Clone ID: ZEAMA-23APR03-C43308_6.p
LLLNQHDQFPRKSIVRCLEKRRKWEGGGNLHGIYMYIFFLRFLARYNEPPVQRHSYXRPILNAIVATTTLILLEQKSLCTRFLFFLRSPLWYLYCPRSRIC

SEQ ID NO: 8199 - protein, 159 aa, Zea mays
  Clone ID: ZEAMA-23APR03-C4331_4.p
LRPCISRLKPEIVFNSHTRANHPGWGLGRTVSLDKVQRTVGHLASNIIPFLWLYFESSFPKCCTTDAVVLLSSGHTRANKLYSAFVVAPTFQGYLYAYPAPAFCHCYYCSMISVCPYPILLLATVNMLLLEQFGLIYVYKSRYAIVHLMHCIKAQLPHI

SEQ ID NO: 8200 - protein, 116 aa, Zea mays
  unsure (1)..(116): unsure at all Xaa locations
  Clone ID: ZEAMA-23APR03-C433205_1.p
MGPTPAAAMSKRGRGGSAGNKFRMSLGLPVAXTVNCADNTGAKNLYIISVKGIKGRLNRLPSACVGDMVMATVKKGKPDLRKKVMPAVIVRQRKPWRRKDGVYMYFEGSIPIWRHQ

SEQ ID NO: 8201 - protein, 266 aa, Zea mays
  unsure (1)..(266): unsure at all Xaa locations
  Clone ID: ZEAMA-23APR03-C433613_1.p
MAPSSKDGATEQPTSGGSGDDRENGTGEPKEGAVVTGNRRPRGRPPGSKNKPKPPIXSVTRDSPNALRXHVMEVAGGADVAESIAHFARRRQRGXCVXXGAGTVTXVALRQPTAPGAVVALXGRFEILSITGTFLPGPAPPGSTGLTVYLAGGQGQVVGGSVVGTLIAAGPVMVMASTFANATYERLPLDDAEEDPGQAQLPPGPGGGPPLIMGGIADPSAMPMFGGGGGGVPPSLMMPGGAAASGAGLQLGHEGLAWARARPPPY

SEQ ID NO: 8202 - protein, 289 aa, Zea mays
  Clone ID: ZEAMA-23APR03-C434870_1.p
MGDHEARGDDTERKADKKLSGWGLFGSKYEDAADLYDKAANFFKLSKNWNRAASVYIKIANCHMKGDSKHEAASAYVEAANCYKKFSPQEAAQALDQAVNLFLEIGRLSMAARYCKDIGEIYQQEQDLEKASDYLERAADLFDSEGQTSQSNTIKQKVAEIAAQLEQYPKATEIFEEIARQSINNNLLKYSVRGILLNAGICQLCRADAVAIQNSLERYQEIDPTFSGTREYKLLADLAASMDDGDIAKFTDAIKEFDGMTRLDPWKTTLLLRAKNELKKQEDDEDDLT

SEQ ID NO: 8203 - protein, 216 aa, Zea mays
  Clone ID: ZEAMA-23APR03-C4353_3.p
MGRSYNHSPSPPRGYRRRTRSPSPRGRYGGRDTDRDLPTSLLVRNLRRDCRPDDLRRPFGKFGPVKDIYLPKDYYTREPRGFGFIQYFDPEDASDAKYYMDGKMLLGREIAVVFAEENRKKPSDMRAREKISGRGRSYDGRLRSRSPGFNGSPRGRSRSQSRSYSPAPKRKHYSRSPAPRPRERSLSRSPAVNRSRSASPIVSRSPHRQGSLSVSE

SEQ ID NO: 8204 - protein, 217 aa, Zea mays
  unsure (1)..(217): unsure at all Xaa locations
  Clone ID: ZEAMA-23APR03-C43573_1.p
MGSPGAGSSGGHECSFKFLLIGDSGVGKSSLLVSFVAASXYLDGDIAPTIGVXDFKIKFLTVGGKKLKLTIWDTAGQERFRTITSSYYRGAQGIILVYDVTKRESFSNLADVWTKEIEANSTNKDCIKMLVGNKVDKDDERMVTKEEGLAFAEEYGCLFLESSAKTRENVEKCFEELALKILEVPSLLEEGSSSVVKRNILKQKQESDAKNGSGCCQ

SEQ ID NO: 8205 - protein, 77 aa, Zea mays
  Clone ID: ZEAMA-23APR03-C4376_62.p
SYDSHGGRSTTVGFNVLLLNLAATSASSGGAVRSAELYIGSRISLTLKSEIGYEGVLYTINTEESNIGLCNNLGNEH

SEQ ID NO: 8206 - protein, 549 aa, Zea mays
  Clone ID: ZEAMA-23APR03-C440462_2.p
MYQKKSHFCLCSANMALEPIALLLTVLIAAPLTVLLLFLVAGNKKAARAASPTPPRRRDRLRLPLPPSPRGLPLVGHLHLLGALPHRALMSLARAHGPVLLLRLGRVPTVIVSSAAAAEEVMRARDLTFANRPASAMAERLLYGRDVAFAPYGEYWRQVRRVCVVHLLSARHVGSFRRVREQEAAALAARVARDSAGGAAVGLSDLLTEYANAVVSRAAFGDESARGLLDEFDSGRRQRKVLSDLQKLIGTTPLGELLPWLGWVDAVTGLEGKIRRTFEALDGLLEKVIDDHRRRPRNGEDGSHRDFVDVLLDVHEKDQEHGIQLESNEIKAIILDMFAAGTDTTTTVMEWAMAELVTHPRAMRRAQDEVRAAAAGSTGVNEDHVAQLDYLKAVLKETLRLHAPVPLLVPREPAADTEILGYHVPARTRVLVNAWAIGRDPATWERAEEFVPERFLGGGAAANVGFKGQHFELLPFGAGRRMCPGIAFAEGSAEMALASLLYHFDWEASRGQNREGTPSLDMTEMSGITVHIKSGLPLVSKPWSGSPLN

SEQ ID NO: 8207 - protein, 198 aa, Zea mays
  Clone ID: ZEAMA-23APR03-C440598_1.p
SFVMAASRSPKAAREAAAVDANTTFVQADPATFRALVQKLTGAAPAAGGTTTATAPKQEDDDDAAAVTVAHAPRRPKLQERRRAAPARLELSPASLYCYHHHHAHSRYGHGLIMHSPVSPMDAYMVLAASASPSPSPSPSSGGAVVTISREEEEREEKAIASKGFYLHASPRGGDGDRPRLLPLFPVQSPRISELRRG

SEQ ID NO: 8208 - protein, 85 aa, Zea mays
  Clone ID: ZEAMA-23APR03-C4410_3.p
MGSGDPAADPLSSFLRHPGAFSFSRRVAMARDATATSVPALRPWLVDLLPLLVVLLIAAHVLALGYWIYRLATDGSRQPARSKKH

SEQ ID NO: 8209 - protein, 389 aa, Zea mays
  Clone ID: ZEAMA-23APR03-C44130_1.p
HETITYNILIEKSRGATTPQAQPYKSTNKVEFYGPLGLGKPMEEMLMAGNANPNPPPAAAPSAPGAQTQSQRGGGAPPPAAGAAAPSAGATVGAAGTERRARPHKEKALNCPRCNSTNTKFCYYNNYSLQQPRYFCKTCRRYWTEGGSLRNVPVGGGSRKNKRSSSSAASTSAAMSGTVSVKNPKLVHEGAHHDLNLAFPHHNNGRALQPPEFPSSFPNLESSSVCYPGAAMLGNGAAGRGMGALSAMELLRSTGCYVPLQHVQLGMPAEYAAPAGFTLGEFRIPPPPQSQSVLGFSLDTHGTGGYSAGGLQESAVGRMLFPFEDLKPAVSAAGGGASNDGADHRQNDHRKDQAAGDGSSVTGGHETPGGFWSNSLIGNGSSNGGGGHW

SEQ ID NO: 8210 - protein, 152 aa, Zea mays
  Clone ID: ZEAMA-23APR03-C4421_2.p
MFYGAMVWDPWLIVSQIVCLQCLYYLSLGVAMALLVGTRVPRLTLLYLFDFSTLTPRTPTGWCAIASFLLAAVTGAGFMLYVIERAKKCLDFAATLYIIHLFMCIVYGGWPASVTWWVLNITGLATMALLGEYLCIRRELKEIPISRLRASV

SEQ ID NO: 8211 - protein, 528 aa, Zea mays
  Clone ID: ZEAMA-23APR03-C4444_1.p
MGLYRNEWAEALGIEISSPRAKDGTMVVNRRTGFSNGKLMPSLSFKLWEAEAVVASMDHDGRASECLRDSVPELVFMASPTTTTPSPRVSSSPKCELDAAAVKLQKVYKSYRTRRNLADCAVVIEELWWKALDFASLKHSSVSFFNGGKPETAASRWARARTRVAKLGKGLSKNGKAQKLARQHWLEAIDPRHRYGHNLHIYYDVWSKSESTEPFFYWLDIGEGKEVNLEKCPRSKLQSQCIKYLGPKERQEYEVVVERGKLVYKKNGALVQTLDDSKWIFVLSTTKALYVGQKKKGSFQHSSFLAGGAITSAGRLVVKEGILKAIWPYSGHYLPTEENFKEFIRYLEENGVDLTHVKKCPVDKDDEYPLVSKPEAQANAAVSNGTGGAEHSTASEAMVDHTSDSDAADGDGHGATGGRVPVVTGPPSSAAAAAAQVGKNHSTCRWSTGTGPRIRCVRDYPQDLQSRALEHVNLSPRLTGSPSRKRDPVPSPRPSPAMILSPRLASVGFHPQTTVSLTLPDFKRSRLH

SEQ ID NO: 8212 - protein, 476 aa, Zea mays
  Clone ID: ZEAMA-23APR03-C4444_3.p
MAQPHLVLPSPRPLLPAAATPSRRAVAVRAALSTASPPAKAAAGAEAVRSIRARQIVDSRGNPTVEVDLVAGDGRLHRSAVPSGASTGIYEALELRDGDKAVYGGKGVLQAVRNINEVIAPKLVGVDVRNQSDVDAIMLDIDGTQNKSKLGANAILGVSLSVCRAGAGAKGVPLYKHIQELAGIKEPVMPVPAFNVINGGSHAGNNLAMQEFMLLPVGAATFAEALRMGSEVYHVLKGIIKAKYGQDACNVGDEGGFAPNVQDNREGLVLLMDAIEKAGYTGMIKIGMDVAASEFLTKDGNYDLNFKNQPNDGVHVLSAQHLGDLYRDFVKDFPIVSIEDPFDQDDWSSWASLQSSVGIQIVGDDLLVTNPKRIADAIDRKACNALLLKVNQIGTVTESIQAALDSKAAGWGVMVSHRSGETEDNFIADLAVGLASGQIKTGAPCRSERLAKYNQLLRIEEGLGNVRYAGEAFRSP

SEQ ID NO: 8213 - protein, 355 aa, Zea mays
  unsure (1)..(355): unsure at all Xaa locations
  Clone ID: ZEAMA-23APR03-C445940_1.p
MASPVLLVAALCCLCALLGAAGEPARGAAAEASALRSKAATDPNMEVKFDFTPFLIQYKSGRVHRFMGTSFVPASVDPRTGVASRDVVVDHGTGLAVRLYRPSRQAVAAGVGGRLPVLVYFHGGAFVVESAFDPVYHGYLNALTAKAGVIAVSVNYRLAPEHPLPAAYEDAWAALAWVVANANARRGGAGAGAGDPWLSRHGDASRLFLAGDSAGGNIAQNLAMRAAGQQQRIRGLALLDPYFLGRYVGGVAARAWDFICAGRYGMDHPYVDPMALXAEXLRRLPSPRVLMTVSEQDRLGPFQRAYVDALRGSGWRGRARLYVTPGEGHCYFLNNLASPKAAMHMATLAAFINGS

SEQ ID NO: 8214 - protein, 422 aa, Zea mays
  Clone ID: ZEAMA-23APR03-C44602_1.p
MAAAAISLPHSPSLLQPTRRRSAPPACTQSERGVSFDPGSAFYRSDSAAGRDLAVLAATLHRRRGRPDPSAPFLCLDAMCGCGVRALRYLAQAGADFVWANDASEALRPIILANLCRFERGSPEAVAGCRRWVVSHNDATRLLAERYLRREYFDVIDVDSFGGDAAYVRAALLALKIGGLLYLTSTDWRSARGYGSRSSLSSYGAYVRPMPYPNEVGLRMVIGGSAREASLLGFHITPLFSYFAYHGPIYRVMVQLCNGKDDGISNYGFICHCKSCGQSQTFGFDELGQISCGCTDTTDADSITVVGPLWTGPLHDASFLTEMLSLANEWGWACTIENGVSLEKLLGMMIEESDPRLPPGYIRLDEISRRAKVNSPPLGTLINSLRKEGFSACRSHISANTIKTNCSMASCIDVARGIRNSR

SEQ ID NO: 8215 - protein, 408 aa, Zea mays
  Clone ID: ZEAMA-23APR03-C4463_6.p
MAAAPALARELLDAAREPEFAEWQRGVRRRIHQHPELAFQEHRTSALVRAELDAIGVPYAWPVAQTGVVATITGPAAGPVFALRADMDALPIQEMVEWEFKSKEDGKMHACGHDAHVAMLLGAARLLQSRRDDLKGTVKLVFQPAEEGHAGAYHVLKEGVLDNVQAIFGVHVDTALPVGLVGSRPGPFLAGSARFTATITGKGGHAAGPQHVVDPIVAASSAVLSLQQLVARETDPLQGAVVSVTFIKGGGGAFNVIPESVTMGGTLRSMTNDGMSYLVKRIREVIQGQAAVSRCAATVDLMEERMRPYPATVNDEAMYSHAKAVAESMLGEASVMLCPQFMAAEDFGFYAQRIPAAFFSVGVRDEATGKVHHVHSPHLDIDEAALPVGAALHAAVAMEYLNKHAPCK

SEQ ID NO: 8216 - protein, 499 aa, Zea mays
  Clone ID: ZEAMA-23APR03-C44833_1.p
MAAAAAASQSDVPHRQPGQRRPMCAVCTKPLRLCLCGRLRSSPVDNAVGVTVLQHAMEAHHPLNSTRVARLGLRNLAVAQVTDVNHRARFILTTLDACGGAAAASGPAGGPVAARFGNHDRSDGPEEIELQDGGGLAFPRAGICGAKSDGKHSATCDFDESGLSACGYLGAEDLSFGGSCEMLDLGDVNGGIFCDLAGEVGSLSCCHNDGGRVRFIKKTNSDEQPAGLERPSSAAKQIENSVDEATTGESNHRSEVDVAYNVNGNLSHSVVTNDSDSDEVNGIVNGCNGVGKEIDEVSAAIGQDWTRKSMDKCTIAYTEKELRIGIERGVKPKIRWLSRGPLGEAAVSNGFLVTKIQMKKCKLTGEITMFEEFSITIPPKSALLFPCQRAISIDASGCQVQHLIVLDGTWAKAQRMYHENPWLQLLPHVKLESDRVSLYSEVRHEPKAGCLSTIESIVVAMRKLGEDSKGLDDLLDVFESMIADQRRCKDENVKQKLNS

SEQ ID NO: 8217 - protein, 166 aa, Zea mays
  unsure (1)..(166): unsure at all Xaa locations
  Clone ID: ZEAMA-23APR03-C44868_1.p
MARGGHLSALCLPPRLGATPPCCGRPAAVRASSCCARPPAXGGARRRGRGRGRLLVVRAGGPPSTNALILAFVLPLSLFVGTLVTAARVADDLDDRFLREMEINRAILEENEASDDDGAGEEDDDINEAEEDAEEDEELPPVPVEEKEXEPTVVGPRTRNRPRRRV

SEQ ID NO: 8218 - protein, 183 aa, Zea mays
  Clone ID: ZEAMA-23APR03-C44979_1.p
MARAAAQKKKPSKSKAQCYRGKTGERTSEETMGTSLAQAVTALMGTCARQLSRAARRLHRRPRARQALAASLSSRAILPFLGGGGGGAIGSKRRRRREQDEPSFEAEEDGVWRKEIMMGERCQPLEFSGAIYYDAEGRRLEQPPTPRSRFAARCRWRRPSSRSRQSPAEGTSAQLESTRSISL

SEQ ID NO: 8219 - protein, 356 aa, Zea mays
  Clone ID: ZEAMA-23APR03-C4503_2.p
MVSLRCTTAHHSLLGSPTCLARPRRRACPVVRAAVAVEAGAQAKVSLIRIGTRGSPLALAQAHETREKLKATHSELAEERAIEIVIIKTTGDMILDKPLADIGGKGLFTKEIDDALLQGRIDIAVHSMKDVPTYLPEGTILPCNLPREDVRDAFICLTANSLAELPAGSVIGSASLRRQSQILYRYPSLKVVNFRGNVQTRLRKLKEGDVSATLLALAGLRRLNMAENATAVLSVEEMLPAVAQGAIGIACRSNDDKMMEYLSALNHEDTRLAVACEREFLAVLDGNCRTPIAAYAYRDNDGNCSFRGLLASPDGSKVFETTRSGPYSFDDMVEMGKDAGHELKAKAGPGFFDSLQ

SEQ ID NO: 8220 - protein, 409 aa, Zea mays
  Clone ID: ZEAMA-23APR03-C450869_1.p
MASHPEHPAEPRAPPAPTTIGDLSDDLLREILLRLPSLPSLVCASLSCRAFLAAVRSSRAFRRRFRALHPPPLLGFFFDPDGNENPTFMPIRRGSDRGHAAAVRGLDAFLTRVPHEDDVFPGWQIMECRGGCLLLLNWRTKQLAAYNPLTGALDLVPKLPDDICKGHRGKFISGDFFLVVPDDEAPDRRSFRVVSSCHDKYRVRVAVFSSATRKWQILPWSEPVPTQPASGKYWLLSGRQVSGFLCWSHHKNAYKVLLDTATLQFSVIDLPYGLSGQGHLYRTGDTKDGKLCIVAAIDFSLFVWFRTPDAGGIDRWVLRHVLQLEDEVLEATEGSRNELEQLKVFAILDGIVYMTTFETFRDATLPCWYLSFCLETRKLEKLFYVKANGHAHPYFMPWPTALVGNNLSP

SEQ ID NO: 8221 - protein, 354 aa, Zea mays
  Clone ID: ZEAMA-23APR03-C450_1.p
MSGDGDARGLEAAAATAAEAARELREAAAALVATRAAEEDALRRRAVALEADVRRLQASLHALDPSTLDKVEEELERARVAITDSDVASFLPSKRNGKFLKTFLGPVNVRVARKEDKLKIKDEYNNYRDRTAYKFLLFPSILLLLRWWIWDGCLPALAVQIYQAWLLYLYTSFALRENVLIANGSDIRPWWIYHHYLAMLMALISLTWEIKGQPDCSSKQRGVQLFLRWAIMQGIAMHLQNRYQRQRLRTRIALGKAKRMDVVAGETAGVEGQLLLLYPVLFILQGFEAYVGVLLLQTALHGLASEWQVLVCGILLVVMAVGNFVHTMETLVLKLRFKAKMKKAKSRQDRPHQN

SEQ ID NO: 8222 - protein, 397 aa, Zea mays
  unsure (1)..(397): unsure at all Xaa locations
  Clone ID: ZEAMA-23APR03-C4513_1.p
ARDHYLEHPNRKNHSVRSSAPPTYQLQPPAMAVSLPVPIPPALLHLPSLFLYALHTYIHPDAVPSNTPRAVLRPPGSNAGPAPGSSKRGAAKDKDPFDATSAQLYRLRLSHATLASRPHFAAYHLALLLPLALLLPALLLPAAPGASPLAPLVPAAYLFVALLRHVVVPSPRPALLAAALGALLVTTLLSSSPFAGALASLAALPAARFARAFWLGTDQPRTGLAVLSSSAPARLIFHLTVLVSSTATILRCCGFMDGAEQEAKLLAAAAGLQLLAARPAVQMYLNEAVFCWYQRLHASRAPDTEYGRAKVFLHNHHLCAVATQLVAPPLLVLSLLXLWRVQGKDFFEGLEGMYWLVGWSVAMKEAALLAARWIVAVWSAATVITLMCYKRGWLFVS

SEQ ID NO: 8223 - protein, 289 aa, Zea mays
  Clone ID: ZEAMA-23APR03-C4515_3.p
CFFHVPLPLSPSSLELNSLAPVVLWSEEDLLCAHRTATPSPAFLPACSLPCSSSSSAQCFSMALAQVAAIEAPCARPSSSLSSPSCSSPSGRPFLCSDLAMELPRQRAHLSLSRFPGACPSMAPDPLQAAAPSPCCSPLAPLLGSPSLDARVPLGLPGTRSPLVPCPLYGAPSTRFRPKAMGKPRPKAEPPRPVPVVVPKPEPEPEAVPVLEPDANPAPPPEDTMEVDGAVDAPGHGRGRWRRTSCCARSMCTSTPSRSNQHPAVHYAVPLRPCWRPYELNEICEEVRV

SEQ ID NO: 8224 - protein, 576 aa, Zea mays
  Clone ID: ZEAMA-23APR03-C45203_1.p
MTKAKLAFWLGWIALLQGCMVKSSLPYEYDYSASIECLPEPLEPQYGGGVLRNADFSAGLRGWSAFGYGSIAESTSAAGNGFAVALNRTRPYQSVSQKVYLQADTHYTLSASLQVSGGGSDLLALVKTVGDFVRPGGGGARARCWSLLKGGPTAACPGLAEHYLPTKATVTLWLNSVTLKPYSKAGRTAHRAESVSAARKKAESLQATDSAGNPLEGAAVSLDAVRTNFPLGAAVSRYILTNSAYQTWFASRFAVATFENEMKWYSTEPAPGQEDYTVPDAMMAFAKSNGIAVRGHNVFWDQPSQQPRWVQSLPYPQLLAAASRRIRSVVSRYAGQVIGWDVVNENLHFNFYEGRFGWDASTAFYAAARLLDAGSALMFMNEFNTVEQPGDMAALPARYLQRLQQIIAAYPENGAGMAIGLEGHFTTNPNIPYMRAALDTLAQAGIPVWLTEVDVAPGPSQAQHLEEVLREAYAHPAVQGIVIWSAWRPEGCYVMCLTDNSFNNLPQGDVVDRLIAEWRATPRAGSTDAQGYFEAELVHGEYKVTVSHPALNSSISRSVKVELGSGSDHYFIDMQV

SEQ ID NO: 8225 - protein, 505 aa, Zea mays
  Clone ID: ZEAMA-23APR03-C45279_1.p
MGAEPVDFSPPPPPEPTLSPEPEISGKDRGGNWKADMMSALGESVSFGRFLSEPLEWGKRSAFAHNRYLEEAAVQARPGSVAQKKAFFEAHYARKKRKSEDHAAAASDDVAGGDGELEAAEDGGAASWSLSATESSCMTDEPPAPAEEVCCGWEEDRVVDCGGSASDKPVHVPEELADITDAVGPCCRMDAPTDETQHMEGGDEVVGAVLPLQKQDLCMDSLTAVDATLKEISILNQDITDSVKRRRIQMASLLPKPAKLSSPPTAKKGQNSSAKRRSMRHSAKENNSPPSAGSNKLRTTSTPKKRSTLSALHMSMSFPRCESGNTSMASRNLGTTIAARISELEHANATKPAEKNTKPHDLRLPRKKFSSALPEIAPRTSQVDEERSSHIMKIKEKLFGSTFPTLHQKYGITKEKERKINNEHGFKESRHSFCFKATLLPNFYRSNKQPKDTSHQATQEILSSSKSGHLSRDINQAHQTGKDAQTSKDASDAKQICCFPLRKMY

SEQ ID NO: 8226 - protein, 122 aa, Zea mays
  Clone ID: ZEAMA-23APR03-C453260_1.p
SYVNLEFFFLRENNITSLFLFFCFPMHTILSLNSFYSLHTLTSVVKDAMQLSMELEMPQYHISRNDRGPDDQEVSGHESRADNKINNVVASRKHRLLMSPVSNKKHAWSTHNKPFPTHQVPL

SEQ ID NO: 8227 - protein, 270 aa, Zea mays
  Clone ID: ZEAMA-23APR03-C453528_1.p
MAREEELKRIDLKVNVSCCDGCRRKVMKAMSLKGVLRTEIQPSHDRVTVVGDVDVKVLVKKLARVGKIAEPLPPAPAAFEQCKKRDDGDRAAQAQVEEKRKGKGDAVDKAAAAAAPSEQEGCKKCAGEAASRAEGGGGVDGDRGSGKKAPSPKDGTAGWTGEEGGDADEFDTKPPVAVAADHRHAQAQVQQHYHRAEPPTVVPVHVPAYYAPPAAAVPYYGYYGMPPPVPVAMAMGVGVAQRHHPQVRPQPSRFDEDFFNDDNTVGCSVM

SEQ ID NO: 8228 - protein, 262 aa, Zea mays
  Clone ID: ZEAMA-23APR03-C453591_1.p
MPDQTSAAAAGGAAFDRCLLALYLISPLTVLALRFISAPYGKLSRPGWGPVLPAPLAWFLMESPTLWLPPLVLLRWPPPPLSGPLAALPAALYAFHYVHRTLVHPLRLARLRRAPAPVPLLIAACALGFNILNAYLQARSFALHAGRQASPFRCLAGLALFAWGMRTNIAADKELLRLKEAGGGYKIPRGGWFDLVTSPNYFGETVEWLGFAVVAWTPAAWAFFLYTCANLGPRARDHRRWYVQKFRGEYPASRKAFIPYIY

SEQ ID NO: 8229 - protein, 379 aa, Zea mays
  Clone ID: ZEAMA-23APR03-C453633_1.p
MDSMEDAVSGTAAQGDLAEVVARAGAMAAAASHHHHRRPPSPAAADHGHIVSAARATARSQIMLVPAACYDEETRPAAACGDAVMFDAPSSAMAAAVGPYHHLSSSSAALAPAHGGYWLPPQQISQEHACGGLDEPPMVTRISPVTTPPPPSHHHQIMNRKNEVKKVVCIPALPPPASSRPGGGEVIPSDLWAWRKYGQKPIKGSPYPRGYYRCSSSKGCMARKQVERSRSDPNMLVITYTAEHNHPWPMQRNVLAGYSRPHTATHMSSNCKKKKNSCSVEPTSSWPTTTTSSSSSKNGNYECQQMTNMTMEENAAAGYVAYAIDDEECAAMHQPINCGSVQPSADEVFAELEELEPTTSSPVNANIYSRGVTYEWHKF

SEQ ID NO: 8230 - protein, 202 aa, Zea mays
  Clone ID: ZEAMA-23APR03-C453655_1.p
MMEKRHGGDGGAGAGGFTVLHLLGAGVLAFLLPRAAGATDDAKWHAHAHSAAGSNGAVTVGHGAPAPHVHAAGLPPLSAPAPTAGADDLPPPPAPVPTSVSSPPSREPGPHFGFPLQPGPGTASAAAPGLGPGGEGYPFIGSNPTVPLPTGTTNTATVLPLTDTGDAAAAATKVVGLAASLGARVSMIGLGISLATLSLSKI

SEQ ID NO: 8231 - protein, 384 aa, Zea mays
  Clone ID: ZEAMA-23APR03-C453992_1.p
MSGRRRVDDDDDHDVVFDAGKPPPFRIGDVRAAVPEHCWRKSPWRSLWYVARDVAVVAALGAAAAGMDSWAVWPLYWAAQGTMFWALFVLGHDCGHGSFSDSATLNSVVGHLLHSFILVPYHGWRISHRTHHQNHGHIHRDESWHPITEKLYRQLEPRTKKLRFTVPFPLLAFPVYLLYRSPGKSGSHFLPSSDLFSPKEKSDVMVSTTCWCIMLASLLAMACAFGPLQVLKMYGIPYLVFVMWLDLVTYLHHHGHHQLPLPWYRGQEWSYLRGGLTTVDRDYGWINNVHHDIGTHVIHHLFPQIPHYHLVEATKAAKPVLGRYYREPHKSGPLPLHLLVVLLRSLRVDHFVSDHGDVVYYQTDHDLNTSSAHGWANQNHHKQK

SEQ ID NO: 8232 - protein, 464 aa, Zea mays
  unsure (1)..(464): unsure at all Xaa locations
  Clone ID: ZEAMA-23APR03-C454370_1.p
MDRGKSTVARGRRRGPPPPLPVHAPHGRWRDTPPPSAAAWVQARRSTERPPAPEPARPSAGRELELLSWADLPADILGLIVSRLPRVDDRARLRSVCRAWRAAARVYGRPPPPLPLLVLSDFSFSALCAGGAMTGTRRIPLPSQEMAAGVRCVGSSDGWLVGVQLNEGRYFGDSQCFLMNAFYQDVVRLPPPSVNTHSLDAFSKSLPIANGSGAVQCTVNGARYVMSFCKVLLSSSPDHDGNCIVAAFSVHRSTASLALWRPGMASWCVCQGGCISKFSXHCLVQGKVYMFSKVTTNLFVFDISEDERGLMVSRVERCVTELPDVKDSYGQRWNLVEWRGKLLLVVIYLGPEGWYNICKVGVFEVDLSTNPFRFTETNSLDGDCIFISPCSSNSFCACPYDGVEDDLIYFIGSLNHSRNASPLDKFVYNMRDGTLAPFALEITDDDLRAPDGSRMNPTWLLPSE

SEQ ID NO: 8233 - protein, 207 aa, Zea mays
  Clone ID: ZEAMA-23APR03-C454487_1.p
RTFHSRNERREQKMEMEMESTWKTLFQRRVLLAAKHCYNVHERLLRVLVPLNADLQDRRRYPGPFAEAARRELEGASMELGLAVASMGAARHLALRGGAPCPSAPFDSVDDLAGDPGVWCALEKLANAAALATRVHDALELACGHLRAGEVLLALDEAGDGDEQSPSSEQLIGVMVLSEAMLKAADLATETAEAREAAFGFIGRRVK

SEQ ID NO: 8234 - protein, 114 aa, Zea mays
  Clone ID: ZEAMA-23APR03-C454616_4.p
MPRLFLFCLVSSQLAATAVTARPFATVLLHGGAMSRVAADAPYSAAAVALHAHSLLEESRFAGSPLSSHRGGHRPFDRAFAGGKIIVAGLAAAIVVAVFCYIRITRKKSVEPKV

SEQ ID NO: 8235 - protein, 176 aa, Zea mays
  Clone ID: ZEAMA-23APR03-C454694_1.p
MQQSCAAANLARLPLPVVPGLEDLASLFLPRNGPVLPAHDYSSSFDFDVVAGLDPAYYYYPHSCDGGAAIATPVSSVSAERKRRRLASNRSSARRSRARRQRRLHELSLRAAELLGANQRLLVDLNRVVARHGAVARENARLREEAAGLRTRLGEVEVGEAAAAAAAGQGPLRGPS

SEQ ID NO: 8236 - protein, 317 aa, Zea mays
  unsure (1)..(317): unsure at all Xaa locations
  Clone ID: ZEAMA-23APR03-C455337_1.p
MADPSFLVGIVGNVISILVFASPIATFRRIVRSRSTEDFRWLPYVTTLLSTSLWTFYGLLKPGCLLVVTVNGAGAALEAAYVALYLVYAPRETKAKMAKVVVAVNVAFLAAVVAVAPAGAARRXRLFAVGLLCAALTVGMYAAPLGAMRTVVKTRSVEYMPFSLSFFLFLNGGVWSIYSLLVKDYFIGVPNAIGLVLGTAQLLLYLAYRKAPASKDDDEEAAAAASGDDGDDEEEEEGLTHLMGQQVEMAQRGRLRLHKGQSLPKPPPGGPLSSPRHGFGSIIKSLSATPVELHSVLYQHARFQPVKKDDDDVEAND

SEQ ID NO: 8237 - protein, 155 aa, Zea mays
  unsure (1)..(155): unsure at all Xaa locations
  Clone ID: ZEAMA-23APR03-C455395_1.p
MTCTGGGGGGGEHYSRQVRELCALLLAIVSPSPAPPRQPVSTMSPAAAAAMLLGASVALMLCGSVTFAIGFLLMPWVAGLALLFGFAGAVNTLSSSGLFXAAAAAPSSPPPRAPASTRGDGSSSGSGRRGPNPSGRIRCAPRLACSPPPASRNRA

SEQ ID NO: 8238 - protein, 292 aa, Zea mays
  Clone ID: ZEAMA-23APR03-C455405_1.p
MASRPSTFRFAVVAVLSTLPLVASSASGHENPEPVVRDSPQNGTNRRYLWASSSARGYGGWSSGGATWYGSPNGAGTDGGACGYHGDVSQRPFKSMIAAGGPSLFKNGKGCGACYQIRCTGNRACSGRPVTVTVTDSCPGGACLAESAHFDMSGTAFGAMANNRGMADRLRSAGILKIQYRRVACNYNGRTVSFKVDAGSNPYYLAVLIEYVAGDGDISAADIMQAGCDSWAPMQQSWGAVWRVNSNNGQPLRAPFSVRVTSGSGKVLVVRNAIPAGWTAGRTYRSTVNYGY

SEQ ID NO: 8239 - protein, 212 aa, Zea mays
  Clone ID: ZEAMA-23APR03-C455486_1.p
MMPRRVASVPVPDWLEALLATRFFLACAAHPASPRNECNMFCLDCTGAPPPPPPAFCYYCRAHRHSSHRVIQIRRSSYHDVVRVSEVEDVLDISGVQTYVINSARVLFLNERPQPRGAGAAAGKAAASPYNCEICGRALLDPFRFCSLGCKLVDTKRSNGHAASSADGGGGGGGAASGNDETTEAGGSKNGPGARPHGRRRKGTPHRAPFWS

SEQ ID NO: 8240 - protein, 467 aa, Zea mays
  Clone ID: ZEAMA-23APR03-C455625_1.p
MCARTTTTSSWMKQLMNASRQGRHGRVLHLLFTHLRRGDRGVVELHRAAVPTALRACARLGNASSGRLIHALVLTRFPSLASDAVAATALLDMYAKCGLVASAQRVFDEMPSRDDLVAWNALVACYARHALPERALVLAIKMRGQCLCPDLVTWNAVVSGFALAGDDQMATKLVGAMEVDGFQPDVVTWTSLVSGSVLNFQYARARVLFRRMMTTANPVLPSSATIASILPAFANVADVKRGKEVHAYAVVTGVEQELNVSSALVDMYTKSGFVVEARRLFDKMSERSTVTWNSMIFGLANSGHCQEAIGLFNRMLCDGARPDHLTFTAALTVCSYAGMVELGKGLYRAMQEEHGIEPRLEHCACMVHLLGRAGWLAEAYDFIKAMPLGPDCFVWGALLGACRSHGDIKLAELAASHLLTVEPANAASCLLLSDSLASVGRQDDVMKMKRLAKRRRMKKLHGCSWLE

SEQ ID NO: 8241 - protein, 200 aa, Zea mays
  Clone ID: ZEAMA-23APR03-C455657_1.p
MPSSASADAEGARSKRKRGSSAACASDGSDQQGPSSHWLTPRAQQAYSSKLLQALRLVRGGTGTPTCPASAPAVRDAAYRALAVAARGRSRWSRAILARSRRRRALLRARRPPPPTPRHRQRRHQQQQDERPAGGLAGRAKVLARLVPGCRSLSLPALLAEVSDYVAALEMQVRAMGQLTHDLASSSSAPTTASTMIAPP

SEQ ID NO: 8242 - protein, 189 aa, Zea mays
  Clone ID: ZEAMA-23APR03-C455782_1.p
MGISTKTLLVCLVPWLVYQLQPHRFSPVSAATTMAGKIEIFTVYQHDRLNETGYVVVTGDEGAPSSDTTRPFGSIYVFRDDLTLHNDSDSPVAGVMEGTSITTSFDGLHNLLAAKISLRHRGYRGSVSVLGGSHNTKPSVYPVVGGTGDFLYTEGYVRSSPVDSDRPRVIYKLEIHLYWPPYTKFAPFP

SEQ ID NO: 8243 - protein, 387 aa, Zea mays
  Clone ID: ZEAMA-23APR03-C455882_1.p
MEPTPAAPRIHLQSPQTAVPTRAVEPGRTRRITVAAPPLPPAALQRRTRVVLYYRADAAGADGRASVRLWEEAMWAKESLSEAVADHPEMGGRLRRHADGSWEVKLNDAGVRFTEATAEATLDEFLAAAQDKDRAPSWEAALAPWADVNAEDPDVSALVYVQLTRFQGDGGFAVGVSCSLMLSDPLSLARFLASWARTHARMKAQNDAAAHPLMQYASYFRRPDARAARALVKSVPLDAFASADAAETVLFRARPSMLPAGAGAPPAADHRALAVACVAQARERLGDGKVVPPQFPLVVFDCEGGVSVETCAAAAYGQPPSPSGGGRYKIDVALWEELGLEELVLRDSKPLHVSYSILGAGCDGLAVAMPAGAAGELLVAATVPKPK

SEQ ID NO: 8244 - protein, 387 aa, Zea mays
  Clone ID: ZEAMA-23APR03-C4559_2.p
MGHQQAQHGKDDTEELLAAHRQLWCHALGYVKSMALKCALDLRIPDTIDRCGGSATLGELLAASEIPASNHDYLRRVMRTLTAMRIFAASHDPAKADDAAAISYQLTPASRLLVSSSSSVDDAAGASKENTTTPSILPNIAHLVRPNTISLLFSMGEWMKDESAASVSLYETVHRQGMWACVEDDAANRASFYESMDADTRLVMQAVVRRCPHVFDGVKSLVDVGGGRGTAAAAVVAAFPHIQRCTVMDLPHVVAEAPAGTAGLSFHGGDMFEHIPSADALMLKWILHDWDEDKCIKIMERCKEAIGGKEAGGKVIIIDTVLGSRADDDDDDKTCRETYVLDLHILSFVNGAEREEQEWRRIFLAAGFRDYKITHTRGIPSIIEVFP

SEQ ID NO: 8245 - protein, 308 aa, Zea mays
  Clone ID: ZEAMA-23APR03-C455_1.p
TKRSPPPRRPPPPRPRSSSSSWILRTTTSSSRRSTRSTTTTCKSKLTSRRSRTGAAEVKEQQQLQVVAQPGERRQQALAPKRSSNKDRHTKVDGRGRRIRMPALCAARIFPLTRELGHKSDGETVQWLLQQAEPAIVAATGTGTIPASALASVAPSLPSPTSGLARPHHHMWAPSAGFSSPSFLNSAAAGTGDAAGIMQRMGIPAGFELPGASAAGATLGAGGHIGFAPMFAGHAAAMPGLELGLSQDGHIGVLAAQSISQFYHQVGAAAGGGGQMQHAHGHHHHHHQQQEDGEDDREDGESDDESGQ

SEQ ID NO: 8246 - protein, 429 aa, Zea mays
  unsure (1)..(429): unsure at all Xaa locations
  Clone ID: ZEAMA-23APR03-C456064_1.p
MGKAGRLLKSILAGRKSGVRDKALRHQQQQGDATPLPAASSPREKRRWSFRRPATAPTKQEGKANNAAPSPLSSLEPSARELDQSEHAVAAAAAATEVARLTAADESHLSVSCCPVEEAAAVRIQATFRGYLARKALCALRGLVKLQALVRGQLVRRQANATXLRRMQALVDAQSRLRAQRARMLDADHATPPAAYQRRSPHHPIPMRRSSYEAMDRSGEEHVKVVEMDAGDPARRGRSSCSAAATESRERRLAEYYHHGGGGQCSPAPFLFAPDLSPQRGDSGHLEDVFAFDPAATARSSPYVAPYDDAADAYGVVPSYMANTESSRAKVRSQSAPRQRTDAALERQPSRRRAQQGAPRKMQRSSSHVGVPAAAAYGYPAQPWAGVRLDRSSASLVGSECGSTSSVLTAATVGYCRSLVGFEVHRGHY

SEQ ID NO: 8247 - protein, 799 aa, Zea mays
  Clone ID: ZEAMA-23APR03-C4560_1.p
MPTVGHLLAHRIAVINQKARALCHKWGGVPKHGTNGEHFHTEESSHTDQLKSPDAGHKTETKRKCVVDEGEPDEESKPEVTTHSDAPLSDPSLTNDNADATEQPAGLTSPNPSNGNATLGDVNNLVRSPTSAGHVGLEDGQSTPNEISSNDAELPINGILRSNSTNAKSGTGQDAPVESTPVAMSVDHNKPGKLFPGSKMGLEDSIISVSSSIKESQPFAAGRSHLEKDTTETLNHLAVVTRDLQDLSEESTSKEDEPTSSSSTDDMDMSGDYILQRCMSSFGGSSKAADTKSTALEGEKSTRMADFDDTDALEVARLVAIEVEREVIDYREPFCSSPDTNSRNADSPDLEGPRQPVAIASELNDNKSSSTEAKSGSSSSHKEDGSGITDGSGPLSRKHTHSVDLGNLDLNENQCAEETDFNPKSILSNSVNLSMPIAVAASRGSSVFPARLHFEGGLGWKGSAATSAFRPAPPRRTPDAEKSLSASSHKTSNILFDLNVADNGSATSGEPLSTAILPASSELPSEVASKAVDVSGGLKLDLNFSCGDEEDAITASNVPSLWNHQQFNGNWSQPSFSSSKQPAARNFDLNDNMSIADVSVRGMDGSSVKTPSRPRDMSDHSAVTIMGKRIVVGQRDDGQQYQHNFLGPSAESRVFARPTQSFAHTPDYSVLSYPSQPAMPFTPAFFAPGGSPYLVDAKGAPVIPPLSGLSLGISHPSFNTRATQPSSNELSYFHPSMDFSYGVSSEGARREAGSYWPMSYQGQTMFVDERMRNVSQDGTSGLVLKRKEPESGWDLYPRR

SEQ ID NO: 8248 - protein, 248 aa, Zea mays
  unsure (1)..(248): unsure at all Xaa locations
  Clone ID: ZEAMA-23APR03-C457023_1.p
MAATADPRAKPPPAASHHLKPWAPQPRPRARRVPPLPGPVVTGGGGARDRRRSSSSSSSSSSHRRLSADAGTVQMELPCDGQIKDPRAKLMGHLRPLPPPPPPPPPPKPQPRPPGPEPAAPLPQPTPSQPEEAAAARPWNLRDRKCRRPTARGAAAAAAAALDASHARDAAGAGAEKARLPVPLERAPFAVALTAEEVEDDVYALTGARPRXRRPRKRPRVVQRQLDALFPGLWLTEITADAYKVPDE

SEQ ID NO: 8249 - protein, 173 aa, Zea mays
  Clone ID: ZEAMA-23APR03-C457254_1.p
MSSSSSDLVLYNLVPAPQTLNPPPPHVTAAPDLSISTAVAAAPEPVIRGRVRRPVGSSADRHAKVAGRGRRVRIPAMVAARVFQLTRELGHRTDGETIEWLLRQAEPSIIAATGTGVTTEEAPPSLVPVAPIASSVSLTPVPYYTALLMQPPPTANESPVASASVSGTVADNN

SEQ ID NO: 8250 - protein, 426 aa, Zea mays
  unsure (1)..(426): unsure at all Xaa locations
  Clone ID: ZEAMA-23APR03-C457328_1.p
MTEAARFHGMIGGGGGKGMQDNVINGFDNIPYYQKFGEGSHMSVDSVDGFNLTNCAGGSVAMSVDSSSVGSNESRTVILKHPGLRDAPTASYSVNNSVFRPNRVAAHTLNEDALAQVLMDPNHPTEVLSSYEQWTIDLGRLDMGGPFAQGAFGXLYRGIYNGEDVAIKLLEKSENDPERAHSMEQQFVQEVMMLSRLSHPNIVRFIGACRKSVVWCIITEYAKGGSVWQFLARRQNKXPLRLAVKQALDVARGMTYIHALGFIHRDLKSDNLLISADKSIKIADFGVARIEVKTEGMTPETGTYRWMAPEMIXHKPYDHKVDVYSFGALXIVLWELGAITGMLPFTNMTAVQAAFAVVNKGARPVIPQDCLPSLRHIMTRCWDANPEVHPPFTEIVCMLESAEMELLSNVRKARFRCCISEPMTTD

SEQ ID NO: 8251 - protein, 199 aa, Zea mays
  unsure (1)..(199): unsure at all Xaa locations
  Clone ID: ZEAMA-23APR03-C457456_1.p
FDRLIGNLLHVLRPSLSLSLSLLIHSIPWAGDSIVSCVLHAQANVTAADSSGRAYWVYSSDASTAYGVSALLLLLAAQAVAMAATRCFCCGRGLSPGRWRAWSGTCFIICXQRRVTFVIAELCLLAGSVRNAYHTKYVSLFSNAPPRCAVLRRGVFAAGAAFALLTALLAELHYLFYARARAAAAVPPPIVGGIGMTRM

SEQ ID NO: 8252 - protein, 284 aa, Zea mays
  Clone ID: ZEAMA-23APR03-C457666_1.p
MEENIPHPREAQGPTVAQPAPAVVTPRDDALAPVAQLLSSSGDDESSDDEGELELEVEFEFPFVCRDSPAGTAAPADELFADGRIRAFYPVFGRGTAGCVPRGGGGGGSGSCCTALPAAPPRVRGQLGRLFQEETRERSTSASFTASFGPATDEDGGLDGAAPGSYCVWRPGPSASASPSPPPPRKSGSTGSMARWRRISDLVVGRSHSDGRDKFLFLAAAPRRGPKDKEPAATAPPAVAAHQMAAYLARGVPPRRTFLPYREELVGFFANVNGISRSHHRPPF

SEQ ID NO: 8253 - protein, 405 aa, Zea mays
  unsure (1)..(405): unsure at all Xaa locations
  Clone ID: ZEAMA-23APR03-C457767_1.p
MGGVLGALLHRRSGGRPPPARATRRRALTRQPSAYDAGGGHRRAMLSKKYSYIPDTYTSLDEVAAALREQGLESSNLILGIDFTKSNEWTGRQSFGGQSLHRVGDTPNPYEQAISIIGKTLAPFDEDNLIPCFGFGDATTHDYNVFXSFHPDNSPCHGFEEVLACYRKIVPHLKLSGPTSFAPIVEAAVDIVDRSGGQYHVLVVVADGQVTRSVDTGDGDLSPQEKRTVESIVTASSYPLSIVLVGVGDGPWDDMRRFDDKLPARDFDNFQFVNFTAIMARAATAQQKESAFALAALMEVPIQYKATMELGILGRSTGNAKRVAPAPPPLPHAQRQASSLRRGASNVGGAAAAPRDDQVCPICLTNAKDLAFGCGHMCCRECGESLTRCPICRQPIRSKLRLYSG

SEQ ID NO: 8254 - protein, 589 aa, Zea mays
  unsure (1)..(589): unsure at all Xaa locations
  Clone ID: ZEAMA-23APR03-C4577_3.p
MGMAALLLVWALLHCAGTAVTMVRASHAVYPELQSLEAEKVDETSRTGYHFQPPKHWINDPNGPMYYKGLYHLFYQYNPKGAVWGNIVWAHSVSTDLIDWTALAPGIYPSRQFDVKGCWSGSATVLPSGVPVVMYTGIDPDEHQVQNVAYPKNLSDPFLREWVKPDYNPIIXXDSGVNASAFRDPTTAWYGPDRHWRLLVGSKVGGKGLAVLYRSRDFRRWVKAHHPLHSGLTGMWECPDFFPVAVHGGGRHYRRGVDTAELHDRALAEEVKYVLKVSLDLTRYEYYTVGTYDHATDRYXXDAGFRDNDYGLRYDYGDFYASKSFYDPAKRRRVLWGWANESDTVPDDRRKGWAGIQAIPRKLWLSPRVRQLIQWPVEEVKALRAKHVNVSDKVVKSGQYFEVTGFKSVQSDVEVEFAIGDLSKAERFNPRWLTDPQALCKKRGARETGEVGPFGLWVLAAGDLTERTAVFFRVFRANSSSSSRLVVLMCNDPTNSTFEAQVYRPTFASFVNVDIARTKTIALRTLIEPSVVESFGAGGRTCILTRVYPKKALGDNAHLFVFNHGEVDVKVTRLDAWEMRTPKMNVPAQ

SEQ ID NO: 8255 - protein, 301 aa, Zea mays
  Clone ID: ZEAMA-23APR03-C457883_1.p
MPGLVAYSGLGLGLLALAALESLPLRVPPLRSLPRRLTTPLHLRHLLAAAVSALCLISALVSAHHLSLPTLAASALFLLYSLAPFAPLAAPLPSPLLDLLLAAAFAQELLLFAHRRPSTAAGIENRYFDLLLVPIALCLGATLLAAHRPGEPAPRIARAAGLALQGTWMLQMGFSFFTSAIAQGCALHAASRADYTIKCRTHEDYHRARSVATLQFNGHLALLVIAGAAAYAAVLSRSNRPPSGYSALDKEVQMEGMPMMSQFTLDSDEEKEEEVITSTAAPVANGGESHDEIPLHEPGSK

SEQ ID NO: 8256 - protein, 285 aa, Zea mays
  unsure (1)..(285): unsure at all Xaa locations
  Clone ID: ZEAMA-23APR03-C457883_2.p
MSLCCCCSTATGRGVLLPSLLLGRRHWTGHHLLNLRATTTVVSSSSAAATSSLSPPQQRQITVYVDTLLEWNQRMNLTAVTDEAEVMARHVADSLAMLPPLERVYRGRSTSAGGAIDGVRLIDVGSGAGLPGLILAVARPSWKFTLLESMRKRCTFLEHAVEAMNLSNVDVVCDRAEKVGQSLDFRESYDIVAARAVAELKVLAEYCIPLVRIGGLFIAAKGHDPHEEVRNAEGAIKKLGASMLELCNVESMXPHGQRTAVLYVKERATPKKYPRLPGTPSKAPL

SEQ ID NO: 8257 - protein, 468 aa, Zea mays
  Clone ID: ZEAMA-23APR03-C457979_1.p
MSKRPMMTTPAGGEDGEPSSGARGAGAPPPSQPVGTGRYARLQSAGTGTSAADGDRPRRHVTYMEGRFEAAEQPPTDDGYGAGDTAPPQTRTQRPRPTYTPVSQRRREPAIDEQPRLYGDYPRRGSPAEPPARTPTRPRGSRAGLGGAAGGALPPGSSSLPSPETAVSTTGGIPGSSGGAPPVQPRRGGLKTNKTIERVSTLGDEPVGLGGSGSSEPPPPPTQPKPEPRFSLPQQPEEGPYVDQPPKQPSSWGSGTKRPAGASPTLIRRKEKATKPLTVCLTCCCILFWLLVVCVGLGILVVYLLYHPRAPRIHVSTATLNAGYIDELPPPHLGKALNSDLYVLAAIYNPNTKVDVVLRYMQLDLYFQGRLIGTQAVWPPLYEKPGDSALRSVHLVVSEVVMTQEDAEVWKNVTTGGGLVEMHLQGKFHVQLNFGRWLPFRYTVRPTCALWLDPPPAGALRRARCLNP

SEQ ID NO: 8258 - protein, 213 aa, Zea mays
  Clone ID: ZEAMA-23APR03-C457999_1.p
MGSKTGAVSSLLCCPCRCLFCGVLSCLFSVLACIFCVAALVALVLFLLFRPHIIRATAISADLSDFTLTPRTWILHYNLSLGLQVRNPNKRIALHYRGVVAQAHFQGQQFGHTAPPDFFQDTSETSTLDLAFAGESPIVGGIAAAAFRREAAEGAIFSVDVKISSHMKLKVWVLKVPGPKTKIDCPLRLQRRDVAHGQRPPEFHQTECRVTFF

SEQ ID NO: 8259 - protein, 406 aa, Zea mays
  unsure (1)..(406): unsure at all Xaa locations
  Clone ID: ZEAMA-23APR03-C458469_1.p
MAKSRREISFGLAVVLSLTAAALVRTGHGADAAFARASGTRFTIGGRPFYSNGFNAYWLMYMASDPADRSKATAALDEAARLGGHAXRTWAFSDGGYRALQVSPGVYDEEVFRGLDYVISEAKKRGIHLILSLVNNWDGYGGKKQYVQWARTQGHSLNSDDDFFTDSVTKGFYKNHVKAVLTRVNKMTGVAYKDEPAIFAWELMNEPRCQXDLSGKTLQAWITEMAGYVKSVDPNHMVEIGLEGFYGESTPDRKRQFNPGGYTVGTDFISNNLIPGVDFATIHSYPDQWVPGASDGAQVAFMRRWMASHAGDAAAVLRKPLLVAEFGWSARSNSYTVSMRDAYFRMVYEAIYASARAGGPLAGGLFWQVMVPGMESWTDGYDVVLDRSPSTAAVVGQECSRMTGLN

SEQ ID NO: 8260 - protein, 430 aa, Zea mays
  unsure (1)..(430): unsure at all Xaa locations
  Clone ID: ZEAMA-23APR03-C458476_1.p
MMARVAVLLLLAAAFAAALVPDAAESRILLTLYDFGAVGDGVADDTKALAGAWTAACTAADNVILNVPAGGTFRIXALTLAGPCRSEIKLLISGDILAPESPQDWGQGQSDQWLHFHKVRDLTVTGGGIIDGRGQQWWAQSLARTQPAPKAVHFEDCQGISVKGITLQNSQSYHLTFTRSSDVEANYLRVTSPEHSVDTKGIHLVDSYNVHVMDNLISTGDDCVSIVGNCTDVRLRAISCGPGHGISIGTLGVNSSVDYVEKIKVDTLFISNAENGVRVRTTEDGGGGGGFARKVKFESIVMRNVTNPIIVDQGISSDDPPPSSPEAVALAATATAAVQVEKINYIDITGTSASERAVTFSCSDARPCRRLSLVNVNLTQVDGSEASSYCRQAFGRSVGTVVPESCLSKEDFVHHVPPQRSEEDGEDSES

SEQ ID NO: 8261 - protein, 431 aa, Zea mays
  unsure (1)..(431): unsure at all Xaa locations
  Clone ID: ZEAMA-23APR03-C458493_1.p
SLVQFLKDEGAVLSPEDENKREKVIRELKKIVMHWANAVAYEQSVPQGLATATVLTYGSYTLGAHGPESDIDLLCLGPCIATLQYHFFVVLRQILQGRPEVSEVHTVEKAKVPLMRFRFTGIAVDLTYAQLPVIDALKAINTFSPQLLQKIDTRSWRSLSGVRVNEQIVQLVPNAEKFQTLLRCIKLWARKRGLHCHYLGFFAGIHLAILAAYVCRKFPDASVSGLFAVFFQTFAHWPWQVPDPLRHDFQWSWLFEPFPYDQKYQQFLRIALRAPTIAELGDWAGWVKSRFRFLILKLERAGIECDPCPSEEVDHTDNDPNVVFYWGLIPKRIIQVDTSSLKGDFMEDLTNDVYGTVKCTHSDVTISVVGLPQLPKSMCSXSIHRQYMQHCMMGYEGTDEGQIERRDSRYWTGYSFELGGVLVCARIWEDY

SEQ ID NO: 8262 - protein, 352 aa, Zea mays
  unsure (1)..(352): unsure at all Xaa locations
  Clone ID: ZEAMA-23APR03-C458557_1.p
FFTLWSPAPPCRGDYATSRPSPLASRCSGLNRAHPATLSAAAAAAASPSPCFQPLPMSSRFAALALIVTAAGCCARPLDGHVELLTRPPSDELRNRRRSLSRHRLHPALLDAGRVAGLVGGEPWGATATPPSSSLPPSGDGALVASRSAAVNGSKSTPEPTLLLRRGDHMAPAPLATTGDRGDGVTLPPSSSPGGGFNGRILGSSSAVFLGLGFKGLILPFSKSSSAAVSVTAGAALPTRVPNSNSVSHAATXRGGHAPAEPPLGRPRPLLPVERHGRSACGGVQPAARLKLLVVAAAPLGDVRVYGRGAPGAGWRTGEVLEEVERVGAGEARRGGRRQEAERTRRRRRRQE

SEQ ID NO: 8263 - protein, 206 aa, Zea mays
  Clone ID: ZEAMA-23APR03-C4585_2.p
MGSASRAVSCLCCPCKCLACGLLSCLCSILVSLAVVLGVVALILYFIFKPHMIAATVDSASLSQFALSASSTLSYDLNVTMTVRNPNTRVGLYYDDVQALALFSDQRFGYAPLDAFYQGTQASTQLSPGFRGTQLLQGDVTAAEFRQEQSAGNFAVDVDLNAKLRVKVWAFKVRGPKAKVTCKLSVPAPGAANASPFQPTVCKVWF

SEQ ID NO: 8264 - protein, 431 aa, Zea mays
  Clone ID: ZEAMA-23APR03-C458886_1.p
VYNSSTPQWCGVRPPSRRRRSRPPTRPRTTAPTSRRTSGARSTTVPTVPATRQRPPGRKAAAGTAASVAGRPASDSRFKPPPLPPAPPGAVIRSLFVSLTRRSTPRSSPSATPASAGADAGDGEQWRLAAADLSRRLAAATRTRDEALEETTRLKHSLAELEHKLARLEARVLPTPAAAFPVDSFLRAVSTARAAVRNLARALSAHLRSPSSPGPSLESFLNRAFHADFELDTDADAHTTDPAGRCQANLAAYHAVAVLTWEEVLLHGTKHYSEGLSRFCDAKMSEVVSSLGWARARPWPEPLLQAFFLAAKGVWGVRLLARSVHPPLPVVRAERGARFDPRFMEDAAASRAGTLEPASVKMMMAPGFHVYLAGAGVVKCRVVCFYTSSNARTDGHRDGGSSANGSVGLGSSCSDINGSATDVVDSCRAVK

SEQ ID NO: 8265 - protein, 207 aa, Zea mays
  Clone ID: ZEAMA-23APR03-C459023_1.p
MAQGRMSCVFLACLVAVASVSASTASAFVFKAGGTGEWRVPAAAGSGNGSAYNAWAQRNRFRVGDAIAFTYQPGNDSVLLVDKRSYDACDTGSPTDTFADGSTVFTFTRSGPFYFISGNKDNCDRGEKLIVVVMAERAAVGNATEPGAGLAPSPSGPFSSFSPPPPFGIDISPTAAYPPPNAAPPKVAAGVAGAATFAIGALFYALV

SEQ ID NO: 8266 - protein, 219 aa, Zea mays
  Clone ID: ZEAMA-23APR03-C459516_1.p
MSHIAVERNRRRQMNEHLKVLRSLTPGLYIKRGDQASIIGGAIEFIKELQQVLESLEARKKRRSSGGGHSFLTGSPSPTPSPRSHLLSSVSTPSPPVMIKELAACCNSAVADVEAKISGSNVLLRTLSRRSSIPGGQAVRLIAVLEGLHLEVLHLNISTMEDTVLHSLVLKIGLECQLSVEDLAYEVQQIFGQDTAEQKPQAEENHHHLIYSSAMAAAI

SEQ ID NO: 8267 - protein, 337 aa, Zea mays
  Clone ID: ZEAMA-23APR03-C459649_1.p
MEEIIPHPHLHALASTTLAIVAVMVMVLPSTTAGGRLCRESCGDIPVRYPLGIDDGCGSPYYRNMLTCADNATLRLRTPSGTYPVGGADYSDPHLVVTDPSMWTCARPFTSVHAAPFSLDTSTRFSLSPRNEYLFFDCDEARVIVAPRPASCDRYPGRCDSACDSAGYLCRNLPGCALEEGSNQSCCAYRPRAAESLRAMLRHCGAYTSVYWRAAGDRSFPPYDQVPAYGVRVDFEVPVTTRCLQCQDKRRGDGGTCGFDPATRDFVCICGDGRNSTTDCADGHSSGHHGSAGIVAASAVASVSAAIGIWGLVWYIRKIKPSKVVTCGVQSNENRFF

SEQ ID NO: 8268 - protein, 379 aa, Zea mays
  Clone ID: ZEAMA-23APR03-C459654_1.p
MVAKTRTRRQLAKLALLLLALLLLLAAILLCVFLIPRHHRRPLPPASPPGAGNASNPDDSIVAFDFSPYLIMYKSGRVHRLDGTARCSAGVDEATGVTSKDVVIDSGTRLAARMYLPPAPRGTQSKGLGRRHPVLVFYHGGAFVIESAFTPLYHAYLNGVAAKARVVAVSVEYRLAPEHRLPTAYDDSWQALNWVARNAGSGPEPWLRDRGNLSRLFVAGDSAGANIAHDMAMRAGTGGGLDGGAAIAGLLLLDPYFWGKKPVAGETTDPARRRQYEATWSFICGGRYGIDDPLVDPLSMPASEWRKLACSRVAVTSSGLDDFRPRGLAYVAALRDSGWDGETEQYETPGERHVYFLDRPKDPNSVKELAFVTGFLSRE

SEQ ID NO: 8269 - protein, 304 aa, Zea mays
  Clone ID: ZEAMA-23APR03-C459656_1.p
MDPAAADRPCVIQSLPANCNTLPPPLVQALPANCNTLPPPLVQALPAKTNPSQPSSPTAKRRHAPPAPGSGPAPPSPRRTRSGGAPEWTPAETLALVAEVAAVDDGWSRSVSAFQKWAMVAENLAASEALLSGPGSRRRGRGSKRTAGECRRRWEALAAEYGAVRRWEVRTGATYWEMGAAARRKAGLPAEFDDEVYGAMDALIRVEEALLADAAGGGAGGEDVEGLVGGGAGCVGVEVGKQDGGDSVEAEVGEEQVQQDASAGEEEEQDVDEDVEEMQEDGGNAGASNDLGHETGTSVEPERS

SEQ ID NO: 8270 - protein, 474 aa, Zea mays
  Clone ID: ZEAMA-23APR03-C459684_1.p
MALESWLTKVRSAMSSASGGSGAPSRPRKQSTVGILAFEVASLMSKLLQLWRAVGDAAVARLRHETMNLHGVRKMVSDDDDFLVGLARAELVDTLRAASDSVAALAARCADPSLRDFRDAFLELADTGRDRHRWTAPSWKEMDARASRMGKQVATTAALRRAMEELAEAEHGLRKLVVLQCAASSLSASKISAASEQQQVVFSKRQEVKHLKQTSLWGSTFDAAVASLARAAFTTLARIKAVFGAGREQRHPPLYRSLTLSSAVHPSGDARSPPSRKSMSMEEVLLFDVDDQPSFAPKRQVRGGGFLEDSSAALTPPAGTLGAAALAPRYAGLVISIERMARSPLLVGPEERDELYGMLTASVRAQLRARLRGAVPAADPGLAGQWCAALAGILEWLAPMAHATVRWQAERSLEQRGGSGNGSVLLLQTLQFAERDKVDAAVVELLVGLNYVWRFEKEMSCRAMLASPARPPVR

SEQ ID NO: 8271 - protein, 403 aa, Zea mays
  Clone ID: ZEAMA-23APR03-C459814_1.p
MGKNGLVSIFSRLVDSAAPTSTSAAAAATPWQWSACGTNPQTTSFRAGAGGGDDEPCCTATPPTAAAAAAAASRSVHRKPAAMGRGAPPGEMYKTVNSVFLDDPAADDFFFSLAGDGDDEEEVAGLYLDDDDDDDGFSTTTASEEWSEEAVIRSLGRTSTDRFFFDPQPGPLPASNSILATTAAAAAETPARKKTVPVPVPGPTEEEDATATHADEGDGVKKQRQPTTTTTAAAASSSSLAERSVAVAVDSGDPYGDFRASMEEMVSAHGLRDWAQLEELLAWYLRINGKQHHHLIVGAFVDLLLGLSTSSPSSSSSSSSSSAPCSTAAETSTTTTTTTSSTSTGCSCSCGVRLLHGRRRYDHQWAASPATPSQPPPPPPPADVQVDVVEDEDEEEACKALVL

SEQ ID NO: 8272 - protein, 180 aa, Zea mays
  Clone ID: ZEAMA-23APR03-C459937_1.p
MADHHHHHHHGHPPDGPGGAGDQLEVIKEQDRLLPIANVGRIMKQILPPNAKISKEAKETMQECVSEFISFVTGEASDKCHKEKRKTVNGDDVCCAFGALGFDDYVDPMRRYLHKYRELEGDRAASSRGGGGGGPAGAGDPASASAAAGPSPSAASAGHFMFGAAMDRPDNNSSAGARPF

SEQ ID NO: 8273 - protein, 167 aa, Zea mays
  Clone ID: ZEAMA-23APR03-C459941_1.p
MRPCAHLAALLLLLAETVSSRHAHAPAGAAQDVAPSAHLPLPCLEELLPCTAYLKTTKHPSPTCCTAMHNAAAAEMPCMCRLFADPELLATFNVTREQMFKLPARCGLPVGCRTGASHEPVVEAPPPPAPAQQHHHGASSRGVQFSSIWSLVASFVLGQMIPMAAPF

SEQ ID NO: 8274 - protein, 370 aa, Zea mays
  Clone ID: ZEAMA-23APR03-C460065_1.p
MRVVEGAPEADEEEEKWLGQYSSTQSILLVGDGDFSFSLALATGFGSGANLVATSLDTYEALGNKFCRAKSNITALKSLGATVLHGIDVKTMKLQIDLKNRRFDRIIYNFPHSGFKGKEHEVHMINSHKKLVREFFCNARRLLRPYGEIHVSHKRGKWYEKWGLKHLAAEFSLVLVEKVSFQKADYPGYHQKKGAGPNCDKPFPLGTCSTFKFRIGSSKKQNGRRAGPISSIGGDTRPCRPLSLVQPWSGLQFVPRDYIVPVPMTAPSHVVDQRQPGRIPSPMGRISSNCLFARLGQTLYENRIIAESLGNTDYFACEYQRSLLREYRMQSQLVPEATSLSYSAFLEARQWESVQRQERLRRRIAYGRSQ

SEQ ID NO: 8275 - protein, 251 aa, Zea mays
  Clone ID: ZEAMA-23APR03-C4601_3.p
MANAGGGAAGEGEWLKVAQLRALVQEDHRAKEVDNLTLRRFLRARGHNVDKAAAMLLKFLRWRAEAAPGGGTVREEQVRGELEQDKIYMGGVDRTGRPIIVGLLAKHYSANRDMAEFKSFVVYFFDKICARIPRGQEKFLAIMDLKGWGYANCDVRAYIAAIEIMQNYYPERLGKALMINVPYIFLKVWKTMIYPFIDANTRDKFVFVDDKSLRETLRREIDESQLPEFLGGKMPLVSLKDYAQQPQPVCE

SEQ ID NO: 8276 - protein, 237 aa, Zea mays
  Clone ID: ZEAMA-23APR03-C460258_1.p
MQSRGSRDRMEEPQPRNSSFSLPTTARSAANPLHAFPAEKERDTRHIILLLYYTATATAHPPPPPVQVRIWNLHARVVVVVVAQHPELLRPGGGSVVAYSNDDDRRRRRRRLVGAAGAEGRLGRAPRQVRGHQRLRLRLRPQRALVAPAAAPRGHAACAVPGRRPAPTTAAAPEAEEGALLLLAMVVTRPRRAVQCSLRTKHLLCSALLLIIMLLNLGFLHSSVHAKESFSVWTMRS

SEQ ID NO: 8277 - protein, 260 aa, Zea mays
  Clone ID: ZEAMA-23APR03-C460307_1.p
ARDHYLEHPNRKMPRFSCDHRALPSFGPPDVVCRWWCRRSCLLPAAIGGVQPHGGWHPFATIRLQGFSSCSPAVVPRRRPPMRMTTSFVVGRSKSGCGFPPALSFKDVHHPRWGGRRVEPGFCLPRGPVAHFFLQHSREERGSPATRRRRTSATRGRPGAGADSCRVPGTWPGWPCRRLRRCLLPFGQGMAIRPPHGRRSRRTWVRHIHGFSRAVGRTGGPSKMSYAAGVAATFLDGLVLAPWEDGSEDLLCGGGRGRRC

SEQ ID NO: 8278 - protein, 508 aa, Zea mays
  Clone ID: ZEAMA-23APR03-C460367_1.p
MGEEKQRRDGHGGKNKYAVACSIIGSIISILMGYDTGVMTGAMLFIKEDLKTNDTQVQVLAGILNVCALVGSLTAGRVSDWVGRRRTISLAACIFLAGSVLMGLSPNFGTLLAGRCVAGVGVGYALMIAPVYAAEISSAHIRGSVTSLPEICISFGILIGYVANYLLAKLPLVYGWRAMLGLGALPSAVLAVAVLAMPESPRWLVMQGRVEQAHAVLRRVSDTAGEADVRLAEIKTAAGLADDDDGSPRGVGKGVWKEMFLHPTPPVRRILVAAFGVHFFQHLTGIEAVVLYSPRIFKAAGIATRSEILAATIGVGVTKTVFIMTAILLVDRIGRRPLYLSSLAGIIASLACLGLGLTVVERSVPRHSPTWAMALSIATVFTFIASFSIGVGPITWAYSTEVYPLRLRAQGASVGVAINRVMNAGVSMTFVSLYNAVTIGGAFFLFAGLAVLAAMFFYFLCPETQGRPLEEIEEVFGRGWRARLLSWDEAVVELPMSNTTDGNTKARP

SEQ ID NO: 8279 - protein, 474 aa, Zea mays
  Clone ID: ZEAMA-23APR03-C460399_1.p
MKSWAPINLNVGLVVGVLFVLLTYLVLSQQAASSGLSVAATVAQWIMDKHLTTTNGPAETFIASDVQRTAEEQLVQGSGEKGKVVYNTKGSYSETCEVDGDVRINSTALSVTLVPASSSERREWRIWPYSRKNMPDIKMVTVTQLEDKSSAPPCTVTYNIPAVLFALGGLTGNFWHDFGDVLVPLFIASRRYDGEVQFLISNMKPWWPAAYKTILQRLSKYDAVDLDGDGDGDAHVVRCFPHVTVGIHMHNGLSIVPEWAPGPPGGRGLTMADFTRFMREVYALPRDAPASLVREEPGKQSPPPRLLLIHREHSRRFMNEREILQAAEAAGFEAVALDLRRDVTVDAQARVVNSFDVLLGVHGAGLTNSVFLPPGAVLVQVVPYGKMDVIATLEFGLPAKEMGLKYLDYVVSAEESTLLEMLGPEHPAIKDPDSIHRSGWDKMTEFYLNMQDVRIDVARFAPVLTQAFDHLRQQ

SEQ ID NO: 8280 - protein, 146 aa, Zea mays
  Clone ID: ZEAMA-23APR03-C4603_15.p
MSRRKTREPKEENVTLGPTVREGEYVFGVAHIFASFNDTFIEGNTGSDHWYYRAMKVKADRDESLPYAAMLAAQDAAQRCKELGITALNIKLRAIGGNKIKTPGPGAQSALRALARSGIKIGRIEDVTPVPTDSTRRKGGRRGSRL

SEQ ID NO: 8281 - protein, 173 aa, Zea mays
  unsure (1)..(173): unsure at all Xaa locations
  Clone ID: ZEAMA-23APR03-C4603_36.p
MSRRKTREPKEENVTLGPTVREGEYVFGVAHIFASFNDTFILTVXCCNMQHITDLSRRETLVRITGAMKVKADRDESLPYAAMLAAQDAAQRCKELGITALNIKLRAIGGNKIKTPGPGAQSALRALARSGMKIGRIENVTPVPTDSIRRKGGRKGKEAVGVFDISWRWPSSS

SEQ ID NO: 8282 - protein, 496 aa, Zea mays
  unsure (1)..(496): unsure at all Xaa locations
  Clone ID: ZEAMA-23APR03-C460408_1.p
MANSHHRCTSVASELEGTLLISGSLFPYFFLVALEAGGPLRALLLLAVYPLXLLGAAFSWDDLPLLAMTFLSTAGLDVGDVTAAARATLPRFFLADLRGSAFRALSRHAGGGERYVVTHLPRLVAEPFVREYLGADVRVVGTELRVVAGKRFSGTVVVASPGVAAAAAGADRSLGALVAVLGSDRVVGVGLYCPGAGGDQQPAFLQACQERRMVSAPEKAAAVPLPRSEYPRPLVFHDGRLVRRPDPLVCLAILLWLPLGVLLSVTRLLFGFLPHGAGLLLSAATGFRMRGSLGGAAAAGPRRGTLFACNHQTLMDPVILATVLRRKVTAVTYSLSSFSELIAPIPTVRLTRDRGRDSRIMQRELARGDLVVCPEGTTCREPYLLRFSPLFAEIADEVTPTAVRAGGAMFHGSTVRGHKWLDSVFFLMNPAPWYEIRILATCSGSGGASSLDVANGVQRMIGDELGFECTGXLTRRDKYRMIAGHDGVDARSSPSS

SEQ ID NO: 8283 - protein, 451 aa, Zea mays
  unsure (1)..(451): unsure at all Xaa locations
  Clone ID: ZEAMA-23APR03-C460516_1.p
MKLLPRLCMATGTGTGDGDGEGSASSSTKRATAVSSSSSTVSTSSAAAAAVSESSSSTSLPSLSSATSASLAASFVHVATLLPLSARPSPCAAVVAATGGSLPGLVVARPSCVALHDLSTLEATSTSDAAAGAGAGSVKCVARLPGGGGGGAAVTGHQDGRLRLWRVSSRSPGRIRLAAALPTVSDRLRRFPVPSNHVAVRRHHRRLWIEHADAVSGVAASADGRLLFSVSWDKTLKVWAAPSLRCLQSLAAHDDAVNAVAVAPDGTVYTGSADRRVRVWAPRPRPRPAARGKKQPVYHLVATLSRHTAAVNALAVGRGGQALYSGGNDRCVLVWEREDSASHMAAVGALRGHRKAVLSVACAPGGLVVSGSADQTVRAWRRAADGRGYACVAVIDGHGTAVRSVAAAPLPVLQKRSRAGGVNGGGGDEEWRVCXSFDGQVRVWSLRVSCL

SEQ ID NO: 8284 - protein, 788 aa, Zea mays
  Clone ID: ZEAMA-23APR03-C460892_1.p
MRAVRTRRPRPPRPSPELAKAPISPTTRSKPEEDPSPLTLPIKAFKLRLANGPPLASTAKDFKTYSETCASLLRLCRAMSATSTTMPSYAPSSGCLPLVLSLHAHAFRSGLTADRSVASNLLTAYAAFTRAADRDQAFRDCVAADAASSFTYDFMVSEHVKAGDIASARRLFYGMPEKSVVSYTTMVDALMKRGSVRDAVELYERCPLHSVAFFTAMISGFVRNELHKDAFPVFRKMLTCSVRPNVVTLICVIKACVGAGEFDLAMGVVGLAVKCNLFEKSIEVHNSLITLYLRMGDAAAAHRVFDDMEVRDVVSWTALLDVYADLGDLYGARRVLDAMPARNEVSWGTLIARHEQKGDTAEALKLYSQMLADGCRPNISCFSSVLSACATLQDLRGGTRIHANALKMGSSTNLFVSSSLIDMYCKCKQCTYAQRVFNSLPEKNTVCWNSLISGYSWNGKMVEAEGLFNKMPARNSVSWNTMISGYAENRRFGDALNYFYAMLASGHIPGEITLSSVLLACANLCSLEMGRMVHAEIVKLGIEDNIFMGTALSDMYAKSGDLDSSRRVFYQMPEKNNITWTAMVQGLAENGFAEESISLFEDMIENGIAPNEHTFLAILFACSHCGLVEQAIHYFETMQAHGIPPKSKHYTCMVDVLARAGCLPEAEELLMKVSSELDTSSWSSLLSACSTYRNKEIGERAAKKLHELEKDNTAGYVLLSNMYASCGKWKDAAETRILMQGASLKKDAGCSWLQLRGQYHAFFSWKEKHPLSLEIYEILDLLMLELTT

SEQ ID NO: 8285 - protein, 275 aa, Zea mays
  unsure (1)..(275): unsure at all Xaa locations
  Clone ID: ZEAMA-23APR03-C461343_1.p
MAMATRVTAAAVVLRVLSLLILLRTGTCADDYSAFVYAGCSQGRYSADSQYASGVDSVLTSVASSAPYAPYDNFTSPTDSSVVGLYQCRSDLPASVCSGCVRSAISRLSSLCAWAVGGAVQLRACFVRYGNDSFLGKQDTXVLFKKCGGTPGDAGGVAMRDSALGALVAAXAPAGGGFRTGGSGAVQAMSQCVGDLGAKPCSXCVSAAXAQLKAGCGYATAGEVYLGKCYARFWANGGGGFSSSSSSAGRHGFRLVHVVAAGLFFPSLAYASLAI

SEQ ID NO: 8286 - protein, 161 aa, Zea mays
  Clone ID: ZEAMA-23APR03-C461358_1.p
LRPGSRGQQEEGKGKKGAAGRKVGGPRKKSVSRSVKAGLQFPVGRIGRYLKKGRYAQRVGTGAPVYLAAVLEYLAAEVLELAGNAARDNKKTRIIPRHVLLAIRNDEELGKLLGGVTIAHGGVLPNINPVLLPKKTAEKASSVGSKEAKSPKKAAKSPKKA

SEQ ID NO: 8287 - protein, 224 aa, Zea mays
  Clone ID: ZEAMA-23APR03-C461443_1.p
MAVTSAAARRFLALAPARGPRAFWSASCPPDPDAPSASSTSTDNNSRRKKKEPSGSAHHRLAAVMDAVNERKLPPELSGRGNAVRSETDIVNVVEQRIWHSMEEGHFENLPGKGKPLNLTSNPHADPAEDTLYRILSKNGCAPEWVELNKEIRGMILSWRSALRKAWANRSEDDDSNWSDDSRALQERIRQINDKVFRYNLIVPFGRQLFGLNWDKELDKLKEE

SEQ ID NO: 8288 - protein, 210 aa, Zea mays
  Clone ID: ZEAMA-23APR03-C461986_1.p
MHAPMAIRVSSSVAATASNRSLLLVVAGVALALLASPTAVSARRRPVRLRLYMHDIVGGPGQTAVRLVKGPGPENPSMHPGNYFGDTVAVDDLLTAGLAAGSAPVGRAQGTYMTGSMSRPVFVVAVTLMLAAGPYSGSTLVVAGRDDTSQPVRELAVVGGTGALRRAAGHVLWSTARVESSLHAVLQLDVHASVPAPSKAAAAALLVSSA

SEQ ID NO: 8289 - protein, 131 aa, Zea mays
  Clone ID: ZEAMA-23APR03-C462033_1.p
RPSPARRTSTCSSAGTRPRPPHTASRSSQTRRRRHPRSRRRTDHLASRPAATRPHRRCPGAPSLTRTSCCRGASRSSMSLPPSRPSRARAPPRPRTRPSSRSPASASGRKAPMQPPTPRTPPATPRKKKKK

SEQ ID NO: 8290 - protein, 197 aa, Zea mays
  Clone ID: ZEAMA-23APR03-C462084_1.p
IRTIPNSTVSIPPTHTHTTTLKRKRRRRSIGQVNNKPTHHFYERSVLCSLYHHAGEVAVPARHATGRQPARIRFLGGRARNTAARSRATGKKARRADADADADGAAEDGSLRLAGVGGTAGGRGGAHADFRGAGGHSAGARSRLSSDVGVVGSASCSCSCAPFSAGGKDEATGSAVVLIGGSAAGRTSAAAELIWPP

SEQ ID NO: 8291 - protein, 182 aa, Zea mays
  Clone ID: ZEAMA-23APR03-C46208_1.p
MEVKEVCVQDMLVDLEKGKCLLPIEDNSGMKVNSIVGHASTMRPSSWDDLVALKDDKSHHICCFSSHRQDSSVKSGEPMKAEGEIKVGILDKSTVDKENKKWYKKPPRPPRLQTTSPLDPADQKLISALSELAVLKKARIERMKALKKMKNSKPASSIGNLVALIITVILCFFILWQGLLMK

SEQ ID NO: 8292 - protein, 279 aa, Zea mays
  Clone ID: ZEAMA-23APR03-C462144_1.p
MRTLRRRRRHPGSRRPTPSRRRPHCSPPARAPGLPTWVPAQRSQPPHLTRRRAGSPITVPFLWEEAPGKPKALPAAATPDAANAGSFTEVGGRRQDRGHADLPRPLPLKLPPRLQQASSSFAAADTPLSPKTVLQGGRRRPRWARRGASAFRTTPSAGGGLFSRNWSKPTAAASNKNGDGDHERDAAGPDAPWCSPASSSSSSSSSASTCFGVDGHGHGHGGRARPADGREVCSEEDDGSPRGSVRITRFRRNRSLPSMTTSNLWASIRRSVKQITPWS

SEQ ID NO: 8293 - protein, 344 aa, Zea mays
  unsure (1)..(344): unsure at all Xaa locations
  Clone ID: ZEAMA-23APR03-C46266_5.p
MLCSKAKPAPVCPGAGVRLYISVPVRSGRQKESRLASYSSERKIAQKANSNRHRAKGIGRARFALFPGQPTTPPANQRRRRGGGDRMEGHVRRSPASSAADDGAPSTSGSADATARYADADDNAAGAGGPKVWVLVLLFALLLLPFLPSAMRRGTGGGTVWAGGGRGTEGGYRYRRGGISFKSGWDVVNLCLVLFAILCGLLGRSGGGGDGDSSSSATSASASAKDDRHRLASSAPPAAEPVTVAEGEDESPSVTASPAPAYCASPDVNTKADRFIESFREGLKLEKXNSYREKWQRQIQENAAVEIEEGEFMVIGSLFGDDDEEDEDGISLPQTPATAVAVGF

SEQ ID NO: 8294 - protein, 132 aa, Zea mays
  Clone ID: ZEAMA-23APR03-C46267_1.p
MSGEEADGSKPQGGGVHYGTFQGPPSYPPPRPPPSLSAHHRGDYQAVPARDYEAGVRGRSHDRLPCCGIGFGWFLFIVGFFLGAIPWYVGAFLLCCSRVDYREKPGYVACVAAAILATIAVIIGAAAGTHVL

SEQ ID NO: 8295 - protein, 337 aa, Zea mays
  Clone ID: ZEAMA-23APR03-C462869_1.p
MPNDAPSPPIHSAKDAMDALAGILGGALPGSVAAAEDPAAALLNDPDVASEVTGRLRGPGSGAGNDSLCRWLYDAFRSNVPELQLVVLRFVPVLAGVYLCRAVSRKTLAGFEAVLLALYAHAAAQRGAGEAETVSLPNLANPSPYHDAKVPPKAKPVDLDVAVLSPPLEPHGTVRATRRAQIVGAVLQLYHGKLAHMPLSSKMDFCGFCVAWAGTHSKLDGADKQRLPPAPAGGDAEKWQRVPLPWELFQPALQIVAHCLLGTTGSDELKAQAARAAECLYWRATETMDARAVLATRSLVRLSQMVEEPIPEPSFSGAIENTAELEAMRANILNSNN

SEQ ID NO: 8296 - protein, 216 aa, Zea mays
  Clone ID: ZEAMA-23APR03-C462894_1.p
MEMVLDNSAPGVVAAGQSYRGVRKRKWGKWVSEIREPGKKTRIWLGSFESPEMAAVAHDVAALRLRGREARLNFPGLVHRFRRPATAEPDDVRAAALEAAAQVRFRPDLVAMQASGGEGGCRFGGAGGSDDTGSPEPLAAGEDDVAWDVLLGTDVEVVESPKMWDELAEAMLVAPPPVWEGDMEDTDDWAQGGNLWDLPVWALGPTGRCSFTSFGF

SEQ ID NO: 8297 - protein, 207 aa, Zea mays
  Clone ID: ZEAMA-23APR03-C462983_1.p
LDGEATPGGGRRRPGLVLLLLPHDPRADDSWCRCCRRRRQLVSSWTGGGGAAAGYPSGSAAVVAAGRTTPSGGGFIDLASYIIIVKYTLLDRSDNFIVLVRHSGGRRRRRSCGGDNARREEEDGAGAGGGLPWLRRQRPPLAVGTAAEELIVHRDPRPIDRVTSLHFFFFVFWFHTHARTAVSYSGRAFRYCSFVVGLYDYTSYLYL

SEQ ID NO: 8298 - protein, 397 aa, Zea mays
  unsure (1)..(397): unsure at all Xaa locations
  Clone ID: ZEAMA-23APR03-C463111_1.p
MSSSSASLQPPPAGATGGSSPYSASSSFLPSFMIIAALLAFVFLASVSIHLLLRFLSXALPPPPPPPPPPRRCPDIRARGPTAXDAGSADASVARRPAATAAPADAGKNEEEEDAGDEKQRLIDSLPLFTMXSALAALPKSSPDCAVCLSPFTXDADLRLLPACRHAFHAACXDAWLRTTPSCPLCRAAVALPHPSLSGMLAAAQAQRPARPGPGPGPSFLVEMGTVSSRGSPAAAGGGRDRNRNRNSRTYSLGSAFDYQIDEEVEAVVSRVARIAAARESSAVKEEKPSAEQGSAPAPAPAPSPSSQPPPPGETVAEAAGSSRGWLREYVDRLASSAYTLSERWSSRWSQGQSQQQRQEEPWLWDAEAAEMSAAPGSDDDEEETAFMAMYRWIAGV

SEQ ID NO: 8299 - protein, 291 aa, Zea mays
  Clone ID: ZEAMA-23APR03-C463211_1.p
MGRPARSRSPATEPPPAVTGLRSSKISFRSRKIVKTASAKPLATTALALAPQAPPPPVLPALSSPGELAAALRHLQAADPLLTAVIANTEAPTFTATPSLPAFHSLARSILYQQLATSAADAIYARFLALLPSASAAAAAVAADAVTPAAVLALAAADLRTIGVSGRKASYLHDLAARFAAGELSDSAVAAMDEAALLAELTKVRGVGEWTVHMFMIFSLHRPDILPCGDLGVRKGVQELYKLKSLPNPEEMAALCERWRPYRSVGAWYMWRLMESKGAASKKKNKGNASS

SEQ ID NO: 8300 - protein, 239 aa, Zea mays
  unsure (1)..(239): unsure at all Xaa locations
  Clone ID: ZEAMA-23APR03-C463535_1.p
MEVEADGIQEATAGAGDGGGXGTHVFFCVAATSRGNKNSISYFHTNAVGEDAESALALAALCLDHAPDHHRWHHHTVAGAKTFAFLSADDGRTYFAAADPSPGAAEVVRFLERVRDACDAAPRKRLRDEAVAPVARQFARTLRAAAAGPSSGAELPEASLQAKEPSTPLAPVCEKDEEERQRAGERRRAFLQPEESASALPGWRPWWRHASVVIVVDVVLCLVLFAVWMGVCKGFGCLR

SEQ ID NO: 8301 - protein, 491 aa, Zea mays
  Clone ID: ZEAMA-23APR03-C463581_1.p
MGSLSTAEGQRPHAVCMPYPAQGHVTPMLKLAKLLHARGFQITFVNTEFNHRRLLHSRGPDALDRVPGFRFDAIPDGLPPSDADATQDIPALCYSTMTTCLPHLLALLARVDADAGSPPVTCLVVDAVMSFGFDAARQIGVPVAALWTASACGFMGYRNYRNLIDWGLVPFKSAADLQDNVGGGHLATVVTGARGMCDGVQLRDFPNFIRTTDRADFMFNFLMRESERLSLPDGVIVNTFEDLEGATLDAMRAILPTVYPVGPLLLRERLEIPASSPLAVLGSNLWKEEEGLLEWLAGRAPRSVVYVNYGSITVMTNSQLLEFAWGLANSGYPFVWNIRPDLVKGDSAVLPPEFASAVEGRALLTTWCPQEAAIQHEAVGVFLTHSGWNSTLESLCAGVPMLSWPFFAEQQTNCRYKRTEWGVGMEIGGEVRRDEVTVVLKEAMDGEKGREMRRRAEEWKEKAVKVTLPGGPAETNLERVIHEVLLSQKKG

SEQ ID NO: 8302 - protein, 174 aa, Zea mays
  Clone ID: ZEAMA-23APR03-C463977_1.p
MEVQPELSLGFAPAVKIPRRSSSNSEGSGGGAGNKRKHFAWESHGSSLDLQLGDPLPLDWEQCLDLHSGRMYYQNRKTKNKSWDRPSSKEEQGTLNLELGISTTPDTFKSHTSGGHMVAVPCVNCHLLVMLCKSSPACPNCKFVQPSVAGMPKTPPRRRLETVKPLLETLSLLH

SEQ ID NO: 8303 - protein, 84 aa, Zea mays
  Clone ID: ZEAMA-23APR03-C463979_1.p
MASLLSLYGGDAAGGRRRMSRGSGTAPAPVRRLLRRLRSSFIRRSAARPRTRAAARFAYDLRSYSQNFDDGVISSSAPAATARA

SEQ ID NO: 8304 - protein, 180 aa, Zea mays
  Clone ID: ZEAMA-23APR03-C464040_1.p
MGKRPPTDPKRFGDTSNAGSSSGWTDEKHMLYITFLEESFVNQLYSSKGEMNSAESFYATPGAWQKSSYSGNGRNTKYDEGHGYWGTVEVDGDGADYMDDDASTNGPRQERDTSYHARQRNSRGSAAFRLRQHGHSFSWRESSDQNFLDGETQGSKEQGRGSSKNQQKHADTTKVGPHDS

SEQ ID NO: 8305 - protein, 354 aa, Zea mays
  unsure (1)..(354): unsure at all Xaa locations
  Clone ID: ZEAMA-23APR03-C464522_1.p
MALSPTPTAVAAPPPEPGPEPAPSAELPLPDAIAAALPPDPYEQLEVARKITAVAVASRASRLELEAARLRQRLADRDRLAAELADRAAKLEQALRDADARXRSALDDNAKLAKERDSLAQTSKKLARDLAKLETFKRHLMQSLGDDNSQTHHQETVDIRTYEQSVAKANSWKDGLEKNSHPVSSLSDESVEADSVNQEVTTRPFEQKLTITHITPRLTSDPAPKLRTAATSPRRYSTAVSPKLASGATSPRLEGHMAMSPWLPSSKMSSAANSPPRGQSISGRGTRVDGKEFFRQARHRLSYEQFAAFLSNIKELNAHRQSREETLRKADEIFGAENMDLFRSFQGLLSRSLS

SEQ ID NO: 8306 - protein, 348 aa, Zea mays
  unsure (1)..(348): unsure at all Xaa locations
  Clone ID: ZEAMA-23APR03-C464592_1.p
LXAGLKAMAALYALVAVSLLPVLVTAECDCSDDDATGRDKAGALRLKIIAIFCILAGGAAGAAVPALGRRLPALRPGAGPFLAVRAFAGGVILATGLVHILPAAFDALGSPCLAAAGGPWARFPFAGTVAILAAVATLVVDTVATGYLRRKAAAVGDEPPQLGGDDPEEASGGGRHGHAHGVDDDDDLVRHRVVSQVLELGVVVHSLIIGMSPGRXSDFPSTVRPLVPALTFHQLFEGIGLGGCIVQAKFRLRSMVAMAVFFSLTTPIGVAIGIGISSAYDETSQTALVVQGLFEAAAAGILVYMALVDILREDFMSARVQGSAPLQAALSASLLLGAGLMSMLAIWA

SEQ ID NO: 8307 - protein, 381 aa, Zea mays
  Clone ID: ZEAMA-23APR03-C4646_1.p
ILATLVGLLHLLAGTKAYNNVFLRHHVFCILQVAAGRSPTLFGVPKVVTPPLVVKDICSDQHTKADSSIPQPSKPQEPSTSTPSVREVLPTSGPTKDADNISNCSERRNVVKIRVKLTASSSKASDADHRGHFHGGRNENEPGPCSSMSVDAPMVGTANEPLNVSNHNIEEQNSCHDRESRMSASVSTVKLLDRHDISRELQCTADSRLDALPKNQFSPAINLPEALDKPGSQLEGVSTSYEGNQAPESVNGVETKERKKKDKKDKKRKRDEKRVKKDDPEYLEKKRLKKEKKMEKELARKQLEGEGRATPEQPRPVNPSGSLEVLPARPPAPVLSAEPPAVRISEPQVSSKETAVDTARAAAKPRIKIRVKPLVRKSEGN

SEQ ID NO: 8308 - protein, 673 aa, Zea mays
  unsure (1)..(673): unsure at all Xaa locations
  Clone ID: ZEAMA-23APR03-C464914_1.p
MAGTHKKRMEDRFGSFFSFDEDSESEDISLDELEEELKEHKNCDVLVTILTNGEKQRGMATLIEGDLGHTEEALIQDYIEDNDSLVLLHDQIHDCDVILSQIGLILSGFQTHICSISSEIRSLQEKSWDISLKLKNRKLVETKLAGFVEEIVAPPGLVNILVNGEVNEGYARSLEILSRKLKFVQVDPLINASKALNDIKQELERLRQKALSKISSHIMEIFFAMRNPGTNIQILQQNLLQKHRYLVLFLKEHGSETYGDLCASYVDTMNKVLSTYFHVYVEALEKLKLEIGVPSDFNGHDTSIIDIIIRGREHLRNHGFMFSLGERANIXKEIHQPGLVPHISQGNSRKYPYEVIFRSLQKLLMDTASSEYLFMESFFGEESLFYQVFEGPFAVIDQHLDITLPNCHDAVCLMLIICITRKHQALMYLWPRFKVVFDMYIQSLYQCDAKTLWIDGTHPHHIARCYVEFTASLVQLNAECGDGQLDMNLERLQSAIEFLLVRLAQTFTTTKLQHLFLLNNYDMAISVLKETGDEAKKLQKYFEEKLESNMMAFVDNLLMEHFSDLLRFVRSHVSEDLVSYTENTNIADVEPVVKNFAMKWRIALELMHNEVITSCTNLLSGMAILKAAMTQLLNDYNRLSECVKKITGGSTLNRHMVSITSISYEIRKYSRTL

SEQ ID NO: 8309 - protein, 331 aa, Zea mays
  Clone ID: ZEAMA-23APR03-C4656_1.p
MLRNRSRRAVGGGANQAQGKNQAQGRAGGLMAELPAAAAPQSPRHPSSSSSSSSPAAAPVFPSPRPFVAMAALPQAGLLLDGSSEGSRSAVSPTSILETKHFCCSPLPPFLSERSLRRAARVDAAAAAAAEPAGVGLADVLRDHGDAKVAGGKVVLGSQLRVQVPSGRAVELLSSPIEFGAKNRDAQLAALSPARRLLPEVVSSPSARVFAAGGVAVVPPGEMAMSEDYTCVISRGPNPRTTHIFDDCIVESCGDLLADKPAAGGAAAADCGFFSSCHACNKQLGHGNDILIYRGHKAFCSSECRYQETLLDEAVDGEFALGDGGKGGGRC

SEQ ID NO: 8310 - protein, 234 aa, Zea mays
  Clone ID: ZEAMA-23APR03-C466_5.p
MEAADYGKLFVGGISWETSEDRLREYFGRFGEVTEAVIMRDRSTGRARGFGFVVFADAAVAERVTMDKHTIDGRMVEAKKAVPRDDHSIVSKSNGSSTGSPGPGRTRKIFVGGLPSSVTEADFRRYFEQFGIITDVVVMYDHNTQRPRGFGFITYDSEDAVDKALHKSFHELNGKMVEVFLLLMGWATFQALGQGTLLVELEIITSVCLLAAMEGATQLVQLASLFLQQAIHMM

SEQ ID NO: 8311 - protein, 265 aa, Zea mays
  Clone ID: ZEAMA-23APR03-C467_51.p
MASSTMALSSTAFAGKAVNVPSSLFGEARVTMRKTAAKAKPAASSGSPWYGPDRVLYLGPLSGEPPSYLTGEFPGDYGWDTAGLSADPETFAKNRELEVIHSRWAMLGALGCVFPELLARNGVKFGEAVWFKAGSQIFSEGGLDYLGNPSLIHAQSILAIWACQVVLMGAIEGYRVAGGPLGEVVDPLYPGGTFDPLGLADDPEAFADVKVKELKNGRLAMFSMFGFFVQAIVTGKGPLENLADHLADPVNNNAWAYATNFVPGK

SEQ ID NO: 8312 - protein, 266 aa, Zea mays
  Clone ID: ZEAMA-23APR03-C467_68.p
MASSTMALSSTAFAGKAVNVPSSSAFGEARVTMRKTAAKAKPAAASGSPWYGPDRVLYLGPLSGEPPSYLTGEFPGDYGWDTAGLSADPETFAKNRELEVIHSRWAMLGALGCVFPELLARNGVKFGEAVGFKAGSQIFSEGGLDYLGNPSLIHAQSILAIWACQVVLMGAVEGYRIAGGPLGEVVDPLYPGGSFDPLGLADDPEAFAELKVKELKNGRLAMFSMFGFFVQAIVTGKGPLENLADHIADPVNNNAWAYATNFVPGK

SEQ ID NO: 8313 - protein, 325 aa, Zea mays
  unsure (1)..(325): unsure at all Xaa locations
  Clone ID: ZEAMA-23APR03-C47235_1.p
GSSCPARIKQVVIRDLPSSGTPVAGVRRSLSSPREQRLPPPAFRMENPFSVKVLQVFTGFGVGCGVGIGVGRPIYLGMIPGLQQVMSATRGATDAFSGVTRHVNSALRTAGLKNIEAGIGCGVGIGHGFGIGIALKPRVLHGIQSSVGFPPXEIMSKWTSKLKDTPETPSSSNPMVHSLSSNEQTHNSMSMDLEAKDAESNLNQTSSYEMSKVQSTQPEALTVSRTKKVIANFLQDPLFQNDTKVDFRDAPGNLHGMDSVLQLVLKHQKVIEELQEENENLRQILIEELKISPTKLQIGHKNGVKAYYPCSDCFECRRRSRRTTR

SEQ ID NO: 8314 - protein, 790 aa, Zea mays
  unsure (1)..(790): unsure at all Xaa locations
  Clone ID: ZEAMA-23APR03-C47319_1.p
MSRFVDKLPFFDRRSSLMEEAGDIPRSGLLHMHHHQPHHSGLLMQPQPSPPAKQSSFTLAQLLKRVNEARSDASSPTSSPTHSHYTIELGGSVPGSTGSDLSERIGGGGGDGPLLPFVLKFTDLTYSVKQRKRGPCLPVLPFRRGAGEPAEPEVSRMKTLLDNISGEAREGEIMAVLGASGSGKSTLIDALANRIVKESLRGSVTLNGESLDSNLLKVISAYVMQDDLLYPMLTVEETLMFAAEFRLPRSLPTKEKKKRVQALIDQLGLRNAANTIIGDEGHRGVSGGERRRVSIGVDIIHDPIVLFLDEPTSGLDSTSAFMVVKVLQRIAQSGSVVVMSIHQPSYRILGLLDRLLFLSRGQTVYYGPPGALPSFFNDFGKPIPGNENPTEFALDLIRELETMPDGATDLVEHNKKWQMRTAPKAKHHDGHGEKPSLSLKEAISASISRGKLVSGATDGSVSVHSAGESAPAAAVSKFANPFWVEMGVLTRRAFLNTKRTPEXFIIRLAAVMVTGFILATIFWRLDDSPKGVQERLGFFAIAMSTMFYTCSDSLPVFLNERYIFLRETAYNAYRRSSYVLSHTIVGFPSLIVLSFAFALTTFFAVGLAGGADGFFFFVAIVLASFWAGSGFATFLSGVVTNVMLGFPVVVSTLAYFLLFSGFFINRDRIPRYWLWFHYLSLVKYPYEAVMQNEFSDPTRCFVRGVQMFDNTPLAVLPAVLKVRVLRAMSQSLGVDIGTATCITTGPDFLAQQAVTDLTKWDCLWITVAWGFLFRILFYISLLLGSRNKRR

SEQ ID NO: 8315 - protein, 268 aa, Zea mays
  Clone ID: ZEAMA-23APR03-C4781_2.p
MKMATMTAYKYQAQALMRDYLLADLLVPYTSVLFGIVLCKAYDFTRILSSFYFKGYTLLTKIQRIEWNNRGMSSAHAIFITAVSLYIVTSTDLFSDCVKGPITFRNSIISTSALGVSVGYFITDLEMIFWLYPSLGGMEYVLHHTLSLVAIAYTMLSGEGQFYTYMVLISETTTPEINLRWFLDTAGLKKSSAYLVNGILMFVAWLVARIFLFMYVFYHIYLHYSQIMQMHAFGYYLTFVVPSVLFVMNTMWFMKILKGVMKTLAKWS

SEQ ID NO: 8316 - protein, 112 aa, Zea mays
  Clone ID: ZEAMA-23APR03-C4787_3.p
TFLLKQTDIFNYSLDVHRLMEWGLLPVDVARKCFEKKQGQKVKSPVKAIVAKRIPSSPAKTLPSSAKKLVMPSNSAGKLKSQKKRKASDDTDDDDDDDDFVASKAKTKRHKA

SEQ ID NO: 8317 - protein, 166 aa, Zea mays
  unsure (1)..(166): unsure at all Xaa locations
  Clone ID: ZEAMA-23APR03-C478_3.p
VSVQTRPQGGEIVAVGEGRSFGSNRIEISVPVGAQVVYSKYAGTELKFNDAXHLILKEDDIIGILDSDDVKDMKPLNDRILIKVXAEAEEQTAGGLLLTQATKEKPSVGSVVAVGPGPLAEDGSRNPLSITPGSNVMYSKYAGSEFKGEDGEYIVLRASDVMAVLS

SEQ ID NO: 8318 - protein, 368 aa, Zea mays
  Clone ID: ZEAMA-23APR03-C47978_2.p
MEEARQRRRLCLCLVVAAGSWALLAAVARCDPQVPCYFIFGDSLVDNGNNNYIVSLARANYPPYGIDFAAGPSGRFTNGLTTVDVIAQLLGFDNFIPPFAATSADQLLGGANFASAAAGIRAETGQQLGGRIPFAGQVQNYQTAVQTLVSILGDQDTASDHLSRCIFSVGMGSNDYLNNYFMPAFYNTGSRYTPEQFADSLIADYRRHLRVLYNYGARKVVMIGVGQVGCSPNELARYSADGVTCVDRIDDAIQMFNRRLVGLVDEFNALPGAHFTFINAYNIFDDILANAASYGFTVTNAGCCGVGRNNGQVTCLPYQAPCANRDQHIFWDAFHPSEAANIIVGRRSYRAESPNDVYPMDISTLASI

SEQ ID NO: 8319 - protein, 450 aa, Zea mays
  unsure (1)..(450): unsure at all Xaa locations
  Clone ID: ZEAMA-23APR03-C483_102.p
MGKEKFHINIVVIGHVDSGKSTTTGHLIYKLGGIDKRVIERFEKEAAEMNKRSFKYAWVLDKLKAERERGITIDIALWKFETTKYYCTVIDAPGHRDFIKNMITGTSQADCAVLIIDSTTGGFEAGISKDGQTREHALLAFTLGVKQMICCCNKMDATTPKYSKARYDEIIKEVSSYLKKVGYNPDKIPFVPISGFEGDNMIERSTNLDWYRGPTLLEALDQINEPKRPSDKPLRLPLQDVYKIGGIGTVPVGRVETGMIKPGMVVTFAPTGLTTEVKSVEMHHESLLEALPGXNVGFNVKNVAVKDLKRGYVASNSKDDPAKGAANFTSQVIIMNHPGQIGNGXYAPVLDCHTSHIAVKFSEILTKIDRRSGKEIEKEPKFLKNGDAGMVKMTPTKPMVVETFSEYPPLGRFAVRDMRQTVAVGVIKSVDKKDPTGAKVTKAAVKKGAK

SEQ ID NO: 8320 - protein, 447 aa, Zea mays
  Clone ID: ZEAMA-23APR03-C483_53.p
MGKEKSHINIVVIGHVDSGKSTTTGHLIYKLGGIDKRVIERFEKEAAEMNKRSFKYAWVLDKLKAERERGITIDIALWKFETTKYYCTVIDAPGHRDFIKNMITGTSQADCAVLIIDSTTGGFEAGISKDGQTREHALLAFTLGVKQMICCCNKMDATTPKYSKARYEEIVKEVSSYLKKVGYNPDKIAFVPISGFEGDNMIERSTNLDWYKGPTLLEALDQITEPKRPSDKPLRLALQDVYKIGGIGTVPVGRVETGVIKPGMVVTFGPTGLTTEVKSVEMHHEALQEALPGDNVGFNVKNVAVKDLKRGFVASNSKDDPAKEAASFTSQVIIMNHPGQIGNGYAPVLDCHTSHIAVKFAELITKIDRRSGKELEKEPKFLKNGDAGMVKMIPTKPMVVETFSAYPPLGRFAVRDMRQTVAVGVIKSVEKKDPTGAKVTKAAAKKK

SEQ ID NO: 8321 - protein, 447 aa, Zea mays
  Clone ID: ZEAMA-23APR03-C483_72.p
MGKEKSHINIVVIGHVDSGKSTTTGHLIYKLGGIDKRVIERFEKEAAEMNKRSFKYAWVLDKLKAERERGITIDIALWKFETTKYYCTVIDAPGHRDFIKNMITGTSQADCAVLIIDSTTGGFEAGISKDGQTREHALLAFTLGVKQMICCCNKMDATTPKYSKARYDEIVKEVSSYLKKVGYNPDKIAFVPISGFEGDNMIERSTNLDWYKGPTLLEALDQITEPKRPSDKPLRLALQDVYKIGGIGTVPVGRVETGVIKPGMVVTFGPTGLTTEVKSVEMHHEALQEALPGDNVGFNVKNVAVKDLKRGFVASNSKDDPAKEAASFTSQVIIMNHPGQIGNGYAPVLDCHTSHIAVKFAELITKIDRRSGKELEKEPKFLKNGDAGMVKMIPTKPMVVETFSAYPPLGRFAVRDMRQTVAVGVIKSVEKKDPTGAKVTKAAAKKK

SEQ ID NO: 8322 - protein, 447 aa, Zea mays
  Clone ID: ZEAMA-23APR03-C483_75.p
MGKEKSHINIVVIGHVDSGKSTTTGHLIYKLGGIDKRVIERFEKEAAEMNKRSFKYAWVLDKLKAERERGITIDIALWKFETTKYYCTVIDAPGHRDFIKNMITGTSQADCAVLIIDSTTGGFEAGISKDGQTREHALLAFTLGVKQMICCCNKMDATTPKYSKARYDEIVKEVSSYLKKVGYNPDKIAFVPISGFEGDNMIERSTNLDWYKGPTLLEALDQITEPKRPSDKPLRLPLQDVYKIGGIGTVPVGRVETGVIKPGMVVTFGPTGLTTEVKSVEMHHEALQEALPGDNVGFNVKNVAVKDIKRGYVASNSKDDPAKEAASFTSQVIIMNHPGQIGNGYAPVLDCHTSHIAVKFAELITKIDRRSGKELEKEPKFLKNGDAGMVKMIPTKPMVVETFSQYPPLGRFAVRDMRQTVAVGVIKSVEKKDPTGAKVTKAAAKKK

SEQ ID NO: 8323 - protein, 176 aa, Zea mays
  unsure (1)..(176): unsure at all Xaa locations
  Clone ID: ZEAMA-23APR03-C4844_14.p
MPGFAQRLAXGIPWRSIARQGLSRVFLVAKAYCLIHVVNDHLCSVTLVRGASMLPSLNLAGDAVAVDRVSVRLGRVAPGDIVLMISPEDPRKSVVKRVVGMQGDSVTYLVDPGKSDSSRTVVVPQDHVWVQGDNIFASNDSRQFGAVPYGLITGKIFCRVWPPESFGAIDDATKQS

SEQ ID NO: 8324 - protein, 253 aa, Zea mays
  unsure (1)..(253): unsure at all Xaa locations
  Clone ID: ZEAMA-23APR03-C48655_2.p
MATFLGSSPALLARPIAKPHISCAQTPRPPSAQNQPPSSEQPQAQTQQQSVQAQPQQAAARPKRAGGADSTDWVASSLTRRFGIGAGLAWAGFLAVGVVSEQLKTRFEVAQQQANTKDVEQEQEVVLPNGVRYYEMRVGGGDVPRXGDLVVIDLQGRXAGSGGGGEAFVDTFGDGKRPLALVMGSRPYTRGMCEGVEYALRSMRAGGKRRVVVPPGLGFGDDGADFGEEHVQVPPGATLEYIVQVDRVSIAPA

SEQ ID NO: 8325 - protein, 257 aa, Zea mays
  unsure (1)..(257): unsure at all Xaa locations
  Clone ID: ZEAMA-23APR03-C487612_1.p
RRQRRPSRPWPKPSPPRPSPTAAATLSPACQHARVDRPPHRATPPFRSPARAAGRNLAMKSKKSVHGSSCKKAKLFDGLIGKHGSEIDPCYKLFLEHLSKDRNTYVLDVPKGDHGLPFSVRYEEDYTSYGNTKCRSSPNFPNHSRRTSWGIPDGKQPDVKAIKAASRNMCCSFSPKRSYVKKTTTSLVDEPYELFLSLVKFKDGFMVIEPEPGVTIVYEREEDMPAGYDDWRTGSSTNELSLVSXLETXRETHHAKI

SEQ ID NO: 8326 - protein, 161 aa, Zea mays
  Clone ID: ZEAMA-23APR03-C4883_1.p
MAARARAAAPFWLLAAAAVTLLVAAASAQSGGSSSDDCTSALVSLSPCMGYISGNGTSAPSASCCSQLKAVVQSKPQCLCAALGSDASSSLGGVTIDRSRALGLPAACNVQTPPVSQCNNGSSGGGSKATPFLPSGGASLGGPAALVLGLAAAAVYAVAAT

SEQ ID NO: 8327 - protein, 257 aa, Zea mays
  Clone ID: ZEAMA-23APR03-C4890_6.p
RWWAKMLDMQKRRVRLLLFITGILALSMTAEKSRELVGKEAASKSGQSTFMNCFDKGSGSLACTSKEGVKLYVNNIRSAHLEMVRQRPMGKALADAVAEGLTPSEAAKQAQKVSAKATKIAARQANRILGPIISCGWDFFEAMYSGGSMMEGFLRGTGTLFGTYVGGFHGEERFGKLGYLAGSHVGSWGGGRIGLMIYDVISGLKYMFMSVQPKYESSSYASEDGPEYAKRYTNQEEPTYYEPSKEKQEESKWFGLF

SEQ ID NO: 8328 - protein, 473 aa, Zea mays
  Clone ID: ZEAMA-23APR03-C4907_2.p
KLTTANSIRKPQTQRASHGIRYHLHLVAPCRPPRRQSCEDWWRAEAGGRGGAWPARSGGAPAARGGACEAAGGGLRRGCPAAPVADEAAVDYEALARELEGASPLEIMDRALAMFGSEIAIAFSGAEDVALIEYAKLTGRPFRVFSLDTGRLNPETYQLFDRVEKHYGIRIEYMFPDASEVQELVRTKGLFSFYEDGHQECCRVRKVRPLRRALRGLRAWITGQRKDQSPGTRASIPLVQVDPSFEGLDGGAGSLVKWNPVANVDGKDIWTFLRTMDVPVNALHAQGYVSIGCEPCTRPVLPGQHEREGRWWWEDAKAKECGLHKGNIDKDGQAAAAAAAAPRTANGNGSAGAPDIFESPAVVSLTRAGVENLLRLESRAEPWLVVLYAPWCPFCQAMEASYVELAERLAGSGGVKVARFRADGEQKPFAQAELQLQSFPTVLLFPSRTARPIKYPSEKRDVDSLLAFVNSLR

SEQ ID NO: 8329 - protein, 351 aa, Zea mays
  unsure (1)..(351): unsure at all Xaa locations
  Clone ID: ZEAMA-23APR03-C49527_1.p
MGHHSCCNQQKVKRGLWSPEEDEKLIRYITTHGYGCWSEVPEKAGLQRCGKSCRLRWINYLRPDIRRGRFTAEEEKLIISLHAIVGNRWAHIASHLPGRTDNEIKNYWNSWIKKKIRKPAMSTTTTSSAVTAASPPCSTAASDAALGRHLQTPFSAAEHRLDAILSQSLALPPPKLGSGGGGGGGQESPPLPPHCPFFMFDTSVSVSPPSPAAAAHHLQHPFLTFTAAAAMDDNAPMGFHLPPLVDGMGMGMXQAMDCGALGHDHRVAGGNNNGQAEAAAAGMANGCCYGQLQKQQEEEQQPSLGQEDQWDDESARHLLMWDDDQELTPSNLEAMESTAHSLLFMGPNDHT

SEQ ID NO: 8330 - protein, 331 aa, Zea mays
  unsure (1)..(331): unsure at all Xaa locations
  Clone ID: ZEAMA-23APR03-C4980_1.p
MKHEALQLRKTLKPVNNFRKKAQENRVKKDQANADSKEVSNTLGAKWKVSGAEREAAXEERYRQEKKAYLQVVGQEKREAEAMKLLVEQQMQWTAKELLDQYLKFRQEAEEGDCKKGRKKKSKKDKDPSKPKQPMSAYFVYSQERRATLVAEKKNVPEIGKITGEEWKNMTEGQRAPYEEVARKQKEEYHKQMEVYKQKKAEEAASLEKEEQEHKKIMKHEALQLLKKKEKADNIIKKTKEKRQKKKQENADPNRPKRPASSFLLFSKEERKQLIEERPGINNSTLNALITVKWKELSGEERQAWNAKAAPAMAAYKKEMEEYTKAQSSSA

SEQ ID NO: 8331 - protein, 652 aa, Zea mays
  Clone ID: ZEAMA-23APR03-C49976_1.p
MVPPLLQRVGCLGPSMGRRLALASATGQVIDAVGGEATTRKKLRVQELSRTPLPPPPPKKRIFLRHCRLPSARVASRRGVSGAMNVPVVDPYQGEFPETIEEYLHHGTMKCIAFNRKGTLLAAGCSNGSCIIWDFETRGLAKEFRDKDSTAPITSVSWSRYGHRLLASATDKSLTLWDVPTGEKIARITLQQTPLRASLQPGSPTPSICLACPLSSAPLLVDLNTGSTTVLPVSVSENGNPPAPNPRNKFADGTPPFTPTAATFDKHGALIYVGNSKGEILIIDSKSIQVHAIVPIPGGSVVKDIVLSRDGQYLLTNSNDRVIRVYRNILPVKGSREEIRNISSNSNEYGSHYDKLKANGTSCLILSCELLDAITKIQWKAPCFSGNGEWIVGASANKGEHRLQIWNQAGRLVKMLEGPKEALIDLAWHHVEPTIATVSVTGFVYIWAKEHVENWSAFAPDFVELEENEEYAEREDEFDLNPREEQAEKVVIDEDADVDIETSEKNTVFSDVEDSVDEISYLPAIPYPDSPDEQPEKCLGSSKLEDSNHSGSPSSMDAVQNGQAIPPASSPMEVDNSTAEDPEEGPNSKRKRRLSVKGLELQQSEKGKKGSTKNKSLGKSTKSSAKKMESANGNSSAFDDEATEDDEINIDS

SEQ ID NO: 8332 - protein, 495 aa, Zea mays
  unsure (1)..(495): unsure at all Xaa locations
  Clone ID: ZEAMA-23APR03-C4998_1.p
MEFTVVRTAIVLLLSLAVSSTFLCGGVQGGRHYHYHHTTHTKHNTAHPPSAHAPGPASGRRLPPVSPPPSDSSSYPTPGAAPEPAPAPAAAGTMYDVVKDFGAVGDGVTDDTDALKTAWDTACQDDGDSVVLAAAGYSFLVHTTVFTGPCQGSVTIQLDGAIVAPSTPXTWPANSKRNWLLFYQAHGMSLQGAGLIDGRGQKWWELPCKSHKGQGGSSGHGASCDSPVALRFFMTNNVTVQGLKVQNSXPEFHIRFDSCRGVVASGLSISSPALSPNTDGIHVENTEDVLITNTAVSNGDDCVSIGAGTLNMHVENVTCGPGGHGISIGSLGKQGSRACVANVTVRNAVIRHSDNGVRIKTWQGGSGAVSSVSFENVRMDAVRNPIIIDQYYCLSKSCDNATSAVFVSGVSYAGIRGTYDPRTTPIHFGCSDAVPCTNITLSDVXLLPASGDSTIDNPFCWNVYGSTATPTVPPVPCLIEGVPRRVDDNSTLKCY

SEQ ID NO: 8333 - protein, 499 aa, Zea mays
  Clone ID: ZEAMA-23APR03-C4998_2.p
MEFTARTAIALLLSLAVSSSFLCGSVQGGRHHHHGKHAKHSSAHPPSAHAPGPASGRRHARPVSPPAPPPSSGSGGYPTPGGAAPEPAPAPAAAAAGGTVYDVVKGFGAVGDGLTDDTGAIKTAWDTACQDDGASVVLAAAGYSFLVHTTVFTGPCQGSVTIQLDGTIVAPSDPDMWPANSKRNWLLFYQAHGMSLRGAGLIDGKGQKWWDLPCKSHKGQGGSSGHGASCDSPVALRFFMTNNVTVQGLKVQNSPEFHIRFDSCRGVVASGLSISSPALSPNTDGIHVENTQDVLITNTAVSNGDDCVSIGAGTLNMHVENVTCGPGGHGISIGSLGKQGSRACVANVTVRNAVIRHSDNGVRIKTWQGGSGAVSSVSFQNVRMDAVRNPIIIDQYYCLSKSCENATSAVFVSGVSYAGIRGTYDPRTPPIHFGCSDAVPCTNITLSDVELLPASGETIDDPFCWNVYGSTATPTVPPVPCLIEGVPRNLDDNSSLKCY

SEQ ID NO: 8334 - protein, 166 aa, Zea mays
  Clone ID: ZEAMA-23APR03-C5001_19.p
MAAEAKTPSLAEEYSLPPQEVPVEKVAEEKPSSGTETESAPSTNDGTPSSVEDKNETSEVQDAAEKSDAEETNTAAEEASETTEEEEAEKPEIKIETAPADFRFPTTNQTRHCFTRYVEYHRCVAAKGEDAPECDKFAKYYRSLCPGEWVERWNEQRENGTFPGPL

SEQ ID NO: 8335 - protein, 187 aa, Zea mays
  Clone ID: ZEAMA-23APR03-C500540_1.p
MSESDGCALRRPPTAAEVVGRLKDDGDFDALRRAIVRKVKDNEILRNKIISEVKQSVVLQEDGSERMKLKDLSDAIFQDIGSKIMGQISDEVWNVIQSNETDIQGTVKAVYNRILNPEKVSEPSPKKLKQRGKEEQVLPTKTATSVAVEAEDDDPEEPPGFGFNNTQRNDIGATKPQMSLENGNEGK

SEQ ID NO: 8336 - protein, 684 aa, Zea mays
  unsure (1)..(684): unsure at all Xaa locations
  Clone ID: ZEAMA-23APR03-C5016_2.p
MSSRNRSAAASSAAPALRTPRRLRRRPVKASAPGPAGGRRSGPATPLLKWDVGGRRGEGTKAAADEAGDAARARETKAREVSVRRLAAGVWRLRPPEAVAGAGAGGENRVRVGVEHIPRHLQVQLLKQNTSGHHQSLKNEVSSPISVLERKSGELHKVQLHATSAMLPVATMEKATKWEPGDIKGMESHDAYLIASQLNLLDEQQDTVYVAGLQMELQQARDRISELETERRSARKKLDHLFKKLAEEKAAWRNREHEKVRAILEDMKADLDHEKKNRRRLEMINLKLVNELKEAKMSAKQLLQDYETERKARELTEEVCNELAREVGEDKAEIEALKRDSLRLREELDEERKMLQRAEXWREERVQMKLVDAKLTLDAKXTQLSRLQQDVEAFIAACSTANGDITVVEEAENIIQAIKSVRAQGAEFRYEPPAASEDIFSIFEELRPSEEPVIKEIEPCYTNSSAKCESEIQQVSPMTDIFLETKAKVYSNKSPKDESDAEDGSSWETISHEDMRGSSGSPDGSEPSVSNKISISWNSRNGFEYRENEKLEDDLADAYLASMNQPKKKESAISKLWKSSRPKNSEVCKKDAVVETVNARPSNARHSVGTYSTVESGIQETGLSPPSVEQWSSPDSMNIQFNRGFKGCIEYPRTSQKHSLKAKLMEARMESQKIQLRQVLKQKI

SEQ ID NO: 8337 - protein, 450 aa, Zea mays
  Clone ID: ZEAMA-23APR03-C5064_2.p
MAEQKIRREQRFKKSEGGRLQRALGQLGAGESVTRKIGAETRMRGDFRDKEDGVEKIDENHKRDNTAVSPPEEQRPKKARIQMFSPAEGVPDNVTVSVEYAKSGRSTCKGCSENIAKGALRLGASFPDPRGYENTKWYHVVCFPTSSYPLFPMSNLKGFDSIEDHDRDKLHKLVENHKSDGKAADVLNESNLKREMAHSIDDSNEGAEKDLEGIKIHCMGEFEEGAEKNLEEAKLPAGNKMIGPSISFSLSDIKKEYKNATLPAHWKVFDTVIFREKEDGLHASSKIAAFDFDGCLANTSMKRVGADQWSLQHKSIPEKLQRLYDDGYKLVIFTNESNIERWKNKRQQAVDSKVGRLDNFIECVKAPIQVFIACGLGKGKGIPDDPYRKPNPGMWWLMAQHFNSGIKIDMDQSFYVGDAAGRENDHSDADIEFAKAIGLKFHVPEEYFGF

SEQ ID NO: 8338 - protein, 228 aa, Zea mays
  Clone ID: ZEAMA-23APR03-C5070_2.p
MKKIFGAKKNKDPPPTIQDATDRITKRGDTVDEKIKKLDAELARYKEQIKKTRPGPAQEAVKARAMRVLKQRRMYEGQRDMLYNQTYNLDQVAFAAEGLKDAQQTMTAMKAANKELKGMMKTVKLEDIDSMQDEMMDLMDVSTEIQETLGRSYNVPDDIDEEELMGELDALEADMDFESESVPSYLQPDQEPELSLPAAPTGHAAVPANQQQEDELGLPTVPQASIRT

SEQ ID NO: 8339 - protein, 57 aa, Zea mays
  Clone ID: ZEAMA-23APR03-C5084_8.p
MAVMEKLKIFVVKEPVVAASCLIAGFGLFLPAVVRPILDSWQTAEQVPPPLLNDPCS

SEQ ID NO: 8340 - protein, 217 aa, Zea mays
  Clone ID: ZEAMA-23APR03-C5120_2.p
MAARVLAALALALALALVAVPAPTRASNDEGDALYALRQRLSDPNGVLQSWDPTLVTPCTWFHISCDQVGRVVRLDLGNSNVSGSIGPELGRLVNLKYLELYRNNLDGEIPKELGNLKNLISLDLYANKLTGGIPKSLSKLDSLRFMRLNNNKLTGSIPREFAKLSNLKVIDLSNNDLCGTIPVDGPFSTFPLRSFENNSRLNGPELQGLVPYDFGC

SEQ ID NO: 8341 - protein, 208 aa, Zea mays
  unsure (1)..(208): unsure at all Xaa locations
  Clone ID: ZEAMA-23APR03-C5140_10.p
MVSLKXXKXXAASVXKCGKGXXWLDXNEXXEISMXNSRQXIRKLVKXGFIIXKPXKXHSXSRXARRAHEAKQKGRHSGYGKRRGTREARLPTKILWMRRMRVLRRLLCKYREAKKIDKHMYHDMYMKVKGNMFKNKRVLMESIHKSKAEKAREKTLSDQFEAKRAKSKASRERKIARREERLAQGPREPTAPVAAPAPSTGVPKKAKK

SEQ ID NO: 8342 - protein, 523 aa, Zea mays
  unsure (1)..(523): unsure at all Xaa locations
  Clone ID: ZEAMA-23APR03-C5140_19.p
MVLTMASAQEDSLLLLLLPTTSPLPPLVAVFILAAVLLWLSPGGPAWALSRCRRPPPGPTGVVTALSSPVAHRTLAALSHAVDGGKALMAFSVGLTRLVVSSQPDTAREILASXAFGDRPVKDAARHLLFHRAMGFAPSGDAHWRGLXRRLAANHLFGPRRXVAGAAHHRASIGEAMVADVAAAMARHGEVPLKRVLHVASLNHIMATVFGKRYDMGSREGALLDEMVAEGYDLLGTFNWADHLPLLKHLDPQGVRRRCNRLVQKVESFVGKIIMEHRTRRANGGFVSDECIGDFVDVLLGLEGEEKLSDADMIAVLWEMIFRGADTVAILMEWVMARMALHPDIQAKAQAELDGVVGIGRGVADADVASLPYIQCIVKETLRMHPPGPLLSWARLAVHDAHVGGHLVPAGTTAMVNMWSIAHDPAIWAEPEKFRPXERFQEEDVSVLGSDLRLAPFGAGRRACPGKILALATTHLCVAQLLHKFEWAAGGGVDLSERLSMSLEMATPLVCKAVPRVQGQAAS

SEQ ID NO: 8343 - protein, 288 aa, Zea mays
  Clone ID: ZEAMA-23APR03-C5143_9.p
MATAATASATAATRFTLLAGAGLRSRISRLPTAVRFQRQRGLTTTALLKTADLQPKEQGKPETLDYRVFLVDGGGRKVSPWHDVPLRAGDGVFHFVVEIPKESSAKMEVATDEAFTPIKQDTKKGNLRYYPYNINWNYGLLPQTWEDPTSANSEVEGAFGDNDPVDVVEIGERRANVGDVLKVKPLAALAMIDEGELDWKIVAISLDDPKASLVNDVDDVEKHFPGTLTAIRDWFRDYKIPDGKPANKFGLGNKPASKEYALKVIQETNESWEKLVKRNIPAGELSLA

SEQ ID NO: 8344 - protein, 149 aa, Zea mays
  Clone ID: ZEAMA-23APR03-C5187_6.p
MADQLTDDQTAEFKEAFSLFDKDGDGCITTKELGTVMRSLGQNPTEAELQDMINEVDADGNGTIDFPEFLNLMARKMKDTDSEEELKEAFRVFDKDQNGFISAADVRHVMTNLGEKLTDEEVDEMIREADVDGDGQINYEEFVKVMMAK

SEQ ID NO: 8345 - protein, 573 aa, Zea mays
  unsure (1)..(573): unsure at all Xaa locations
  Clone ID: ZEAMA-23APR03-C5303_1.p
SSQWRLVLPEQSFKERAHWRRPRRGPSPPIAGAPVTALSWRNSLSQLAAPSGSRNAAAPRRAARRLQTPLTLLAPALLAAAAAPGRSQPSPKFDPLHRAQAPWDQVARMDQEPPAFISAHXLRRRPAEAAAVPEAKARPGLKATPPADEAFAMPLLSGACTGPGQYFVRFPAGTPARPSLLVADTGSDLTWVKCRRRRHDAPAPGYSAPASNGSSSSSSSLAPAASSHARVFRPDRSRTWAPISCSSDTCTASLPFSLAACPTPGSPCAYDYRYKDGSAARGTVGTDSATIALSSSSARPAGKKRQAQAKLQGVVLGCTTSYDGESFLASDGVLSLGYSNVSFASRAAARFGGRFSYCLVDHLAPRNATSYLTFGPNPAVSSASETACGGSGSGSAAPGARQTPLLLDRRMRPFYAVAVNGVSVDGELLRIPRRVWDVEKGGGAILDSGTSLTVLVSPAYRAVVAALSRKLAGLPRVAMDPFDYCYNWTSPSTGEDLAVAVPELAVHFAGSARLQPPAKSYVIDAAPGVKCIGVQEGAWPGVSVIGNILQQDHLWEFDLRDRWLRFKHTRCAL

SEQ ID NO: 8346 - protein, 443 aa, Zea mays
  Clone ID: ZEAMA-23APR03-C5332_2.p
MSASRSGRRRTGSVALGDLLQREASAERAALGCGERPSVAAGQACRAKKGEDFALLKPACERRPGAPSTSFSAFALFDGHNGSAAAVYAKEHLLGNVLSCVPTDLAWDDWLAALPRALVAGFVKTDKDFQTKAHSSGTTVTLAIIDGSVVTVASVGDSRCVLEAEGSIYYLSADHRFDANEEEVGRVTECGGEVGRLNVVGGAEIGPLRCWPGGLCLSRSIGDQDVGEFIIPVPYVKQIKLSNAGGRLIISSDGVWDALTAEMAFKCARGLPPEAAAEQIVKEAVEAKGLRDDTTCIVIDIISPEKPKRTIQSQRSPRKGLVLLKNFFLRKTASDSLSLPDKDNYPEPDLEEVFEDGCPSLSRRLNSEYPVRDMFKLFACAICQIDLESGQGISIHEGLSRPGKLRPWDGPFLCHSCQEKKEAMEGKRHSRDSSSRNSGSSES

SEQ ID NO: 8347 - protein, 204 aa, Zea mays
  Clone ID: ZEAMA-23APR03-C5346_15.p
MPSSTMSASTGSWRTRRRSGRRVAVAWPSPDGRRARPGRSSPPPSASTTCSRAGPSCGGSSGTRTTRASSCDLWSSAAARHAAACPPSPMLSSGTSLRGGSCNTWWSWRTGARSSCCGCRFSSVILRWRNAGFLTEENKLITVNPDTKVLQAMQLMTENRVRHIPVIDGTGMLGMVSIGDVVRAVVAEHREELNRLNDYIQGGY

SEQ ID NO: 8348 - protein, 254 aa, Zea mays
  Clone ID: ZEAMA-23APR03-C5363_31.p
MLPCARSVLRRRGLASSLLRMCGGEGQCSTGTGELVANARCASTLAALGGGGRVLERGARLAYPQTGVIGAGRMARTQTRCFLGCGDGEEGGVLSKVYEERRVMGYSPEQMFAVVAAVDLYEDFVPWCQRSRIVRRHDDGSFDAELEIGFKFLVESYVSRVEMEKPRYIKTTASESGLFDHLINVWEFKPGPVPGTCDLYFLVDFKFQSPLYRQVASMFFKEVVSRLVSSFSDRCFRIYGPAVPVLENTYGQGR

SEQ ID NO: 8349 - protein, 143 aa, Zea mays
  Clone ID: ZEAMA-23APR03-C5363_45.p
MAVGKNKRISKGKKGGKKKTVDPFSKKDWYDIKAPSVFSVRNIGNRRRRRRRRRIEVSTRRSDHEGQVEEEAHEEAQEEAQKDEAEIQVGRSRWIVDLMTCVGTYISSDALVCLWRDVNLPWCHGPPSVERLACTSVGHFSWF

SEQ ID NO: 8350 - protein, 344 aa, Zea mays
  Clone ID: ZEAMA-23APR03-C5382_3.p
MEAPGSPYASSPESAPKRAPRSPPQQQPPSEEGDDKEKPIHLRFLVSNASAGCIIGKGGSTINDFQSQSGARIQLSRSHEFFPGTNDRIIMVSGLFGEVMKAMELILEKLLAEGEEFNEAEARPKVRLVVPNNSCGGIIGKGGATIKSFIEESHAGIKISPQDNNYVGLHDRLVTVTGTFDNQMNAIDLILKKLSEDVHYPANLSSPFPYAGLTFPSYPGVPVGYMIPQVPYNNAVNYGPNNGYGGRYQNNKPSTPMRSPASNEAQESLTIGIADEHIGAVVGRAGRNITEIIQASGARIKISDRGDFISGTSDRKVTITGTSEAIRTAESMIMQRVSASSERL

SEQ ID NO: 8351 - protein, 419 aa, Zea mays
  Clone ID: ZEAMA-23APR03-C5395_1.p
MIATHLSPALKQYRFPSPLHSTSHNHHLPVHLPLPRRHRNFAKPAAAAPDLLASVESVASAASVLAAIVLVHESGHFLAAASRGIHVSQFSIGFGPALARFRLGPVEYALRAIPLGGYVGFPDDDPESGFAPDDPDLLRNRPVPDRLLVVSAGVAANLAFAFLIVYAQALTVGVPVQAQLPGVLVPEVLPGSVAARAGLLPGDIILAVPGAAPDPSVPVLVDLIKASPSREVPLTVSRAAPGAVDRRSVELTVVPDTSADGSGRIGVQLSPNVRVTRVRPQNLADATVLAVREFTLLTGTVFDGLRQTLLNFSQSADKVSGPVAIIAVGAEVARSSADGLFQFAAVINLNLAAINLLPLPALDGGTLALILLEAARGGRKIPREVEQGIMSSGILVVLMVGMFLIVRDTLNLDFIKEIL

SEQ ID NO: 8352 - protein, 123 aa, Zea mays
  Clone ID: ZEAMA-23APR03-C5408_2.p
MEHASAFLARALTTPLPASAALPRRRPARVAVAAAAPERRPPGAVASTTNYVVPLDAAPSGITRPLVEILRDLNKRVPDAIVRPSSRRASASDPVIPWYHANRMLSFYAPGSQGGCWNSIAER

SEQ ID NO: 8353 - protein, 306 aa, Zea mays
  Clone ID: ZEAMA-23APR03-C54247_1.p
FLIPSAVLHPLSLFRVAFLPASDELARAAAAVCPGPSPTHQGHEGRYTIYVHASREKPEHVSPIFVGREIDSEKVTWGKISMVDAERRLMANALQDIDNQHFILLSDSCVPLHSFDYVYDYLMGANLSFIDCFYDPGPHGNFRYSKNMLPEVTETDFRKGSQWFSVKRQHALMIIADSLYYTKFKLHCRPGMEDGRNCYADEHYLPTVFRMMDPDGIANWSVTHVDWSEGKWHPKAYRAKHVNLELLKNIASIDVSHHVTSDGKKVVTENPCLWNGAKRPCYLFARKFYPESINNLLTLFANYTLI

SEQ ID NO: 8354 - protein, 438 aa, Zea mays
  unsure (1)..(438): unsure at all Xaa locations
  Clone ID: ZEAMA-23APR03-C54732_1.p
MSSSPADLSCVLPRVLIVSRRTVRKNKFVDFVGEYHLDLIVGYGAVPVIVPRVAGVHALLDSFEPIHGVLLCEGEDVDPSLYESADASLSPEQLEAVRRLHASDAAVDREKDSIELRLARRCLERNIPYLGICRGSQVLNVACGGSLYQDVEHELAEAQQVQVQHINYADYDEHRHPVRVVPGTPLHEWFAGDLADGARLMVNSYHHQGVRRLAQRFVPMAFAPDGLVEAFYDPAAYSPGEGRFIMGLQFHPERMRRPGSDEFDYPGCARAYQEFVRAVVAYQEKTAATHLPRPGAALPLPASSSPKLSKEMERRRKVISRSFSLAKDMYLSGGRTKPAEQRELEAGAEFLESNTASLSVQQEKRLKQMGATXRNASGYLNSLKVKGVREAAARALMAEMTVNQVSDLVTFYQTMGKICSEVLDAKLQGLHLSTNLYE

SEQ ID NO: 8355 - protein, 296 aa, Zea mays
  Clone ID: ZEAMA-23APR03-C54803_1.p
KQPPTGPPRVPIGGGRAEQNTGDGAGARRVGGAVGARAPPTAGARRVQGVGRVHPAGALAHAPHGPRRRRPHRRPRRPPALLRRRARPCQYPYFQLFFVASFLPSCAVARVAGGRALQVQTAQYPTGAAAAGVPEDTDQTVRQRGLRQGRHPQALPRGGAPRSAEAAHLAAAEVPAGVAGGCRQGSGFCCSASAAAAASNAVPSAAARGKMVLQNDIDLLNPPAELEKLKHKKKRLVQSPNSFFMDVKCQGCFSITTVFSHSQTVVVCPGCQTVLCQPTGGKARLTEGCSFRRKGD

SEQ ID NO: 8356 - protein, 170 aa, Zea mays
  unsure (1)..(170): unsure at all Xaa locations
  Clone ID: ZEAMA-23APR03-C5506_2.p
MATRAPPQSSSTGSVTVTIDPSPSSSSSSXPPASAPAPAPAPESVVLRLKRRAKKKVSWKEGTVDNEGLGRKSSKKCCIFHKEVPFDEDCSDDEAPGGGGGGGHRCPRPHGDAGEGTSGCSSSSHDPWPPLISVRVTRSSLSSLEKWLHKSCKMEGNFVHPWATTTHSYN

SEQ ID NO: 8357 - protein, 412 aa, Zea mays
  Clone ID: ZEAMA-23APR03-C5524_3.p
MAALSVPLHAAAGSRAAAADPVKVPCVRSTGSAHFGRAFPSVAVSSLAARHIEPMRAIATQAPPAVPQYLSGEKTKIGINGFGRIGRLVLRIATSRDDIEVVAVNDPFVDAKYMAYMFKYDSTHGPFKGSICVVDDSTLEINGKKVTITSKRDPAEIPWGNFGAEYVVESSGVFTTTDKASAHLKGGAKKVVISAPSADAPMFVVGVNENSYDSKMNVVSNASCTTNCLAPLAKVVHEEFGIVEGLMTTVHATTATQKTVDGPSMKDWRGGRGAGQNIIPSSTGAAKAVGKVLPELNGKLTGMAFRVPTPNVSVVDLTCRIEKNASYDDVKAAIKAASEGALKGILGYTDEDVVSNDFVGDSRSSIFDAKAGIGLSSSFMKLVSWYDNEWGYSNRVLDLIAHMALVSAAAKL

SEQ ID NO: 8358 - protein, 284 aa, Zea mays
  Clone ID: ZEAMA-23APR03-C5530_10.p
LFAPPQPQTLIPHQSQGRPSHPTLHSPNHGGRRRERGGERGGFGRGPRQEEEKWVPVTKLGRLVKENKITKIEEIYLHSLPVKEHQIVETLVPGLKDEVMKITPVQKQTRAGQRTRFKAFVVVGDGDGHVGLGVKCAKEVATAIRGAIILAKLSVVPVRRGYWGNKIGQPHTVPCKVTGKCGSVTVRMVPAPRGSGIVAARVPKKVLQFAGIEDVFTSSRGSTKTLGNFVKATFDCLMKTYGFLTPEFWSQTKFSMAPFQQYTDLLAKPTKGLVLEAPTETVEA

SEQ ID NO: 8359 - protein, 123 aa, Zea mays
  Clone ID: ZEAMA-23APR03-C55734_1.p
MSRGGSSGGGRSSLSYLFEPEETVLYRTRTSNQETEKAPDTNSGCVKQDDDEKKTVGTEAVHSPPKREVSNPILSSHKPPCNIYHTGQLSSGLLITDRPSTRVRCAPGGASSLGFLFGEEHEK

SEQ ID NO: 8360 - protein, 337 aa, Zea mays
  Clone ID: ZEAMA-23APR03-C5607_3.p
MLASLLFLGTWPAVLTLLERRGRLPQHTYLDYSVTNLLAAVLIALTFGQLGGARRGMPNFLTQLGQPNWPSVLFAMAGGVVLSVGNLSTQYAWAYVGLSVTEVISSSMVVVIGTTLNYFLDNRINRAEILFPGVACFLVAVILGSAVHSSNAADNEQKLGASTNAYKLGTQERTNLISDAPKDLEESGASGIRQPDKAEAGTAEYLIELEERRSIKVFGSNTFIGLGIVFFAGVCFSLFSPAFNLATNDQWHTLRDGVPHLVVDWDGRQWALLAGLLCGFGNGFQFMGGQAAGYAAADAVQALPLVSTFWGVLLFGEYRKSSRKTYVLLGFMLFMFV

SEQ ID NO: 8361 - protein, 492 aa, Zea mays
  unsure (1)..(492): unsure at all Xaa locations
  Clone ID: ZEAMA-23APR03-C5622_2.p
MGSTAAASVLPVSAGSGENLVLILDYGSQYTHLITRRVRQLGVLSLCVSGTAPLASLEGLRPRAVILSGGPHSVHAPGAPAFPEGFLGFAAAAGAHVLGVCYGMQLLVQSLGGAVVSGERQEYGKMDVEVTAASSALYGQAETGKRQTVWMSHGDEVVRLPEGFEVVARSVQGAVAAIENRENRFYGLQYHPXGGVDSTVAATLVHKAIGDRLHCVFVDNGLLRYKEGERVMTTFESDLHLPVTCVDASEQFLSKLKGVEDPEKKRKIIGREFIAVFDDFAHKLEQKIGKRPEYLVQGTLYPDVIESCPPPGSGRTHSHTIKSHHNVGGLPKDMKLKLIEPLKLLFKDEVRKLGGILNVPDSFLKRHPFPGPGLAVRVLGDVTQGNALEVLRQVDEIFVQSIKDAGLYDKIWQAFAVFLPVQTVGVQGDQRTHSNAVVLRAITSEDGMTADWYYFEHAFLVDVVNKICNNVRGINRVCQDITSKPPATVEWE

SEQ ID NO: 8362 - protein, 354 aa, Zea mays
  unsure (1)..(354): unsure at all Xaa locations
  Clone ID: ZEAMA-23APR03-C5651_2.p
IYASPPCSWVLSSSTTTSYSAATPNLSFLAYARKQIEMLKLKEILDSDASDVNYERMMKDIQLDLVHTPSRRAAASSHGRHRKKNSVAATAQSDDNKMLALWSVDRVSSGSRRHDMDLRPPQSEAAETEKGKKRPSSEPVPVVTVKDLSVDKQEVLSRPTVMAVAATATTTEPHREWKKKVIDRLSSEAQRLRDLRTIVQELRAGVEASSDAELDGVKAQMAGAEGAIAELVDANAKLLKKAEXFTSAGDGGGDVDLRSRSQRKILERVRKMSDKAGRLELELQRFQHALLRHEEERAARRAAKAAAASTTVQVQRRSRVQLVEYLYGRRRDSRRPKQKARGPSCCMRAKAIDD

SEQ ID NO: 8363 - protein, 70 aa, Zea mays
  Clone ID: ZEAMA-23APR03-C565878_1.p
MIRMEMKKTHILTMTIFTPAERRYMEQKQKIDMQKIAKVANKSHKDRMQDFNQYLAKLSDHYDIPKVGPG

SEQ ID NO: 8364 - protein, 329 aa, Zea mays
  Clone ID: ZEAMA-23APR03-C565_1.p
MTHSPLAAIKPPRPFFQSHPSHTELVDSYLRTWVEDGVKTGAFIHDADVYGSDPADLLQQFAPVVAHNGERAWYFYSLLRYKHSSGKRKKRSTGSGTWHSEAKPKPVFMASKSNWHQIGLRQTFSFVVRNETGAPFRTGWLMMEHRLLNDDGEEKQQEEEGFLVYRVLCKVYRSPRKPEPSGNKAAAAASPGHKIEADDDESNDATLDENDDDESNDATLDENDDGSNAAPPAASGRKRKSDDVEPSEAKASDVIAGGAAAAPAPKKKSDGSSSPVATSPTTEMQCPGCGHHVLVTMNRAEPKSQTEIAKDESAPGARQQGEIRMYEFL

SEQ ID NO: 8365 - protein, 507 aa, Zea mays
  Clone ID: ZEAMA-23APR03-C5661_2.p
MATRASKNCLCAGSSSFDDPDVVEVSPATAAAAGWASGHHKRKRSQVVPQEVIEIDDDDPDGVILIGDKAQVEKNKQTAVCPMDCSKHAKSGWVQDIPGPSTYASKYTSSWVDLKVFQDEAVYNYSDGYPFDGFEEDYAYDEDEFEDDGYDTPLIESEYQFGLSAKFDNFNVLHGLEASLPWKQKTAIEIANKTKPSKAVDDKIEEKYKAFKRFDTVDDHSDHYYSKPESRKVQAVKKPSKDWVKRIQHEWKVLEKDLPDTIFVRAYEDRMDLLRAVIMGPAGTPYHDGLFFFDIYFPPQYPNVPPIVNYRAGGLRLNPNLYACGKVCLSLLNTWTGSGCEKWNPANSTMLQVLVSIQALVLNAKPYFNEPGYAMHANTAHGEKKSLTYNEDTFLHSCRTMLYSLRNPPKNFEDFVAGHFREYGRNILVACRAYLEGAQVGCLSGDGVQDVDEGDKSCSVRFKQSLKRLHEELLAEFTAKGADCGKFLSEKARSGASTSAADTTLRL

SEQ ID NO: 8366 - protein, 130 aa, Zea mays
  Clone ID: ZEAMA-23APR03-C5663_4.p
MARGVVSGAKGGAAGGGGKKKGSVTFTIDCTKPVDDKIMEIATLEKFLQERIKVAGGKAGQLGEGVTVTRDKSKVTVTSDGPFSKRYLKYLTKKYLKKHNVRDWLRVVAASKDRSVYELRYFNIAENEEE

SEQ ID NO: 8367 - protein, 248 aa, Zea mays
  Clone ID: ZEAMA-23APR03-C5664_1.p
MASPKPLLLLATSFLSCGLLVAADYAPMTLTVVNNCPYPVWPGIQANSGHDVLEGGGFFLPPLSHKSFPAPAHPWSGRIWARTGCAGAGAQLHCATGDCGGRLQCGGLGGAAPATLAQVNLHHGNDQTSYGVSVVDGFNVGLSVTPHEGRGNCPVLACRKNLTETCPGELQLRSPAGSVLACKSGCEAFRTDELCCRNMYNSPHTCRASKYSEFFKRECPQAFTYAHDSPSLTHECAAPRELKVIFCH

SEQ ID NO: 8368 - protein, 102 aa, Zea mays
  unsure (1)..(102): unsure at all Xaa locations
  Clone ID: ZEAMA-23APR03-C5702_5.p
MIGYALQDPSIREMAEQIASDPVFNQMVEQLQKSAQSILGMPLCXDPAMSRMLENLTILAHKEXLEERMARIKDDPSLKPILDEIDNGRPSAMSFPKHFSRS

SEQ ID NO: 8369 - protein, 135 aa, Zea mays
  Clone ID: ZEAMA-23APR03-C5702_6.p
SSLDILHVDVELKKSQLFLRKIKSSSVIYCVEIGEIVSSKLSPSRNLLGTNAGSHISTLDRLYFWESKLYDEAKASSAICRKYGGKCKKLRLHESRGVNQIDNDFTRAARERCQYHCILQDDRICSSGPINKRDG

SEQ ID NO: 8370 - protein, 508 aa, Zea mays
  Clone ID: ZEAMA-23APR03-C5712_2.p
MAALPASAPAPAPAPSEAAELVPTLSSLEPVYGAGAQLDDARIRFARLGDRFHAVYGARPALFARSPGRVNLIGEHIDYEGYSVLPMAIRQDMIVAIRRANGDQVRVANVDDKYPLCVYPADPDKEIDVKNHKWGHYFMCGYKGVYEYCRSKGIDLGKPVALDVVVDGTVPQGSGLSSSAAFVCSATIAIMGILDKNFPKKEVAQFTCLSERHIGTQSGGMDQAISIMAKPGFAELIDFNPIHATDVQLPSGGTFVIAHCLAESKKAETAATNYNNRVVECRLAAIVLAIKLGMDRKKAISSVTTLSDVEGLCVSFAGREGSSDPAVAVKKLLHEDPYTGGEIEKITGEGLTSVFQGSQTSLDVIKAAKHYKLFQRATHVYSEARRVYAFRDTVSSKLSEEGKLKKLGDLMNESHYSCSVLYECSCPELEELVKVCRDNGALGARLTGAGWGGCAVALVKEPIVPQFILKLKEMYYKSRIDRGVIKQGDVGLYVFASKPSSGAAILRL

SEQ ID NO: 8371 - protein, 509 aa, Zea mays
  unsure (1)..(509): unsure at all Xaa locations
  Clone ID: ZEAMA-23APR03-C571_16.p
EGLFEAITGYGLGGSSMALFGRLGGGIYTKAADVGADLVGKVERNIPEDDPRNPAVIADNVGDNVGDIAGMGSDLFGSYAESSCAALVVASISSFGINHEFTPMVYPLLLSSVGIIACLITTLFATDFFEIKAVDEIEPALKKQLIISTIVMTIGIALISWLGLPYTFTIFNFGVQKTVQSWQLFLCVAVGLWAGLVIGFVTEYYTSNAYSPVQDVADSCRTGAATNVIFGLALGYKSVIIPIFAIAFSIFLSFSLAAMYXVAVAALGMLSTIATGLAIDAYGPISDNAGGIAEMAGMSHRIRERTDALDAAGNTTAAIGKGFAIGSAALVSLRLFGAFVSRAAISTVDVLTPEVFIGLIVGAMLPYWFSAMTMKSMGSAALKMVEEVRRQFNTIPGLMEGTTKPDYATCVKISTDASIKEMIPPGALVMLTPLIVGILFGVETLSGVLAGALVSGVQIAISASNTGGAWDNAKKYIEAGVSEHARTLGPKGSDPHKAAVIGDTIGDLK

SEQ ID NO: 8372 - protein, 317 aa, Zea mays
  unsure (1)..(317): unsure at all Xaa locations
  Clone ID: ZEAMA-23APR03-C57207_1.p
MSLISMMEARLPPGFRFHPRDDELVLDYLCRKLSGKGGGGAYGGIAMVDVDLNKCEPWDLPDEACVGGREWYFFSLHDRKYATGQRTNRATRTGYWKATGKDRPISVSGRRGAGDTAALVGMRKTLVFYQGRAPRGSKTEWVMHEFRVDGPPVADRPGSPLLQLQLQEDWVLCRVFYKSRTASTRPAAGPDEAGPLSSQLIGGLPMPRMAAPADAAYLSFDVTPAAGGYYHHQDSGPADARHHLPPPPAQPFSRSSLSSLRDLLSSMXEGSDAAAAVRETELHLQLEGWTEAAYAQQQGGAMPAHPQQTWSPFLSSG

SEQ ID NO: 8373 - protein, 567 aa, Zea mays
  Clone ID: ZEAMA-23APR03-C5721_2.p
MASAALICGTEQWKALQAHVGAIQKTHLRDLMADADRCKAMTAEYEGIFLDYSRQQATGETMEKLLKLADAAKLKEKIEKMFKGEKINSTENRSVLHVALRAPRDAVINSDGVNVVPEVWSVKDKIKQFSETFRSGSWVGATGKPLTNVVSVGIGGSFLGPLFVHTALQTDPEAAECAKGRQLRFLANVDPVDVARSIKDLDPETTLVVVVSKTFTTAETMLNARTLKEWIVSSLGPQAVAKHMIAVSTNLKLVKEFGIDPNNAFAFWDWVGGRYSVCSAVGVLPLSLQYGFPIVQKFLEGASSIDNHFYSSSFEKNIPVLLGLLSVWNVSFLGYPARAILPYSQALEKLAPHIQQLSMESNGKGVSIDGAQLSFETGEIDFGEPGTNGQHSFYQLIHQGRVIPCDFIGVVKSQQPVYLKGETVSNHDELMSNFFAQPDALAYGKTPEQLHSEKVPENLIPHKTFKGNRPSLSLLLPTLSAYEVGQLLSIYEHRIAVQGFIWGINSFDQWGVELGKSLASQVRKQLHGTRMEGKPVEGFNHSTSSLLARYLAVKPSTPYDTTVLPKV

SEQ ID NO: 8374 - protein, 326 aa, Zea mays
  Clone ID: ZEAMA-23APR03-C57339_1.p
MMLSGHGGERRLFTASQWQELEHQALIFKYMASGAPVPHDLVLPLRLATGVDTAPSLAFPPQPSPSLAYWGCYGAGAPFGRKAAEDTEPGRCRRTDGKKWRCSREAHGDSKYCEKHIHRGKSRSRKPVEVTSSPAAGAAAAYRPSAISTISPPRAADAPPPSLAYPQQHLLHGASSSAAARAPAGALQLHLDASLHAAAAAASPSPPPSYHRYAHYTPPASSLFPGGGYGYDYDYGQSKELRDAAELRRRHFHALGADLSLDKPLPEPDTGSDEKQPLRRFLDEWPRESGDMAADDATQLSISIPAASPSDLAAASAAAARFHNGE

SEQ ID NO: 8375 - protein, 409 aa, Zea mays
  unsure (1)..(409): unsure at all Xaa locations
  Clone ID: ZEAMA-23APR03-C57435_1.p
MEDALAPPSVAPTPSPLAAAAVLTRRRSHLDSASFRTLSRLFSHCLHINPSPCGISPPVPEPVAADFVGGDPDDSPERPNGAEFNRLKDVEIEAADAGGPSLHGTVHQPAAANSTLDLVEAEAEALXLEGAGAVGVVESTSCMTRAEAGESAGLVVESTSCKTTAEVEESAVGAGLAMVGDVSLKSVESLLETKVDDSVEVAVGDDEGCLLFEAMLTNFTGLIDDVDAGAIPTQRCAVSGGDLQNNKASEDLKQLGGRIEGEPLRNCDNGQNDGGGFEEGEIEGEFQDLGSEESGNSEHGDEDGEDEKLEDNSISRGSGPNKSCDYGTQFGNLHSIPETGNDHLVLNMDAIVRGDAQISVTRAQAVTYDEVVDWNETPLPDNESVDPGKKRKRILTEERKAKKTKKKKK

SEQ ID NO: 8376 - protein, 422 aa, Zea mays
  unsure (1)..(422): unsure at all Xaa locations
  Clone ID: ZEAMA-23APR03-C5754_2.p
MAMSWIRSVVRRALIAPKPRGSRQFTVTAAGGGATQTERVAAEMVRYALGGAVHRSSPGSPFAPSICASVEAMRILEQGASNLQGGGEGSAEAVGLLMLAMSTLLYRSGRRQDAVEKLKATQQVAPSAVFRVAAWEALMGLHMEAGQEMSYLISPNDSVDLSIKYDSKWSDQDHLKFRVNAVRGLVTLLNGETESAAQLFDGWCRDFSRGENQTENAAVSYGEYLHCVGDFQMAAQVYEKILEAFCMDDMSGNLLAAGNMVPEEASLGATCSYGQLLSHSGKFAEAEDYLTRALQKAEEQFGANHPKVGIILTCVARMYKLKAKSEGSTSIMVQEGLYRKALEVLKAPAINSEGKNNDLLSMIRXYAELLLIQSNRKAEGERMKQWAEDAWRNRRLTLAQALEFSEPSKPTVVVDTRIGRVV

SEQ ID NO: 8377 - protein, 182 aa, Zea mays
  Clone ID: ZEAMA-23APR03-C5760_2.p
LTTSNVLSFASLLIKLSRQQQQLHAMVFIPDSCLRRTLASSLQTSWSWPPRASRFMAVVGTGPRVVVDLDVHPHRHLAAGVSSSHRTSTSTRTLLGGSGNLRSRVIRGLQAVPRQRQASGQRRSRGRPGKKKKEEEAGELEAEEGKRSRLLRCELHHRAPQLRPPQTTGQRKDTRQRNSSIG

SEQ ID NO: 8378 - protein, 235 aa, Zea mays
  Clone ID: ZEAMA-23APR03-C5782_5.p
MTVLDAESRFHVLAVDDSIIDRKLIEMLLKSSSYQVTTVESGNKALELLGLRDNGAEDASPPSSSSSSSSSSSPDHQEIDVSLIITDYCMPGMTGYDLLKRVKGSSSLKDIPVVIMSSENVPARISRCLQDGAEEFFLKPVKPADMKKLKSHLLKRKQPKQKNKPQAQAVESPEQQLDPHPQPVHELELEEAAADRNGVNKRKAAAMEEGLTVVVTAPESTKPRRLSTSSLTVET

SEQ ID NO: 8379 - protein, 240 aa, Zea mays
  unsure (1)..(240): unsure at all Xaa locations
  Clone ID: ZEAMA-23APR03-C5788_34.p
MTPHRSPAGTGGSGGGGPPALHYLSGPYGDTTFTKVFVGGLAWETRSEGLRAHFEVYGDILEAVVITDRATGRSKGYGFVTFQDPESARMACMDPYPVIDGRXRANCNLAILGRPGPAVPFGXSAYGPEYLYQQLCRXAYGPYVGQQYIPVYGGPRTVGPAVYPYGQSGQPVPSDHAYSLGYAPSRVLPLSNQNVNAANVVRIPPLQQFPPGAPRPQQQLLAPARAPPFPQNNVSEQATG

SEQ ID NO: 8380 - protein, 174 aa, Zea mays
  Clone ID: ZEAMA-23APR03-C578_6.p
VFLEWWSSAVTLFARGRMSLFCVLVVASMLRYMLRASLEEGFPDAPHTPVSGPGGRAFYPTPRRPPLCPGARSRCLGSAPWAIRPARAVAGSLIRGGITITRLSDPRRVKPGGKKDKSHKGTGNRATVGRVRRTARPPDLRRRRARTSDLRRRRRGEAALWPFSARERPDPSRR

SEQ ID NO: 8381 - protein, 246 aa, Zea mays
  Clone ID: ZEAMA-23APR03-C58764_1.p
MEVHAAVGKRLWSYVRAAFFMARNGVLSNKRKLLLSVPHLLANRRRGTTRAVANLLSSHRGSTAAAAYALRRRDYEFSSCSNSSAGPSSFSSSRRRLPYFPCLSAAAEEDERQYDGYGSLSLPVEPAPPLARIDYHASAAASSPGLMLRGRGDGDDLAPEDEEEYVYAFASSSSSPALLLPGAASGEFSVRVSNYSSEDEAAGCDCDAVDADAEDFIRRFYDQLRRQNTHALLPCYMQQESVASSS

SEQ ID NO: 8382 - protein, 76 aa, Zea mays
  Clone ID: ZEAMA-23APR03-C5894_5.p
MRRYSPPYRSPPRRGYGGRGRSPPPPRRGYGGRKEGSGSLLVRNIPLSSARGDLRVPFERFGPVRDVYIPKDYYSG

SEQ ID NO: 8383 - protein, 336 aa, Zea mays
  Clone ID: ZEAMA-23APR03-C59124_1.p
MAFASSSFRLALFLVLLAFVSLARHATGEASPSRRLMELYKPPPSDLLRYHDGAVLSGDIPVSVLWYGRFTPAQKAIVTDFLLSLSAAPTSPAPSVSQWWGTIDRLYLSKAADAAAVGKSGAHGGGGGRKGARVVLAGQVSDEGCSLGKSLTLAQLPALAAAARPAKGGLALLLTAQDVLVEGFCMSRCGHHGSYGARPRVAAAAYAWVGNPGTQCPGQCAWPFHQPPYGPQAPPLVPPNGDAGMDGAMISVASMVAGAVTNPFGDGFYQGDRAAPLEAATACAGVYGNGAYPGYAGQLLVDAATGASYNANGARGRKYLLPALYDPDTAACTTLV

SEQ ID NO: 8384 - protein, 81 aa, Zea mays
  Clone ID: ZEAMA-23APR03-C5923_19.p
MSCCGGNCGCGSGCKCGNGCGGCSKMYPDMAEQVTTTTTQALIMGVAPSKGYGGFEAAAGAENGGCKCGGNCQCDPCNCGK

SEQ ID NO: 8385 - protein, 128 aa, Zea mays
  unsure (1)..(128): unsure at all Xaa locations
  Clone ID: ZEAMA-23APR03-C5977_8.p
MRTQALFFLALALLGAVLAQSSNRHHHHYHHAHVQSKGQGAGGGGGELASRAKAAGAXAWPCCDSCGGCTRSEPPRCQCLDAAPRGCHPACRDCVKSSLSVDPPVYQCMDRVPNFCQRRCTARAAAAH

SEQ ID NO: 8386 - protein, 223 aa, Zea mays
  unsure (1)..(223): unsure at all Xaa locations
  Clone ID: ZEAMA-23APR03-C60195_1.p
MVQSKKKFRGVRQRHWGSWVSEIRHPLLKRRVWLXTFETAEEAARAYDEAAVLMSGRNAKTNFPVPRSGTGELLAPAVPAAXEARGGGGGGTSLSQILSAKLRRCCKTPSPSLTCLRLDPEKSHIGVWQKRAGARADSSWVMTVELNKDAPPPPSSGEEPAPSYGGAATTSTSTPTSSTITAGSPPPEMMDDEESVALQMIEELLGSHGMMLQVQGAAGSLVI

SEQ ID NO: 8387 - protein, 565 aa, Zea mays
  Clone ID: ZEAMA-23APR03-C6025_1.p
MDEHHRGVHLAAQNAESCGYLLSKLAGDGGVSDGAYPTASAQVYYQELVMGDDQSENAAPQMDAQETISAEEIQDNIYEADVCVPLEYKVVESQQQRGIRRRCLVFEAAGGFSNSAVKRGTIEDRSVSTCSKGKSPAESQPRGLRGIGLHLNALALTPKGKMACQDPPPTASALLPSSASEKDARGELLCAGENFAHSGGELLEFPLDGCSAGGGFPVNDHHVSGQSVSPQKKRRKTDNGDDGEACKRCSCKKSKCLKLYCECFAAGVYCSEPCSCQGCMNKPIHEETVLSTRKQIEFRNPLAFAPKVIRMSDAGLETGEDPNNTPASARHKRGCNCKKSSCLKKYCECYQGGVGCSSNCRCESCKNAFGRRDAETELPEEMKQEESDQTENPQQEKENDQQKANVQGEDHPLLDLVPITPPFDFCSSLLKLPNFSSAKPPRPTKARSVTSRSSASKATAAVQPCRSSKLAASASASGIDEETPDILHEPDSLSNCVKTTTSPNGKRVSPPHNALGSSPNRKGGRKLILKSIPLFPSLTGDTNSGSAMNSTDSAFCASPLTLGPS

SEQ ID NO: 8388 - protein, 209 aa, Zea mays
  unsure (1)..(209): unsure at all Xaa locations
  Clone ID: ZEAMA-23APR03-C6027_3.p
MAEPAEHRPAEEEEAAAAGEDEDTGAQVAPIVKLEEVAVTTGEEDEDALLDMKAKLYRFDKEGNQWKERGTGTVKLLKHKDTAKVRLVMRQAKTLKICANHLVVATTKMQEHAGSDKSCVWHALDFXDGELKEEMFAIRFGSVENCKKFKDTVEEIAEQQGKSEEKENDEVSTAASDLAQKLTVAEPSKEENAEKEEAPASDDKKDAKE

SEQ ID NO: 8389 - protein, 286 aa, Zea mays
  Clone ID: ZEAMA-23APR03-C605_1.p
MEAAPSARAFSPSSSPSAGARPSLPLAGLASRSRRARVLAAPPPPRAVASSRAPLVVSSPPPPQDSGTHNPAHAKVDRSGRFCSPRAARELALMISYAACLEGTDVVRLFDRRISARREPGFVFNKACLLSYNHMSFGGGPLEVGTEEEAEKLASQNDKDSANEADVLSAPPKLVYNNYVLRLSRELLVAVASGWDKHVVIIDKIIPQAWKDEPVARILELCILHIAMAEMASKGTPHKVVINEAVDLAKRFCDGGAPRVINGCLRTFVKDHVDVAGTSQEAKSKS

SEQ ID NO: 8390 - protein, 340 aa, Zea mays
  Clone ID: ZEAMA-23APR03-C6066_16.p
LARSAEQSAAKKQSNGEPCECASSTSAVHQTHLRKPVHPPGRAGQQGDNRGGQVRPGQEIRELPRLRRRPRRQPCGPRAGDHQRNRERAPTVRRCVRHRQLFVSPCICVSLPARLKGSTLVTNGVITAGSDEWAIYGGTGVFAMARGVIRRRYLADRAGGNTDELNMDVFCRPFGSQSQLQDKMQVQGQGQGSSVTKIGLWGGPGGSAQDITAERPPQRLHSVTVRAGVAVDSIEFTYTDSAGQRRAAGRWGGLGGNVRTIDLGNAEDVREVSGTYGAFEGATTLTSLRLVTSSRTWGPWGVENGTRFSVTAPIGSSIVGFYARAGTRLVDAIGVYLRQI

SEQ ID NO: 8391 - protein, 290 aa, Zea mays
  Clone ID: ZEAMA-23APR03-C60706_2.p
MANNRTYEEHTPAVEWSRSAAEADAVKISLPGFKREDLRVLVDNHGHLRTRGERHLTGNRWIRFQNDFELPANCNADGIRAKFENETLTITLPKKTPSTPMQPPPRMPTAAPPPLQGQGQGLPPAARPAAPTPAPLAPAAPSVKPPAESRASMPRKTYDPVPAPAPEVEPPATTKPQPSLGAVQRLKEEEEERKREEEGKMAEDRKEMVHEKDTQQEQQPMLAETMALANLKPRQASARQGMLVSVAVAVVVLLGFTVYVWHSLRNATGGAGGEHGHGHQLWTGSYGDEM

SEQ ID NO: 8392 - protein, 80 aa, Zea mays
  unsure (1)..(80): unsure at all Xaa locations
  Clone ID: ZEAMA-23APR03-C608_10.p
MSCCGGNCGCGAGAQAGGQCLPQLNRLLACRAYLVPGAPDPSADCCSALSAVSHECACXTMGIINSLPGRCHLAQANCSA

SEQ ID NO: 8393 - protein, 365 aa, Zea mays
  Clone ID: ZEAMA-23APR03-C61378_1.p
MGAKPTSRSYQTQHSPVATPMLLVRAPPSPAPLSAAANFPADLERPLRLRGLSSSRAGVTTATATAKPAASSLGGQKRKQVTSVANPLVKHCVKLRLSAAYRRSCRRLLLVGLAPILEVCSFELEAIDYLLLLDGVEAPEALREFSGDILYVSAAVMKKVSGMQSVDSTEAVAVMHMPNLFRDLGSHQDGDALDGLFSYPKRILVLDGIQDPGNLGTLIRSACAFKWDGVFLLPACCDPFNEKAIRAARGASLQLPIVSGTWHDLHALVTKYRMKMMAGHPESSSDASKETYSLSNELADSLLNESLCLVLGSEGNGLSAETLQACELVNIPMEGTFESLNVSVAGGIFLFMLQPKGQIDRTSTP

SEQ ID NO: 8394 - protein, 88 aa, Zea mays
  Clone ID: ZEAMA-23APR03-C6145_3.p
MAGRDGAKSSASMEEEACGEKKYGGIAPKKKPLISKDHERAYFDSADWVLGKQAANSSTRATVESLKPKLKRTPHHQLPPRKPTCASG

SEQ ID NO: 8395 - protein, 287 aa, Zea mays
  Clone ID: ZEAMA-23APR03-C6196_2.p
MVFLSNEDAWIHDEDIMDDVDSDVEESDSEGDSGEEAQAKPADKAIYNKEAILEKLEDIAWPKNVDWMHKLTVEHDQGEKVDVNDDLARELAFYTQALDGTRQAFEKLQSMKVRFLRPTDYYAEMVKTDAHMHKIKGRLLSEKKRIEEAEERRKARESRKKAKEVQAEKKKERAKQKKEQIESVKKWRKQRQQGGFTKGNDDVPDLNFEGEEGFKQSKKKRPGVSPGDRSGGLAKRGKGGKNGRARDSKFGHGGRKGLKKQNTAETTNDFRGFNQGGEPQNKKRKRF

SEQ ID NO: 8396 - protein, 279 aa, Zea mays
  Clone ID: ZEAMA-23APR03-C619_4.p
MEFLQGQRLETTLAVAAAVVAVAAGSAYLFLRSRKPRGCLDPENFKEFKLVEKKQLSHNVAKFKFALPTPTSVLGLPIGQHISCRGQDASGEEVIKPYTPTTLDSDIGSFELVIKMYPQGRMSHHFRETKVGDYMSVKGPKGRFKYLPGQVRAFGMVAGGSGITPMFQVTRAILENPKDNTKVHLIYANVTYEDILLKEELDGMAKNYPDRFKIYYVLNQPPEVWDGGVGFVSKETIQTHCPAPAADIQVLRCGPPPMNKAMAAHLDGLGYTKEMQFQF

SEQ ID NO: 8397 - protein, 348 aa, Zea mays
  Clone ID: ZEAMA-23APR03-C6211_2.p
TTDIDPHDDAAPGAADKIISHTLAGAMLSGLGLWHLFNHMRLLVSLAPTAPSASSSRVAVLAPAAWFPAPRVRRLEPIAMLAAGAYGLATQMLAYSPMPFRADGSIPPERLPNHEHAIIYASLLVYAGSAIYLDDRRRQRHAAPAPPTLCMLLLAALFAQELFVFHVHSSTDDHAGVEARLHWFLQASAAACLAAALLGAARLPADLQLAAGLVRSASLAFQGLWCVVIGVAWVPGMLPAGCYLDGGGGVHLRCRGEDSLRHAIAVVNLQFGWCMVLVTLLVVGIYVYVCKRYPAGAWSHGEVYGRLPEAEAADEDDDSHHHDMETPNCKQLAAHDDVHEFTSLEIDV

SEQ ID NO: 8398 - protein, 391 aa, Zea mays
  unsure (1)..(391): unsure at all Xaa locations
  Clone ID: ZEAMA-23APR03-C621_24.p
MECVTDMPLATLDSRPRKRQRLGWDVVPAEMYQVTLPRLGWDVGPAEMNQFALCGQEVVNAFSAAVLGLSSGCVSSQVNQEQPHDGSPPLREDDKNGHYVFAVGDNLTSRYKINAKMGEGTFGQVLECWDKETKEMVAIKIIRGIKKYRDAAMIEIGMLEKLGKYGESRXVMHELRLIHTDLKPENILLVSPEYIKVPDYKVSSQSPKEGSYYKQLPKSSAIKVIDFGSTTYDQHDQSYVVSTRHYRAPEVILGHGWSYPCDIWSVGCILVELCTGEALFQTHENLEHLAMMERVLGPLPYHMLKRADRHSDKYIRKGRLNWPEGCTSRESMKAVMKLSRLQNLVMQNVDQAAGDFIGLLQGLLKYDPASRLTAREALRHPFFTEGFGRRR

SEQ ID NO: 8399 - protein, 272 aa, Zea mays
  unsure (1)..(272): unsure at all Xaa locations
  Clone ID: ZEAMA-23APR03-C623_1.p
MLLSAFLGNCLFSYPPPPLLPATTAAPRPSTRLPVPFPARLRPASLVARRLTAEAGEALSALSAAEGDDEYEAELQEEGFPSWAGGGEEEDYDHDPEIGDIMGDYFDDPKKGQTRMEDRIRKKRHKIVQTKTGSPNPMKVVFNKFDFSNSYIWFEFYNVLLPKDVTLISDSLRSWHIVGRLGGCNSMNMXGANVTPTSFYNIGDLEIQDNLARVWVDIGIHEPLLLDILLNALTTISSDHVGIKQVQFGGSEFLNWSEDLKTEEVGYSVCKI

SEQ ID NO: 8400 - protein, 212 aa, Zea mays
  Clone ID: ZEAMA-23APR03-C62414_1.p
MAMGAAAAASTCTRPASPGLARRRVRAQATSSWAGGAEALVRSGAVRAVRPRDAAEALGGEGFRLLDVRPEWERARASVRGSVHVPLFVGDDDMGPVTLLKKWVHLGYIGLWTGQAFTKMNDRFVDDVAAAVDGSKDAKLLVACGEGLRSLIAVRMLHDDGYRNLAWLAGGFSKCADGDFAGVEGESKLQYATIGGASYIFLQILLFLGVVK

SEQ ID NO: 8401 - protein, 494 aa, Zea mays
  unsure (1)..(494): unsure at all Xaa locations
  Clone ID: ZEAMA-23APR03-C626_3.p
RTLSLRLKVKIIRYAPCGEIVKHASRLEQEIEENPASIPFQEIIYCNLGNPQVLGQPPLTFFREVLSLCDNPALMDRDEARALFSPCSIRRARRILNSIPSKDTGGYTDCRGIKCLRQVVADGITARDGFPSTADDIFLTDGATSAINLMMQILIRSHEDGILSPLPEYPLYSASIILHGGTMVPYNLTEDNGWGLEIFEVKRCLEEARSAGLTVRAMVVINPGNPTGQVLSVTNQEEIVEFCRKEGLVILADEVYQENIYAENKKFHSFKKVARSLAYDENDLTLVSLHSVSMSYGESGRRGGYMEVSGVAANVKDQIYKVASLTLCPNIAGQILVSLAMDPPKNFPCDLYXLGDESFESFDKEKEQIRSSFCKRAKTLEKAFSGLEGVTCNKLEGALYLFPRLHLPSAAIRAADFEGVSPDIFYAHRLLDATGIAVVPGSGFHQASGTIHIRCTILPDERKIEAMVARLRAFHKAFMNEFRGSQQVMNDLRR

SEQ ID NO: 8402 - protein, 415 aa, Zea mays
  Clone ID: ZEAMA-23APR03-C6292_2.p
MATIVNTTEEEPMLAVVRFTAELAWADAGPEVADPEVARLCLEAQEHILAGRWLDMASLMLASADLLLTSPSRVSDKDLECVLSVICSLVTKAGSEDQALQITELICAKLTQQHGDKPALRLKVLFSLYNLLPSPYGKAFVYKKALELATAGKAAEYIIPSFKNIDSFVSEWGIDNLEKRELYLAITTILKDHKGMAKEYFNFLNKYLATFKGSDDESGIIGDAKEEAVAAIIEFVKSPNLFQCDLLNMPAVSQLEKDGKYQLVYELLKIFLTKKLDSYLEFQSANSDLLKDYGLVHEECVTKMRLMSLLDLSSRCSGEIPYSAITVELRINDDEVEQWIVKAIASKILDCKVDQLNQTVIVSRHTERIFGMEHWHALRTKLGAWRGNIARAINTIQANKVTEEGAQGMQGLAIH

SEQ ID NO: 8403 - protein, 150 aa, Zea mays
  unsure (1)..(150): unsure at all Xaa locations
  Clone ID: ZEAMA-23APR03-C62931_3.p
TLSKSIGIGMRAQRRRAYFSDELGPRFLPKPTTAVTKRRLYCILLYARPRGFFFLSCFATLGVCPRTFPARGQRSVHLTHGCEAAAAAAAAATEASAGRLGDASVSXSASAAAAVKGTLXGEGDDLIRVRVFCVRADWASGRVCRGPWET

SEQ ID NO: 8404 - protein, 301 aa, Zea mays
  Clone ID: ZEAMA-23APR03-C62_1.p
MHQQGMDMAGCTTPRYTYGADHHQMKEGGDQQQELASPAMASFLQQLSSNAGGGGGVGMHAASMDYSGTGGGLDRICHESRALEAGPFGMRSLPDLSSFGGYSRSTTAESTSSAQPYLQRSSSLAESSRQQEPDIVSARSSSSGSGAASEQRKKRASEERTSTVKKSKQEGSKPSPPKQQQVPKVKIGEKITALQQIVSPFGKTDTASVLFETIKYIKFLHEQVQLLSEPYTNSSRSKGNNHFPWGDHRAAAETSKQGDEAEHDLSDRGLCLVPVSWTPQVYRDGTAMDYWTPAYRGCLYR

SEQ ID NO: 8405 - protein, 418 aa, Zea mays
  unsure (1)..(418): unsure at all Xaa locations
  Clone ID: ZEAMA-23APR03-C63612_1.p
MKPIAHSLHAAVDRRWLLPLAVGSALSLLLLVALTTFPSPSAPSSSSALFVEHKLAPSPPSPAASLPRIAFLISGSAGDASALRRVLLALYHPRNRYILHLDAEAPDSDRSNLAADLASHPAIAAAANVRVVDRANLVTYRGPTMVANTLHAAAAFLWGDGASHWDWFINLSASDYPLVTQDXDLIHVFSKLPRDLNFIDHTSDIGWKEFQRAKPVIIDPGLYMKKKADVFWIPQRRSVPTAFKLFTGSAWMALSRPFVEYCIWGWDNLPRTVLMYYSNFISSPEGYFHTVVCNAEEFKNTTVNHDLHYISWDNPPKQHPHYLTAEDLDRMVASDAPFARKFHEDDPVLDRIDEEILGRGADVPTPGGWCAGTRENGSDPCSVVGDTGLVVPGRGAARLQRLVTSLLSEEKFHPRQCK

SEQ ID NO: 8406 - protein, 229 aa, Zea mays
  Clone ID: ZEAMA-23APR03-C6364_3.p
MGKRWIPLEANPDVLNQFIWGLGVHEEDVQFCDVYGLDDELLAMVPQPVLAVLFLYPLTSLDEEKEESSVSAATSTSAGKELSKKVYFTKQTVGNACGTVGVIHAIGNATSQIKLVEGSYFEKFYKQTADMDPAQRAAFLEEDDEMEDAHSVAASAGDTDANVDVNEHFVCFSCVDGELYELDGRKSQPTSHGPSSPETLLQDAAKVIKARIAENPNSMNFNVMALSKK

SEQ ID NO: 8407 - protein, 214 aa, Zea mays
  Clone ID: ZEAMA-23APR03-C63714_1.p
MESFVQKHVVGVPLTSFAYADEERRGKPSCSAMVHKKNKKGSFICWMNKLSHKTDNYMQGFKEHLSLGPKVSETIKGKLSFGAKVLQAGGIDKVFREYFTVEEDEKLLKAFQCYLSTTAGPIAGMLFISTKKIAFHSDRPLNLLSPKGGRTRVPYKVLIPTKRIKSASVRGNLYNPDEKYIDVVTVDGFDFWFMGFVSYEKSFRYLQHAILELR

SEQ ID NO: 8408 - protein, 486 aa, Zea mays
  Clone ID: ZEAMA-23APR03-C6393_2.p
MVAARLRLALLLSVCLCSAWARPRLETAIRLPSQRAAAADETDDGAVGTRWAVLIAGSSGYYNYRHQADICHAYQIMKKGGLKDENIIVFMYDDIAHSPENPRPGVIINHPQGGDVYAGVPKDYTGRDVNVDNFFAVLLGNKTALRGGSGKVVDSGPDDHIFVFYSDHGGPGVLGMPTYPYLYGDDLVDVLKKKHAAGTYKSLVFYLEACESGSIFEGLLPNDINVYATTASNAEESSWGTYCPGEFPSPPPEYDTCLGDLYSVAWMEDSDFHNLRTESLKQQYKLVKDRTAVHDTFSYGSHVMQYGALELNVQHLFSYIGTDPANDGNTFIEDNSLPSFSKAVNQRDADLVYFWQKYRKFADSPPAKSEARKELLEVMAHRSHVDSSVELIGSLLFGSEDGPRVLKAVRAPGEPLVDDWSCLKSIVRTFEARCGSLAQYGMKHMRSFANMCNAGILPEAVSKVAAQACSSIPSNPWSSIHKGFSA

SEQ ID NO: 8409 - protein, 392 aa, Zea mays
  unsure (1)..(392): unsure at all Xaa locations
  Clone ID: ZEAMA-23APR03-C6397_1.p
PPPPPKLFMDSQHAGNKLDRFCLAECLSSSANLASLXEGMQLHGLSVKNGLDCDSHVVNATMDMYGKCGKMDCMLKTLPDPAHRPTQCWNTLISGYARYGYFKEAEDTFKHMVSVGQKPDYVTFVALLSACSHAGLIDKGMDYYNSMAPTFGVSPGIKHCVCIVDLLGRLGKFAEAEKFIDEMPVLPNDLIWRSLLSSSRTHKNLDIGRKAAKNLLELDPFDDSAYVLLSNLYATNARWVDVDKLRSHMKTIKLNKRPACSWLKLKNEVSTFGIGDRSHMHAEKIYVKLDEILLKLREVGYVADTSSALHDTDEEQKEHNLWNHSEKLALAYGLLVVPEGSTIRIFKNLRVCADCHLVFKLVSMVFHREIVLRDPYRFHQFKHGSCSCSDFW

SEQ ID NO: 8410 - protein, 553 aa, Zea mays
  Clone ID: ZEAMA-23APR03-C6398_2.p
MALPAPPVRLALLLLVALPFCAAHPGPGAFNAPRHFQTPALHSDGFGLVARRSVAEAPADINVTTNSSFVLAADRTYRRDPLNGFRKYPGGWNISEVHYFASVGYTAIPLFAIALVWFVIFFLVMLGICCRHCCCPHHTYKYSRTAYALSLILLILFTCAAIAGCAMLYDGQGKFHKSTTTTLKFVVSQANYTVDNLRNLSDSLSAAKKVDIAQSFLLPPNVQNEINEIQGKLNSSATDLAIKTTDNAAKIKKVLNRVRLALVVIAAVMLLLAFVGFLLSIFGLEFLVSVLVIIGWILVTGTFILCGVFLLLHNVVSDTCVAMEEWVAHPTEHTALDEVIPCVEPATANESLYRSRQVTFELVNVVNQVITNVSNMNFPPQLTPLYYNQSGPLMPLLCNPFTPDLRDRNCSRGEVTLDNATQVWKRYECQSTTVSGGAEICATMGRVTPSIYGQMTAGVTVSQGLYQYGPFLIQLQDCTFVRDTFTTINQGYCPGLERYSKWVYVGLVMVSSAVMLSLIFWVIYARERRHRVYSKQHQPYPVEDKPAATVPGA

SEQ ID NO: 8411 - protein, 105 aa, Zea mays
  Clone ID: ZEAMA-23APR03-C64371_2.p
MDAAAEASTPSSPSKLRDKLRTTVCCCFGVERARWRRRRGAATAAGEFRYDPLSYALNFDEGEDDDAYADPAAAFRYRNFNARLPPSPAGPAAVRTQRQRATATA

SEQ ID NO: 8412 - protein, 476 aa, Zea mays
  Clone ID: ZEAMA-23APR03-C6465_2.p
RFARVRGQAAAARSSTRATAQVIVGRRRPVPRREDASELDLRASSSWSQQLLDAGVRIIQGDIRKKDDVRKAFRGVDCVFHLASYGMSGKEMVQTGRSYEVNINGTCNVLDACHEQDVRRLVYVSTYNVVFGGKPIVNGNEALPYFPIEDHVDAYGRSKSVAEQLVLKSNGRPAKSDKSTRLYTCAIRPAAIYGPGEERHFPRILSLAKLGLAFFKIGDPGVKTDWVYIDNLVLALILASMGLLDDIPDRKGTPVAAGQAYFICDGSPCNTFEFIIKPLFQSLGYSVPQVVLDTSVALAVSRIFLFISTLFYPWLDSKWMPQPLILPAEVYKVGVTHYFSFLKAREELGYVPMVRPHEGLAATISYWQERKRRELDGPTIFTWLAVTIGMLAVFSAACLPAVGPLKWVLDVHMFVFRSMLVIRLVLAVAIALHAGEAVYAWFLARRVDPRNAAGWFWQTFALGYFSLRYLLKRGRA

SEQ ID NO: 8413 - protein, 269 aa, Zea mays
  unsure (1)..(269): unsure at all Xaa locations
  Clone ID: ZEAMA-23APR03-C64707_1.p
MLPTTATAAAPPPPTAGPASSPSEPHAALLLALTYMRLRELLSCARTCRGLREAVAGDPLLWLRLVVEPPLSHRITDEALLALTDRAQGRLRSLHLLGCPRVSDAGLLRIVERNHDVTELFVPRCTGLTADGLVKIIHFLHGQHKGNLSRVRLHGICXRNVRLVFDCTRKNCREVKDGRSRCRGCFFCVARCETCGGCIDLEELGESGLACSDFLCMDCWLKLPKCCTCNRPYCERHSNLKENLSASGQFTCQECAAFATSLRSRGEGY

SEQ ID NO: 8414 - protein, 429 aa, Zea mays
  Clone ID: ZEAMA-23APR03-C6515_1.p
MASLFGNGGYIYSSGSEGEDEDEGTEGYRKGGYHAARPGDRFAGGRFVAQRKIGWGNFSTVWLAYDTLHSRFVALKIQKSARDYAHAALHEIELLSAVAKGDPTNSKCVLRLLDHFKHAGPNGQHVCLVTEFLGDSLLRLIRYNRNKGIGLSRVKEICRSVMVGLDYLHSELGIIHTDLKPENVLLESTINPAKDPVRSGFTPILDRPVGNQYGGTVISFSEKMLKMRARRAVAKISQRRVSLGGVGAELEKERCLDGISLKCKIVDFGNACWADQQHAGEIQTRQYRAPEVIIGSGYSYSADIWSFACIAFELATGDLLFAPMNRQGCSEDETARYLDHLALMMETLGKMPRKIASSGTRSKDYFDRYGDLKRVRRLKFWPLDRVLVERYSFSEPDAKGFADFLRPMLDFAPEDRPSAAQCLKHSWLN

SEQ ID NO: 8415 - protein, 236 aa, Zea mays
  Clone ID: ZEAMA-23APR03-C6527_2.p
MGLGLGVRAAPFTYAAHALAVAAAAMVLVWAIYFRGGLAIEATNKNLIFNVHPVLMLIGYIIIGGEAIMVYRVLPTSNHGTNKLIHLVLHGIALVLGAVGIYFAFKNHNESGIANLYSLHSWIGIGTITLYGIQWIVGFVTFFFPGAAPNVKKGVLPWHILFGLFVYILALANAELGFLEKLTFLESSGLDKYGTEAFLVNFTALVVVLFGASVVVAAIAPVRLEEPQGYVPIPEN

SEQ ID NO: 8416 - protein, 120 aa, Zea mays
  Clone ID: ZEAMA-23APR03-C6533_6.p
TRTTSIGVAHPCELAEVFDVMWAFVFYVIDSIILARCAAFVHTSDGAKVTRTSPVAPCWSTRICYLTTTSSRTPSPTGNSGTASQTSRTSALSNTRSLPSAYNLAESKIKQKAIGKEAVF

SEQ ID NO: 8417 - protein, 205 aa, Zea mays
  unsure (1)..(205): unsure at all Xaa locations
  Clone ID: ZEAMA-23APR03-C6537_1.p
MAMMSGMDGGSNVVKVAAVVDAENPAVGPPPCAVDSDDLSQRANWLRAAVLGANDGLVSTASLMLGVGAVKADARAMVISGFAGLLAGACSMAIGEFVSVCSQRDVELARLDRGGGXDEKAALPSPVQAAAASALAFSVGALLPLLAAGFIADYRLRIGVVAAVATATLAAFGCVGAVMGRAPVARSCARVVGGGWXPWPSPSAS

SEQ ID NO: 8418 - protein, 360 aa, Zea mays
  Clone ID: ZEAMA-23APR03-C65450_2.p
MVAISMYRGNLHIGGPDSGASAPRRWEAPRPTLDVKRFRRLLRNRFRAVARLAGTPLGQASPSSSGMDVGRGAADPEREAPDEEGGAGDGGEEEQGQLQHDQDQDQDQDQQHQEEQGNVEAEAEDPEQQEEEEEGAVEDADMEDAGEVVVDGDAEEGQGESEGVDPKPEEEASYPDGIDDKNRKLNEKLDALNKKKHGLVQMLKQVLNAEEEIRRRNMQASLRAAMPQPSENATDGSSVSRLAPRMTVDVNFGDVAGDSDAGSNQGTPGRPLHHFHSISPSTASFARSPFGSLQGHTPRSPATFSTASPSRFATNIHPGQPPALYSASLPGSNYVATSPSPAASGGSSSVFRDPRPPNST

SEQ ID NO: 8419 - protein, 279 aa, Zea mays
  unsure (1)..(279): unsure at all Xaa locations
  Clone ID: ZEAMA-23APR03-C6549_1.p
MEAPDEEAGLGLPEGERLLEVALISAQGLKPPSGVRRRLQAYAVAWVDAGHKLQTLPDATGGLDPAWHARLLFRVREASLADDSPAAVSVEIYAAAAAGSWXHFGGDSLVGSARFLIGDHRLLSRPVGSPSMFAVGVRRPSGRVHGLLNVAASLVAVPPSPAACHALRLSPAVSLSGPSVAPTPSRVLRVLNRAHRTPPPSPRLLTPKKQQMVDDGSDEAEEDARGMGGVVFCGPCVGPLPRKIRTSPSDENLQAFANIFSGGLRHCRTEPSFLRSPGK

SEQ ID NO: 8420 - protein, 116 aa, Zea mays
  unsure (1)..(116): unsure at all Xaa locations
  Clone ID: ZEAMA-23APR03-C6557_18.p
MELPEWVDIVKTARFKELPPYDPDWYYIRAASVARKIYLRQGIGVGGFQKIYGGRQXRNGSRPPHFCKSSGAISRNILQQLQEMGIIDVDPKGGRRITSQGRRDLDQVAGRLAVEA

SEQ ID NO: 8421 - protein, 188 aa, Zea mays
  Clone ID: ZEAMA-23APR03-C655_2.p
ELLDGKDRQHGRLLSRRRDPLLQLFPLQLLLRHRLLLLWRERLLRIHIQRIVPHKEEQQEACNHKQNHHSWVQALVHLLNDHIVCYKSEIATNSCRRLTSNTVHPHCLAKVARASIRVTCQCTTPESRAEHRSPPGREDTRSGKGRTGSALGGPGSTQPPTGWRRCCQRFNRKMEKERNRGRRKGGAD

SEQ ID NO: 8422 - protein, 197 aa, Zea mays
  Clone ID: ZEAMA-23APR03-C6561_2.p
MYGRRASQLLKEIDSSEAGQLVPFNSDVFDQVIRECNEHNSQFQSLIRKMVEQNLDIETTRNEDHYGAAIHHLSLLRNKRCLMAYMYNRAEVIQSFRWKIGPVLPHDIQEKLHFSEKEYFKNHSAAIKSYISEMDIDLTVDMVPPKDPYIQVRVLEDIGEVSLGDHSVSLTKNSLHFLRRTDAEQFISQGLMEEFLE

SEQ ID NO: 8423 - protein, 322 aa, Zea mays
  Clone ID: ZEAMA-23APR03-C6590_2.p
MADASPRTETSTDDTDDNNGLEPGRGGLVASDSSDRSKDKHGDQKTLRRLAQNREAARKSRLRKKAYVQQLENSRLKLTQLEQELQRARQQGIFISSSVDQSHSMSGNGALAFDMEYARWLEEHNRQISELRAGVSAHASDTDLRSVVDKIMSHYDEIFRLKGNAAKADVFHVLSGMWKTPAERCFLWLGGFRPSEVLKLLSTQLEPLTEQQLSGISNLQQSSQQAEDALSQGMEALQQSLAETLAGSLSSSGSTGNVANYMGQMAMAMGKLGTLENFLRQTLQQMQRILTTRQSARALLVISDYSSRLRALSSLWLARPKE

SEQ ID NO: 8424 - protein, 140 aa, Zea mays
  Clone ID: ZEAMA-23APR03-C6595_3.p
LPPDSRIPKPPWRRTATASHSSSSWPPPSPPSLLAAALGGGRGPLLGGWNPIPDVSDSHIQELGGWALGQAKHQKLAADGLRFRRVVRGEQQVVSGMNYRLYVDAADPAGRTVPYVAVVYEQVWTRTRQLASFNPVPRAP

SEQ ID NO: 8425 - protein, 341 aa, Zea mays
  Clone ID: ZEAMA-23APR03-C6596_1.p
MEGDEMLRVKLGRQGLEVSKLGFGCMGLTGVYNAPVPDQAGIDIIKHAFEAGITFFDTADAYGPHTNEVLLGKALKHFPREKVQIATKCGIAGFDASGMRVKGTPDYVRACCEASLQRLATDYIDIYYQHRIDQSVPIEETMGELKKLVEEGKVRYVGLSEASADTIRRAHAVHPITAVQLEWSLWTRDIEEDIIPVCRELGIGIVPYSPLGRGFFAGRAAVERVPSESLLSKHPRYSGENLEKNKVLYTRLEMLSKKYGCTPAQLALSWVLHQGEDVVPIPGTTKAKNLDENIGAVKVRLSKEDLEEISGAFPAGEVAGSRLLGVLEPFSWRLANTPPPK

SEQ ID NO: 8426 - protein, 126 aa, Zea mays
  Clone ID: ZEAMA-23APR03-C6596_2.p
MEGDEMLRVKLGRQGLEVSKLGFGCMGLTGVYNAPVPDQAGIDIIKHAFEAGITFFDTADAYGPHTNEVLLGKVTFRATYWCRFWSQLQPRREDQELIKSSCRNVERVLLQFFSNFGWGSVLRLNM

SEQ ID NO: 8427 - protein, 326 aa, Zea mays
  Clone ID: ZEAMA-23APR03-C6601_2.p
MAATLLHAATASLQSSSQPARAGAATAFHPLASTPSIRLARSSFSSNRRLEVSLRAVSAGHCFAGRGAPRGRRVVAALAGEQTEGSEVGDDKDNSNEEIKPEEAQEAWKVMLEQFKAEALRMQALSMQAYDVYSKRAREVLLEASEKLKIQADKAQKDLSVIATEVSQEGQEYLVMAARNSPDSIKDITTTFRALGRLNWPSEYEDYHVGIPFGTFLTVGGFLNFMLTGSTSALRFGIVLGLALLTLGISSLRSHREGDRRPRLLVKGQAAIALVIFFREFSVLLQNGWFPKIFIVLLSGVVAAFYFYRIATGNPKDLSSKNDSAN

SEQ ID NO: 8428 - protein, 205 aa, Zea mays
  Clone ID: ZEAMA-23APR03-C6602_4.p
VLQAIEVSKRQMKLREASGNSDMVSRLEAAESKLQELKSNMGVLGKEAVAAMTAVEAQQQRLTLQRLIALVESERNYHQKVLQILDQLEREMVSERQRIEGAPPVVESSMPPPPAYEEVNGIFMRNTVAELVETVEYFLAEAIQSYQAESDTELNLSTGDYIVVRKVVSNNGWAEGECRGKAGWFPYDYIEKRERVLASKVGQVF

SEQ ID NO: 8429 - protein, 176 aa, Zea mays
  unsure (1)..(176): unsure at all Xaa locations
  Clone ID: ZEAMA-23APR03-C6643_23.p
KKRPFPFALFDPSKKTAAEMVYYALLVGAELDGLTNLQPSXGCDDPSFPYYLKCKLCGRDGTIVMIPGQGTPLTIEQSQKEEKTCLMVFDCRGYEPVEFSFGAGWKAESVHGTPFEIDCPEDEFSEYDEKGECPVELSKLQSTFKVVKKHEKGGKTRFVQIQWLGVCRVLESKVYK

SEQ ID NO: 8430 - protein, 217 aa, Zea mays
  Clone ID: ZEAMA-23APR03-C6679_4.p
MADEIDTRPASAGSRAVLAHATEDDDREEGEIAADAPSPALPAAHPLEHSWTFWFDNPHGKNKMAAWGSSIRPIHTFSTAEDFWGLYNNIHHPSKLIGGADFHCFKNKIEPKWEDPICANGGKWTISCGRGKSDTLWLHTLLAMIGEQFDYGDEICGAVVSVRSKQERIAIWTKNAGNEAAQISIGKQWKEFLDYKDSIGFIVHGYSAYCLSPPLLS

SEQ ID NO: 8431 - protein, 290 aa, Zea mays
  Clone ID: ZEAMA-23APR03-C6688_2.p
MNKGEVVRTLSTRARIEPGFTTLVWQKLEEENSEFFRAYYIRLKLKRQIILFNHLLQHQYNLMKYPAPPNIPLAPIQNGIHHMPVSNLPMGYPVLQQPIMPAPGQPHMDPMACGLSSGHVVNGIPAPGGYHPMRMNSGNDMVLDNGVPEAPHAGATGSAMSSEMAVSPSSAASSNHAPFTPSDIPGMTMDVSALDSAFGCDVGNPESLQLGPDGSRDSIRSLGQLWNFSLSDLTADLTSLGADLDVLENYTGTPFLPSDSDILLDSPDQDDIVEYFADAINGSPSDEEKP

SEQ ID NO: 8432 - protein, 509 aa, Zea mays
  Clone ID: ZEAMA-23APR03-C66903_1.p
MAAQQQVASVLQSFPFRAAVLTLCVALLPLLPTQAPDVGAGGPGQEFLAKVWELLHLLFVGIAVSYGLFSRRNSADDGRAGAVAVAAETEKHAAAGPEPAKADARYAWRMFRDSIPPFDDDDEDDVLVPDSPPGGGGGGRARSWRAPHRPVEPVVVVSTGGGGDRIGQAADAQAPLSLPVRTLKAQQEQDASAGAVETPRARRRRSSQDLAAGCARDETVLASPIPWRSRSGKLDARRPASPSSTASPRRLSPASSLSGETLAKASEEEYYAKAKRSSPYRSSSISSPPPPPPPPPPFLVHGYHPATERRAAAAKSFKEELQHHSMRGQGEDHYSPKTSSISISAYNSSNSSPAKPRSSFDGGFSSSVSVGKSVRTFRAREAAVFQDQNQELPDGAGDDRDVLDVHGSEEPYGYRAYQSIHRFQYERSGSDPILGGVVVSSDETESSDDDDDSGGGGYSTRESTPEVDENEVDKKAEEFIARFREQIRRQRIESIKKSAGSRGVKHHGK

SEQ ID NO: 8433 - protein, 231 aa, Zea mays
  unsure (1)..(231): unsure at all Xaa locations
  Clone ID: ZEAMA-23APR03-C6703_1.p
LHVWTQEEVDDDVFLLILPFPHLKCCIKRSXTKLSHTSALTGEKKVRELLEGHIKNCRVSFRMEPYIFKSLANYLRMEGLVKDTRIKVEEKLGFFLYMISHNATFEDLQVFFGHSNDTFHRVIKHFFDIVIPGLSMRFLKPPFNQVHPKIHGDNRFYPYFKNCIGSIDGTHVPVSMSPDQAAPFRNRKGTLSQNVMVVCDFNLNITYVSAGWEGSATDSMVLRSPKKKKKG

SEQ ID NO: 8434 - protein, 308 aa, Zea mays
  unsure (1)..(308): unsure at all Xaa locations
  Clone ID: ZEAMA-23APR03-C6703_5.p
MMFTRGSPKILMLSKAAQKKVSPKASTSKKCGGGVQRAAWNSELEKSLVDLLFEHNVPPYRAQNGWSPDAWNKIVTEFNKKHEYVTFNKIQIQEKERELKRDYKMLKEARKQSGVSWNEKRCMIVADPPIWENIIKSFPRAKKFQKKSFPLFDALGELYDGHIAQGTXNITSTQLPQEWNTISNEEEQVNTTRMDEEGIIQQQPQEEDSRLEQDEDPMIERTEQRSTATRRSTASTINQDKEAKRMKKDSLEXDLCISVLRSMNVTADEKIKAAEVFDIPNNRETFISFSVDEPETALLWLRRKIDKL

SEQ ID NO: 8435 - protein, 348 aa, Zea mays
  Clone ID: ZEAMA-23APR03-C6744_1.p
RRKEEGARWRRRRQPRKGEEEGGRKKYALVSYHELPEYMKENEFILNYYRSEWPVLNAVLSLFSWHNETINVWTHLLGFMLFFGLTLVHLGQYFPQVADLIGHLSWPISKVAENVSSNIGDVLSGAAMFIQTNPSLASHGTAVASQTTRWPFFVFLAGAMFCLLSSSACHLLSCHSHRLNLLLIRLDYTGIAVMIVVSFFPPIYYIFQCEPRWRAAYLSAITAAGAGTVYALMSPRLSAPRYRARRALLFVGMGLSGVVPAAHAAAANWHEPRRNVTLAYEGAMAASYLVGTAFYLARVPERWRPGAFDLAGHSHQIFHALVIAGALAHYGAAIVFLRARDEMGCPAS

SEQ ID NO: 8436 - protein, 510 aa, Zea mays
  unsure (1)..(510): unsure at all Xaa locations
  Clone ID: ZEAMA-23APR03-C6746_1.p
MDGSSKGSGHSEALRNYNLGRTLGIGTFGXVKIAEHKLTGHRVAIKIINCRQMRNMEMEEKAKREFKILKLFIHPHIIRLYEVIYTPTDIYVVMEYCKYGELFDYIVEKGRLQEDEARRIFQQIISGVEYCHRNMVVHRDLKPENLLLDSKYNVKLADFGLSNVMHDGHFLKTSCGSPNYAAPEVISGKLYAGPEVDVWSCGVILYALLCGTLPFDDENIPNLFKKXIKGGIYTVPSHLSALARDLIPRMLVVEPMKRITIREIREHQWFQIRLPRYLAVPPPDTTQQAKMIDEDTLRDVVNMGFNKNHVCESLCSRLQNEATVAYYLLLDNRFRATSGYLGADYQESMDRNLNQLASSESSSSGTRNYVPGSSDPHSSGLRPYYPVERKWALGLQSRAHPREIMVEVLKALQELNVRWKKNGHYNVKCRWCPGFPEVNDTLDASNSFLGDSTIMDNDDANGRLPTVIKFEFQLYKTKDDKYLLDMQRVTGPQLLFLDFCAAFLTKLRVL

SEQ ID NO: 8437 - protein, 95 aa, Zea mays
  Clone ID: ZEAMA-23APR03-C681_2.p
MAMAKPPLQTAAIILFVLLATASCLHTVDTAALGFCWGKCSARCARASARRAWAACMSSCGLCCEECNCVPRDIHDCPCYSNMFTTGPKKMPKCP

SEQ ID NO: 8438 - protein, 762 aa, Zea mays
  Clone ID: ZEAMA-23APR03-C6830_2.p
MWRLTVAEGGGPWLRSTNGFVGRAVWEFDPDLGTPEERDEVERVRQEFSDHRFQRRESADLLMRMQCAKQNRSQRRDLPRIKLGEDEHVTEEIVLSSLRSALDQFSSLQASDGHWPGDFSGIMFIMPGLIFALYVTGSLNVVISPEHRHEICRYIYNHQNEDGGCGTLILGSSTMFGTCSNYITLRLLGEEPYANNSVLAKGRAWILSHGGATLIPQWGKIWLSVLGLFDWSGNNPIFPELWSIPQFLPFHPGKFWCFARMVYLPMAYLYGKKFVGPITPTILALREEIYDTPYGKIDWSDARSKCAKEDLICPRTLLQNVIWTSLYRCVEPVLSSWPINKLRERALGNIMEHIHYEDENTQYLCICPVNKALNMVCCWVEDPNSDAFKRHLARIPDFLWISEDGMKAQVYDGCQSWETSFIIQAFCATDLVNDYGSTLQRAYEFMKNSQVMRNHPGDQRYWHRHRSKGSWTLSSADNGWAVSDTTGEALKAVLLLSKISNKNNLVGDPIERERLHDAIDCLLSFANKDGTFSTYECKRTYSWLEILSPCETFPNIVVDYPYPECTSSVLQALILFKDLYPGYRTEEIEALVRSAATFIETKQQEDGSWLGNWGICFTYGAFFSIKGLVASGRTYKNSPCIRKACHFILSKQLSTGGWGESHIAIETQVYVNLKGDRAHAVNTAWAMLALIYAGQFERDPTPLHCAAKELINMQLETGEFPQQEHVGCFNCSLYFNYPSYRNLFPIWALGEYHRGLRAKKDN

SEQ ID NO: 8439 - protein, 618 aa, Zea mays
  Clone ID: ZEAMA-23APR03-C6856_2.p
LPLSPLLALSTQATASALRSGSGRRRHRLLLPPLSSRLAPSPPVLRTPAGDPAHTDVEASKENRGACSLNNDRADALEEEANVSTARIGHVESADPGGSVGVEKEIFMAVNEESEGEQAGATLEDLFFFNGEEDDDSDWEPASRLVVNRWFCLNCTMPNVDKITYCMNCRELPGSVVDGYDVFKKQIAQTALLSADTGLLPVSTAIGFDERMLLHSELEVKPNPHPERPDRLRAIAASLAAAGIFPSKCALVPPREITKEELLMVHSPDHIESVEQTKNMLYSYFTSDTYANGHSACAAKLAAGLCADLASLIVSGRVRNGFALVRPPGHHAGVKQAMGFCLHNNAAVAALAAKRAGAKKVLIVDWDVHHGNGTQEIFDGDKTVLYISLHRHEDGNFYPGTGAAHEVGVLDGQGFSVNIPWSRGGVGDDDYIFAFQTVVLPIASEFAADITIISAGFDAARGDPLGCCDVTPTGYSWMTSLLAGSSNGRLLVILEGGYNLRSISSSATEVVKVLLGEGPNRASFVVSPSKEALSTVSQVLKIQQQFWPVLGPTYASLQAQQGSVSSNHSNELKKRKRPGGGPGPFWWKMGSKRLLYEALIEPRSRPRKLKGSTGSAAP

SEQ ID NO: 8440 - protein, 530 aa, Zea mays
  unsure (1)..(530): unsure at all Xaa locations
  Clone ID: ZEAMA-23APR03-C685_1.p
MLFINANGQTELPGACHRSRKSQGQSRFPNPNQSCATARCARASEMDDVSVKQIAVLYPVGGVGHVGPMTQLAKVFLHHGYDVTMVLIEPPIKSTDSGAGFIERVAASNPSITFHVLPPTPAPDVASSTKHPFLLILELMRQYNDKLESFLRSIPRERLHSLVIDLFCTHAIDVATRLGVPVFKFFASGAGTLAIFTQLPALLAGRLTGLKELGDKPLQFLGVXPWPASHLATSLLESPEDELCRTSMEILERNAGTHGVLVNTFESLEQRALQALRDPLCVPGQALPPVYPIGPLVGTGTGRQEGDGGPQHECLAWLDAQPERSVAFLCWGSKGALPKEQLKETAVGLERCGQRFLWVVRTPAGRDGPGRYWEQRAEADLDALLPEGFVERTKDRGLVVTSWAPQVDVLNHPATGVFVTHCGWNSTLEAIAAGVPMLCWPLAGAEQRMNKVFITEDMGVGMEMEGYMTGLIKAEEIEGKLRLALESEEGTRLKKRALQLKKETEEAMEDGGSSEAAFLRFLSDVANVRG

SEQ ID NO: 8441 - protein, 206 aa, Zea mays
  Clone ID: ZEAMA-23APR03-C688_30.p
MFSRSPHLKRLVMPAWNRITKVGICNAIQRWQALESLTMPTIGHPPYIMEEIARSCKNFTELKIMGSFDQQFASAILQFLPKLKVLSLRCSKVSMDALQCLLNSMEYLEVLNISHCLLLVVAANGRKQVVHELDSQILERASRLREFHYCQSRLCVACQRMVVDEGIMRWYRYEDWFWRRDEVRSLDLQDYGKLFDVGCERLTSVD

SEQ ID NO: 8442 - protein, 278 aa, Zea mays
  Clone ID: ZEAMA-23APR03-C6896_1.p
MPYPPKRGESKAAALCRRLRFERSVLSTLSRRRRRGANMKAIGNGGEWWWNLPSLRRKSDSRRRGRRNTDPRGRRRGPPREPLSSSSSSESIEQGGGWPIEFPFRQAVTAASLTFTGDTIAQVRSRIVDRRRCCPDSNTKELIPDILLNHDWIRALRMASYGFLLYGPGSYEWYQLLDRCMPKQTFVNLSAKVILNQIVLGPCVIAVIFAWNNLWLGKLSELPSKYQNDALPTLLYGFKFWIPVSIVNFGVIPLPARVAFMSSCSIFWNFYLSTTMSK

SEQ ID NO: 8443 - protein, 666 aa, Zea mays
  Clone ID: ZEAMA-23APR03-C6905_4.p
MATPNGLARIETTGKKKQDNGVWYDDSSAPVRAQTIDELHSLQRKRSAPTTPNRSAPTTPIKGGAHSPFAVAISEEERHTQQMQSISASLASLTRETGPKVVKGDPAAKGEAAAQGAPSTPRAHQQHRHPAAPAIAVSDSSLKFTHVLNNLSPAELYEQAIKYEKGSFITSTGALATLSGAKTGRSPRDKRVVKDEVTAQDLWWGKGSPNIEMDEKTFLINRERAVDYLNSLKVVRQRQLLNWDPENRIKVRIISARAYHSLFMHNMCIRPTDEELEDFGTPDFTIYNAGQFPCNRYTHYMTSSTSIDLNLARREMVIMGTQYAGEMKKGLFGVMHYLMPKRGILSLHSGCNMGKDGDVALFFGLSGTGKTTLSTDHNGLLIGDDEHCWSDNGVSNIEGGCYAKCIDLAQEKEPDIWNAIKFGTVLENVVFDEHTREVDYADYSVTENTRAAYPIEYIPIAKIPCVGPHPKNVILLACDAFGVLPPVSKLILAQTMYHFISGYTALVAGTEDGIKEPQATFSACFGAAFIMLHPTKYAAMLAEKMQKYGATGWLVNTGWSGGRYGVGKRIRLPYTRKIIDAIHSGELLTANYQKTEVFGLEIPTEINGVPSEILDPINTWTDKAAYKENLLRLGGLFKKNFEVFASYKIGDDSSLTDEILAAGPNF

SEQ ID NO: 8444 - protein, 643 aa, Zea mays
  Clone ID: ZEAMA-23APR03-C69288_1.p
MAHSPAPSGGGGGGPLPLLVSLNCLDDLSLEQEGLAGVAAVEHVPLSAVACGRIEAASAVLLPSLAFLPRAAQRRLRPWQLLLCLGSADRAADAAAAADLGLRLVHVDANRAEEVADTVMALILGLLRRTHLLSCHASSVPAAGWLGSVQPMCRGMRRCRGLVLGIIGRSAAARCLATRSLAFRMSVLYFDPRYVASGKTKRPSIVFPSAARRMDTLNDLLAASDLISLHCGLTNETMHILNADCLQHIKPGAFIVNTGSCQLIDDCALKQLLIDGTIAGCALDGAEGPQWMEAWVREMPNVLILPRSADYSEEVWMEIREKAITMLQSFFFDGVLPSSAISDEDEEISEAKNEDDYLGPQAKDSQSQIFDTEIDESHITLESEKKRAISHHKEPQASGKSVNIGSRSEGRRSRSGKKGKKRPAHRRPQQKPDDLSAVESDSNYSSRRDDDTAMSSRDQVVSSSSRFASPEDPKYKHKSLSESPMEITSEKKVPVLLSRKYPDKLKDGFIVALRARDNSGYHVARQRVVGGGGWILDVVSNATNRDPAAQFLVTFKNKDTMGLRSFVAGGKLLQINRKMEFVFASHSFDVWESWMLDGSLLEGSKLINCRNPSAVLDICIEILAAPSEEDGVTRWLDSPRWGL

SEQ ID NO: 8445 - protein, 204 aa, Zea mays
  unsure (1)..(204): unsure at all Xaa locations
  Clone ID: ZEAMA-23APR03-C6933_10.p
MASPSSSPSRKVPFSAHMGARVQALSKIACSRLQKELAEWQVNPPAGFKHRVTDDLQRWVIDVAGAAGTLYTGETYKLQVDFPEHYPMEAPQVIFLHPAPMHPHIYSNGHICLDWSTGYAKKFLEILLTNHDSMRWQLSLAPXDILYDSWSPAMTVSSICISILSMLSSSPEKQRPADNDRYVKNCRNGRSPKETRWWFHDDTV

SEQ ID NO: 8446 - protein, 294 aa, Zea mays
  Clone ID: ZEAMA-23APR03-C6944_3.p
MTMYSQSVRAPPPPPCRFVPRPCYVMARPLLVFTPSGALLKAAVRDVWASNFDEELSNLSAVLPRYPCVCVDTEFPGAVHDSDLPRYMRGPRESYELVKRNVDDLKLLQVGIALSGPAGRFPIAWQFNIRGFDPALHPHAPASIAMLREQGMDFAMLNEFGIDPEDFAAGFRCSGLACGRLTWTAFSGSYDFGYLAKALTGGQPLPDTVDGFLALVRRLFGHSVFDVKHLARCCAMRGGLEQVATALGVKRAAGRAHCAGSDSLLTTDVLLLMLHRFFRNVDVLAHAGTIVDLT

SEQ ID NO: 8447 - protein, 102 aa, Zea mays
  Clone ID: ZEAMA-23APR03-C696_82.p
MSGRGKGGKGLGKGGAKRHRKVLRDNIQGITKPAIRRPRRGGVKRISGLIYEETRGVLKIFLENVIRDAVTYTEHARRKTVTAMDVVYALKRQGRTLYGFGG

SEQ ID NO: 8448 - protein, 210 aa, Zea mays
  Clone ID: ZEAMA-23APR03-C7015_2.p
PPPFPSPRRSIAGHAGDGDGAQARALRDGVSCFLSRLLPVASRPPLLLRTADIHRLMATLKDAAARKSILATIRLVVPAGAARPAPPVGPALGFYRLNLMAFCKDFNARTQKYKAETPMQVTLTAYKDSTFEFVVKSPSVSWFLKKAAGIETASTRPSHVNVSSLTLRHVYEIAKLKQADPFCKHISLEALCKSIIGTANSMGIAIVKDL

SEQ ID NO: 8449 - protein, 307 aa, Zea mays
  unsure (1)..(307): unsure at all Xaa locations
  Clone ID: ZEAMA-23APR03-C7067_2.p
MAENFQLQGRHGKSRVRVSRVWRRPAAAGGDVIVEWNVAVSIVSDCLPSYTSSDNSAIVATDSIKNTVYVKAKECTEVVXSMEEFAVILGRHFTSLYPQVTEATVTIVERPWERVTVDGKPHSHGFKVGVEKHSTEVIVKKSGSLLINSGIQGYSLLKTTQSGFEGFVTDRYRLLPDTRERIVATEVTAWWRYPFEHVSQLPSKPFCFTQRYQDVKKVLAETFFGPPDVGVYSPSVQNTLYLMAKEVLTRFPDISSVQLRMPNLHFLPVNLGTKEAPLVKFADDVYLPTDEPHGTIEATLSRPMSKL

SEQ ID NO: 8450 - protein, 142 aa, Zea mays
  Clone ID: ZEAMA-23APR03-C712_22.p
SLIALSGIGTWKDFDSIFLWLVLNALALVLNVFAENLNALKCAGWGVFIAPNHQDSITLSIQLTHSGGRVLCSGGLNHSNSCILSCSSTFQQTGKPLRPLLILGLGRVRSATRPVEFSHRQPVLFQPFPSLKRSLRPYEPSP

SEQ ID NO: 8451 - protein, 225 aa, Zea mays
  Clone ID: ZEAMA-23APR03-C7172_7.p
NRCGETSNNLGEERTTGFRRQPCRVVGGDDLLKGIFFEVKKKFETALGVLKKEKITIDPDDPAAVSRYAQVMKTVREKADLLSDSQRIKYTIETFTKGIPDARTYLNTLQQLRIKSGLIDHLGIEPLMMEALEKIEKDIKKPLLRSDKKNMATLLAEFDKINKKLGFRKEDLPKIEEELELEIAKSELTELKKECVEAMETQLKREEFQDEEMPDVRKLDIRNFL

SEQ ID NO: 8452 - protein, 523 aa, Zea mays
  Clone ID: ZEAMA-23APR03-C71826_1.p
MATRRRLSPTFFGGLRARELGGASVSSRATAGLPYLADLSSDPGGRGGGVIAVEHSGDPAIPFAISFGKTAQTCNLLAVADEDGYVGLYDTRRRLPSASSSLEKSAETRVCDWVAHNNAVFDVCWIKEGSQILTASGDQTVKIWSVGNRKCIGVLSGHTGSVKSLSCHSSNPELIVSGSRDGSFALWDLRCDPKSPNSHGETCLTSSAVVREAHSPILRSRTRSRAKAASTSITSVLYLKDGVSIATSGAADNVVKIWDTRNLKVPFSNKNSQAGAQPLEGVKHGISCLSQDSYGAYIAASCMDNRIYLYSVLHVNKGPIKVYTGSKIESFFVKSAISPDGTHILGGSSDGSVYLWQVDQPESAPIVLKGHEGEATSVDWCASEVGKIATSSDDSTVRVWSTMKMDCTNVSSPTVIRKRITAPSTEYRRSITHEPATTSRDGVVCTSGDGELQSGCHSPLQPRALHFGTPESSKKRALALFEEEALDSRKSPEAQTNSPSSVLSPPSSLKRRTIRDYFASAAS

SEQ ID NO: 8453 - protein, 400 aa, Zea mays
  Clone ID: ZEAMA-23APR03-C7182_1.p
MGKGRAPRCAKVGLNKGSWTPEEDMRRVGYMQKYGHANRRALPKQAGLLRCGKSSRLRWLNYLRPDLKRRDLPAQEEQTAIELHACPATTWSRIPACIAGRTDNEIKNVWNTHLQKRVPPAGGEEEHCAAGSNKNKKKKEKAAGGAEEPLPSPTPSPSPSSSTTTTANCSSGDSGEQQSNTSKEADDEQLDLENLEMMPMLDDDPITFGFDMLVDPVPAPYGPAVSASASRPTSPCASFTSPPPPAGCGPLGVDDLLVLPEIDIDQELWSIIDGDGGGDGGGSACAVSAETSAPCCQSNAPEPTTNGACATSHHGAAEEEGKEWWLEDLERELGLWGPVDVEDYQYQYPTGPHGLVADHTDPLPAMVDDPVSCYFQAGPASAVLQEPGYSVTSGSNLMGL

SEQ ID NO: 8454 - protein, 120 aa, Zea mays
  unsure (1)..(120): unsure at all Xaa locations
  Clone ID: ZEAMA-23APR03-C7190_17.p
PSDAAAGQSRRSEAELGAAPVPALGVVPETARNGAAGSATAESRPDEQEIVRSRPSPDGIVSAHADPVGDGAVLAHLLRQLLLDPEGLVRXCANKEARHQPRQRNTETKAAQANSMENEN

SEQ ID NO: 8455 - protein, 100 aa, Zea mays
  Clone ID: ZEAMA-23APR03-C71_65.p
EKVKSTSVTQKQMPSQREQYGSTVHLFIDAGRSPRKITFMSITFVNDLWKSDKAHVVFSSLSRFPSLLSRRSFPAHSFGCAPSFVELGNQPVLRLVQASS

SEQ ID NO: 8456 - protein, 96 aa, Zea mays
  Clone ID: ZEAMA-23APR03-C71_75.p
SISIYLICTNNIKLQMYLRLEGVKIQVWRQKQMPSQREQYGSTVHLFIGAGRSPCKITLMPFTFINNSIVILRGLIWFFIFKSVSLSAVMSKLFCA

SEQ ID NO: 8457 - protein, 194 aa, Zea mays
  Clone ID: ZEAMA-23APR03-C71_79.p
IHHCPSTRTRRSVRSNPPRSPNPRFPPRPHPFDSPLPYHTYAQIRPLQSPFPIVSRRPRRRLAPNDPLAPTTIRFVVKKPPAPRRKRKQQPLATLTLHGAGDGAEAAYGGSGGGSSADHHVVHVGHVGHGARRHEGGRSSSTGANSKLCIGCSSVDIFCYSPPISAEDGTVDGGSIPAADGAAGLTAGIFGLRL

SEQ ID NO: 8458 - protein, 295 aa, Zea mays
  Clone ID: ZEAMA-23APR03-C71_83.p
PFSLIFSTAHGPGYFFSQLYPLPCVPGQLVEKSRRRLHSPFSRSAAASLPLSSLSHDASSSLHTSFCSIPSFLCARYSSFPCYCALYLPSHGVHLPMLAPSPASPPWSSISLRGTPSSSFLSLSVLCWPVLYSSHPRRGFCSLCSESPTRSSPGSPSLMASACAPSTLLAWPRRLPPVGRAPSQSPLRAARALLAPLLAEYFPHKICSTTVSSNREASSPCALASAVANFAIKFTSTPCSVCFAVGYFSTFQFRAACPVCARSRLDLVVIPCVIKKSQESGGFVSVVGTVRELTT

SEQ ID NO: 8459 - protein, 140 aa, Zea mays
  Clone ID: ZEAMA-23APR03-C71_98.p
MHTCLHHSCLFLSSIRINRASNQPETNLEKPAFWMSNLVNLVWLQSLCNACGIRYRKKRRQELGLDSAKKPQQNQRPPPPQQQQQQEDHCPATSAVAVRDNTKSSRLQVVKKRRVLMGVEEAAVLVMALSSSSRSTLLHG

SEQ ID NO: 8460 - protein, 346 aa, Zea mays
  Clone ID: ZEAMA-23APR03-C720_3.p
MAEQAGAGRYWCHMCAAAVSPAEGEVEMKCPFCHSGFLEEMETARGAATDDGDGDGAVAQVHPGADRPSSIWAHAILSTVDSSARRRRNRRQQEAASDVYDWNDPEFSLRRRRVTAFLRLLHELRDRQLQRLESAAGVALEGDQLTPFGRSLFIGAAGGEHGVALGDYFLGPSLDALVQQLAENDAARHGTPPAKKEAVEAMPTVEIAGGNDGDDAASCPVCLEDYAAGERAREMPCRHRFHANCIVPWLEMHSSCPVCRFQLPATDDKSSCNGGDGGFVSVDADREGSDNGGGDGRASSRGNAELAEAEESGRRLPPSLQWLNSLFSPSAQSSGSGGSSSHHWEN

SEQ ID NO: 8461 - protein, 73 aa, Zea mays
  unsure (1)..(73): unsure at all Xaa locations
  Clone ID: ZEAMA-23APR03-C7210_27.p
MIEVVLNDRLGKKVRVKCXDDTIGDLKKLVAAQTGXTRPEKIRIQKWYNIYKDHITLKDYEVHDGMGLELYYN

SEQ ID NO: 8462 - protein, 213 aa, Zea mays
  Clone ID: ZEAMA-23APR03-C7210_29.p
RLASFSPRERIGCSSLFCSRLGRFVEDPGSALSRGLSAGVVSRGVASQGLVACSGEFREAEMAPKAAPAKKGDAKTQALKVAKAVKSGAAKKKTKKIRTSVTFHRPTTLKKARDPKYPRISTTGRNKLDQYQILKYPLTTESAMKKIEDNNTLVFIVDLKADKKKIKAAVKKMYDIQAKKVNTLIRPDGKKKAYVKLTPDYDALDVANKIGII

SEQ ID NO: 8463 - protein, 86 aa, Zea mays
  Clone ID: ZEAMA-23APR03-C7210_51.p
SFLFVIIIFLLVQPENEKPITESGDEISYERAKAKSPISLLSGLRRRSIAHAKFGSSHYERKEFIGAPIKLDVEAHARIQKHSDCI

SEQ ID NO: 8464 - protein, 398 aa, Zea mays
  Clone ID: ZEAMA-23APR03-C7210_58.p
MTTARQWWRRATAAVKDRRSLYLRRVAALRPRPASGVAAAVLWSPELEAAVIRATSHDERSVDYGNAARVFALARASPVSVQPLMWALARRAGRTRCWAVALKALMLAHGLLLRPDLAPRSVRLGRIPFDLADFRDRSSPPSKSSGFSAFVRAYFRFLDTRSLFIAQDLDAVADTGETDGEDARLDHVTKQQHLLHLLLQIRPYGDGMELGLIFEAMDCVVIEIFEVYSEICTGIARFLVAVLGSAPMTPRPRPGETLAAARRRRAVQGMRVLKNAAEQSAQLSSYFELCQSLGVLNAAEFPAVERVADDDIRDLEKIIMNHVVEESREDKQMKALVAVEETPPASKTVVTTEWVVFDDDDNAAAGARPRNFEGYLNPFVTAPWDATPRVGETCWFSL

SEQ ID NO: 8465 - protein, 149 aa, Zea mays
  Clone ID: ZEAMA-23APR03-C7210_62.p
LAAPAKKGDAKAQALKVAKAVKSGAGKKKTKKIRTSVTFHQPKTLKKARDPKYPRISTTGRNKLDQYQILKYPLTTESAMKKIEDNNTLVFIVDLKADKKKIKAAVKKMYDIQAKKVNTLIRPDGKKKAYVKLTPDYDALDVANKIGII

SEQ ID NO: 8466 - protein, 396 aa, Zea mays
  Clone ID: ZEAMA-23APR03-C7210_69.p
MTTARQWWRRAAAAVKDRRSLYLTRVVALRPRPVSGVATPALRSPKLEAAVIRATSHDERSVDHGSAARVFALARASPPSLQPLMWALARRARRTRCWAVALKALVLAHGLLLRSDVAPRAARLGRVPFDLADFRDRSSPPSKSSGFSAFVRAYFRFLDTRSLFTAQELDAANSGEADGEDARLDSVTKLQHLLDLLMQIRPYGDGVQQGLILEAMDCVVIEIFEVNSQICTGIARFLVAVLGSAPTTPRARPGETLAAARRRRGVQGMRVLRKAAEQSAQLSSYLELCRDLGVLNAAEFPAVERVSDDDIRDLEKIIMNHVVEERGKDVEKETKALVAVEETRLASKTVVTKEWVVFDDDDNDAAGARPRSLGSYMNPFMAAPWDTVACSRDLLV

SEQ ID NO: 8467 - protein, 182 aa, Zea mays
  Clone ID: ZEAMA-23APR03-C7210_70.p
MIFYFLLCFFTHLTLWSSFSVSSSGEFREAEMAPKAAPAKKGDAKTQALKVAKAVKSGSVKKTKKIRTSVTFHRPKTLKKARDPKYPRISTTGRNKLDQYQILKYPLTTESAMKKIEDNNTLVFIVDLKADKKKIKAAVKKMYDIQAKKVNTLIRPDGKKKAYVKLTPDYDALDVANKIGII

SEQ ID NO: 8468 - protein, 158 aa, Zea mays
  unsure (1)..(158): unsure at all Xaa locations
  Clone ID: ZEAMA-23APR03-C7210_82.p
MRHLREAEMAPKAAPAKKGDAKTQALKVAKAVKSGAAKKTKKIRTSVTFHRPTTLKKARDPKYPRISTTGRNKLDQYQILKYPLTTESAMKKIEDNNTXFIVDLKADKKKIKAAVKKMYDIQAKKVNTLIRPDGKKKAYVKLTPDYDALDVANKIGII

SEQ ID NO: 8469 - protein, 106 aa, Zea mays
  Clone ID: ZEAMA-23APR03-C7211_3.p
MGSPLGGWPSYNPHNFSQLVPADPSAQPSNVTPATYVATHRTDPPPNQVITTEARNILLRHLYQKSEEKLRPKRAAPNNLAPENNNKKKQPRGPVGDVGGQSSARS

SEQ ID NO: 8470 - protein, 324 aa, Zea mays
  Clone ID: ZEAMA-23APR03-C7216_1.p
MAQPFHVPEVLQDGMSWLLASPEESLPFILADRGFDVWIANNRGTRWSRRHVSLDPSSRLYWNWSWDDLVVNDLPAMVDFVVKQTGQKPHYVGHSMGTLVALAAFSEGRVVSQLKSAALLTPVAYLAHITTPIGILLAKAFVGEVLSDFLGMAEFDPLAPPVTNLIRAFCRRPGMSCYDLVGSITGKNYCLNSSAVDVFLKYEPQPTSTKTMVHFAQTVRDGVLTKYDYVLPERNIASYGQAEPPVYRMSGIPPSFPLFLSYGGRDSLADPADVRLLLQDLPGHDQDKLTVQYLDKFAHLDFIIGVCAKDYVYKDMIDFLNRFN

SEQ ID NO: 8471 - protein, 235 aa, Zea mays
  unsure (1)..(235): unsure at all Xaa locations
  Clone ID: ZEAMA-23APR03-C7233_3.p
MKFGKSLNNQIVETLPDWRDKFLSYKDLKKRLKQIGAGSGERRSKRQRVGDGRGGSSPPAMTPEEAGFVALLDAELDKFNAFFLEKEEDYVIRLKGXVKILKKYDKRTGALIRLPFIRNVMQXPFCATDVLYKLVKGCEEMLDQXLLPRNQQRPVPSDNGGEGDSDGDDDKQRPAEPGASSLPXGGGGGAGDMELEEIEDMESMYMKSTVAALRALREIRSGSSTVSAFSLPPLR

SEQ ID NO: 8472 - protein, 210 aa, Zea mays
  Clone ID: ZEAMA-23APR03-C7239_1.p
FCVCKQELGSRRGYRRSCATSTSRLACWAAAAAGGRPAAADGTARTATPRSPGSAPRPRATAASAGAGLSACTPTTPRSPPGSSSRRRTPRSRRPRRSPPRRLPPPPAPPPRPFPPPRRTCTSWDLTPCRGRFLDRAGCTTRRKQSSTTEAASASPRPRRTWTASSSAGSSSRGGSPAQERDGCSAFSEPRERTENWDRGLRATYIYQSY

SEQ ID NO: 8473 - protein, 335 aa, Zea mays
  Clone ID: ZEAMA-23APR03-C7267_6.p
MAPGSKAERKAALDAGAWMFNVVTSVGIIMVNKALMATHGFSFATTLTGLHFAMTTLMTLVMKWLGYIQPSYLPLPELVKFAFFANLSIVGMNVSLMWNSVGFYQIAKLCIIPVLCILEIMFDKVRYSRDTKLSIVLVLVGVAVCTVTDVSVNSQGLLAAVIAVWSTALQQHYVHHLQWKYSLGSFNLLGHTAPAQAASLLVLGPFVDFWLTNKRVDAFNYTSIVTFFIVLSCIIAVGTNLSQFICIGRFTAVSFQVLGHMKTVLVLTLGFFFFGKEGLNFHVALGMFLAVIGMIWYGNASSKPGGKERQVYSTPSEKTQKHGVLSSQSELDQKV

SEQ ID NO: 8474 - protein, 163 aa, Zea mays
  Clone ID: ZEAMA-23APR03-C728_7.p
MDAVMFGLETPLMAALQHLLDVPDGDAGAGDNKTGGGGGATRTYVRDARAMAATPADVKELPGSYAFVVDMPGLGTGDIRVQVEDERVLVVSGERRREEREDDAKYPRVRRRMGKFMRKFVLPDNADVDKVAAVCRDGVLTVTVEKLPPPEPKKPKTIEVKVA

SEQ ID NO: 8475 - protein, 130 aa, Zea mays
  Clone ID: ZEAMA-23APR03-C7300_3.p
MWWEGDGGEAPREETPVDFDFIALLAKPKDYYKILEVDYYASEETIRSSYIRLALKWHPDKKQGQGEENSTSKFQEINEAYQVLCNPAKRQEYDKKGILYVQDQNVVDYLNRHKGLILTCNGLGIRYSVW

SEQ ID NO: 8476 - protein, 246 aa, Zea mays
  Clone ID: ZEAMA-23APR03-C7321_1.p
MADLRPPEPGTNGSSAGVVAALPAVEAVAAAETAMAATGGPQPPAPPYSKRRRRPSVRLGDIDAPPPRRNHKPPSSSHPRPPRRAHPDDLDPHAHSRRGPKPPAQRRPRTAWIPAAPASAGPAEGYDDDEERYYDDEDQSDSAAAAAARARVSGSRDASGDESDGVADWGLPNGRLPSATGYGGVKAWLDGLGLSRYAPVFEIHEVDDEVLPMLTLEDLKDMGIGAVGSRRKMYAAILKLRSDNAS

SEQ ID NO: 8477 - protein, 254 aa, Zea mays
  Clone ID: ZEAMA-23APR03-C7387_1.p
ARDHYLEHPNRKITQAKPLLRALLLSLLHLLPQLSELAAAASAQAQHSTDSESLPLARSASEEGRDNGGGDDAGRRRVLRRAQQADIAAHHRRRRGRGLLRRAVHPRRRRRRRAPPGVRVARPCAVAGVAAGATGLRAVPLPPRRQLRRGRQRQGGVAAAAVRQQGHRRVHPTVHARVRAPQEEGQEPGRRRQGRAAGRRGRTAQEARLISASLHRDLMDQQGEKKEEEKGGAKKRAPELRTNPRCSARRNQPD

SEQ ID NO: 8478 - protein, 99 aa, Zea mays
  Clone ID: ZEAMA-23APR03-C7392_5.p
MICTISGEVPDEPVVSKKSGLLFERRLIERYIEDHGKCPITKEELTMDDIVPVKTNKTNYFPISKVTQKQGLEYFVSKQDLISSFHRVVSLERILNGMF

SEQ ID NO: 8479 - protein, 119 aa, Zea mays
  Clone ID: ZEAMA-23APR03-C7398_4.p
MALRGVWQLQKLVVNYCDWGGSSRGIRAFMEAHLPAFKEKNPHLEVVTELVRGQHPNLKGIYKNHNERVVCVRNLPPEEILLQATRLRNSLGRKVVKLRTRHVTKRPSVQGTWTTELKM

SEQ ID NO: 8480 - protein, 109 aa, Zea mays
  unsure (1)..(109): unsure at all Xaa locations
  Clone ID: ZEAMA-23APR03-C7403_3.p
MIGVGKAXXYANVLDKPLSRGRQEVSLSAFAFLFSELVQYNQTQVDNITELERRLEDAGYAVGARVLELLCHREKGNRRETRLLGILSFIHSTVWKVLFGKVAGKENLD

SEQ ID NO: 8481 - protein, 321 aa, Zea mays
  Clone ID: ZEAMA-23APR03-C74296_1.p
MGRQPCCDKVGLKKGPWTAEEDQKLVSFILGNRQCCWRAVPKLAGLLRCGKSCRLRWTNYLRPDLKRGLLSDAEEKLVIDLHAQLGNRWSKIASHMPGRTDNEIKNHWNTHIKKKLRKMGIDPLTHKPLPPPDPHPPKDHQSPPHTATGGSPEAPPSPSPKPPQEKTAVPVMTPASQQEAGDDDVPLLSNYYPGFCTDEVPMMDPDEIMVPLDDGRTAPPTSTIFSTTTTTSYSAASDSVSSSLSRDEDPLFPLMDLEFPDIAFQMGLLDDMVASWDDSLAQQPLSPSPVYDDDYANQLQIRSGVAFDQEPGNKIVLFSSY

SEQ ID NO: 8482 - protein, 119 aa, Zea mays
  Clone ID: ZEAMA-23APR03-C7432_1.p
SRNLSAAITVLRAVAVRLGHNRGTVSIWRRRRTELRLMDLQSSGPIISRRTASSNNLSSPAMTSTHSKLSSEDRHLRACSRAVRSRGSEESPWYLESQVLGEEQVVQEEPPNTEEFDLI

SEQ ID NO: 8483 - protein, 129 aa, Zea mays
  Clone ID: ZEAMA-23APR03-C7440_18.p
QTRAGPGNSRTSRAHRHRQAHSAITVSPRSRTARSCTHPSPSSSGVAIPSVDRRVRPRQPDLCQSPWRLADRKISRFEKNITKRGSVPETAKKANDYPVGPILLGFFVFVVVGSSLFQIIKTASNAGLF

SEQ ID NO: 8484 - protein, 148 aa, Zea mays
  Clone ID: ZEAMA-23APR03-C7449_6.p
MGIVFTRLFSSVFGNREARILVLGLDNAGKTTILCGQTSIRPYWRCYFPNTQAIIYVVDSSDTDRLVTAKEEFHAILEEDELKGAVVLVYANKQDLPGALDDAAITESLELHKIKSRQWAIFKTSAIKGEGLFEGLDWLSNTLKSGSS

SEQ ID NO: 8485 - protein, 147 aa, Zea mays
  Clone ID: ZEAMA-23APR03-C7454_3.p
MMMSAKKIAHLAKKWQRMAAQGRKRLTLGAAAAKEVDECCGSVASKGHCAVYTADGARFEVPLACLSTPVFRELLQMSQEEFGFAGGDGRITLPCDAAVMEYAMCLLRRGASAELEQAFLSTMAMSCHCAIYMAPYVGRARQQQIVV

SEQ ID NO: 8486 - protein, 388 aa, Zea mays
  unsure (1)..(388): unsure at all Xaa locations
  Clone ID: ZEAMA-23APR03-C74604_1.p
MPPPNSAPRLALPAMARSQTQTQSQGDLDFPSLISDLTSLLLHSPASAGAGGSGPVFSSSSLSIPTPKPKPNPSPTSAAPPTPLARAAIGACAGXAAAGAFTYAALLPIDAVKTRLQVQAAAAPSVTSWQVFLDILRTDGPLGLYRGLSAVILGSASSSAVYFGTCELAKSLLRPHLPPFLVPPLAGASGNVSSSAIMVPKELITQRLQSGAATGRSWQVLLGILRADGFLDLYAGYAATLLRNLPAGVLSYSSFEYLKAFALRRRGGESLTPGESVLCGALAGAISAAVTTPLDVVKTRLMTRVGGAEGSRTVLGTMREVVAEEGLVGLSRGIGPRVLHSACFAALGYCAFETAKLAILQFYLERCQSKEPGAAAQPETEPGAAAAT

SEQ ID NO: 8487 - protein, 182 aa, Zea mays
  unsure (1)..(182): unsure at all Xaa locations
  Clone ID: ZEAMA-23APR03-C7477_14.p
PPPASASAPGSPTVLQPLACDSASTPPPPSLDYRRRPSPISSAANSAHQIPPPADGSPWWNPKAYPLADAQLXMGILDXIQQAANYKQLKKGANEATKTLNRGISEFVVMAADTELLEILLHLPLLAEDKNVPYVFVPSKQALGRACGVTRPVIACSVTSNEGSQLKQQIQGLKDSIEKLLI

SEQ ID NO: 8488 - protein, 367 aa, Zea mays
  unsure (1)..(367): unsure at all Xaa locations
  Clone ID: ZEAMA-23APR03-C749_2.p
MHPGGGPLSVPPGFRFHPTDEELLYYYLRKKVSYEPIDLDVIREIDLNQLEPWXLKERCRIGTGHQHEWYFFSHKDKKYPTGTRTNRATTAGFWKATGRDKAIFLGNASRRIGLRKTLVFYIGRAPHGKKTDWIMHEYRLDQENVEIQEDGWVVCRVFKKKSYHQRGLNPAEMAAALDDDELQPFPVPIPGSSLQPTEHKTNPTHLMQYDYPSFDPSMQLPQLMSDDQEQEQPVRPTLLPGHPGVAMASMSSLNIECSQNLTKLTSNGSDEMLHVGHGGGAGGGVVVDRFAGTTTDWSILDKLLASHQNLDRLFHGKVVTTASASPMAVPVYHQQLMELGGSSSSLQRLPLQYLGGETADLLRYHPK

SEQ ID NO: 8489 - protein, 207 aa, Zea mays
  Clone ID: ZEAMA-23APR03-C74_297.p
MGKNQAYKAMQRARLGSSSGAPGAADAPEDGMTDGSFHSPEWHAARLASLNKTHTLTWEEFKKKQKEEELKRGELEADKDQMMREYRAQLDAERAQKLANGRNHSRSNSKSSSSKKERKDKDAKKRSKKRRKHKSSSESSSSSSSESSSSDDEDRGSRKSRSQSRSKRTRKEKKSRSRSKHRGSESEEEGLVERAVYHGVLNMMLSC

SEQ ID NO: 8490 - protein, 110 aa, Zea mays
  Clone ID: ZEAMA-23APR03-C74_298.p
DDSNQVLTLQGKPKHMACQGTPTPHMTTVPIDSPFASRPHRLGIQCSTDPGCRRAVTALVPTIASMGDPISGRMRDKVRARLQSGTRFTGYHVSRHVLSTFKSLTQVSTH

SEQ ID NO: 8491 - protein, 211 aa, Zea mays
  unsure (1)..(211): unsure at all Xaa locations
  Clone ID: ZEAMA-23APR03-C74_302.p
MASSLARLGAALPRARPRAATRTLPPPRWDAAALGASRRAAPNVCRCLVHSDVKVAPTSDFKDSSKSETWRIKMLYDXGDCPLCMREVNMLRERNKSYGAIKFVDISSKDYSPRXDIRGLDYETSMGRIHAVLSDGTVVTDVEAFRKLYEEVGLGWVYAVTKYEPVASMANAVYGLWAKYRMQITGRPPLEEIMASRRAAGECKDDKVCKM

SEQ ID NO: 8492 - protein, 250 aa, Zea mays
  Clone ID: ZEAMA-23APR03-C7503_39.p
QPSGRGRGRGSHQTPPSAVLSAHCRKTTATQATSAQRPFTSPHPPSTLLRSMAMSSSASKKQAQAQKAGRRPPAVSSAAAADAEMQRVFSRIDADGDGRISPSELAAVSRAISPPASSSHGRREVAAMMEELDTDRDGFVDLGEFRAFHARGVGGGGDDDDDAELRAAFAVYDADGDGRITAAELGSVLARIGEGCSAEECRRMIAGVDADGDGCVGFEEFKIMMRGPQPQPQPQAGAGLTAVPDKAKKE

SEQ ID NO: 8493 - protein, 262 aa, Zea mays
  Clone ID: ZEAMA-23APR03-C75230_1.p
MYQAISLLAMQYEEEQSRSLHGCKPGCVWDWEVVLPDHRSFSLSNTRRSRAAGLSMDASQDVSDWDWELVLPDHRSFSLSNGGKNLDDKETEEHDLLPPSGDVDVHDECKGIGVVLDETCKSAVPSVADPIMASEGGEEEKAIQSPDAEESVTADSKFAQEEEEEEEDIKKDGNDKVGALIGALCSFGVAAATACVFLIGGRLHHHHTQHHKIQLQFFGDDKGIQQVVRQTSRLNQKAMSFAMGAGASRHFGRPRVKRSKSH

SEQ ID NO: 8494 - protein, 132 aa, Zea mays
  Clone ID: ZEAMA-23APR03-C7545_20.p
MTFKRRNGGRNKHGRGHVKYIRCSNCAKCCPKDKAIKRFLVRNIVEQAAVRDVQEACVHDGYVLPKLYAKVHHCVSCAIHAHIVRVRSRENRRNREPPQRFRRRDDGPRPGQGPPRPGGAAPAAAAAAAPRT

SEQ ID NO: 8495 - protein, 169 aa, Zea mays
  Clone ID: ZEAMA-23APR03-C75582_1.p
MADNLIKPVALLLLLLNLCMYVILAIIGGWALNVAIDRGFIIGPELRLPAHFHPIFFPIGNFATGFFVLFSLIAGVVGIASAMVGFNHLRFWNYESQQPAAALGIVAWALTVLAMGLACQEISFDRRNAKLGTMETFTIILTVTQFFYVLAIRGGRHGPVHVERRGNFA

SEQ ID NO: 8496 - protein, 227 aa, Zea mays
  Clone ID: ZEAMA-23APR03-C7562_2.p
MAGADDLKVLGLWTSPFVIRVRIVLNLKGLAYEYVEDDLGNKSALLLSSNPVHKTVPVLLHAGRPVNESQIILQYIDEVWAGTGPAVLPRDPYERAAARFWAAYIDDKVKSAWLGMLFECRDEGERAEAVARAGEALGTLEGALRGKPFFGGDGVGFVDAVLGGYLGWFGAVGRIIGRRLIDPTKTPLLAAWEDRFRAADVAKGVVPDDVDKMLAFLETLLANYYSK

SEQ ID NO: 8497 - protein, 465 aa, Zea mays
  Clone ID: ZEAMA-23APR03-C75798_1.p
MASVREIVVWIGSKSAADLAWEIAVLEEQVVRKELHLLSLYRAAFDQYLGVSPRASAQEPRHERSSRRATAADDEGALRLRSIKESASYSLPTLSDSKRVELSRCSSGRSSLANFLSASIAEYVPKISCKLSEDILRCVSAVYCKLASRPLSQEEEEARSETPPFTPSLSVSSASSSFSLKKQHPVRGWSPRCYYNADATATPDAYASSGGSSGRYSGVMVFPGIHVDEEKFEYACKILDTIRSLIKRLEKIDPRKMAHEEQLCFWVNIHNALVMHAFMAYGLQEKRMKSTDLILKAAYNVGGHSVNSQTIQNSILGCQSHRPSLWVRTLFTPTKKSGSSIHPYALQYAEPIAHFALSTGAFSDPPVRLYTAKKLYHQLEQARAEFIQANVMVRRQTIFLPKVLHFYAKDASLELPDLVDIVCESMPELQRKEIRQYLRRRIDKCVQWLPYKSSFRYTVHSSLAE

SEQ ID NO: 8498 - protein, 560 aa, Zea mays
  Clone ID: ZEAMA-23APR03-C75798_2.p
MESAGGRPEAAAAAVLKVKGRDAGRRPNGAHSSSSCLQHRHSRRTTSASYVNAPDVSPRLSAGHIPAAISRSEVLDDTRRSLDLPDQFPEHRVAAATERAERSGSKSAADLAWEIAVLEEQVVRKELHLLSLYRAAFDQYLGVSPRASAQEPRHERSSRRATAADDEGALRLRSIKESASYSLPTLSDSKRVHAQELSRCSSGRSSLANFLSASIAEYVPKISCKLSEDILRCVSAVYCKLASRPLSQEEEEARSETPPFTPSLSVSSASSSFSLKKQHPVRGWSPRCYYNADATATPDAYASSGGSSGRYSGVMVFPGIHVDEEKFEYACKMLDTIRSLIKRLEKIDPRKMAHEEQLCFWVNIHNALVMHAFMAYGLQEKRMKSTDLILKAAYNVGGHSVNSQTIQNSILGCQSHRPSLWVRTLFTPTKKSGSSIHPYALQYAEPIAHFALSTGAFSDPPVRLYTAKKLYHQLEQARAEFIQANVMVRRQTIFLPKVLHFYAKDASLELPDLVDIVCESMPELQRKEIRQYLRRRIDKCVQWLPYKSSFRYTVHSSLAE

SEQ ID NO: 8499 - protein, 423 aa, Zea mays
  Clone ID: ZEAMA-23APR03-C7583_2.p
MGKHEFLTPKAIANRIKAKGLQKLRWYCQMCQKQCRDENGFKCHCMSESHQRQMQVFGMAPDRVVEGFSEEFLESFLSLIRRAHRHSRVAATVVYNEYIADRHHVHMNSTRWATLTEFVKLLGREGYCKVEDTPKGWFMTYIDRDSEQAVKDRLKRKRIKSDMAEDERQERMIARQIERAHKSLAKPNDGDAAEGEPESGGEEEYSGSDDDGEELEDVSKEANKATGKIAIALQTAVRGPKVNPFEDKPEVKFRFDEEGDLGTGEEKDELAKKKGKDVKAADARRSALDELMKEEEMAKERSNRKDYWLCPGIVVKVMSKSLAEKGYYKQKGVVRKVMDKYVGEIEMLESKHVLRVDQDELETVIPQIGGLVRILNGAYRGSNARLLSVDTEKFCAKVQVEKGLYDGKVLRAVKYEDICKISS

SEQ ID NO: 8500 - protein, 151 aa, Zea mays
  unsure (1)..(151): unsure at all Xaa locations
  Clone ID: ZEAMA-23APR03-C761_4.p
MPTTMAAAAAASAPSSLRVSRQGTIGGGHALYSRSQRAATVSARASMNITCCANQTQTAQRKSYSGTTSPPSGSVKEKVKPRLDDGGVGFPPFRFGGGGGGGGGGXGSSSSGGFILFVVVLLLDYLKEFERNLQNGPRRSGGGYDDGLAPQ

SEQ ID NO: 8501 - protein, 225 aa, Zea mays
  Clone ID: ZEAMA-23APR03-C76437_1.p
MEKEKEKSRARPSRGHWRPGEDDKLRQLVDKYGPRNWNSIAESLEGRSGKSCRLRWFNQLDPRINRRPFTVAEEELLLRAHRAHGNRWAIISRLFPGRTDNAVKNHWHVVMARRRRRTLVGEAAAIGSVVVPPRHQYFHFGSCSPPPPTRSLCFAVPAGFGPLGLSRPAASCGVRNCNVPTAVALLDDGHRHDMSKDLGGDDDNGGDALAKRKDVQFFDFLGVGI

SEQ ID NO: 8502 - protein, 167 aa, Zea mays
  Clone ID: ZEAMA-23APR03-C7650_1.p
MAGSTRAAHKAFLLCNYTLLGAASACIFLTLSLRLAPSACGLLLVFLHALTAVFAAAGCSGSFTDGGAGAGRAHAAHTAGAVLTAIFQGAAALLAFTRTADFLAELRSYVREEDGEVILKLIGGLGTAIFVLEWAALALAFALRLDDDGNEEIDGEHCKSWASAYHV

SEQ ID NO: 8503 - protein, 180 aa, Zea mays
  Clone ID: ZEAMA-23APR03-C7679_1.p
METEEETTPKAKKRPQSLLGSLREAITKVRFLLSSSATRWMLLRSLARGGGGGGAPARRLSLRRATGPARHHRRVARPPPAAPVPPGRPAWVAEPGHGVSRATSPASPEALTRASSSSGGRSPASSAGDDDVDQRAELFIANFYRQLRMERQVSLQLRYVRGNSWDRTPGATPSPASSRG

SEQ ID NO: 8504 - protein, 443 aa, Zea mays
  Clone ID: ZEAMA-23APR03-C7686_1.p
MVLSAGGLGLLISLTLPITCLFPFLYFMVRDFRVAETEEDIGFYAGFLAASYMVGRGFSSIFWGVIADRVGRKPVITFSILSVVVFSALFGLSTTYWMAIATRLVLGALNGLLAPIKAYCVEVCQTQHQALGLSLVNTAWALGLIVGPALGGYLSQPAEKYPHVFSKDSVFGRFPYLLPCLSVSAFATLVLISCEWLPETIHKHKVPEMDTKAFKALSSKEGYCDPPRKKKSLLQNRPWISTLLPYCFFSLHDTAYSEILSLWAVSDRKYGGLSFSTEDTGQVLAMAGASLLVYQLVIYRWVHRILGTVNSARIASAVSILVLATYPFMTYLSGVKLSLALCSAAMMRSALAITVTTGISLLQNNAVCQEQRGTANGISTTAMSFFKSIAPVGAGALFSWAQKRQDVAFLPGDQVVFMVLNLVQLLGLISTFEPFLVLPALPE

SEQ ID NO: 8505 - protein, 202 aa, Zea mays
  unsure (1)..(202): unsure at all Xaa locations
  Clone ID: ZEAMA-23APR03-C7696_3.p
MAQTVFTPSLEAMKHVKAENGVILTKPFLXVCKQILPVLDKFGAAMAIVKSDIGGNITRLENKYTSEPSKYEHLYSMIQEEVQNKTAKGSSSCTNGLLWLTRAMDFLVELFRNLLEHPDWAMSQSCTDSYTKTLKKFHGWLASSSFTVAMKLAPNREKFMEVISGTGDINADIEKFCTTFSPFLKENHNFLASVGLDDLKAS

SEQ ID NO: 8506 - protein, 156 aa, Zea mays
  unsure (1)..(156): unsure at all Xaa locations
  Clone ID: ZEAMA-23APR03-C7750_12.p
MGRMHSRGKGISSSALPYKRTPPIWLKTATTEVEEMITKAAKKGQMPSXQIGVLLRDQHGIPLVKERXLGSKILRILKXAHGLGRRRIPEDLYFLIXKKAVAIRKHLERNRKDKDSKFRLILVESRIHRLARYYKRTKKLPPTWKYESTTASTLVA

SEQ ID NO: 8507 - protein, 243 aa, Zea mays
  Clone ID: ZEAMA-23APR03-C77575_1.p
MESKCVNDQDTLIDLESGNGTAVINHSNDLESGCVCACANGCPRDDRNNQHMDCSSPASDAVARSGDDRKSEGEEKLGLGLLDSSGGDKAKKKRSKKKPPRPPRPLTPTPLDVSDQKLLNELSELAVLKRARVERMKALKKMKNAKQGFSGGNLCPLIVTVIFCVVILWQGFFSGHGPAVSFHGSPESSIRGTRSSLISIRFYKNHSNTRPPPFSETTAAPDNVVETGPRLRNRNQARRLLAR

SEQ ID NO: 8508 - protein, 255 aa, Zea mays
  Clone ID: ZEAMA-23APR03-C7777_2.p
MAMDAAVAEKSGGGGGGAAGVAAAAQVGLNGVGGGERRSRFHRICVYCGSAKGRKPSYQDAAVELGKELVERGIDLVYGGGSIGLMGLVSHAVHDGGRHVIGVIPRSLMPREVTGEPVGEVRAVSGMHERKAEMARFADAFIALPGGYGTLEEVLEVITWAQLGIHKKPVGLVNVDGFYDPLLSFIDMAVKEGFIKEDARRIVVSAPTAKELVLKLEEYVPEYEVGLVWEDQMPAAELESPGSPPPRLWTSAALL

SEQ ID NO: 8509 - protein, 145 aa, Zea mays
  Clone ID: ZEAMA-23APR03-C7799_52.p
VVTLILYCLIHSGSTCSASIAGKHQDSRVPSRIHQLRPHKAKQFITWFYHKNKSTGYLLGPHPCFHYCHALELPKFQRYLMKPMSLALLRKHCLQHMSPYFRIKPWGLAHTANPRSRAVVLGVRVPHVGVSHGGGGRGAGLTGKP

SEQ ID NO: 8510 - protein, 250 aa, Zea mays
  Clone ID: ZEAMA-23APR03-C7814_1.p
MEVASGDEDLESLLQNFHRVSQGYKDALMQVQVLRVNCSTEFKRREALESHITDLKKDNERLRRQYTETLFKVTNQVKFHTEAQSLKEELDKANSRLLSMEEEHKRETEQLKHSSEMNINALENKLSHALVQQARDEAAMKQLKLELSAHKSHIDMLGSRLEQVTDGVHSQYKNEIQDLRDVVSVEQEEKKDIHRKLQNVENELRITRMKQAEQQRDSVSVQHVETLKQKVMRLRKENESLKRRLASSEV

SEQ ID NO: 8511 - protein, 118 aa, Zea mays
  Clone ID: ZEAMA-23APR03-C783_16.p
DKPVHILQIRWSHQEPYHGFGACTSSLFDGTSGPLGHLFSELHCGDAGRRHRAQGAGGQALLLGREAGRVAVVGGRQDRRRRRRRGVAKDDHVPQLLGTELSSEAAAEVASAAGQVYN

SEQ ID NO: 8512 - protein, 142 aa, Zea mays
  Clone ID: ZEAMA-23APR03-C785_175.p
SSSKAHNYITNVSYHSSYCSKAHNYITLAAPELISHKSTKATLMLQAVQKPSDNHSSFLYPPVLRYKLSLSRTPLPVVWCISHRLEVEHFVGEKISHRLQNQQSLVRLEGEHFGLWGLGCKFGNLYTPTQPIMVSSNLNSKP

SEQ ID NO: 8513 - protein, 237 aa, Zea mays
  unsure (1)..(237): unsure at all Xaa locations
  Clone ID: ZEAMA-23APR03-C785_246.p
REASPDQIEALYQYAKFQFECGNYSGAADYLYQYRALCTNSERNVSAVWGKLAAEILMQNWDVALEELNRLKEIIDSKNFSSPLNQLXNRIWLMHWALFIFFNHENGRNGIIDLFFQDRYLNAIQTNAHHLIRYLATAVVVNKRRRNMLEELIKVIQQEPHSYKDPVTEFLECLYVNYDFDGAQQKLIECEQVTLRLFFLQFSRPQFCYSRVCFLNYGKSLKDNTSFFVCAKHPSVK

SEQ ID NO: 8514 - protein, 267 aa, Zea mays
  Clone ID: ZEAMA-23APR03-C785_261.p
MASMLEKIDEMLLLAVYKKVCTSLGASRRRWAPKPFVARSFKPPTTYSKPTPPRVMIGPVSSLSEPSPGPPSPSSSPSPAASSRKAIWYFEGIYAYSPQIPGVRFPGLTHPGIVGTAPSAKLLNVWNEREKRLAETSPQTLKLFEVLHQRPLANLPTPENCLLGKIQEGTAGWHKVANEAARTIPGRENGGNCDIKNLSRGSKVYLPVFVEGANLSTGDMHFSQGDGEVSFCGAIEMSGFLELNFFQGFIPLIHPSKTKFSAAVVLL

SEQ ID NO: 8515 - protein, 248 aa, Zea mays
  unsure (1)..(248): unsure at all Xaa locations
  Clone ID: ZEAMA-23APR03-C785_284.p
MGLRPPPFTATTCSVTPRSSALKFGGPVRASQRSPTMGYAEIAIRPSGSGKRFLETMKAIQGALIMSSSIQIILGYNQLCYFLQKIQRQGGLSRRFSNVSYYGLTTPPYKLDALEPYMSKRTVELHWGKHHQDYMDGLNNQLATSPLYGYTLEDLIKEAYNNDNPLPEYNNTAQXKRNERKLLVVHTRNAISPLAFGDIHAYYLDYKDDKLTYVTNFMDHLVSWHTVTLRMMRAESFVNLGEPNIPEA

SEQ ID NO: 8516 - protein, 325 aa, Zea mays
  Clone ID: ZEAMA-23APR03-C78616_1.p
ARDHYLEPFRFGDLIPYPCAAHLPFPAWSSHSLAPFFPSPDLPIPEITPDTPHPRTPRPHLAMGSAAASPPPSGKLTQEELKRVAAHRAVEFVEPGMTLGLGTGSTAAHALDRLGDLLRAGALPGVAGVPTSLKTEAHAARAGIPLLPLPGARIALSIDGADEVDPDLNLVKGRGGSLLREKMIEGAGARFVVIVDESKLVPRLGCTGAIPVEVIPFGALHTLGLIRGLFDGLPGFHARLRTVPAAPAKGGEDSDSESEQPFVTDNGNYIVEMFFEDGIRGDLRDISDRLLRITGVVEHGMFLGMATTVIVANKDGTVSVMDRKK

SEQ ID NO: 8517 - protein, 293 aa, Zea mays
  unsure (1)..(293): unsure at all Xaa locations
  Clone ID: ZEAMA-23APR03-C78616_2.p
KYPKFPNRVTPASQKPNSRSRSSPQPRAAPSPPPSPWSAPPPXPPPSGKPTQDELKRLAAHRAVELVEPCMTLGLGTGSTAAHALDRLGDLLRAGALPGVSGVPTSLKTEAHAARVGIPLLPLDAASIALSIDGADEVDPDLNLVKGRGGSLLREKMVEGAGARFAVIVDESKLVPRLGCTGAVPVEVVPFGAPHTLGLIRGLFHGLPGFHARLRTTTVPEGEQGSEQQPFVTDNGNYIVEMFFDGGIRGDLRDISDRLLRITGVVEHGMFLGMATVAIVAKKDGTVAVMERK

SEQ ID NO: 8518 - protein, 285 aa, Zea mays
  Clone ID: ZEAMA-23APR03-C78616_3.p
QTAAAVDPRAATPRSKPPLLPPPPLTMGSAAASPQPSGNLTQDELKRVAAHRAVEFVEPGMTLGLGTGSTAAHALDRLGDLLRVGAPGLVADCGCCRYARRHSKVQASLAPATAPHHGQRRRLSIDGADEVDPDLNLVKGRGGSLLREKMIEGAGDRFVVIVDESKLVPRLGCTGAVPVEVIPFGAPHTLGLIRKVFDGVPGFHARLRTVPAANGEDSDAPFLTDNGNYIVEMFFEDGIRGDLLDISDRLLRITGVIEHGMFLGMATTVIVANKDGTVTVINKKK

SEQ ID NO: 8519 - protein, 255 aa, Zea mays
  Clone ID: ZEAMA-23APR03-C7867_2.p
MGSSARARHLFFLAALVAVAAPRSADAWGGGRFFFSKTTRAEATAEPDKKAAGGDTVAAPAFSRPSTAGSGGRGYGLYGRLEEKYPADYFRRGVHRNTEKLTTTTGGERVRTTFPEDSGRGRPYPENGSGRSRPPWYYTAFHRGRQQEQEQRDFGMSDTRLYQNGRYYYDVDAGRYGYGRESNPMRTRPDEGEFGSGYGRPRGPAGGRRGSSYGDAAGYQQRYGNDEEFGDGAMDQNTNGAFQEEAGQNGRRYTP

SEQ ID NO: 8520 - protein, 222 aa, Zea mays
  unsure (1)..(222): unsure at all Xaa locations
  Clone ID: ZEAMA-23APR03-C7869_16.p
MAPLKLYGMPLSPNVVRVATVLNEKGLDFEIVPVDLTTGAHKQPDFLTLNPFGQIPALVDGDEVLFESRAINRYIASKYASEGTDLLPATASAAKLEVWLEVESHHFYPNASPLVFQLLVRPLLGGAPDAAVVEKHAEQLAKVLDVYEAHLARNKYXLAGDKFTLADANHASYLLYLSKTPKAGLVAARPHVKAWWEAIAARPAFQKTVAAIPLPPPPSSSA

SEQ ID NO: 8521 - protein, 118 aa, Zea mays
  Clone ID: ZEAMA-23APR03-C790732_1.p
MMLHCTFAISEAPARALALGQVSVMRAMPQEEEAAVATTTMAGGKVAALLATAAALLLLLPLALPPLPPPPTQLLFVPVVLLLLVASLAFCPAATSSPSPMHAADHGSFGTTGSPHLC

SEQ ID NO: 8522 - protein, 449 aa, Zea mays
  unsure (1)..(449): unsure at all Xaa locations
  Clone ID: ZEAMA-23APR03-C7912_2.p
MDPCPFVRVLVGNLALKMPASAPPAAAAASGSGVHPATPPCYYCRIRLNKLPYQTAPAPLLPATEEGSAPAPAPASCAAAFHASKADLDRAAARPALFLGGRLRTARLKVAVYAGRGGGEGGGRLLGKLVFRFDLRRAVAEPFVFLSGWFDIGKRGAGKPAAANAARAQLNLTVLGEPDPRFVFEFDGEPECSPQVLQVKGSMKQPMFTCKFSCRSNSDLRSRSVQSDSGAVGPRNWLAKLWSERERERAGKERKGWSVTVHDLSGSPVALAXMVTPFVASPGTDRVGRSNPGGWLILRRRVDGTWTPWGRLECWRDRGGSAGDAQLGYRFELVPDHNSNVTGTGVCVAESGVPAARGGRFAIDLTTAGSPGRGSGELSRHALWPPGGFVMSAAVQGEGRRGRPSVEIGVAHVGCAEDAAAFVALAAAVDLSMDACRLFSCKLRRELSA

SEQ ID NO: 8523 - protein, 348 aa, Zea mays
  Clone ID: ZEAMA-23APR03-C7980_2.p
MENGGAKGDVPDDANEHCPGTQSEEAGKADACAGCPNQQICATAPKGPDPDVVAIVERLATVKHKLLVLSGKGGVGKSTFSAQLSFALAEMDHQVGLLDIDICGPSIPKMLGLEGQDIHQSNLGWSPVYVESNLGVMSIGFMLPNPDDAVIWRGPRKNGLIKQFLKDVDWGEIDYLVVDAPPGTSDEHISIVQYLQATGIDGAIIVTTPQQVSLIDVRKEINFCKKVGVPVLGVVENMSGLRQPLSDLRFIKLDEAGKTDATEWALNYIKEKAPELLSVMACSEVFDSSKGGAEKMCHEMGVPFLGKVPMDPQLCKAAEEGRSCFADQKCSASAPALRNIVKKLIKAE

SEQ ID NO: 8524 - protein, 279 aa, Zea mays
  Clone ID: ZEAMA-23APR03-C8029_9.p
MTSPAPTSWFSGLSRSSSTMAGGVASASASASASGPASAFLPDAPKSVIGAGSGGGKRNHLCGALFKYGPKSAQVAFRTGDFNHQVIFIGGLTDGLLATDYLEPLSLALEVEKWSLVQPLLSSSYTGYGISSLQQDALELEQLISYLINKENSEGVILLGHSTGCQDIVHYMRTNFACSKAVSGVILQAPVSDREYRATLPETAEMIDLAAKLISEGRGMDLMPRKANSDAPITAYRYHSLCSYMGDDDMFSSDLSEDQLRQRLGHVNHTVPGYFFNGG

SEQ ID NO: 8525 - protein, 307 aa, Zea mays
  Clone ID: ZEAMA-23APR03-C8085_1.p
PSRRTHPSKTLSQIHKAPPPPPRPPFIFAETLTLVAAATLPGDAMSNPKGSKMLQFINYRMRVTIQDGRQLVGKFMAFDRHMNLVLGDCEEFRRLPPSKSSKTTGEREERRTLGLLLLRGEEVVSMTVEGPPPPDESRAKAAAAGGALAGPGIGRAAGRGVPTGPLLQAAPGLAGPVRGVGGPAPGMMQPQISRPPMPNLSAQPVSYPQVVRPPQGMPPPMRPGMPPQMPMQFRPPGAPPAPFPGAPPQQYMRGPPPMGPPQVRPGMPGPPPPGMRPGMPPPPFGQPRPGMPPPPPGPQQPGQNPPQ

SEQ ID NO: 8526 - protein, 491 aa, Zea mays
  Clone ID: ZEAMA-23APR03-C809_25.p
MDPYKHRPSSAFNPPYWTTNSGAPVWNNDSSLTVGARGPILLEDYHCEKLANFDRERIPERVVHARGASAKGFFEVTHDITHLTCADFLRAPGVQTPVIVRFSTVIHERGSPETLRDPRGFAVNFYTREGNWDLVGNNFPVFFIRDGIKFPDMVHALKPNPRTHIQDNWRILDFFSHHPESLHMFSFLFDDVGIPADYRHMDGSGVHTYTLVSRAGTVTYVKFHWRPTCGVRSLMDDEAVRCGANHSHATKDLTDAIAAGNFPEWTLYIQTMDPEMEDRLDDLDPLDVTKTWPEDRFPLQPVGRLVLNRNIDNFFAENEQLAFCPGLIVPGIYYSDDKLLQTRIFSYSDTQRHRLGPNYLLLPANAPKCAHHNNHYDGSMNFMHRHEEVDYFPSRYDAVRNAPRYPIPTAHIAGRREKTVISKENNFKQPGERYRAMDPARQERFITRWVDALSDPRLTHEIRTIWLSNWSQADRSLGQKLASRLSAKPSM

SEQ ID NO: 8527 - protein, 120 aa, Zea mays
  Clone ID: ZEAMA-23APR03-C8103_21.p
MASRSSIVLATAMLATLFAVGLCTTPLTFQVGKGSKPGHLILTPNVATISDVEIKEHGGDDFSFTLKEGPTGTWTLDTKAPLKYPLCIRFAVKSGGYRIADDVIPADFKAGTTYKTTLSI

SEQ ID NO: 8528 - protein, 242 aa, Zea mays
  unsure (1)..(242): unsure at all Xaa locations
  Clone ID: ZEAMA-23APR03-C8103_30.p
MAEPKASKSRSKSKSKSSHDGAASNKSKAAPAPAGTLDAHFTPCADVKGLRFGAQLVTRALTVRRASPLELPHLLRAAPSPSSAAPAAADPLSFAPTTTAYIPTSFAILAHHAWHTLTLGLGTRNSKAAVFVFESATMKAAADAAWPGVVPLGDVGRRXLRAAPGAPEMARFKFRKGCLTFYVYAVRAAGARGFARADELRAVVEAVARLKDFLDHTAMLALPGQRSIDVAAAAAAQVGVVH

SEQ ID NO: 8529 - protein, 264 aa, Zea mays
  Clone ID: ZEAMA-23APR03-C813_4.p
MASVAEMQPLAPAGYRRAPEMKEKVEASVVDLEAGTGETLYPGISRGESALRWGFVRKVYGILAAQLLLTTAVSALTVLHPTLNATLSDSPGLALVLAVLPFILMIPLYHYQHKHPHNFVFLGLFTLCLSFSIGVACANTQGKIVLEALVLTAGVVVSLTAYAFWASKKGKEFGYLGPILSSALTILVLTSFLQVFFPLGPVSVGLFGGLGALVFSGFILYDTENLIRRHTYDEYIWASVGLYLDILNLFLSILNMLRSMQSDN

SEQ ID NO: 8530 - protein, 263 aa, Zea mays
  unsure (1)..(263): unsure at all Xaa locations
  Clone ID: ZEAMA-23APR03-C81597_1.p
MFPVEVSALAAGGAGAGRQAAGDAAGTMLPPFFMGSIWPATAGAAGSEEDEAAAAAAAHDRALAASRTQREADTRRRERITSHLDRLRNVLACDPEREIASLLATALEKVRDLXQRAAGVGEAAPAHIFPKEHDEIVVLASGSRAVFEASVCCDYRSDLLPDLIETLRALRLRTLRSEMATLGGRVRNVLVLARDVVDGGGGAVAGGDDGYGGRAADSAGGATDGGGGDFLKEALRALVERPGAAGDRPKRRRVSDMNMQAAA

SEQ ID NO: 8531 - protein, 343 aa, Zea mays
  Clone ID: ZEAMA-23APR03-C819_6.p
MAVASTSPLSAKPATAPSPPAPGSGLLALGVRRAPATAAWRRLRVEAIRTQREKQRAEVPVEESAPARDAAAPLAGNGAGAGADGSVVPSSDDSWVVKLEQSFNIFATDSVIMVLKGVYGDRYYARFFALETIARVPYFAFISVLHLYATFGWWRRADYIKVHFAQSWNEFHHLLIMEELGGDSLWFDCFLARFMAFFYYFMTVAMYMLSPRMAYHFSECVERHAYSTYDEFLKLHEEELKRLPAPEAALNYYMNEDLYLFDEFQASRTPGSRRPKIDNLYDVFVNIREDEAEHCKTMKTCQTHGNLRSPHSTPNCLEDDTECVIPENDCEGIVDCVKKSLTK

SEQ ID NO: 8532 - protein, 257 aa, Zea mays
  unsure (1)..(257): unsure at all Xaa locations
  Clone ID: ZEAMA-23APR03-C8210_2.p
MATNTKLVALGLAVLVSVGFSDAARVVRLGSYASAGGGGGGGGGGSGSTGAAGYGGGSGGGGGYGIGKGGGDWWNNFVSSVAGGGGGGQGGGGGTNGGSGSGGGSGYGSGTSSTAASGPSSGNYANAEGKGAGGGMGGGADGAYGSGAGGGVGKGQGESGVALAPSSDGYYNGGAADATGGGSGAGGGHGGGAGAPSYGTGGGLGGGKGXRRQRRSWGSGYAAGIGAGTGGGGGGGFQGASGGGGGSGSGSGSGGIH

SEQ ID NO: 8533 - protein, 584 aa, Zea mays
  unsure (1)..(584): unsure at all Xaa locations
  Clone ID: ZEAMA-23APR03-C8219_1.p
MALTNVFVVLLSTALAVLPFSPADAGVVGVSYGRLGNDLPGTASVVKLLKKSGITSVRLYDANSKVLKALANTGITVMVMLPNDKLAAAAADPSSARRWVRRNVAAYYPATHIHAVAVGNEVFEEAKNLTGQLVPAMSNVHDALVKLGLDGAVKVSTPIAFTALQESWPPSAGRFRDDIARSVMKPMIDFLERTGSYLTVNAYPFFAYAEEPDKISLDYALGNSNATGVRDPVTGLVYHSLLDAQLDATYFAMEKLGTSRSSARGPKSVAPAAHVSESGWPSGGKPKRGGRPRPRPRGGGRRLELEQAGGEAASVANAQAYNNYLIKRVLSGDTGTPYHPDADMDVYIFSLFNENQKGDGADDVEQHFGLFYPNRTKVYEFDFRGGALVASWCVANASAGDARLQAALEYACGHGADCGAIQPGAPCFEPDTRLAHASYAFNSYYQRNGRGQGXCDFDGAAYVVYHEPAGTCDPNVSWCVANAAAGDARLLAALNYACANGADCGAIQPGGACFEPNTVVAHASYAFNSYYQRKGRGSGTCDFAGAGSVVYHAPKIIGKCVLPSKAWIQETTTVKSRGFKTSSV

SEQ ID NO: 8534 - protein, 469 aa, Zea mays
  Clone ID: ZEAMA-23APR03-C8249_3.p
MPREIITIQVGQCGNQIGMEFWKQLCLEHGIGKDGLLEDFATQGGDRKDVFFYQADDQHFIPRSLLIDLEPRVINGIQNSEYRNLYNHENIFVAEHGGGAGNNWASGYHQGEQFVDDIMDMVDREADGSDSLEGFVLCHSIAGGTGSGMGSYLLETLNDRYSKKLVQTYSVFPNQVETSDVVVQPYNSLLTLKRLTLNADCVVVLDNTALNRIAVERLHLSNPTFAQTNSLVSTVMSASTTTLRYPGYMNNDLVGLLASLIPTPRCHFLMTGYTPLTVERQVNMIRKTTVLDVMRRLLQTKNIMVSSYARTKEASQAKYISILNIIQGEVDPTQVHESLQRIRERKLVNFIYWAPASIQVALSRKSPYVQTTHRVSGLMLANHTSIRHLFSKCLGQYEKLRKKQAFLDNYRKFPMFADNDLSEFDESREIIESLVDEYKACESPDYIKWGMEDPGEANVVAALDSKLVV

SEQ ID NO: 8535 - protein, 130 aa, Zea mays
  Clone ID: ZEAMA-23APR03-C825_3.p
EMAPGKRGKAKGAAPPPPTAAASTGAVGFPGCLRLMPPSTVAISIHAKPGSKVATITEIGDEAVGVQIDAPARDGEANAALVDFISSVLGVKKREVSIGSGSKSREKVVLVQDATLEGVYDALKKSCNCA

SEQ ID NO: 8536 - protein, 416 aa, Zea mays
  Clone ID: ZEAMA-23APR03-C8280_1.p
MAAAARPASAHLLLLAPLPSPPRLSHLIHTRRLYALAPARRPAAVRARREPSPPSAPSPSAPADSFDCVGTGSDVECFVDAGAEDAAPLLPALSAGASKDDRKSEGDAAVSASPAGRELWEWASLVSPFFFWGTAMVAMKGVIPRTGPFFVAAIRLLPAGALLVAFAAARGRKQPSGWEAWLAIAAFGLIDAACFQGFLAEGLQKTSAGLGSVIIDSQPLTVAILASLLFGESIGAIGVGGLVLGVVGLLLLEVPALSVEGNDTTIWGSGESLMFLSAQSMAVGTIMVRWVSKYSDPIMATGWHMIIGGLPLLVISVLNHDPALSGHIQDLTWSDILALGYTSIFGSAVSYGVYFYNATRGSLTTLSSLTFLTPMFASVFGYLYLGETFSPVQIGGALLTLVAIYMVNYKSIIGEK

SEQ ID NO: 8537 - protein, 210 aa, Zea mays
  Clone ID: ZEAMA-23APR03-C8292_2.p
MAAITAGLLVLLAAAVAAPAHATDYTVGDSSGWSSGVDYATWASGKTFAAGDNLVFQYSAMHTVAEVSSADYSACSASNSIQSYSDQNTKVALTAPGTRYFICGAPGHCGNGMKLTVTVAAAAATTTPETSTSTPAATTTPTTTNADTPNADTPPETSTSTPAATTPPTTTKSTSTSSTSSTGAACGGEARLGMGILAAAAGLAGLALMG

SEQ ID NO: 8538 - protein, 308 aa, Zea mays
  Clone ID: ZEAMA-23APR03-C8296_1.p
MAPSRPLMRGIRPPRVFPTRGGRASPYAVALTALLLVSAALLALIAFGVFSLPVSAPNAAATTTAGGETESADTRPARPRARRDLGEGLGERGAQWTEVISWEPRAFVYHNFLSKEECEYLIGLAKPHMVKSTVVDSTTGKSKDSRVRTSSGMFLQRGRDKVIRVIEKRIADYTFIPVDHGEGLQVLHYEVGQKYEPHFDYFLDEFNTKNGGQRMATLLMYLSDVEEGGETIFPDANVNVSSLPWYNELSECAKRGLSVKPKMGDALLFWSMKPDATLDPLSLHGGCPVIRGNKWSSTKWMHIHEYKA

SEQ ID NO: 8539 - protein, 161 aa, Zea mays
  Clone ID: ZEAMA-23APR03-C833_22.p
MVLKTELCRFSGQKIYPGKGIRFIRADSQVFLFANSKCKRYFHNCLKPAKLTWTAMYRKQHKKDIHAEAVKKRRRATKKPYSRSIVGASLEVIQKKRAEKPEVRDAAREAALREIKERIKKTKDEKKAKKAEVSKSQKTQTKGAVQKGSKGPKLGGGGGKR

SEQ ID NO: 8540 - protein, 373 aa, Zea mays
  Clone ID: ZEAMA-23APR03-C833_45.p
MRGAVEVHTIRRDVATPSPLRLRDPPALDMMRYQRLSPDCLPLGNGGGGGGGAVPRKQASRSSYIREDDAPAVATDGSRLASYLAASSHEPKPLRARAPQPAPLSSVAGRSPARDHAHHHHTSDSSDTASPSSTGGGGGAVVGDVLLQWGHKKRSSCRRDSATAAAPSAQRRQSAVGGGVKIQRRASAPAHAEKLMPPPPPAATRGSNLRSASSFPSRASASTAATGSHHPPHHHRTVEDRSGGQKRSSPDKTHRSTMDGVYHHHHHQESPLTGNGVATAGEKLGVERFELPLIYISLSRKEKEDDFLAMKGTKLPQRPKKRAKNVDKTLQFVFPGMWLSDLTRGRYEVREKKCVKKKRRGLKGMESMDSDSE

SEQ ID NO: 8541 - protein, 218 aa, Zea mays
  unsure (1)..(218): unsure at all Xaa locations
  Clone ID: ZEAMA-23APR03-C833_47.p
MVLKTELCRFXXKIYPGKGIRFIRADSQVFLFANSKCKRYFHNRLKPAKLTWTAMYRXXHKKDIHAEAVKKRXRANKKPYSXSIVGASLEVIQKKRAEKPEVRDAAREAALREIKERIKKTKDEKKAKKAEVTKSQKAQTKGAVPEGFQGPQVGWWRWQALKEPKCRSLTLQLLLHSPPCCTNATFVVPRLILHFLSELFVGFEFHLKRVEFIYLYIG

SEQ ID NO: 8542 - protein, 528 aa, Zea mays
  unsure (1)..(528): unsure at all Xaa locations
  Clone ID: ZEAMA-23APR03-C8343_1.p
RRERQLGSAQAPRPRRHRVAAAARAPCCVAAARHVTSAAAWLCGLLSLLALAGAASAADGAEGEWEPLIRRLLSKGSDAASAPAAEDDEVGTRWAVLVXAGSFGYGNYRHQADVCHAYQILQKGGVKKENIVVFMYDDIAHNILNPRPGVIINHPKGANVYDGVPKDYTGDQVTTENFFAVLLGNRSATTGGSKKVIDSKPNDHIFIYYSDHGGPGVLGMPNLPYLYAGDFIKVLKKKHASNSYSKMVIYVEACESGSIFEGLMPEDLNIYVTTASNPVENSWGTYCPGMEPSPPPEYITCLGDLYSVSWMEDSETHNLKKETIKDQYEVVKTRTSNSNKYKEGSHVMEYGDKTFKDEKLSFYQGFDPANANIANMLLWPGPKGAVNQRDADLLFMWKRYEQLNGGTEEKLRALIEIKETVQHRKHLDSSIDFVGRLVFGFEKGPSMLEAVRTSGQPLVDDWDCLKRMVRIFESQCGSLTQYGMKYMRAFANICNSGISEMKMRESSISACSSYNSARWSPMARGHSA

SEQ ID NO: 8543 - protein, 273 aa, Zea mays
  unsure (1)..(273): unsure at all Xaa locations
  Clone ID: ZEAMA-23APR03-C8351_2.p
MFLRSKIQEMILRRRSRSMNSAGAQRGHVPDQAPSSSTVPCDDDSAGAGGSRSAGARALFASPRXLLHSSSLPAGAGAGVVAFARSPAAEPEPETASSLSPTSVLDAAAAFVPRTGGAAGKRRQRRPWRARDNNGGLADVLDCTDDQQQERIVLAATSSSRSLLRSCSLDRRVEFGVKNKSSWLPLRGRGEPAAPAPADPREIGPSSEDYTCVISRGPNPRTVHIFGDRVVEGGAAPEQETETETESSPRPISLPTRTDPRPRTRSLMSDDAA

SEQ ID NO: 8544 - protein, 363 aa, Zea mays
  Clone ID: ZEAMA-23APR03-C8352_4.p
MAAVDLTPRTPKKAYGGDGGAYYEWSPADLPMLSVASIGAAKLSLAAGGLSLPSYSDSAKVAYVLQGAGTCGLVLPEATKEKVVAVKEGDALALPFGAVTWWHNGPAAQADLTVLFLGDTSKGHKRGQFTNFQLTGSAGIFTGLSTEFVSRAWDLPEPDAARLVSSQPASGIVKLPASAAALPAPSPQDRAGVALNCLEAPLDVDIPGGGRVVVLNTANLPLVREVGLGADLVRIDAHSMCSPGFSCDSAYQVTYIVRGSGRVQVVGPDGRRVLETRIEGGSLFIVPRFHVVSKIADASGMEWFSIITTPNPVFSHLAGKTSVWKAISPEVLQASFNTTPEMEKLFRSKRLDSEIFFAPPSSN

SEQ ID NO: 8545 - protein, 259 aa, Zea mays
  unsure (1)..(259): unsure at all Xaa locations
  Clone ID: ZEAMA-23APR03-C835_3.p
MAAAAAWTGAASPNSLLLSRSPPHAAVLAPSPGSSMRRRLLLGVGTPAVAALAAAAPPAVLQDGAVTVLITXGAYSLVRVFDXLTERRLIEKSLSRKVVHVLSGVXFMSSWPLFRELLRGPLYYVLVLLFSVLVFWRESPIGIVSLSMMSGGDGFADIVGRRYGSAKLPFNRKKSWAGSISMFISGFLLSAMMMLYFSSLGYIDVIWEEALGKLALVALAATVVECVPVTEVVDDNISVPLATMLVAFLLFSSNRTIVN

SEQ ID NO: 8546 - protein, 327 aa, Zea mays
  Clone ID: ZEAMA-23APR03-C83909_1.p
MLAWKEKVADRLARLLADSPVSPSPAQAAVEPSQAKSFPPEHFTPPKTSSLSSYVFSLLPTSNTGHEQNSPCSETLRPLPPESLPKKWRWSDVTWKDPPVELSEESGSESDRDERNGNFGNDPVLQSYRPINNSNGNEETSTSDCVGTLRYLTEKSMFVSPKLFAFFQSSLPGTLKGCHWVLLYSTWKHGISLRTLLRRSENIQGPCLLIVGDMQGAVFGGLLNSPLRPTEKRKYQGTNQTFVFTTIHGEPRLFRPTGANRFYYLCLNNALAFGGGGSFALCVDEDLLHGSSGSCETFGNSCLAYSPEFELKNVELWGFTHSWSRST

SEQ ID NO: 8547 - protein, 333 aa, Zea mays
  Clone ID: ZEAMA-23APR03-C8411_3.p
KLRKFLHLSTDRVLDLILSTSTTLTSWHLLVTFCSLHVALWMKFFEHKPFDSRTVMGFGVLNGISIGLLNLSLGFNSVGFYQMTKLAIIPCTVILETLFFRKKFSRSIQMSLSVLLLGVGVATVTDLQLNAVGSILSLLAIITTCIAQIMTNTIQKKFKVSSTQLLYQSCPYQSLTLFLIGPFLDGFLTNQNVFAFNYTSQVVFFIVLSCLISVSVNFSTFLVIGKTSPVTYQVLGHLKTCLVLAFGYVLLHDPFSWRNILGILIAVVGMVLYSYFCTVETQQKNVEVSPQQVKESEAGPLIADSMSKVENGGGGVDDEPLKVPMWSSKYSRE

SEQ ID NO: 8548 - protein, 153 aa, Zea mays
  Clone ID: ZEAMA-23APR03-C844_1.p
MATATASVAPPSTSTSSVLLHRRLPSPAPGAFPRLSGPAPPPRRARLLLRVALTNEVASDDVAAEEAAAAPKIGRRVRVTAPLRVYHVLKAPDLDIQGMEGVVKQYVCVWKGKRVTANFPFKVEFELAVEGQPKPVRFFAHLREDEFEFVDGE

SEQ ID NO: 8549 - protein, 371 aa, Zea mays
  Clone ID: ZEAMA-23APR03-C8455_2.p
MSDVTSDSAQSRRSPPPPSPSPSMPRFQQQPSGRQPPQPGADSFVFGVFAFIAICFVLISLSVPSSVLHQVPEGHVGVYWRGGALLKTITPPGFHLKLPLITQYEPIQVTLQTDQVRDIPCGTKGGVMISFDKIEVVNRLRKEFVHETLLNYGVHYDKTWIYDKIHHEINQFCSAHSLQQVYIDMFDQIDETMKEAIQRDCTRYAPGIEIISVRVTKPNIPGSIRRNFELMEEERTKALIAIEKQKVAEKEAETQKKIALSEAEKNAQVSKILMEQKLMEKDSSKRQEKIDNEMYLAREKALADANYYRILKEAEANRLKLTPEYLELRFIESIANNSKIFFGEKIPNMIMDQRLLKNYLDAVPRKDHYEM

SEQ ID NO: 8550 - protein, 191 aa, Zea mays
  Clone ID: ZEAMA-23APR03-C8464_5.p
MRPPRGRGGGGRFGGGGGRGGGGGRFGGGGRGGRFGGGFRDEGPPAEVVEVSTFVHACEGDAVTKLTNEKVPYFNAPIYLQNKTQVGKVDEIFGPINESYFSVKMMEGIIATSYKEGDKFYIDPMKLLPLSRFLPQPKGQSQGAPRGGGRGGRGGGRGRGGSFRGGRGPPRGGGRGPRGGSRGGFRGRGRF

SEQ ID NO: 8551 - protein, 144 aa, Zea mays
  Clone ID: ZEAMA-23APR03-C8515_15.p
SILLPVLSPQTFKRRNGGRNKHGRGHVKYIRCSNCAKCCPKDKAIKRFQVRNIVEQAAIRDVQEACVYDGYVLPKLYAKVHHCVSCAIHAHIVRVRSREKRRDRKPPERFRRREDRPAGGQGGPRPGPGAAATAPSPAPVAARP

SEQ ID NO: 8552 - protein, 109 aa, Zea mays
  unsure (1)..(109): unsure at all Xaa locations
  Clone ID: ZEAMA-23APR03-C8515_19.p
MTFKRRNGGRNKHGRGHVKYIRCSNCAKCCPKXDKAIKRFQVRNIVEQAAIRDVQEACVYDGYVLPKLXYAKVHHCVSCAIHAHIVRVRSREKRRAPQAARSGFRRRGG

SEQ ID NO: 8553 - protein, 251 aa, Zea mays
  unsure (1)..(251): unsure at all Xaa locations
  Clone ID: ZEAMA-23APR03-C8652_10.p
MARYDRXAITVFSPXGHLFQVEYALEAVRKGNTAVXXRXTDTVVLGVEKKSTPKLQDSRSVRKIACLDTHIALACAGLKADARXLINRARVXEXQSHRLAVEDPVTVEYITRYIAGLQQKYTQSGGVRPFSLSTLIVGFDPYTDKPALYQTDPSGTFSAWKANATGRNSNSMREFLEKNYKETSGKETIKLAIRALLEVVESGGKNIEVAVMTKKDGLRELEEAEIDEYVAEIEAEKAAAEAAKKGGPRDT

SEQ ID NO: 8554 - protein, 156 aa, Zea mays
  unsure (1)..(156): unsure at all Xaa locations
  Clone ID: ZEAMA-23APR03-C8736_2.p
MAKLAVLLLLAVAASATVPAHGRDTPTEIKAGTDANVTLELAAADGNGVGISNLPAWGGLMGQGYSYFERSNLDIFSGRGPCMAKAPCXMRLATDGTGDHHGWYCNYVEVTTTGPHKGCGQQLFTVEQWLATDAPPFKLEAVRDYCSGDAKGASAA

SEQ ID NO: 8555 - protein, 377 aa, Zea mays
  Clone ID: ZEAMA-23APR03-C873_34.p
MADSEDIQPLVCDNGTGMVKAGFAGDDAPRAVFPSIVGRPRHTGVMVGMGQKDAYVGDEAQSKRGILTLKYPIEHGIVSNWDDMEKIWHHTFYNELRVAPEEHPVLLTEAPLNPKANREKMTQIMFETFSVPAMYVAREAVLSLYASGRTTGIVLDSGDGVSHTVPIYEGYALPHAILRLDLAGRDLTDSLMKILTERGYSFTTTAEREIVRDIKEKLAYVALDYEQELETAKSSSSVEKSYELPDGQVITIGAERFRCPEVLFQPSFIGMEAPGIHETTYNSIMKCDVDIRKDLYGNIVLSGGSTMFPGIADRMSKEITALAPSSMKIKVVAPPERKYSVWIGGSILASLSTFQQMWISRAEYEESGPAIVHRKCF

SEQ ID NO: 8556 - protein, 174 aa, Zea mays
  Clone ID: ZEAMA-23APR03-C88056_1.p
SRGSGDTLVPAVLQCSRPGRRWTLRPGEAGVQQPAGAASTSTAAVPFDRSSSRLGAPGAESFDGALRELKDLRSQLHEAADCCAKAFLSTDKKKMILEGTKGYICDAVVAVIDHLGTVSSKLEHKLQERTEVAQTERKINFLKQVIFGPELHSSLSLRFYQEISIDICMRQGGF

SEQ ID NO: 8557 - protein, 126 aa, Zea mays
  unsure (1)..(126): unsure at all Xaa locations
  Clone ID: ZEAMA-23APR03-C8843_6.p
MRGGGGMIDDEERVGHAEIPTSFGPELRACLRCRLVKTYDQEPFSXWRRSPPPSSRLGLRSRFTSLPLKGGFEDWGFRFSWCGPFIPGCYTLAVSEELQEEYQGSQDNNMXYVPPKRCLELLKQYE

SEQ ID NO: 8558 - protein, 625 aa, Zea mays
  Clone ID: ZEAMA-23APR03-C8866_1.p
MGQCYGKARGASSRADHDADPSGAGSVAPPSPLPANGAPLPATPRRHKSGSTTPVHHHQAATPGAAAWPSPYPAGGASPLPAGVSPSPARSTPRRFFKRPFPPPSPAKHIKATLAKRLGGGKPKEGTIPEEGGAGAGAGAGAGAGAAVGAADSAEADRPLDKTFGFAKNFGAKYDLGKEVGRGHFGHTCSAVVKKGEHKGHTVAVKIISKAKMTTAISIEDVRREVKILKALSGHDNLVRFYDACEDALNVYIVMELCEGGELLDRILARGGRYTEEDAKAIIVQILSVVAFCHLQGVVHRDLKPENFLFTTRDESAPMKLIDFGLSDFIRPDERLNDIVGSAYYVAPEVLHRSYSMEADIWSIGVITYILLCGSRPFWARTESGIFRSVLRADPNFDDSPWPSVSAEAKDFVKRFLNKDYRKRMTAVQALTHPWLRDEQRQIPLDILIFRLVKQYLRATPLKRLALKALSKALSEDELLYLRLQFKLLEPRDGFVSLDNFRTALTRYSTDAMRESRVLEFQHALEPLAYRKMDFEEFCAAAISPYQLEALERWEEIAGTAFQHFEQEGNRVISVEELAQELNLAPTHYSIVQDWIRKSDGKLNFLGFTKFLHGVTIRGSNTRRH

SEQ ID NO: 8559 - protein, 161 aa, Zea mays
  Clone ID: ZEAMA-23APR03-C8918_1.p
ISANISMSSVSNSIAVGLPSYGLYLETRFLTQTYRNFAQKSSYKYSRIRAVQGNGGRRRLVDIIRIIPELSRDYFKSRSRRALFGGISLLGGFYVAQTISLSFGTLGVNDVIAAVVCVLLTEYVTKFYYSRPKVTFPIALLNNFKMGFTYGLFIDAFKLAS

SEQ ID NO: 8560 - protein, 451 aa, Zea mays
  Clone ID: ZEAMA-23APR03-C892_2.p
MASGRESFSHLLPAQSPATRPPVLSSSARAKSSAPHPEAPCSAPEIPPMAGVRSLRSSDRTPWPSRLPFPHAQEFTSVRSARSLPPSSAAHLHGQSSFISLLSASSPCSRSAPPMAGIPFLPSSHGGAHPLLPPVLPTTPTAGLCARALLPCRAPRPAVVEVGPEVAKYGVGDVVGVGVIVGCCRECSPCKANVEQYCNKKIWSYNDVYTDGRPTQGGFASTMVVDQKFVVKIPAGLAPEQAAPLLCAGVTVYSPLKHFGLTTPGLRGGILGLGGVGHMGVKVAKAMGHHVTVISSSSKKRAEAMDHLGADAYLVSSDAAAMAAAADSLDYIIDTVPVHHPLEPYLALLKLDGKLVLLGVIGEPLSFVSPMVMLGRKAITGSFIGSIDETAEVLQFCVDKGLTSQIEVVKMGYVNEALERLERNDVRYRFVVDVAGSNVEAEAAAADAASN

SEQ ID NO: 8561 - protein, 331 aa, Zea mays
  Clone ID: ZEAMA-23APR03-C8931_1.p
MNAVAEEDRAAELAGPLRDLLPPVDFCCAYGSTLLHARPDGTSMVDYIIGVADPLQWHSENLERNPAHYSRWMAGFGAGAITGLADHVGVGVYFNPFVEWRDKRIKYGVVRMRDLAMDVLTWDRFYLSGRLQKPVHVLVDNWDIRKVNSINLEMATSASLLLLPAEFTEYDLYAQICSLSYMGDLRMLFAEDKDKVKKIVEGSFQSFQLMYSPLLQEYIAEGLLKTSSHGQYKTFRQDCGPSTTNELFSVLPWTIQSQMQGRHTLHGKEVPPRTVVSSKEMAANCVRRALRHRVMVSSVRQAVCGLLASGGAVAAQYLGKKMAKAWRSRVA

SEQ ID NO: 8562 - protein, 129 aa, Zea mays
  Clone ID: ZEAMA-23APR03-C8966_11.p
VHTRFWKSIGLGFKTPSEAIEGTYIDKKCPFTGTVSIRGRIIAGTCHSAKMNRTIIVRRNYLHFVKKYQRYEKRHSNIPAHISPCFRVKEGDHVIIGQCRPLSKTVRFNVVKVIPAGSAAAGKKAFTAA

SEQ ID NO: 8563 - protein, 159 aa, Zea mays
  unsure (1)..(159): unsure at all Xaa locations
  Clone ID: ZEAMA-23APR03-C8966_12.p
MXAWTVKAXXXQXKVFLSXKKXXKGKKTXKGXNRXXXSIGLXFKTPREAIEGTYIDKKCPFTGTVSIRGRIIAGTCHSAKMNRTIIVRRNYLHFVKKYQRYEKRHSNIPAHISPCFRVKEGDHVIIGQCRPLSKTVRFNVVKVIPAGSAAAGKKAFTAA

SEQ ID NO: 8564 - protein, 473 aa, Zea mays
  Clone ID: ZEAMA-23APR03-C8981_1.p
MDHKPCAAVLEPLLPSPAEGKAAEAKRLMRLAGPIVASCVLQNVVSMASIIFVGHLGELHLAGASLATSLANVTGYSLLTGMASALDTLCGQAFGARQHHLLGVYKQRAMVVLGLACVPIAVVWACAGRILLLLGQDPQIAAEAGAYARWLVPSLAAYVPLQCHVRFLQTQSVVLPVAASCGATALCHVLVCWALVYKAGMGSKGAALSNGVSYAVNLVVLALYVRLSGACRETWKGFSREAFKDLWRFAELAWPSAMMICLEWWSFEVLVLLSGLLPNPQLETSVLSICLNTGALLYMIPLGLTYSISTRVSNELGAGQPQAAKMAAKVVMYMALSEGLVISLTMTLLRNIWGYVYSDEEEIVTYISKMLPILGISFFIDGLHSSLSGVLTGCGKQKIGAAVNLGAFYLLGIPVAVLLAFVFHLNGMGLWLGIVCGSATKLGFLLFVTCSVDWDKEAVKARYRVLGSSLPLA

SEQ ID NO: 8565 - protein, 278 aa, Zea mays
  Clone ID: ZEAMA-23APR03-C8987_2.p
MIGSFITGMLTLVLGYAYPAYDCYKTVELNRPEVEQLRFWCQYWILLAFLTVLERVGETFVSWLPMYSEAKLAFIVYLWYPKTRGTAYVYESFFKPYIAKHETEIDRNLLELRTRAGDMAVLYFQRVTNYAQTRSYEILQYIASQSPTQRQAHQQQQRPPPPRTRQVNPAPPPIPAPSAPPMPPQPAQAQVPPTPPRPLVPVVPPGAVPPAPPPTAPEATATNGLQDTETMQVDPPRASLSGPPPPLPPEETLIEEAIRLTRGRLRRRLAGGSGPPQN

SEQ ID NO: 8566 - protein, 186 aa, Zea mays
  Clone ID: ZEAMA-23APR03-C8987_4.p
SFTPGLWSQYKAYEDAVVENIKGTIADALVLVREHQAEAIGCATVAGFILFRGPRRFLYRNTFGRLKTEKDLLNDAEQSMMEYQTSIQNLKKESKYTLDKVAIGESDVQRGRTDLRSTGKQIQSLIGSIYKAESTAAGLMDRLRTIPTRQSLELRAEVASMASDLKNQRCALQERINKISEYGVRV

SEQ ID NO: 8567 - protein, 255 aa, Zea mays
  Clone ID: ZEAMA-23APR03-C9031_2.p
MQAIISSKEATAASMAKCIATMLAVAAMLTSVQPSVAASNPADADALRFPGRPGSRPRNPVFPGYPRPRPSPPVSSGSSSPVVPSPMPGLPSSSGPVSPAPCARPGAVVPQLPGFPGLPAGSVGGGSTPSSPTDCVTPLAGLMTCGTFLTGSEPETPTPQSECCAGLGAFLNSSSSAAEGDDRILRCLCPVILGDVNKMLPKPVDPVRMMYLPIACGVVLPPQVLYICFTGQQTAPLVGRIPDVWEKPTSAALSP

SEQ ID NO: 8568 - protein, 339 aa, Zea mays
  unsure (1)..(339): unsure at all Xaa locations
  Clone ID: ZEAMA-23APR03-C9083_1.p
VTNGTNSPGAGDWAKAPQKGVRNQRVTRDGTALGGALVLADRGIWLIEELDEMNNQDRVGIHEEMEKQSIKISKAGIVTSLQARCSDIAAANPVGGRYDSSKTFTQNNVELTDPIISRFDVLCVVKDVVDPFTDEMLARFVVDSHARSQPKGANLEDRVSTDVDDDPLAAARQADPDVLSQDMLKKYITYAKLNVFPKIHEVDLDKISMQGALRXYVSQEDVDMAIRVLLDSFISTQKFGVQKALQKNFRKYMTFKKDYNELLLLLLRTLVKDAVHFEEIMAGSASRLTHVEVKLEDLRNKAQEYEIYDLKPFFSSACFRDNGFLLDEGRGIIRHPLAE

SEQ ID NO: 8569 - protein, 489 aa, Zea mays
  Clone ID: ZEAMA-23APR03-C9094_1.p
MPAMVEEGLVRRAAPEPHFLVVTFPAQGHINPARHLARRLLRATGARVTVCTAVSALRKMFPGAEADAEEEGHRDGAGVRYVPYSDGYDDGFDGAVHDATRYMDQVKVVGSRTLGDVLARLRGAGRPATLVVYTLLLSWVADVARDHAVPAALYWIQPATVLAVYLHFFRATGGVDAAVAAAGGDPWAGVRFPGLPPLRVRDLPSFIVSTSEDDPYAFVADAFRELVGRLDVGEDSPSVLANTFDAVEPEAVASLREHGVDVVPVGPVLSFLDDDAAAGGNNDLFTQDGKGYLEWLDAQAPGSVVYISFGSLSVMRRRQIEEVARGMSESGRPFLWVLREDNRRSEGADADAATLAGGGRGMVVGWCDQVRVLSHPAVGCFVTHCGWNSTLESTACGVPVVCVPQWTDQGTNAWLVERIGTGVRAAVSDKDGVLEAGELRRCIDLATSDMVRAKAAVWREKARAAASKGGSSERNLKAFVAKQIAGGNN

SEQ ID NO: 8570 - protein, 387 aa, Zea mays
  unsure (1)..(387): unsure at all Xaa locations
  Clone ID: ZEAMA-23APR03-C9178_1.p
MGIKGLTKLLAQHAPTAAVQRRVEDYRGRVIAVDASVSIYQFLAVVGRKGSELLTNEAGEITSHLQGMLNRTIRMLEAGIKPVFVFDGEPPEMKKKELAKRSLKRDDAIKDLNRAMEIGDENAIEKFSKRTVKVTGRHNDDCKRLLRLMGVPVVEAPGEAEAQCAALCENHQVYAVASEYMDTLTFGARRFLRHLTDLGYKKSPVTEFDVSKVLEELGLTMDQFIDLCILSGCDYCENIRGIGGQRALKLIRQHGCIEEVLQNLNQTRXPDFTWTSPDPEGLMDFLSTENSFSPDRVTKAVEKIKVARDRYSPGRMKHLTPVASLRGSHTEKEPQCILGSPGQTLKVMSSPQVCKSPSSGFRYGSSKPFMLGRQSGFHGMPYALSFI

SEQ ID NO: 8571 - protein, 368 aa, Zea mays
  unsure (1)..(368): unsure at all Xaa locations
  Clone ID: ZEAMA-23APR03-C9225_2.p
MCSEVHVEGDASVGQKGCKDIRRYKCEFCTVVRSKKCLIQAHMVAHHKDELDKSEIYNSDGEKIVHEQEHRCQECGRCFQKPAHLKQHMQSHSHEGIDTSTRLPQSRSLSXRLFICPLEDCPFSYKRKDHLNRHMLKHEGKLFSCTLDGCDMRFSMKADMQRHVKEIHDSKNPHQFVCKEDGCNKVFRYSSKLKKHEESHVKLDYVEVVCCEPGCMKMFRNVEYLRAHNQSCHQYVQCEICGEKHLKKNIKRHLQSHDKVPSDGRMKCTFDGCEHFFSNKSNLTKHVKACHDQLKPFKCGIVGCGKAFTYKHVRDNHETSGGRKRKALTVETLTRKRVTISGEASSLDDGVEYLRWLLSGGDDSIDCQ

SEQ ID NO: 8572 - protein, 153 aa, Zea mays
  Clone ID: ZEAMA-23APR03-C9227_3.p
MGRKLGGLDRVLDCLSLSLLCSGACACVHSMDEEEEEDDERKQALLLSSQLVQLRGFVDGAAAKTLAFHLEPKTVELKVSMHCYGCAKKVQKHISKMDGVTSFEVDLESKKVVVVGDVTPYEVLESVSKVKLARLWVAPDPKQQAAERLHLQA

SEQ ID NO: 8573 - protein, 303 aa, Zea mays
  unsure (1)..(303): unsure at all Xaa locations
  Clone ID: ZEAMA-23APR03-C9227_4.p
MGSWEEHVRRFLLEEEEDDDELFFVILLAIIPYLSEEKRPIHTTSLTGAKKVKEILEGHESWCKSGFRMEKEIFKATSNFLRRENLLCDTRGVSIEEQLGMFMYMISHNASNQXLQKAFQHSGDTIHQNIRXVFEIVPILTQRFVKLSSXVQTHARIATGSRFMPFFRIALXAIDGTYVPITIAEDRAPPYRNRKGTLSHNVMVVYDFDLNFXHVSCGWEGSASDAGVLRSAISKXFIVPEGKFYFVDGGYANTTSYIAPYKGVRYHLSQLRRRRSSQSGYANYKELFXHRHAILRPCCIIVF

SEQ ID NO: 8574 - protein, 293 aa, Zea mays
  Clone ID: ZEAMA-23APR03-C9248_22.p
MGTSRSSILGEVDVNLAEFAEALKPTSIALPLRGSDFGTLLHITAQLLTTKTGFREFEQQRETGTRSSQQLLNQRSHDPVEVAAASSDIGTDKNCDEEMESPTKNNLNSNNSIKDISQEHKKLANGFNLFQKELERLKDENLSPLLPLDVNLTDPSLSGLERTLSQLDMANEHLQSIFPSFKELPGSGNALERLLALELELAEALQAKKKTNILFQSSFLKQHNDEAAIFQSFRDINEVIQDTIELKRRQMAVENELKEMQGRYSELSVQFAEVEGERQKLEMNLKNRTPWRS

SEQ ID NO: 8575 - protein, 393 aa, Zea mays
  unsure (1)..(393): unsure at all Xaa locations
  Clone ID: ZEAMA-23APR03-C9255_20.p
MGAGGRMTEKEREKHEQEQVARATGGGAAVQRSPVEKPPFTLGQIKKAIPPHCFERSVLRSFSYVAHDLSLAAALLYLAVAVIPALPCPLRYAAWPLYWVAQGCVCTGVWVIAHECGHHAFSDHALLDDAVGLALHSALLVPYFSWKYSHRRHHSNTGSLERDEVFVPRTKEALPWYAPYVHGSPAGRLAHVAVQLTLGWPLYLATNASGRPYPRFACHFDPYGPIYGDRERAQIFVSDAGVAAVAFGLYKLAAAFGLWWVVRVYAVXPLLIVNAXXVLITYLQHTHPALPHYDSGEWDWLRGALATVDRDYGVLNRVFHHITDTHVAHHLFSTMPHYHAVEATRAIRPVLGEYYQFDPTPVAKATWREARECIYVEPENRNRKGVFWYNSKF

SEQ ID NO: 8576 - protein, 105 aa, Zea mays
  Clone ID: ZEAMA-23APR03-C9265_24.p
RGLFFFFFYKSDDRYTVLHRHPDPQSCMVPGFNTDTHEPDKGSHTSHRSHLLLNTIIHACRENEASTGTRLSRRSPTPTTSSPSVSHSHSPQASSYQGPERDSLL

SEQ ID NO: 8577 - protein, 131 aa, Zea mays
  Clone ID: ZEAMA-23APR03-C9265_29.p
MSEEKHHHFFNHHKKDEEQPAGEYGYSETEVVTATGEGEYERYKKEEKEHKHKQHLGEAGAIAAGAFALYEKHEAKKDPEHAHRHKITEEVAAAAAVGAGGYVFHEHHEKKKDHKDAEEASGEKKHHHLFG

SEQ ID NO: 8578 - protein, 392 aa, Zea mays
  Clone ID: ZEAMA-23APR03-C9287_2.p
YTAPNQKPSPYWSPHRSLVTYRTATATAAAASAPVSHAQHRTRAIPSLRIAMASTAFAAAKYFPAHLDSSPRIAPRRAAPTASLSFSPLSASPSSLLRLRSPCPSGPGGRLPPPPPPRSYGGGGGSGGDAADSGGGRRGGGILGLFLAGWAARVAADPQFPFKVLMEELVGVTACVLGDMASRPNFGLNELDFVFSTLVVGSILNFVLMYLLAPTAAASSAASALPSHMFEPGAFSLGSRVATLVSKGATFAVVGFAAGLAGTALSNGLMAMRKRMDPAFETPNKPPPTLLNAATWALHMAGSSNLRYQTLNGVEYMLGKVAPAPVFKASVVVLRCLNNVLGGVSFVLLARLTGAQKSDKPATVAEEKERLIAVGNAAADAIGEARDGEEGK

SEQ ID NO: 8579 - protein, 145 aa, Zea mays
  Clone ID: ZEAMA-23APR03-C9309_2.p
MARLGAGAVLTLLLAVAAAAAFLAVPASAKVGDLSAVEFVAARGSSIPGQRSSKCSGAVGECGVDEEEELGLSGGGGIGAGDALRRTLAQRKPTNRYISYAALRADQVPCNKRGRSYYTNCAAQTAANPYRRGCSAITRCARSMN

SEQ ID NO: 8580 - protein, 282 aa, Zea mays
  unsure (1)..(282): unsure at all Xaa locations
  Clone ID: ZEAMA-23APR03-C9309_3.p
REERQGGGRRDXSQWIVNQRRKKAAAYINNKATPPVGRHGPPRSRRRVDAPAGCRGGGRVPRGAGLGQGRGPERGGVRGGAGRQQVLGRRGRVRRGRGGGARAERRRHRRRRRAAADACAAQADQPVHQLRGAARGPGAVQQARPVLLQQLRVAAGRQPLPPRLLRHHALRPQHELSARAAAGGRAVEPVGLICLCRPAWLGTQIAWLDRAPCIDDVVAAVPPLDGGPDDDGDGGGGGGGADEIIYIHTNPTAISVVVVRSFSLYICLCLYIYISISKTRYV

SEQ ID NO: 8581 - protein, 152 aa, Zea mays
  Clone ID: ZEAMA-23APR03-C93101_2.p
LLPFSPMMTKCQKRASIQGLWLLSMVLLASSSLVCASMAVDGQTKEDINATSVTSMNMTRSSSASYNMTGGGGELNRGQTKDDINTGSTMITTMRATSNIIGNDGASSNRLSSDHDWVIGWYYCKRTNTYYRRLAECLVRCLRPCTKVERTA

SEQ ID NO: 8582 - protein, 559 aa, Zea mays
  unsure (1)..(559): unsure at all Xaa locations
  Clone ID: ZEAMA-23APR03-C9311_10.p
MGSSGFSWTLPDHPKLPKGKPVAVVVLDGWGEANPDQYNCIHVAQTPVMDSLKNGAPEKWRLVKAHGTAVGLPSDDDMGNSEVGHNALGAGRIFAQGXAKLVDQALASGKIYDGDGFNYIKESFESGTLHLIGLLSDGGVHSRLDQLQLLLKGVSERGAKKIRVHILTDGRDVLDGSSIGFVETLENDLLELRAKGVDAQIASGGGRMYVTMDRYENDWDVVKRGWDAQVPGEAPYKFKSALEAVKTLRAQPKANDQYLPPFVIVDDSGNAVGPVLDGDAVVTINFRADRMVMLAKALEYADFDNFDRVRVPKIRYAGMLQYDGELKLPSRYLVSPXIDRTSGEYLVKNGIRTFACSETVKFGHVTFFWNGNRSGYFDATKEEYVEVPSDSGITFNVAPNMKALEIAEKARDALLSGKFDQVRVNLPNGDMVGHTGDIEATVVACKAADEAVKIILDAVEQVGGIYLVTADHGNAEDMVKRNKSGKPLLDKNDRIQILTSHTLQPVPVAIGGPGLHPGVKFRNDIQTPGLANVAATVMNLHGFEAPADYEQTLIEVADN

SEQ ID NO: 8583 - protein, 559 aa, Zea mays
  Clone ID: ZEAMA-23APR03-C9311_12.p
MGSSGFSWTLPDHPKLPKGKSVAVVVLDGWGEANPDQYNCIHVAQTPVMDSLKNGAPEKWRLVKAHGTAVGLPSDDDMGNSEVGHNALGAGRIFAQGAKLVDQALASGKIYDGDGFNYIKESFESGTLHLIGLLSDGGVHSRLDQLQLLLKGVSERGAKKIRVHILTDGRDVLDGSSIGFVETLENDLLELRAKGVDAQIASGGGRMYVTMDRYENDWDVVKRGWDAQVLGEAPYKFKSALEAVKTLRAQPKANDQYLPPFVIVDDSGNAVGPVLDGDAVVTINFRADRMVMLAKALEYADFDNFDRVRVPKIRYAGMLQYDGELKLPSRYLVSPPEIDRTSGEYLVKNGIRTFACSETVKFGHVTFFWNGNRSGYFDATKEEYVEVPSDSGITFNVAPNMKALEIAEKARDALLSGKFDQVRVNLPNGDMVGHTGDIEATVVACKAADEAVKIILDAVEQVGGIYLVTADHGNAEDMVKRNKSGKPLLDKNDRIQILTSHTLQPVPVAIGGPGLHPGVKFRNDIQTPGLANVAATVMNLHGFEAPADYEQTLIEVADN

SEQ ID NO: 8584 - protein, 598 aa, Zea mays
  unsure (1)..(598): unsure at all Xaa locations
  Clone ID: ZEAMA-23APR03-C9326_2.p
MATSVVVARLAGEASQPKVLPSANGVSSESYWRVAATRRWQGRGVRCCAAGFRGGGADADAVIASEDFVGFFREAWPYIRGHRGSTFVVVISSEVVCVPHFYRVLQDISLLHGLGIKFVLVPGTHIQIDKLLSERGKKAKYVGQYRITDEDARKAAMDAAGRIRLTIEAKLSPGPPMLNLRRHGVIGRWHGLVDSIASGNFLGAKRRGVVNGIDYGFTGEVTKIDVSRIRERLDSDSIVVISNMGFSSSGDVLNCKYIFLIIFKFFRMIVQCIHQNCVVVCLLPSQAXYHMNANNFRKTCSFAYIAATILNKIDLCCLQXFSTYEVATACALALEADKLICVVDGQVFDDHGRAIQYMSIEEADLLIRKRARQSDIAASYVKVVDEEGINSLHKGDDRPSLSPKAYINGYAASFRNGLGFNNGNGIYSGEQGFAIGGEERLSRSNADPFKNGLGFNNGNGIYSGEQGFAIGGEERLSRXMAIFLSWSRQHMCAMDVYEGTRMATAEDLPGIRKIIRPLEDSGVLVRRTDAQLLEALESFYVVERDGSIIACAALFPFPEEQSGEVAAIAVSEECRGRGQGDKLLGMFFAYMDNQNPFS

SEQ ID NO: 8585 - protein, 152 aa, Zea mays
  Clone ID: ZEAMA-23APR03-C9353_16.p
MSCCGGNCGCGAGCKCGSGCGGCKMYPDMAEQVTTTTTTQTLIMGGGGGAPPAVGSKRKMSSGSGGFGELARAIETFADMYERMEAAKQQHAEEMERQRIKFLKDLELKRMQAFVDMQLQLARTKHARKGDASSDTLMSLAALPFLSSPAYL

SEQ ID NO: 8586 - protein, 75 aa, Zea mays
  Clone ID: ZEAMA-23APR03-C9353_25.p
MSCCGGNCGCGAGCKCGSGCGGCKMYPDMAEQVTTTQTLIMGVAPSKGGFVAAAGAENGGCKCGANCTCDPCTCK

SEQ ID NO: 8587 - protein, 78 aa, Zea mays
  Clone ID: ZEAMA-23APR03-C9353_32.p
MSCCGGNCGCGAGCKCGSGCGGCKMYPDMAEQVTTTTTTQTLIMGVAPSKGGVEAAAGAENGGCKCGANCTCDPCTCK

SEQ ID NO: 8588 - protein, 134 aa, Zea mays
  Clone ID: ZEAMA-23APR03-C9368_4.p
MSTTTASSLNPNAPLFIPAAYRQVEDFSPEWWELVNTTAWFRDHCFRQRQLHEAACDDVAALLPDDLLDTNDLFYAPDVVHHQPATALLPGYDVLDVLAALSLSSPRAIRQPPRRSLLMAPGGPPPPPRLLCLV

SEQ ID NO: 8589 - protein, 430 aa, Zea mays
  Clone ID: ZEAMA-23APR03-C9375_4.p
MGETVRAGDVAITTHEMESHNPSHSQIAEVTMDIAASASGAAGSKFCKGAACDFSDASNSSKDARERSASMRKLIVAVVLCVVFMAVEVVGGIKANSLAILTDAAHLLSDVAAFAISLFSLWAAGWEATPRQSYGFFRVEILGALVSIQLIWLLAGILVYEAVVRLVGESGDVRGSLMFAVSAFGLAVNVLMAVLLGHDHGHGHGHGHGHSHDHGHGHGDSDDGHSHHDDEEQEQGRVHHHEHGHGGAITVTTHHHHHHHDHDVEEALIKHEGTQSAGRAGKKPRRNINVHSAYLHVLGDSVQSVGVMVGGAIIWYKPEWKVIDLICTLVFSVVVLFTTIRMLRSILEVLMESTPREVDATRLESGLCGMEGVVAVHELHIWAITVGKVLLACHVTIARDADADEILDKVIGYIKTEYNISHVTIQVERE

SEQ ID NO: 8590 - protein, 253 aa, Zea mays
  unsure (1)..(253): unsure at all Xaa locations
  Clone ID: ZEAMA-23APR03-C9388_2.p
MERYSCCRWVLACSILALCLGGQGARCQLTSDFYDSTCPQLYYVVQQHVFDAMRDEMRMGASLLRLHFHDCFVNGCDASILLDGDDGEKFALPNLNSVRGYXVIDAIKADLESACPEVVXCADVVALAASYGVLFSGGPYYDVLLGRLDGLVANQSGADDGXETAALDVSSPYVFDNDYYKNLLTERGLLSSDQGLFSTPEGVAASTKDLVEAYSSDGDQFFYDFVWSMIRMGNIPLAAGSDGEVRKNCRVVN

SEQ ID NO: 8591 - protein, 89 aa, Zea mays
  Clone ID: ZEAMA-23APR03-C93_3.p
MAVMKSSTIVALLLAVAILSSLSPCYEAGGCIGKPKKSPPPPRRPYFSSYSEDHQKDHQNCRLICSSKGFKDGGWCDESVEHKVCCCSH

SEQ ID NO: 8592 - protein, 232 aa, Zea mays
  unsure (1)..(232): unsure at all Xaa locations
  Clone ID: ZEAMA-23APR03-C9408_6.p
MAPIAVGDALPDGQLGWFDENDQLQQVSVHALAAGKKVILFGVPGAFTPTCSNQHVPERAGGGGDMGSFAKLARRAVETEAPVMVKIQELLRGAKDVMSLAQGVVLWQPPESAMDKVXKIIREPTLSKYGSDDGLPELREALLEXLRRENKLTKSSVMVTAGANQAFVNLVLTLCDAGDSVVMFAPYYFNAYMSFQMTGVTDILVGGSDHKTLHPDVGKMTLLFFLLHWKNW

SEQ ID NO: 8593 - protein, 948 aa, Zea mays
  Clone ID: ZEAMA-23APR03-C9528_7.p
MGGLEEIKNEAVDLENIPIEEVFEQLKCTREGLSSSEGQQRLEIFGPNRLEEKKESKVLKFLGFMWNPLSWVMEMAAIMAIALANSGGKPPDWQDFVGIIVLLVINSTISFIEENNAGNAAAALMANLAPKTKVLRDGRWGEQEAAILVPGDIISIKLGDIIPADARLLEGDPLKVDQSALTGESLPVTKGPGDEVFSGSTCKQGEIEAVVIATGVHTFFGKAAHLVDSTNQVGHFQQVLTAIGNFCICSIGVGILVEIIVMFPIQHRRYRSGIENLLVLLIGGIPIAMPTVLSVTMPIGSHKLSQQGAITKRMTAIEEMAGMDVLCSDKTGTLTLNKLSVDKNLVEVFCKGVDKDHVLLLAARASRTENLDAIDAAMVGMLADPKEARAGIREIHFLPFNPVDKRTALTYIDADGNWHRVSKGAPEQILDLCHCKEDLRRKVHSIIDKYAERGLRSLAVARQEVPEKNKESPGGPWQFVGLLRVFDPPRHDSAETIRKALVLGVNVKMITGDQLAIGKETGRRLGMGTNMYPSSALLGQNKDRTLSALPVDELIEKADGFAGVFPEHKYEIVKRLQEKKHIVGMTGDGVNDAPALKKADIGIAVADATDAARSASDIVLTEPGLSVIISAVLTSRAIFQRMKNYTIYAVSITIRIVLGFMLIALIWQYDFSPFMVLIIAILNDGTIMTISKDRVKPSPLPDSWKLKEIFATGIVLGGYLALMTVIFFWAMHKTDFFSDKFGVRSIRDSEHEMMSALYLQVSIVSQALIFVTRSRSWSFVERPGLLLVTAFVAQLVATLIAVYANWRFARIKGIGWGWAGVVWLYSIVFYFPLDLLKFFIRFVLSGRAWDNLLDTRIAFTRKKDLRKGEREAQWATAQRTLHGLQPPESNTLFNDKSSYRELSEIAEQAKRRAEIARLRELNTLKGHVESVAKLKGLDIDTIQQNYTV

SEQ ID NO: 8594 - protein, 125 aa, Zea mays
  unsure (1)..(125): unsure at all Xaa locations
  Clone ID: ZEAMA-23APR03-C9539_11.p
SPKTQGLGRRRPAARGGGVGHDGEGXKHTAKEIAAKIDAATTNRGGGKAGQADRLGLCXTPAPDIKSMQIHHEARHPKLPFEPEKLLNLHSSAPAAAAAAAAAAAAAAEATTSKPKPGVRGSLXK

SEQ ID NO: 8595 - protein, 105 aa, Zea mays
  unsure (1)..(105): unsure at all Xaa locations
  Clone ID: ZEAMA-23APR03-C9539_12.p
MTGKAKPKKHTAKEIAAKIDAATXNRGGGKAGQADRXGRKGGHAKLACPLCRRRRRRRRCRGHHLQAQARRPRQPQEVSLLAWLARPPAWGTIPFGFNPIRRPDL

SEQ ID NO: 8596 - protein, 340 aa, Zea mays
  Clone ID: ZEAMA-23APR03-C9554_1.p
YTGVAAKRRDGDSWTGGMMEAKQAAPDRLSSLPAELQDEILIRLDLRDAVRTSALSRTWRDLWKSLSVISLSFPFGTHPSVVDSVLLRYIGPRVSLFRICVDDACADRIDDWLIALSRYRVESIDMCGTLRSLGNFNLYSSIFSLGDLVSLLLKNCRIPPLPVGFPGFPALQKLVLAYVIFPSNGFKQLEAIIRRSPLLHTLHMFDVFIPGEYPDSVIEAPNLRVLSIYSPYDYRWRFGELSCLEYANIHAFHCPQHEHDFGVFLARFAHVQKAVDVKMPYTLPFTFYNLKKLQLCVDFNEIHSILSMFTMLRSCHNLQNLKIEVRSNSGRCGSNIGSLE

SEQ ID NO: 8597 - protein, 319 aa, Zea mays
  unsure (1)..(319): unsure at all Xaa locations
  Clone ID: ZEAMA-23APR03-C96014_1.p
MGTLVGHVAPGAGFLLIGLWQLFSHTRLFLLRPSSYSAPVWFPVPGVRHLELILIIIGTVLSILMELVIGPAKHQPFDDDGTIPSDHLHNFEHASISLALLVFAAVTIHLDRARAPMRDAVSQLVAAAAFAQQLLIFHLHSADHMGVEGQFHWLLQTAIAVTLATTLLGIPLPXRSFAVSLVRSASLVFQGVWFVVMGVMLWTPALIPKGCFLNFEEGHDVVRCRTDDALDRAKSLVNLQFSWYLTGTVVFVVLFYLQMAKLYPEEPQYLPLVKGGGSGSDGRFSIGDDDHDDEDDVEAAKRGGFGHVVSGTRPVEIER

SEQ ID NO: 8598 - protein, 181 aa, Zea mays
  unsure (1)..(181): unsure at all Xaa locations
  Clone ID: ZEAMA-23APR03-C9646_2.p
MACTRRQLWWACLLAAWCCAGAAAAAQPPAAXRGPAAEXCQGDFGKLTDCMDYATGHAASPSSTCCGDAGGTQKARPECLCYIIQQVHAGRDQVQSLGLRFDRLLALPAACSLPNANVSLCINLLNLKPGSPDYALFANASKITPSAGGSPASDSAVIRLQAGVRGSVALAVVSAIVSSVF

SEQ ID NO: 8599 - protein, 181 aa, Zea mays
  Clone ID: ZEAMA-23APR03-C9646_5.p
MDHVGLLCMDYATGHAASPSSTCCGDAGDTEKARPECLCYIIQQTHTGRNQVQSLGLRFDRLMALPAACNLPNSNVSLCITLLNLKPGSADYALFQRLQDHAVSRRQPCERQRRGQRRQAPGWGQRRRRARRGLRDRLVTLLMDRPPLKGAAAVFFYPPVDSFSCCVPLAHVYSVLSHKKK

SEQ ID NO: 8600 - protein, 98 aa, Zea mays
  Clone ID: ZEAMA-23APR03-C966_55.p
MAIKNMTVAATTRSLDADMTVDEFKEWLRRFDTDQDGRISRDELRRALRAIRSRFTGWRSRQGISYADTDGDGYIDDSEVDGLIEFAQKNLGLKIVAY

SEQ ID NO: 8601 - protein, 351 aa, Zea mays
  unsure (1)..(351): unsure at all Xaa locations
  Clone ID: ZEAMA-23APR03-C966_69.p
MMMLIDCSGCRTPLQLPHGAPCIRCAICGAVTHIAPAPPAEPNRGAVQPAPGWAPPPPPVHGRKRAVVCGISYRYSRHELKGCINDAKCMRHLLMTRFNFPDDSIIMLNEEQTDPYXIPTKHNIRMAMYWLVQGCQPGDSLVFHYSGHGSQQRNYSGDEVDGFDETLCPLDFETQGMILDDEINTALVRPLPHGVKLHALIDACHSGTALDLPYLCRMNRSGQYVWEDHRPRSGVWKGTSGGEAISFSGCDDDQTSADTSALSKITSTGAMTFCFIQAIERGQGTTYGSILNSMRSTIRNTGDSAGVGGGAVTSLITMLLTGGSLSAGGLRQEPQLTACEPFDVYAKPFSL

SEQ ID NO: 8602 - protein, 293 aa, Zea mays
  unsure (1)..(293): unsure at all Xaa locations
  Clone ID: ZEAMA-23APR03-C967_15.p
MEDERNTQQHQGGEQAQDQENEVKDRGLLDSLLGRNKHDDQEKKNQQQQQAEEEELATGMEKKVTVAEPDHKEEGHEAAEKKDSLLAKLHRTSSSSSSSSDDEEEEVIDENGEIVKRRKKKGLKEKVKEKLAAHKAHDEGDHHQTAVPAXXPVVVDTHAHHQEGEHKPHFPAPAPPPHVETHHHPVVVHKIEDDDTKTQTPPQAPEEEKKGLLDKIKEKLPGGHKKPEDAAAAAAAPAXHAPPPPAPHAEVEVSSPDGKKGLLGKIMDKIPGYHKSSGEEDRKDAAGEHKTSS

SEQ ID NO: 8603 - protein, 267 aa, Zea mays
  Clone ID: ZEAMA-23APR03-C968_24.p
MCPAFSIFFNSRRYSLTPPTYTPSPKPPTPKPTPPTYTPSPKPPASKPPTPKPTPPTYTPSPKPPTPKPTPPTYTPSPKPPATKPPTPKPTPPTYTPSPKPPTPKPTPPTYTPSPKPPATKPPTPKPTPPTYTPSPKPPTPKPTPPTYTPSPKPPTPKPTPPTYTPSPKPPTHPTPKPTPPTYTPSPKPPTPKPTPPTYTPSPKPPTPKPTPPTYTPSPKPPATKPPTPKPTPPTYTPTPKPPATKPPTYTPTPPVSHTPSPPPPYY

SEQ ID NO: 8604 - protein, 155 aa, Zea mays
  Clone ID: ZEAMA-23APR03-C968_27.p
PSRSCPRRSPRSPRPSRSRSPEGASSSCASETLCVCVCFPKPPTPKPTPPTYTPSPKPPTHPTPKPTPPTYTPSPKPPTPKPTPPTYTPSPKPPTPKPTPPTYTPSPKPPATKPPTPKPTPPTYTPTPKPPATKPPTYTPTPPVSHTPSPPPPYY

SEQ ID NO: 8605 - protein, 598 aa, Zea mays
  Clone ID: ZEAMA-23APR03-C9695_3.p
MSQPTAAVAAEAQPQGRGLAGRQGGGGGLGQSISGIVRMAVFWYFAAKFFGPKRPPADPGILMSNLFQKGEPMDMWMYLSESDKFNDFANEDALIWHEANIPYAVWGPTSTRTRSLTYYPSEALKHNGSLYAHVYFARSGYPVDPTDPEYEQKSAFGRTHPVVAFLPKSKAGKKKSLLGDSEEPEEQAPPKGNKEFEDKDEGPTEYLSYWKPNVTVNLVEDFTRYTNNNVPAIVAPYLNVDPATGDYYPTVFFNEFWLLRDKLIALNETVKELALNLEVGPISMTKWQLFLQIEQSFQVHRSYGSMLEGEADELKRVFLEGNPYLLGLTMIVSLLHSLFDFLAFKNDIQFWNKNKSMEGLSAKSVVLNFVCQLIVFLYLLDNDTSWMILASSGIGVCIEFWKIGKAMHIEVDRSGKIPMLRFRDRESYAQNKTKEYDAIAMKYLTYVLFLLVIGFSIYSLKYEKHKSWYSWILSSMTSCVYMFGFIMMCPQLFINYKLKSVAHMPWRQMTYKFLNTIIDDLFAFVIKMPMLHRLSVFRDDVIFLIYVYQRWKYPVDKKRVNEFGFGGEEEPAAQETLEGSDPAAAAAAAEPTEDKKTK

SEQ ID NO: 8606 - protein, 171 aa, Zea mays
  unsure (1)..(171): unsure at all Xaa locations
  Clone ID: ZEAMA-23APR03-C9695_5.p
MAAFLRSKCSPVGRTLMGSLGNSLFGAANSSVGAITRPSHCDAISQQIRTFIQMRTNLKVVDNSGAKRVMCIQSLRGKKGARLGDMIIGSVKEAQAXRAKVKKGDVVYGVVVRAXMKKGRSDGSEVQFDDNAVVLVNKKGELIGTRVFGPVPHELRKKKHLKILALAEHIV

SEQ ID NO: 8607 - protein, 537 aa, Zea mays
  Clone ID: ZEAMA-23APR03-C9708_1.p
MGNCFTRKYDEHEHEIPITTDPPRRTSMPVYRPPRPRDDKAQEVPLYSGSDRRPSYRPPRLPVFPSGPGSTGRRRPPTGQTGTVLDRHTVDVRTLFHLERKLGSGQFGTTYLCTERATGKKYACKSVSKRKLVRRADIADMRREITILQHLSGQPNVAEFKGAFEDRDDVHVVMELCSGGELFDRITAKGSYSERQAAAVCRDVLTVVNVCHFMGVMHRDLKPENFLLASPADDAPLKAIDFGLSVFIEEGKVYKDVVGSAYYVAPEVLRRNYGREIDVWSAGVILYILLCGSPPFWEETQKGIFDAILADELDLVSSPWPSISESAKDLIRKMLNKDPQRRITASQALEHPWLKGGAPDRPIDSAVLSRMKQFKAMNKLKQLALKVIAENLTEDEIKGLKQMFNNMDTDRSGTITVEELKDGLAKLGSKISEAEVQKLMEAVDVDKSGSIDYTEFLTAMMNRHKLEKEEDLFLAFQHFDKDDSGYITRDELEQAMAEYGVGDEASIKEVLDEVDKDKDGRIDYEEFVEMMRKGSYT

SEQ ID NO: 8608 - protein, 578 aa, Zea mays
  Clone ID: ZEAMA-23APR03-C9709_1.p
DAEGFLCLFRSTTFVHGADYESCKAYECPLVRGSGKVGMEIVVALASDSHAFLNQGSCVLKRTRKKDEAVSGSPSIKKKREKTSLASADIPIAPAIPIRQLKAEDMRTLMKAESGLRGIGLGVKNNKGKPSPLKVPISAADPGAVELGHEHAQANVLAVCNTRPEQPAKENDATNLEATRSEMNMQNGTVDVPIRSVQTEAMKLQANNPIDVNAQSVAVDVPVGSVSKEATEPETSVHKDKNVQSDVSGVSDRIVSKEPTELETDDHINENVQSVAADVSARSVSKEAAMTDADIGIHENTQSAADLPDSSGPSPMHEDMSQPVDGHKEPGSVEVCIVQQSYASLEAMVPEMIKKVNANGAGTIGVNYTLKDEFQKDGQPVEKVKLPAGVANHSCGGGTNGTWLDPANLTPKKRKKVAQHFSNPAAVIVEFAPGATVPSRQELLSTFGKYGDLIESQTDISETTRSASVVYGKSVEAEEAYRNGCQYLLGQFGPPFATLRLDFSPIVPSPSPPASKPPLRDIRKNLEDMISSRRSALNKATSSADAQLDPVPDKLLGEMQGLLAKVDRMLTRPHANAP

SEQ ID NO: 8609 - protein, 326 aa, Zea mays
  Clone ID: ZEAMA-23APR03-C9729_1.p
MAGTCAHVEFLRAQPAWALALAAVGLLVAVRAAARFALWVYAAFLRPGKPLRRRYGAWAVVTGATDGIGRAVAFRLAASGLGLVLVGRNQEKLAAVAAEIKARHPKVPEVRTFVLDFAGEGLAAGVEALKDSIRGLDVGVLVNNAGVSYPYARYFHEVDEELMRTLIRVNVEGVTRVTHAVLPAMVERKRGAIVNIGSGAASVVPSDPLYSVYAATKAYVDQFSRCLYVEYKSKGIDVQCQVPLYVATKMASIRKSSFMVPSADTYARAAVRHIGYEPRCTPYWPHSVVWFLISILPESLIDSVRLGMCIKIRKKGLAKDAKKKAL

SEQ ID NO: 8610 - protein, 477 aa, Zea mays
  unsure (1)..(477): unsure at all Xaa locations
  Clone ID: ZEAMA-23APR03-C9736_1.p
MATTRPRGGGGAASGALVMAIVVLLLLPPYGAGAEECEDGGISSRARAGDRVEALPGQPAVAFAQYSGYVAVDRDRGRALFYWLTEAVGDDAAAKPLVLWLNGGXSDPSTCSQSLAPFFSCNNQQSRSSSVVNDDAMCALFFLPLLWGVWSISIFFIKKETKTDERTAQDALQFLVSWMSRFPQYRHRDFYIAGESYAGHYVPQLARKIVEYNEASPHPFINLKGILVGNAVTDNYYDNIGTVTYWWTHAMISDRTYKAILRWCNFSSSSISRPCNRAMSYAMNHEFGDIDQYSIYTPSCAAAAARANATVLRFKNTLVRRRRSSGYDPCTETYAERYYNRMDVQRAMHANTTGIPYRWTACSDVLIKTWQDSEFSMLPTYKKLMKAGLRIWVFSGDTDSVVPVTATRFAISHLGLKIKTRWYPWYSAGQVGGWSEVYEGLTFASVRGAGHEVPLFQPRRAFRMFRSFLAGEPLPKS

SEQ ID NO: 8611 - protein, 302 aa, Zea mays
  Clone ID: ZEAMA-23APR03-C9758_3.p
MDLVSSDLAALGAVELVRVSASIPRAAPRTFALLTACLVFPLSFAVLAHSLFTHPILLRIRGAAHSGFAPWLGLFAYQFMYLIVLFTFSLLSTAAAVFTVASLYAGKPASVSSSLSALRPILPRLLRTFLWVSLLMLAYHLAFALAVLLLVVLVFLGIHVYISALWHLASVVSVLEPLCGLAAMAKSRQLLQGRTGTAATLVVSYFAVCGATSLLFRAAVVKGRTEEGSFGLALPGRLLVGAVLVCVLVSVNLLGLLVQSVFYYACKAFHSQQIDRTALYEHLGGYLGEYVPLKSNIQMENL

SEQ ID NO: 8612 - protein, 534 aa, Zea mays
  Clone ID: ZEAMA-23APR03-C9763_1.p
MAAVAGDGGGGPEEGVGESSSPPRNPVLAPAPAASGGSGSGGGGRGGGLRDICREVFERLVNDGHRAGSELLAQLEAHFNRLPISYKLDVNIDKAEDVLIHQKVLAEAQDPDRRPAFTVRFLRLEEVNVDETTNSDAHEEGADIGEALSTRSKTSYAHIHEILFSTKDKPKLLSQLSALLSDIGLNIKEAHVFSTTDGYSLDVFVVDGWPVEETDGLHKALEVSILRNEGSWSGSESSASKRSLPFLAQDFESDIDTRLLKLVNKIASGSCGDMFLGTYSGEEVAVKVLNPQNLNKNVWSEFKQEINMLREVDHPNIVRFIGSCTKPPQFYIITECMSRGSLFDFLHNEHNVLDLPTLLKFALDVCQGMSYLHQKGIIHRDLKSGNLLLDKNDVVKVADFGLARFQDGGGDMTAETGTYRWMAPEVINHQPYDSKADVYSFALVLWELMTSKIPYNTMTPLQAAVGVRQGLRPQIPENTHPRLINLMQRCWEATPTDRPSFEEIIPELEDIQAQAQRTSGETSQTEEDHSCSKD

SEQ ID NO: 8613 - protein, 216 aa, Zea mays
  Clone ID: ZEAMA-23APR03-C976_2.p
MAKTKQGKRDVDAYTIKGTNKVVRVGDCVLMRPADTDNPPYVARVERMESDGRGSVRVRVRWYYRPEEAKGGRRPFHGAKELFLSDHFDTQSAHTIEGKCIVHSFKSYTKLDNVGPEDFYCRFDYKAATGAFTPDRVAVYCKCEMPYNPDDLMVQCEGCKDWFHPSCMGMTIEQAKKIDHYMCSDCAKENGAKRPSNSYSVSPNSDSKIESKRRKR

SEQ ID NO: 8614 - protein, 125 aa, Zea mays
  unsure (1)..(125): unsure at all Xaa locations
  Clone ID: ZEAMA-23APR03-C976_3.p
VFEALNPRAVTVVVDPIXSVKGKVVIDVFRLINPQTMMLGQEPRQTTSKVGHLNNSSIQALIHGLNRHYXFAINYRKNELEKKMLLNLHKKKWIDGLILKRFDTHSXKTNEQTVQVPSVLYGNDH

SEQ ID NO: 8615 - protein, 615 aa, Zea mays
  unsure (1)..(615): unsure at all Xaa locations
  Clone ID: ZEAMA-23APR03-C979_3.p
MASACATSIPLVSAPSACPSKKTTVARFRRRTATCRASSGGGGGRGGENDGLLWLXPRRDVMLNGLSSVAAGLAWYPGVASGADAVCTRADKVNEKTVQCTDPAGQLPCPLVSPTDPVDFKPESKVTRIRQPVHLLSREYQEKYKEAVAKMKALPEENPLSFAAQAAIHQAYCDAYYKYDPTAKDAPFDVHFSWIFAPWHRMYIYFYERALGQLIGDDTFALPFWNWDTPAGMVVPPLFKDSMGNPLYDPNRNPSNVDALVDLDYLNDRNAEPIPFKGPRDEKYKELVNKNLCTVYTQQIRSGKGAESFLGEKYCTDIXSSTSSMGSLERMAHTAVHVWVGKAGPTPSSEACSAATGGFPNHTKGGYSCNNDMGFLGSAGHDPLFYSHHSNVDRMWHIWSTRLGGGQGITEADWLDTSFVFYDDVKSPRKVRIRFRDVLDTRDLGYTYDAESDKDLPWLRCKISSLVPHGKDSPPRSSSARKAAAPVFPLALTKGQVVEVPAVPVPAKDPGKEQLLVIEGIEYDPQANNKFDVAINLPADKALQVGPQYKEYAGSFAVVPGSGAGKTRKVKLSLCITEVLFDIDADGDKTVDVVIVPRTNAKITLNARPTIKNRN

SEQ ID NO: 8616 - protein, 302 aa, Zea mays
  Clone ID: ZEAMA-23APR03-C9804_1.p
RQGELAYGHGDGTPRQQPQLPRSASAAGATGVARASIRSKPVKMPQRGLGVAQLEKLRIEEQKMEGSMPVSGPTNLSVGVGGVFYLHPMHPPPHAPPALLPRPGAVGAVHCGYPSVLWDPATATVSVAVDPLKHSNYNRCLFTLPPLPTVSVGLSLTAASSSHPTEPPSNQMYSSGGGGGAETAAAEDDDDRVHAVVEEAAGVDRPWPLVFEGLNTAAFRTTAAGKAPLAVAARTTREAAAAAGLPDACAAADLTRYEFSRATTNYYRLNLQRAHSHVCGFPPVWVLLSVCFSSELEFLHKD

SEQ ID NO: 8617 - protein, 92 aa, Zea mays
  Clone ID: ZEAMA-23APR03-C98332_1.p
MPAPSAVASAVERLQAAAQDAAKSSSRSAGAFSEQAQQALVSRTAGRVVSLSTCAKVSAISFAIGVVAGFTLKKRLRRWAARLLKRIKDDDY

SEQ ID NO: 8618 - protein, 587 aa, Zea mays
  Clone ID: ZEAMA-23APR03-C9837_1.p
MVIKPITRAGTHTTPPPTHSRSLSLASGKLLWRGRLRAAQHLSSSSCCRCCWPSLLPLSNNAPPPRLPPAAKAREGGASVSAGLLSTLREALDAVKDVTSIISSFPIGGILGDGGGDLRLSSAVADCLDLLDLSSDEMSWSMSMSTDSSGAGGGRLGTGDARSDLQSWLSGALGNQDTCKEGLDATGSVLGSLVAAGLDAVTSLLADGLGQVAGGDDATAPASSLPPSSSRRGAAPPRWLRARERRLLQMPVGPGGLAVDAVVAQDGSGNFTTVGAAVEAAPAQSAARYVVYVRKGVYRETVEVKKKKWNLMLVGDGMGATVISGRRSYGDGYTTYRSATVMVSCCKGFIARDLTFENTAGPAKHQAVALRCDSDLSVFYRCAFEGYQDTLYAHSLRQFYRDCRVAGTVDFVFGNAAAVFQDCALLARRPLPGQKNSVTAQGRLDANMTTGFAFQFCNVSAHPDLLLQQQQAQSSNSNGTAPPATQTYLGRPWKPYSRVVFMQSYIGDVVRPEGWLAWDGDFALDTLYYGEYANTGPGAAVAARVKWPGFHVMTSPAEAGNFTVAQFIEGNMWLPPTGVKYTAGLTS

SEQ ID NO: 8619 - protein, 131 aa, Zea mays
  Clone ID: ZEAMA-23APR03-C9839_1.p
AWFIFQKTPKILLSHILSVIFLFILSQTIHSPLFSPRANSTVLNHRYPTIDKPSYPLPLHTLNTLSQGKPPPTQLPRSAGYTHSVASPPIHPPGKHIHSTTSNITTPHDTYSAQDSTHPYIDILTTILNIC

SEQ ID NO: 8620 - protein, 149 aa, Zea mays
  Clone ID: ZEAMA-23APR03-C98567_1.p
MPPPLPMGRQPTRWWSGGSGSARTLAVGVAVVVALVVSLCFAFIGVRRLAGTLVGGGTPASDSGGRTMAAAAAHPGGQVATTDEEMVYTGRRRLLSGGPGSHPPRCASKCGSCNPCYPVHVSVPPGVLVTTEYYPEAWRCKCRNQLYMP

SEQ ID NO: 8621 - protein, 404 aa, Zea mays
  Clone ID: ZEAMA-23APR03-C99176_1.p
MPAADPPVTDAVPDEDAAPRPSPPPPPPRPRPLSLASALPFWFYFAAAVSLLALLLPHLLPPSSPAPLPPLLRGHLAAGRFLKLDPAPGLFAVTSRPTAAAGDSPAHRVLVLPGLAAGSLSFRRVLSSLSSRGVHAAALDLPGQGLSPASPAATAPARTSALREIMNRGVFHAFEHLVQTGEVPYQEEEPAASAARSPHAPDEAAAAVARAAEALGVGPVHLVLHDSALAAGAAFASANPGAVRSVTLVDATASLPAFPAAVFDVPVLGRLVLRVPALFRGLVRLCCVRGVGAEEAEAYRAAMRGEGKAEAVVEAWKSMNHSFQLGEWRVSSEEVRRLPMLVLWSGSWSDMWIDEGKKVAAALPDAKFIYHSGGRWPQVDAFEEISGVITEFVTSAEEAGSSRW

SEQ ID NO: 8622 - protein, 292 aa, Zea mays
  unsure (1)..(292): unsure at all Xaa locations
  Clone ID: ZEAMA-23APR03-C99294_1.p
MTTTTMTTTTTAAPDLSLHISPPSPPEPRLLLGLELDDDTAAEAAAATKKADNAAAMREYNNLRQVQRRQLHQPSQTAGHGFKRGTSGSAAASAGGRRSSRAPRMRWTTALHAHFVHAVELLGGHERATPKXVLELMNVKDLTLAHVKRDAQMDSRRRRRGAHRPCAAVARRGRPRHMVVLLLTGLSERQARLVEEVPGRELDDDDAAAATTTAEEDADKAAAAREHNLHAQRHRLQLHQPSQTAAHGFKKGSSGNAAARAGGRRSSRAPRMRWTTALHAHFVHAAGTQGGQ

SEQ ID NO: 8623 - protein, 246 aa, Zea mays
  Clone ID: ZEAMA-23APR03-C9958_2.p
NVNTDNNQEFQYGGNALHYKDDSDHDLEYCVSLHLGLTDYRTFVGTNLNPLWEFFLVPSEDDSVHCQHLSDALGNGAIVETSDKKIIVLQRSYNVADYPGYYVFPGGHSEPQEIGIMGHQTDEEDFASLTERVSQEMFDGVIREVVEETGVPASSLTDPVFIGVSRREVNVRPTAFFFTKCNIDSSGVSELYSRAQDGYESTKLYTVSVEELQGMRQRMPGCHNGGIALYELMRNAAKKSEDVIDE

SEQ ID NO: 8624 - protein, 299 aa, Zea mays
  Clone ID: ZEAMA-23APR03-C9958_3.p
MAASGAYPGTAFKILLSCPDGLPRSRVSVKFGRSFDRIPHPDAALEESISEVWDQSLQRNPCLYSGTKFRYGGNALHYKDDSDHDLEYCVSLHLGLTDYRTFVGTNLNPLWEFFLVPSEDDSVHCQHLSDALGNGAIVETSDKKIIVLQRSYNVADFPGYYVFPGGHSEPQEIGIMGHQTDEEDFASLNERVSQEMFEGVIREVVEETGVPASSLTDPVFIGVSRREVNARPTAFFFTKCNIDSSGVSELYSRAQDGYESTKLYTVSVEELQGMRQRMPGCHNGGIALYELMRNAAKKK

SEQ ID NO: 8625 - protein, 305 aa, Zea mays
  unsure (1)..(305): unsure at all Xaa locations
  Clone ID: ZEAMA-23APR03-C9980_2.p
MHPKLSRAARRLLCCGRAASPEDLSDEGSGSLRWVFSLRELRSATNSFNYDNNIGEGPLGSVYWGQVWDGSQIAVKRLKSAKNGTEAEFASEVEILGRIRHKNLLSFRGYCADGPERILVYDFMANSSLYAHLHGPHSAECLLDWRRRISIAXSSESQRASAMPHCDVYSAGIILLELASGKRPVERSGSGKACGIRSWVLPLARQGRYDEIADSKLGDKFSGPELRRMVLVGLACTRSEPEKRPTMLQVVPLLKGESKETLVKLEREELLFSPDSTTVSSQGTPTPDGSTDSAPPKKDQELVGA

SEQ ID NO: 8626 - protein, 197 aa, Glycine max
  unsure (1)..(197): unsure at all Xaa locations
  Clone ID: GLYMA-23APR03-C100252_1.p
MSTTRFIKCVTVGDGAVGKTCMLISYTSNTFPXDYVPTVFDNFSANVVVDGSTVNLGLWDTAGQEDYNRLRPLSYRGADVFLLAFSLISKASYENISKKWIPELRHYAPTVPIVLVGTKLDLREDRQYLIDHPGTTAIATAQGEELKKAIGAAVYIECSSKTQQNVKAVFDAAIKVVLQPPKSKKKGKKKNTPCVFL

SEQ ID NO: 8627 - protein, 346 aa, Glycine max
  Clone ID: GLYMA-23APR03-C100518_1.p
MSSSLMLPAASMLRPCTTSSSSCTSSRRLALFHLVSTGSIALPQAQLFGAKGPELLRVVEASAAEKLAQPEKDLFDWVKNDNRRFLHVVYRVGDLEKTIKFYTECLGMKLLRQRDIPEDRYSNAFLGYGPEDSNFTVELTYNYGVDNYDIGSGFGHFGVAVEDIYKRVDLVKAKGGKVTREPGPVKDGSAVIAFIEDPDGYKFELLERRPTSEPLCQVMLRVGDLDRAIAFYEKAVGMKLLRKRDNPEQKYTVAFMGYGPEDKNTVLELTYNYGVTNYDKGNGYAQIAIGTNDVYKTAEAIKLCGGKIIREPGPLPGINTKIVACLDPDGWKLAFVDNVDFLKELE

SEQ ID NO: 8628 - protein, 209 aa, Glycine max
  Clone ID: GLYMA-23APR03-C10072_1.p
METTLVRFLYYLSTAILFWCCANIVHAIELPNYTVILPEESDFQLRLYNESSWISARVSGTSFEQSYKLGFSRLYQYIHGANSNSSKIAFTAPVLTSVPSSPPGDGYIVRMFVSTHFQGKPPQPNPELKLRIEKWKTQCIAVRKFTGYAKDDNINKEIEALVTTLNKNSATIQDTSFYTIAKYNASSHNTADRLNEVWIKVSGVRTEYC

SEQ ID NO: 8629 - protein, 371 aa, Glycine max
  Clone ID: GLYMA-23APR03-C100776_1.p
MEEQNRFGVYRMKGEFSVDLKLGHHVGNSGTESALANKSKDAAAAGVSKMASSPSGSSKRARAINSTSLTVACLVDGCNSDLSNCRDYHRRHKVCELHSKTPEVTIGGFKQRFCQQCSRFHSLEQFDERKRSCRKRLDGHNRRRRKPQPEPLSRPGSFLSNYQGTQLLPFSSPHVYPSTAIVSPAWSASLVTSSADARLHNHNQQQHHHHQQDLFLGSSHKEGKQVAFLHNNHPSTAAALSSQTPPPFPSSSVRHTLLRTDPLSETCGGARSKMFCESLTTTTTNNNSVHDTTPCALSLLSSSQTHTPGNGLNQMVQPPPSMSLMQPLGLSLQDNNSLESVDHCSSMYSLASDHGSQCNEAAPQLFPFQWE

SEQ ID NO: 8630 - protein, 253 aa, Glycine max
  Clone ID: GLYMA-23APR03-C101083_3.p
KSLKLLRVLNLRENNLGKDDVQRLRYALQHVPNLEELDISGNSIEDEGIRNLIPYFVGASETCPHITCLKLENCDLSCVGVNNLLHILSNFKGPLKSLSIADNYLGSQVAEALGKFFSTPIEVLDIAGIGLGSYGFQELQSLIKEKVKLVKINISKNRGGIATAKFLSKLLSQAPQLVDVNAASNLMPIESLAIICSALKFAKGNVQQVDLTGHIWDYKPEHVSPYTEFVHNGLPILILPSSSASAAPHDHDP

SEQ ID NO: 8631 - protein, 246 aa, Glycine max
  unsure (1)..(246): unsure at all Xaa locations
  Clone ID: GLYMA-23APR03-C10125_3.p
MATSFSPTASVGSIIFQNPPKGLLLLSQQQQQRSFASSASYATLKLPRAFALSPRPLLSKGRTTLVRAATIEEIEAEKAAIEKDXSIRTGRANPSMLDKIQXEYYGNPXSLENIAQXNTXPDASXFLVQPYDKSSLKAIEKAIVSSDLGMTPNNDGELIRLSIPQLTSDRRKELSKIVAKQAEEGKVALRNIRRDALKAYDKLEKEKKLSEDNVKDLSSDLQKLTDEYMKKVDTIFKQKEKELLTV

SEQ ID NO: 8632 - protein, 148 aa, Glycine max
  unsure (1)..(148): unsure at all Xaa locations
  Clone ID: GLYMA-23APR03-C10139_3.p
MGRGLMFGGPDFFSRCFSSVLGGIKSVDSHEWVKQEGSVATIGITDHAQDHLGEVVYVELPEXGGTVSQKSGFGAVESVKATSDINSPISGEIVEVNKKLTETPGLVNSSPYEDGWMIKVKPSDPSELDSLMGPKEYTKFCEEEDASH

SEQ ID NO: 8633 - protein, 461 aa, Glycine max
  Clone ID: GLYMA-23APR03-C10211_1.p
MGERGDEAVTPAGRLFLQAEMKQVIHCVIGLKNPIDAELVKSQVRNSTMLQHPRFTSLMVRGEGGVEHWRPTEIDIDRHVLIIEEAVGEREEEDESAINKYLAELSIDSDGLSMEKPLWEIHLLKAHKCVIFRIHHALGDGISLMSMLLASCRKLNNPNALPTIAASASTSASTSASKTNLINFRNLLATLWFCFIFALEFILRCLWIRDPKSALTGGAGVELWPRKIATATFSLEDMKTVKTAANATINDVLFAVISSGISRYLDFRAPNGLRDGVQLTGLAMVNLRKHPGLQELSNMMRSNSGARWGNKFGMILLPIYYHRTNTSDPLEYLKRAKAMIDRKKRSLEASFSYKIGDFVMSTLGPKFASLLNYRILCHTSFTISNVVGPQEEIMIGGNPITFLRANNSALPHALILNMVSYAGRADMQVQVAKDIIPDPEFLAKCFEDALLEMKEQVTAKI

SEQ ID NO: 8634 - protein, 336 aa, Glycine max
  Clone ID: GLYMA-23APR03-C10337_2.p
FFDFKCVPDIISFREFSVELSSNSFLAYKSAKVFVAGHRGLVGSAIGRKLTQLGFTNLVLRSHAELDLTRQSDVEAFFAYEKPEFVIVAAAKVGGIHANNTYPADFIAINLQIQTNVIDSAYRNGAKKLLFLGSSCIYPKFAPQPIPEDALLTGPLEPTNEWYAIAKIAGIKMCQAYRIQHKWDAISGMPTNLYGPYDNFHPENSHVLPALMRRFHEAKVNGAKEVVVWGTGSPLREFLHVDDLADAVVFMMEKYSGLEHLNVGSGKEVTIKELAELMKEVVGFEGDLVWDSTKPDGTPRKLMDSSKLASLGWTPKVSLKDGLADTYKWYLENVNL

SEQ ID NO: 8635 - protein, 225 aa, Glycine max
  Clone ID: GLYMA-23APR03-C10337_4.p
PEKKITKNTEISKTQKKKTKNAETPKTEKKKTKNAETPKTEKKKTKTHASAKTEKKKNAEIPKIEKKKTKSAEIPLTDGKTKRDREIAKEENKKKTKKPKLSNGTSKQRDEGSKKGVAEGKGEEGKMNVFPMNRIRTMIKGEDPDMRVSQEALLAINNAVEKFLEQFSQEAYAFCVRDRKKCLSYDHLAHVVSKQRRYDFLSDFVPERVKAEDALRERSAAGTGG

SEQ ID NO: 8636 - protein, 214 aa, Glycine max
  Clone ID: GLYMA-23APR03-C103725_1.p
MASSKLVSTNPDLPRDPSSSSSSSSSISPLSSLLSDLHPMDDLLKSITPNSVDDFWKGIAAASTDNAGGVTLEDFLTKAIPVTEEDVRGAPPPPPSFLPFPAEGSSSSVEPFANNGVGSAPSNSVQKGKRRAVEEPVDKATLQKLRRMIKNRESAARSRERKQAYTSELEYLVHQLEQENARLLKEELFECIIPIEVMPKPKKKLRRVNSAQSL

SEQ ID NO: 8637 - protein, 378 aa, Glycine max
  Clone ID: GLYMA-23APR03-C107301_1.p
METKIVLARPFSLESESDPDANYKAPNILRRILSLFSNVRPGSDVSCFKLPPVFNMPKSELQCYGECVYSTALDMLSNINRGNTPLDRLISVVAWSISTVRPLWFGVAPYNPTLGETHHVSKGNLNVLLEQVSHHPPVSALHATDDKENIEMIWCHSTVPKFTGTSVEAHVHGKRQLKLHNHGETYEMNAPNLLIRIFPIPGNDNVGDVSIRCLETNLVAELSYISQSFFRFGTNRRQIKGKIIDSLSAKLLYKIEGHWDSTVTVKNTDNAEVRVIYDANEVISGLQAPIVMDPESVWPTETTLVWSELSQAIVNKDWEKATEAKKTVEERQRELQRERESKGKTWIPKHFRVSYSKEEGWDCSPIQKSVPNAPIVTL

SEQ ID NO: 8638 - protein, 162 aa, Glycine max
  unsure (1)..(162): unsure at all Xaa locations
  Clone ID: GLYMA-23APR03-C10754_2.p
MVCAISSSPFSTLSFRRLVVSNATVSPCKPRAVKLLTALPSAGRRQLLFFLTATTAFTAREAASVAQDIPLFGIRKSLKKVEEEAEEIVKEGFEAADKGLVAAXKGLETAEKGLVAAEREIEEAVSFGGLAQAGAVAGAEVFGILVATAVVNGILGPEAQKS

SEQ ID NO: 8639 - protein, 188 aa, Glycine max
  Clone ID: GLYMA-23APR03-C10789_2.p
MEQDRRFELIDQAIQKLVHDNTNKVQESLHNNDAQYQHPLSHLLSVSQLKMLKGEEILEQFEASSSSEPVASITQETESENEDAGESKGSENDEIIKELKKLKRQNFVTHCLLSVMIVLTVAWQLSEVSLILKVKDGISHPFRSFGNMLKGMVKVPNMNGQEADDKEHPSESPSIPSMIIPNMSHNGN

SEQ ID NO: 8640 - protein, 117 aa, Glycine max
  unsure (1)..(117): unsure at all Xaa locations
  Clone ID: GLYMA-23APR03-C10790_11.p
MFFFKWFHLFITFHVLAATPIFSLTDSSNQVSTNFLDNAKKPEVFYWMVKIRRRIHENPELRYEEFETSKLIREELDKLGIPYKYPVAVTGVIGYIGTGNSPSVALRXADMGALPIQ

SEQ ID NO: 8641 - protein, 184 aa, Glycine max
  Clone ID: GLYMA-23APR03-C10803_1.p
MEKMELAETPLPLLSLNHVSFVCKSVSESVKFYEDVLGFLLIKRPSSFKFEGAWLFNYGIGIHLLESEKVPVKKREINPKENHISFQCSDMKVIMQKLDAMKIEYVTAVVEEGGIKVDQLFFHDPDGYMIEICNCQNLPVLPISSCPLKQLGGEATFKINCFAEESMSMLMMDNFVMDMLKISI

SEQ ID NO: 8642 - protein, 198 aa, Glycine max
  Clone ID: GLYMA-23APR03-C108143_2.p
MPSLRILNKICYSINQYCKYKYRTISSTAQLQGSWMEKVKNVITGQKSTPQSQGDASQVTSDSFTLLRFADEMKNAKRIGAFKEFMVGRSSEATFSSAFDKYEAIIRFLGALDPTGENLPTAQKQEAAKHCNCTIADVEDALAKFTWAKEAQKKIQKLKEEGKPMPKSFAEVMLLIVTLIPNYLVGFNLSSCEDILVC

SEQ ID NO: 8643 - protein, 217 aa, Glycine max
  Clone ID: GLYMA-23APR03-C10841_2.p
MAAYKADDDYDYLFKVVLIGDSGVGKSNLLSRFTRNEFSLESKSTIGVEFATRSIRVDDKVVKAQIWDTAGQERYRAITSAYYRGAVGALLVYDVTRHVTFENVERWLKELRDHTDANIVVMLVGNKADLRHLRAVSTEDATTFAERENTFFMETSALESLNVENAFTEVLTQIYHVVSKKALEVGDDPAALPKGQTINIGSRDDVSAVKKSGCCSA

SEQ ID NO: 8644 - protein, 201 aa, Glycine max
  Clone ID: GLYMA-23APR03-C10844_2.p
MEHENFQVTLSTTCLSSLSLGRRDSKHGKFQKINSIMLCSCVSKEPRGSQMTIFYGGQVLVLDDIQADKAKDIMSFAGKGMSQNQNDCAYTFPATTSATPSRPFPFLMNIIPTTANNSVQDHPQTPSKPVICDLPLARKASLHRFLEKRKDRIAARAPYQTSNHMAALNKLAESKPWLTLAPKSPQQDESDSDSSSSFVLF

SEQ ID NO: 8645 - protein, 195 aa, Glycine max
  Clone ID: GLYMA-23APR03-C10844_4.p
MNPWNMRTSKLLSQQVSYPPYLFVEEIPNMGNSSVVTKDARGSQLTIFYGGQVLVFDDIQAKKAKDILSFAGKGMSQNQNDYANTFPATTSANPTRPFPFLMNIIPTSANNSVQDHPQTPSKPVICDLPLARKASLHRFLEKRKDRIAARAPYQTSNHMAALNKLAESKPWLTLAPKSPQQDESDSDSSSSFVLF

SEQ ID NO: 8646 - protein, 219 aa, Glycine max
  Clone ID: GLYMA-23APR03-C10849_3.p
KSRHLSTLITKNNLKFRRNKMGRNHFQQQQHCADESMWMESQGQQQSYALHEDSWSSDNNYGHNHKQFPGMHMNMNNHNNRLGAFAAVDSDLSMQKHHHGNVGGAMHMNNRHGGKLGGGMFQDHGFGHGCYAQGGRKFPFGGHHHGNNNASHHEYFSEESKKYEESYAEEHVGRVTAKVDEMRYERHNWGGGDTRYANPYGRNNMNHKPHKFQWTAKGV

SEQ ID NO: 8647 - protein, 176 aa, Glycine max
  Clone ID: GLYMA-23APR03-C108810_1.p
SGTTSDFFRSGAHHVDLMVVLVFSTWWLKERVRTVPLVAALLSSSNMAVTRGESTLLARWTWPSPTRVCLRGRDGNLGEAMEILDGVTVEGVGIADLLLLIGACVDVEEHKTLLVSGGVDNKAAKAATLNSDALIQHNLYKKLNFLLHCCHFLTAFFLCCCHFSIAFFFYLLDFII

SEQ ID NO: 8648 - protein, 322 aa, Glycine max
  Clone ID: GLYMA-23APR03-C108900_1.p
MSACKTLSCFSLSSSSSFFKPTLLHPRQRLTLTRRCSTSALLEEPEPQSPSVQHLLTSPDGVSTLMKMDRKPLLPHEPHVRWFPYLDAYRCRNGCVLSSAEVVQALAPCISDDRRQRFGSVVRNRSYSVCLVVEGLCDFGNVSATFRSADALGVQSVHVVSCDANKRYKDNRHVSMGAEKWLDIELWNSTKECFKMLKSRGYRIATTHVGMDAVSIHDLDWSCPTAIVVGNENRGISDEALELSDLHCSIPMAGMVDSFNVSVAAGILMHHSVCDRISRMGRHGDLTVEECQILLAEFSLRHSKSSISIVEDYAMRKAATLT

SEQ ID NO: 8649 - protein, 131 aa, Glycine max
  unsure (1)..(131): unsure at all Xaa locations
  Clone ID: GLYMA-23APR03-C10924_2.p
TLHFLIFTFASKHAPTPPWPQESPLPLPFSSPPSSSSSPSHAPAISPTLSPNPNLTPNLKPFRSRSTPSIPXADAPPLPSDQPPLPARPSVAAVAPHRPPPLPPPPRDPLRQRRNPGRRRRCRQSDPSALG

SEQ ID NO: 8650 - protein, 120 aa, Glycine max
  Clone ID: GLYMA-23APR03-C10951_4.p
MALVSGRSSALNPNAPMFIPAALRQVEDFSPQWWDLVKSSTWFRDYWLSQHKEEEFEEVANDSTNDDMENMLSETFDLGMEEDFNVLENEFEQLVMFSEALDHSVQDDPNTGKGSPQSKH

SEQ ID NO: 8651 - protein, 187 aa, Glycine max
  Clone ID: GLYMA-23APR03-C110436_1.p
MASAKWLFKIITFPCITPPRPKSLPAIDGDTTTPPPLIGPSGPKDDDERLKDVFDHLDIDKDGKISSSELMDYFASVGESLSHKVAERVINEFDSDGDELLDFGDFEKLMKQEDSEELEDVLRSAFEMFEVEKGCGCITPKGLQQMLRQLGDVKSHDECAAMIQAFDLDGNGFLDFNEFQQMMSPAS

SEQ ID NO: 8652 - protein, 126 aa, Glycine max
  Clone ID: GLYMA-23APR03-C110542_2.p
MAYEITEIKKIGIGLIGFGLFFTFLGIILFFDRGLLALGNIFSLAGVGILLGWRSTWALFTNRANFKGSASFLLGLFFIFVRWPIVGIILEIYGCVFLFSGFWSSIKVFLYHIPVVGWIIQFISPP

SEQ ID NO: 8653 - protein, 491 aa, Glycine max
  Clone ID: GLYMA-23APR03-C11057_1.p
QLRRPPPPPEAINHPTLPLQPRPPQPVSVPIGPFAYCLGSASRPLAVPPAVLRLRPIGMGTSEVCAAAAALAFSHICDGCRKKLCGCLVGLFHIYNKPVNGEGSFKLAREDSLHLVEALSLVVTELPPDDAKRALEALCIPVITPLQEAINQGPESLSKRPSRQLTVHIDRFAYIFRFVNHPQVVADAIQRLWPIFKAIFDIRAWDMRTMESLCRACKYAVRTSGRFMGLTIGAMLEEIQSLYRQHHQPCFLYLSSEVIKIFGSDPSCADYLKNLIEALFQHTTRLHLLLQEFTARPDIADDCFLLASRCIRYCPQLFIPSSVFPSLVDCSMIGITVQHREASNSILHFLADIFDLANSSVGEQFIPIRDSVIIPRGASITRILVASLTGALPKSRVDVVSYTLLALTRSYGMQALEWAKKSVLLIPSTAVTDVERSRFLKALSDAASGGDTNGLTVPVEELSDVCRRNRAVQEIVQEALRPLELNMVNVS

SEQ ID NO: 8654 - protein, 168 aa, Glycine max
  Clone ID: GLYMA-23APR03-C11381_3.p
MSGTVKKVSDVAFKVGRNIDWDGMAKLLVSDEARREFSNLRRAFDEVNSQLQTKFSQEPEPIDWDYYRKGIGTRLVDMYKEHYESIEIPKFVDTVTPQYKPKFDALLIELKEAEEKSLKESERLEKEIAEVQELKKKLSTMTADEYFEKHPELRKKFDDEIRNDNWGY

SEQ ID NO: 8655 - protein, 375 aa, Glycine max
  Clone ID: GLYMA-23APR03-C1144_2.p
MEGSSCSNDTSYLLAFGENSGGLCPMTMMPLVTSHHATNPSNPSNNTNNNENTNCLFIPNCSNSSGTPSIMLHNNNNTDDDNNKTSTNTGLGYYFMESDHHHRNNNNNGSSSSSSSSAVKAKIMAHPHYHRLLAAYVNCQKVGAPPEVVARLEEACASAATMAGDAAAAAGSSCIGEDPALDQFMEAYCEMLTKYEQELSKPLKEAMLFLQRIECQFKNLTISSTDFACNEGAERNGSSEEDVDLHNMIDPQAEDRELKGQLLRKYSGYLGSLKQEFMKKRKKGKLPKEARQQLLEWWSRHYKWPYPSESQKLALAESTGLDQKQINNWFINQRKRHWKPSEDMQFVVMDPSHPHYYMDNVLGNPFPMDLSHPML

SEQ ID NO: 8656 - protein, 370 aa, Glycine max
  Clone ID: GLYMA-23APR03-C115078_1.p
MDATSSPFVSSRRMGVYDPIHQISTWEENFKSNDTNNLTVSTSIIGEVDMKLDNQFQVQSEDDTHGIFGTSVKYDQDTNRLTDKTQRRLAQNREAARKSRLRKKAYVQQLESCRLKLLQLEQEVDHAKQQGLYIGNGLGSNNLGFAGSVNSGITLFKMEYGNWVEEQNRQILELRTALSSHIGDIQLGTLVQGIMNHYTKLFGMKSAAAKADVFYVMSGMWKTTAERFFLWIGGFRPSELLKVLVPLSEPLTEQQRFDAYGLEKSCQQAEDALSQGMEKLQQMLSDSVGPGQLVEGTHIPQMDTAMERLEALVSFVNQADHLRQETLRQMYRILTIRQTGRFLLALGEYFQRLRALSKLWVNRPQFPGHA

SEQ ID NO: 8657 - protein, 150 aa, Glycine max
  Clone ID: GLYMA-23APR03-C1154_2.p
MADVLSEEQISEIKEAFGLFDKDGDGCITVDEFVTVIRSLVQNPTEEELQDMINEVDADGNGTIEFVEFLNLMAKKMKETDEEEDLKEAFKVFDKDQNGYISASELRHVMINLGEKLTDEEVEQMIEEADLDGDGQVGYDEFVKMMMIIG

SEQ ID NO: 8658 - protein, 348 aa, Glycine max
  Clone ID: GLYMA-23APR03-C11571_1.p
MGGRWRTLSSFYNRITTSFSYSSKPHFPSFNRSISLAAAATSEIPDPDQFGFVDPELDPCVKIPVKAYFLSTSINLKGIQADNHRNVVPPSSRSSSNYVALRFCDFNLDSNGHGFHMKASNCRYMVVYQYGSAVLFNIEDHEVESYLELVKRHASGLLQDMRKDDYAIKEKPLQVEDMQGGPDYIVLKSLDTDGIRIIGSVLGQSIALDYFVSQVDGLVEEFAGINRGMEKTGTFTMDKKKLLQLVGKANSNLADVILKVGLFERSEIAWRDAKYAQIYEYLRDEYEVAQRFGNLDFKLKFVEHNIHFLQEVLQNRKSDFLEWCIIGLLTIENVLSLYEILGATNTVS

SEQ ID NO: 8659 - protein, 199 aa, Glycine max
  unsure (1)..(199): unsure at all Xaa locations
  Clone ID: GLYMA-23APR03-C115_8.p
VTYNYCSFCSFLSPSYTNRASQAFIFWVEDRALFCQDWDGPFHSAXSLSADHQRFLATGIRGAPSSNCAKGNEKRLSEPPNRSAQQVSAKIPPQQVPSFTSSWAVDGLLELQGSESPEKKESLQFGELEWLTDVGXFFGEQFAQEALAAAEVPQLPETHNSSSVASYKTSKSYMSRKKPRIEVLNDDDDDEYFSVPDLG

SEQ ID NO: 8660 - protein, 348 aa, Glycine max
  Clone ID: GLYMA-23APR03-C1167_2.p
MGRPPCCDKVGIKKGPWTPEEDIILVSYIQEHGPGNWRSVPTNTGLSRCSKSCRLRWTNYLRPGIKRGNFTPHEEGMIIHLQALLGNKWAAIASYLPQRTDNDIKNYWNTHLKKKLKKFQAALDPHSASDSTASGQFLPKSFSDRRSLDISSSNNNHGSSIRLSHQSQSSSTTYASSTENISRLLEGWMRSSPKPLKGSSSQDDEDIQLQGINDDDKNNNNFESTTKLVNLHHLQHKVRNKDEHQEGGGGGVDNMVSHEEFDSILSFENLNNAAWDKSTCDSMPEKSSEAAAEYSVDHHHDIAAHERNNIRQKSENSGAPPLSFLEKWLLDESVGHQVEEMMELSPMF

SEQ ID NO: 8661 - protein, 311 aa, Glycine max
  Clone ID: GLYMA-23APR03-C11757_1.p
MSLRVAAVNLLKKLRFPASHVFPASTVTTNAFSGKLKLSRWYQAGEHGWRIDLRDPCLWIVISGHVAMTLGISASTVFAEDATTEAYPDNDPGGDLIGLRKIEDGSVVSNIHTAKWRVFTDKAREFFLQGKLDEAEKLFLSAIEEAKEGFGEKDPHVASACNNLAELYRVKKAFDKAEPLYLEAINILEESFGPDDVRVGVAVHNLGQFYLGQRKLEEARVSYERALKIKRRVLGYGHSECSDMKSRRVAKAEMVQRKILHVMELSKGWYSLGHCYGDGESFLCIRRHRSLSQIYMNFLQIAENVQEGLTS

SEQ ID NO: 8662 - protein, 410 aa, Glycine max
  Clone ID: GLYMA-23APR03-C118007_1.p
MAFTLTTLPTPNVSVTSFTRRTVSNSKPTLSCTLSSHPFKREYTSVMIVPTGIGAAIGGYAGDALPVARALSSVVDCLISHPNVLNAAMLYWPMPNALYVEGYALDRFAEGLWALQPVHQNRVGLVLDAGIEDELRIRQLQVADAARASLGLPVVEYIVTDIPLKVEKWVDPETGQSTGRIKHPDSLLRAVHTLLSRSKVNAIAVVGRFPDDDTDDVDDYRQGMGIDLLAGVEAVISHLVVKELQIPCAHAPAMSRLPMSLSLSPKSAAEEIGYTFLPCVLAGLSNAPQYLVMDSKCLEKGCILASDVDSVILPKDACGGDASLAFARNKNKKPLIITVEENQTVLDDTADKFGLEVLHVSNYWEAIGVIAAHKAGIDPFSLRRDKILNIGCSSFMPINGHSIPRERVVS

SEQ ID NO: 8663 - protein, 287 aa, Glycine max
  unsure (1)..(287): unsure at all Xaa locations
  Clone ID: GLYMA-23APR03-C11882_2.p
MAFSLPPPRSLPHHFTRRSLLLLSTTTTTLSVPSTPPPTPISTPTTPTVTDRVFMDFSLCPNNFLPDRADSLSPLCSDTTLLGRVVLGLYGNLVPLTVSNFKSMCLGLNSTSSSYKNTLVHKVFPGQYFLAGRQGRPDKGEVRPPHDLPRNTDTVAAKAFALTHSRPXVXSLSLSENDDDDEIKLDPGYRNVECLITTGPGPCPQLGNKNIVFGTVLEGLDVITAIASIPTYLPFERIRQFNDLAQFFGDERAQNARNIWNRPLKSVYISDCGELKVTKPSLTPSLP

SEQ ID NO: 8664 - protein, 219 aa, Glycine max
  unsure (1)..(219): unsure at all Xaa locations
  Clone ID: GLYMA-23APR03-C11941_2.p
GQGYSFISKEEFLGMVEREELLEYMLVYSDYKGMSKQQIRECLAKGCNFVLRVDIXWGATLKVFGKSVVFVATESEMVLVERLVDRKAEIMESLLVRIGTAREEMKHVKNFDYVVVNAKGKLDNAVKLMESIIDARKLGFVRGLYNGQSTCEAGKKLYSLIALSLMDEDFDKIGAVDKPSAFRLLRYPGEMGPQICHSTLTLLLTDGVLGLQVTSLLQL

SEQ ID NO: 8665 - protein, 68 aa, Glycine max
  Clone ID: GLYMA-23APR03-C119658_1.p
MHTLLLPSLSCPQLESLSNAIKWEVLQTPLNYETRGSKVLFTTCSKRVASTMQSNKASQLEQLHEEHC

SEQ ID NO: 8666 - protein, 352 aa, Glycine max
  Clone ID: GLYMA-23APR03-C120696_1.p
MIQELSGGALIAGERKPSSINGGGGGGGVLLPITTPSPSSFPSSTTSDVTLTSTTTTAATTAATAATTTTAVENLRCPRCDSSNTKFCYYNNYNLTQPRHFCKTCRRYWTKGGALRNVPIGGGCRKNKSIGVASSVAGKTASTKMKTIASEFGKSPGFGGGFEVEHELPPPPGQILWGSPQNTHLLALLRATQTQNPNPNPSPMSLKEEGTLLGHMVSTDQPLVSNTLLSYRTLGYDAVAQVPSSLGLFGRNNQDQQQQNGGFLVGEHHNNSGIQELYQKLRSSSTVNNNYCSDNNSSQMFMGNMASNYSSSVSNNILETTSVAGGEFGYWNGPTFSNWSDLPTTNGAGAYP

SEQ ID NO: 8667 - protein, 187 aa, Glycine max
  Clone ID: GLYMA-23APR03-C12071_1.p
MFPRLNCMQADQKVSCFGKLRSINMEEYNKSSVKKARLNSLLTTLLDDPILSDVPKNPTFADVYTLINLELGSAMRISVLKLDGTTLDVIVMNSATVKDLKLAIKKKVNDMEQSSMGHRHISWKHVWANYCLSCHNNKLLDDNEALQNFGVRNNSQVQFVSYVMTKESRRHSKRRKHRFFHGLNKRS

SEQ ID NO: 8668 - protein, 443 aa, Glycine max
  unsure (1)..(443): unsure at all Xaa locations
  Clone ID: GLYMA-23APR03-C121245_1.p
MEQENHKIKAVSLLRSRICDPKCISSSAGAMEQENYKIKAVNLLRSRICDPKFIFINESPESNHSKLKFMISSSVTEACNNSILLLGPRGSGKNAVLELVIQDLLQEYPDSISVMKWNHLLPTPDIWWLSEIAMHXCMEQXLLFWKGFSCDDRVKFMVSMLXRVDXAHKTLILLLDEFDLFAQGKQRLLYSLLDAMQSITSQAVVLGISCRLDADQLLEKRVRSRFSHRKLLFLPPSIEDSQKLLMHMLTLPIDSSFPHAYAVEFNRKVQNIIEDRRFKETLNKYLNVDSSVKHLLRFLFCAVSHMDLQTGFLSRENFEIAFTSIQRQPKLECLRNCSILELQILVCMKRLEVKEQSLCNFNSVMKEYISTLTSERYARHVCLRAFEHLIHRELICFTDNRGQSLSVEFRPVKLLISSAELHQGLRANTSCPPKLLKLMDREG

SEQ ID NO: 8669 - protein, 454 aa, Glycine max
  Clone ID: GLYMA-23APR03-C12141_1.p
MAKSTAPPDNYGHSPVHYAVALGDHTTLSRIISSLPRLPDPSLIQTESDSLAQEKIADQISLVLDRRDVPYGETPLHLAVRLNDLFSARALATAGADVSLQNSAGWNALQEALCRRASDIALVLLRLHHRNAWSKWRRRLPRVIAALRRMRDFYMEISFHFESSLIPFVGKIAPSDTYKIWKRDGNLRADTSLAGFDGLKIQRADQSFLFLGDGDHTHDVPSGSLLVLNRDDRKIFDAFENAGGPMNESDLAGFCSQTSVYRPGMDVTKAELVGRMNWRRQEKTESVGEWKAKVYEMHNVVFSFRSRKVAGSESDVAGSEQVLPLELDEDDDGFLVAENPNFGFPMPDKRRHSSFVREETEWVPMGRKSLDLTSVTAPQPRSVTMPTQTKEKEYVRSLRPSVWLTEQFPLKTEELLPLLDILANKVKAVRRLRELLTTTFPPGTFPVKVRALWE

SEQ ID NO: 8670 - protein, 250 aa, Glycine max
  unsure (1)..(250): unsure at all Xaa locations
  Clone ID: GLYMA-23APR03-C12163_1.p
MAHKTLFKPSLILTLRLNKTAISFSHHHPFRHSQPPFPFLNTSPISLPPTTRITNYTHLWCSNYTTVSTIEEGSEKCYLNLSDEELMRQCEMDTFKASGPGGQHRNKRESAVRLKHLPTGIIAQASEDRSQHKNRASAINRLRSLIALKVRKTVDLEAYSPPRELLQILPPKSSIRGSDCGSQIGPNNPKFASGMQALLDLIFAVEGSVSEAAKYLGLSTGALSRLILSXDSLRKEVNDLRATKGMKPLK

SEQ ID NO: 8671 - protein, 830 aa, Glycine max
  Clone ID: GLYMA-23APR03-C1221_2.p
MSDYLKEKGGPRLVIMGETKQLVTLLTRFQAAMKMIKDIVEKSRSSKKSKRLLRKTLKNMTPLLQEINQYNEHLEPPREEINTLMKEKDAVEELVCYSCSRSIWWTKFLSWLPLYGDGLWHNKNNPLAADDNQVKYIKNTLYEVKEVLELLDIENFQQKLKGVGSPIKCPFGVPENPGFTVGLNPLLSKLKMEVLRDGMSTHLLTGLGGSGKTTLATKLCRDEEVKGKFKENILFFTFSQTPKLKNIIERLFEHCGYHVPEFISDEDAIKRLEILLRKIEGSPLLLVLDDVWPGSEALIEKFQFQMSDYKIVVTSRVAFPKYGTPYVLKPLAHEDAMTLFRHHALLEKSSSHIPDKEIVQKVLILLSDIGSNLYCKGLPLAVKVIGRSLSHRPIEMWQKMVEELSQGHSILDSNIELLTCFQKLLHVLEDNPNNKECFMDLGLFPEDQRIPLPVLIDIWAVLYGFDDDGIEAMDIINKLDSMNLVNVLVARKNSSDSDNYYYNNHYVILHDLLRELAIYQNNLEPIEKRKRLINDINETGTLQQVPARTLSISADETNTSDQSHIQPSQAEVLVLNLQTKKYSFPEYMEKMSELKVLIMTNYGFHPCELENCKLPSSVSNLKRIRLERISVPHVGALKNLEKLSLYMCSNISQIFENGTIPVSDSFPKLSDLNIDYCKDMVELPTGICDITPLKKLSITNCHKLSSLPQNIGKLLNLELLNLSSCTDLEEIPDSIVKLSKLRLLDLSNCISLSILPEDIGDLCNLRNLNMTSCARCELPYSVTNLENLKVVVCDEETAASWEAFEAMLPNLKLEVPRVEVNLNWLHSISS

SEQ ID NO: 8672 - protein, 460 aa, Glycine max
  Clone ID: GLYMA-23APR03-C122_1.p
APPPSTPPLTALPPTTDPSVTIPPPTPCSSPTTSTTIPTPPTPSPFASPPPPSPPSKPPTLPLPASPPESPPPPPPRISSPPGPLSLPPPPRPPPSTSNAPPTLSTIQQFWVQLGKVKLGILQTHWPSALDMKVLPKVPNVVTSETPPERPGEPDCPYFLKTQRCKFGSKCKFNHPKVSSENADVSSGLPERPSEPPCAFYMKTGKCRYGTACKFHHPKDIQIQLSDDLSQNVAQTQTNSMMGGATGDTQPIKSLISPSLQNSKGLPVRLGEVDCPFYMKTGSCKYGVSCRYNHPDRNAINPPIAGLGASILPSSAANLNIGLLNPAVSAYQAFEPRLSNPMVGIAETIYPQRPGQIECDFYMKTGECKFGERCKYHHPIDRSALSLSKQATVKLTPAGLPRREGDVICPYYLKTGTCKFGATCKFDHPPPGEVMEMAKSQGTSANGEEAEGDTSALEQL

SEQ ID NO: 8673 - protein, 203 aa, Glycine max
  Clone ID: GLYMA-23APR03-C123023_1.p
MLSESSNTHNSSKMSFRITKEDGFFSRLIAKETTTPNSSSRIFYYGETSVAVPFTWEAQPGTPKHPLSETSLPPLTPPPSYFSSPKKSHNTKRRNYYSNKASNIFSSIFLRLVGSRKSLHNHHHVSPSSSWSSPSSSSSSSSSWSLAHYNNNNNNSSPSFSMRDKGRGQGGRSSKHNKCSNGFRGCYPFGNMRNANVSHGSVD

SEQ ID NO: 8674 - protein, 231 aa, Glycine max
  Clone ID: GLYMA-23APR03-C12306_1.p
MIMSFPIFFFTLLPLLFHYSHCTTILVDGSSEWKNPTVHIGDSIIFNHKQHHNIYIFKNQKAFDLCNFTQATLLTNPNTASYMWHPSRPGFFYFSFNDGSLKACQASQKLAIKVITSVAAAATPHASAMPPAPFSGEVSPSPLYPWHYNNPLHAASPGPSPSASVTAPMVPYKSSSMPFISSNPAVPLPTDEVDSASSIHPLPTSSGHELQVMIGSFGLLIVVHTITLLLL

SEQ ID NO: 8675 - protein, 153 aa, Glycine max
  Clone ID: GLYMA-23APR03-C12485_1.p
NVFWSSSQESEKEENTARLVVVAVTQGSAESSKSDEKIPSWAKPDSDEPPPWVRDEPNNKNSNNSQQEEEFEIPFYAYLLASAITAIAAIGSIFEYVNQRPVFGVLSSDSVFYAPLLGFFVFTGIPSSAFLWFKSVQAANKEAEEQDKKDGYL

SEQ ID NO: 8676 - protein, 186 aa, Glycine max
  Clone ID: GLYMA-23APR03-C12485_3.p
MCVSGQRVGGCTNSLLTMFCAGAGQNHHASHPRTFFGVPRGDQRKRKTPHRLVVVAVTQGSAESSKSDEKIPSWAKPDSDEPPPWVRDELNNKNSNNSQQEEEFEIPFYAYLLASAITAIAAIGSIFEYVNQRPVFGVLSSDSVFYAPLLGFFVFTGIPSSAFLWFKSVQAANKEAEEQDKRDGYL

SEQ ID NO: 8677 - protein, 462 aa, Glycine max
  unsure (1)..(462): unsure at all Xaa locations
  Clone ID: GLYMA-23APR03-C12505_1.p
RFGVFVELPNLAIVEFRRATVLLYFEYCAMSCRAYSASLEEFGGVGDGTTLNTKAFQAAIDHLSQYASSGGSQLYVPPXKWILADVIITGDTLFLHKDAVILASQDENDWPVIDPLPSYGRGRDTQGGRFSSLIFGTNLTDVIITGDNGTIDGQGDLWWQKFRKGELKYTRPYLIEIMYSDNVQISNLTLVNSPSWNVHPIYSSNLVVQGITILAPVTSPNTDGINPDSCTNTRIEDCYIVSGDDCVAVKSGWDEYGIAYGMPTKQLVIRRLTCISPFSAVIALGSEMSGGIQDVRAEDIVAINSESGVRIKTAVGRGGYVKDIFVRRMTMKTMKWAFWMTGNYGSHADDNYDPNALPVIQNINYRDMVAENVTMAARLEGISGDPFTGICISNVTIQLAKKAKKVPWTCTDIAGISSDVTPAPCGLLPDQGEEKIGACTFPEESLPIEDIKVQTCTYRRNL

SEQ ID NO: 8678 - protein, 143 aa, Glycine max
  Clone ID: GLYMA-23APR03-C1250_2.p
MTEAHIRKKPGMASVKDMPVLQDGPPPGGFAPVRFARRIPNKGPSAVAIFLTTFGAFSWGMYQVGQGNKIRRALKEEKYAARRSILPVLQAEEDERFVKEWHKYLEYEAEVMKDVPGWKVGESVYHSSRWVPPASGELRPDVW

SEQ ID NO: 8679 - protein, 545 aa, Glycine max
  Clone ID: GLYMA-23APR03-C12636_14.p
MGFNIQPYGIQSMLKEGHKHLSGLDEAVLKNIDACKQLSTITRTSLGPNGMNKMVINHLDKLFVTNDAGTIVNELEVQHPAAKVLVLAGKAQQEEIGDGANLTISFAGELLQGAEELIRMGLHPSEIISGYTKAINKTVQILDELVEDGSDNMDVRDKEQVISRMKAAVASKQFGQEDIICSLVADACIQVCPKNPANFNVDNVRVAKLLGGGLHNSTVVRGLVLKSDAVGTIKQAEKAKVAVFASGVDTSATETKGTVLIHTAEQLENYSKTEEAKVEELIKAVADSGAKVIVSGGAVGEMALHFCERYKLMVLKISSKFELRRFCRTTGSVAMLKLCQPNPDDLGYVDSVSVQEIGGVRVTIVKNEEGGNSVATVVLRGSTDSILDDLERAVDDGVNTYKAMCRDSRFVPGAAATEIELAKRVKDFSFKETGLDQYAIAKFAESFEMIPRTLAENAGLNAMEIISSLYAEHASGNAKVGIDLEEGICKDVSTLSIWDLHVTKLFALKYAADAACTVLRVDQIIMAKPAGGPRREQPAGGMDED

SEQ ID NO: 8680 - protein, 531 aa, Glycine max
  Clone ID: GLYMA-23APR03-C12822_1.p
MSDGFCSTHLQIMVRTRGLGRALGQVTRRGVGRGDHDDSDDAPQRRRPTASARRQRVAVTADHVDEPVIPDPDVQDDPMGAPAVVEDIPADAGSEAAEDQPQEFPDGPSDPSMLTAYADHVACSVWTGEERPELKLSSHGRKVHSLGRPVPAIEGLIAGTGVSPLIACSVDTGDWGLLSTFVERWHRETSSFHLPVGELTITLDDVSSLLHLPVIGDFHAFEPLHVDVAVQMLVDLLMVSPESARAETVQCRRPYVRLQWVRDIYQRRCQAGHWTAAARAYLIHLLGCTLFANKSATNVHVVYLEAIRYLSKTDRYAWEVAALVYMYDQLNDASMSHSRQLGGYITLLQCWIYEHFPSVAESTADQDYDEASPRACRWIATKKTVKSIRTPSYRERLDRLRISDVCWIPYGEHREAQDFHVRSCYSGLLRWGPVAVYYRPEKVVRQFGYTPAIPAPPVDSWVSYDDIHDRWMHYEGHIVPVGEVCVVLGACSSDYMDWFFRISHPFMTPGHALDPLPHGHASQPRVVPQAP

SEQ ID NO: 8681 - protein, 138 aa, Glycine max
  Clone ID: GLYMA-23APR03-C12853_3.p
VITTSSNRSEFRRRKVPFLYACACCSYTHRPIESESGSIILILNFFSWIGYPPEGYGKEGYPPPGYPPAGYPPAGYPPPGYPPQQGYPPPPYPAQGYPPPYAPQYAQPPPRQQNSTGPGCLEGCLAALCCCCLLDACF

SEQ ID NO: 8682 - protein, 294 aa, Glycine max
  Clone ID: GLYMA-23APR03-C12924_1.p
MLVLFLFLIFLQEHVLTGGHGLMVKGYDPVVKALANDLDIRLNHRVTKISNGYNMVMVTVEDGRNFVADAVIVTVPIGILKANLIEFTPKLPDWKASAINDIGMGNENKIALRFDRVFWPNVEVLGIVAPTSYACGYFLNLHKATGHPILVYMAAGRFAYDLEKLSDESAANFVMQQLKKMFPDASKPVQYLVSRWGTDPNSLGCYACDLVGMPDDVYERLRAPLGNLFFGGEAVSMDDHQGYVHGAYSSGVMAAENCQRHLLQKQGHMESLPLVPSVRHEIFETTIPPQISRI

SEQ ID NO: 8683 - protein, 231 aa, Glycine max
  Clone ID: GLYMA-23APR03-C130544_2.p
MYASTSFTSQMVHDLLMDTNSRKLLLQDPLLHQSMNSANSPDAMSYNTTDSYFKGRDFDANVVMILSVLLCAVICSLGLNSIIKCVLRCSNIVINNNDPSSSSVSYNNPSPRLANTGIKKKALKTFPTVSYSTEMKLPGLDTECVICLSEFANGDKVRILPKCNHGFHVRCIDKWLSSHSSCPKCRQCLIETCKKIVGSQIQPVPPVPESTIIRIQPLEPEGLERNYREVC

SEQ ID NO: 8684 - protein, 227 aa, Glycine max
  Clone ID: GLYMA-23APR03-C13057_1.p
MSCNGCRVLRKGCSESCMLRPCLQWIETAQAQGHATVFVAKFFGRAGLMSFISNVPENQRPALFQSLLFEACGRTVNPVNGAVGLLWTGNWHVCQAAVETVLRGGTLRPMPELMGLDAPAAAATDEASEAEVACTDTWRIRNPNPNCRFTSSRSSGCGGGGKRKRSEELAKLQAQPNLDLRLTPVFSQKVESRRPESPSMTSVESGTTTENRFGDQWGHRKVLNLFI

SEQ ID NO: 8685 - protein, 158 aa, Glycine max
  Clone ID: GLYMA-23APR03-C130582_1.p
MNKGAAGGLGGGAGAGSGPTAAAAAAAAQKQKTLVQRVEGDIANIVDNFSHLVNVARVNDPLVRNSQEAFMMEMRAARMVQAADSLLKLVSELKQTAIFSGFASLNDHVEQRRIEFNQLAEKTDHTLSRVGEEAAASLKELESHYSSSALKTMQNLQP

SEQ ID NO: 8686 - protein, 94 aa, Glycine max
  unsure (1)..(94): unsure at all Xaa locations
  Clone ID: GLYMA-23APR03-C130739_1.p
RSSFQFSSSHRSASKETYPDRPCICFISYLNSAIPXLDIFYVLNPVIRATELKTXGFLDLQHISKLFTGRFSSQNMNSKRTKTSYKSKMHIGYT

SEQ ID NO: 8687 - protein, 287 aa, Glycine max
  Clone ID: GLYMA-23APR03-C131780_1.p
KRRSQHIRTLTRRLFRSNCQSAPPRRTATPKWKGAKVEGRGRRIRIPATCAARIFQLTRELGHKSDGETVRWLLEHAEPAIIEATGTGTVPAIAVSVGGTLKIPTTSSNEKEAVADASNKKRKRPSNSEFVDININDSVSQSSGLAPVHVAHGLVPVWAVTNPSMVVPANAFWMTPNPPMGPANQQHQLWALSPSVFNVAARPISPLVTTNIPEAWPIMTACSNDSNSAVSTSTVGAKVATESSMAPSVSSSGTKSARTRLLRDFSLQIYDKQELQFLGRSGTHAQS

SEQ ID NO: 8688 - protein, 222 aa, Glycine max
  Clone ID: GLYMA-23APR03-C132_2.p
MGRGKIEIKRIENTTNRQVTFCKRRNGLLKKAYELSVLCDAEVALIVFSSRGRLYEYSNNNIRSTIERYKKACSDHSSASTTTEINAQYYQQESAKLRQQIQMLQNSNRHLMGDALSTLTVKELKQLENRLERGITRIRSKKHEMLLAEIEYFQKREIELENENLCLRTKITDVERIQQVNMVSGPELNAIQALASRNFFNPNMLEGGTVYPHSDKKILHLG

SEQ ID NO: 8689 - protein, 103 aa, Glycine max
  unsure (1)..(103): unsure at all Xaa locations
  Clone ID: GLYMA-23APR03-C13350_3.p
IFLHHTTLLGSVFLRCFDLKNRSKPSLAAFVGCFVPMMLGVCFLCPSMDCLWHKYHYCPKCQEKVVSSXMNNTDPNVADFEKSDPCAVMDPPHWTQESFALSG

SEQ ID NO: 8690 - protein, 151 aa, Glycine max
  Clone ID: GLYMA-23APR03-C13361_1.p
VLMIIKGLFGRYERWNPVHPTHGAFWGMGVGVGCGVGWGPGFGPEVIGYVGAGCGIGFNVGITFAGVGVGLPANFIFEGPYNGVSWIGNLPCISDLQREANGKLFEFRQKHLSIKGINFFDKKNSLPLLTSASKSIQAFRNQIFSSHKGKD

SEQ ID NO: 8691 - protein, 248 aa, Glycine max
  Clone ID: GLYMA-23APR03-C13391_2.p
MRGSVLLKNNLNKARTTMDKPHWITDGVWERLCNHWRSEGFKKKSTQAKTNRASNCGASHTGGSISASQHRANMMKETGTIPTPLELFRRMHQRKDNTWVDRRSQHVNEVFTRTLKQLTKRASAQGKPPPSELDVWCDVARSKKGKVYGFGMESTVMATSPCYRCSSSSSMEWVKKQEFDELAKEMEEVKNERDKLQARVANTERLVEHNNALIRELIESMKFTVNDSQDEGEESDREYEDEESPSEP

SEQ ID NO: 8692 - protein, 331 aa, Glycine max
  unsure (1)..(331): unsure at all Xaa locations
  Clone ID: GLYMA-23APR03-C134052_1.p
MFTNSQTVMQTLLSSPSAEPDLSLNISPPSISDSEAAKDVVGSFGKVLYSDICSTSDSGSSGGSDLSHEFHNLGHHHHREPTLKLGFGTVDLNPHHHQVQGVPRSFNHHHHLLQPHIYGRDFKRSARVVNGVKRSVRAPRMRWTTTLHAHFVHAVQLLGGHERATPKSVLELMNVKDLTLAHVKSHLQMYRTVKSTDKGISTAGHGQTDIGLNPRLGINVHLHAPSPICDTPNLPDPIQNSQRTPWQSSIETKTDNSRQEEPEIGLTYSHLKGNNNNNETMVDGHNNSGGLDSSPLSRSSEAMLDLEFTLGRPNWXKDHPESSRELTLLKC

SEQ ID NO: 8693 - protein, 235 aa, Glycine max
  Clone ID: GLYMA-23APR03-C1341_8.p
MAKDKYRSFLHDEPDNVQWRHGGPPTYDAVNKLFEEGRTKEWTEGSLEEIVQNAIKSWEMELSHKTRLQDFKTINPEKFKLFVNGREGLSGEDTLSLGSYNALLQSSLPEDLKPYKADEETFESSHEAFKSAFPRGFAWEVIKVYSGPPEIAFKFRHWGFFEGPFKGHAPTGKMAQFYGLGTVKVDDSLKVEEVEIYYDPAELLGGLLSGNHINHPIEEDGTKTSAPSQGCPFSK

SEQ ID NO: 8694 - protein, 497 aa, Glycine max
  Clone ID: GLYMA-23APR03-C134566_1.p
MERQRSFSFKPTRLLVFSFTIFSSVLFLSTFTTWLTNYTPSIHQHIHLYFNTSTSSSVGDSVVLPPLTGHSLTKNFTVISVVKVPTLIDNRLARTQKSISGFKSEPVRHHVGASNANFTSMQEYGTSPERVPSKEEKKVVAGGLVGKTQVPILKKIEQKGVEGCDLTKGYWVFDESYPPYSKDSCPFIDEGFDCEGNGRLDRSYTKWRWQAKGCDLPRFNATKMLELIRGKRLVFVGDSINRNQWESMLCMLLGAIKDPTRVYETHGRKITKEKGNYSFRFLDYQCTIEYYVSHFLVHESKARIGQKRRPTLRIDAIDHGSSRWRGADIVVFNTAHWWSHSKTQAGIYYYQEGSVVHPQLNVSTAFRRALKTWASWVDKRINHRKTRIFFRSSAPSHFRGGDWNSGGHCTEATLPLNETLSTNYPEKNIIVEEVIKQMKTPVTLLNITSLSAYRIDGHPSIYGRKTRSSRIQDCSHWCLPGVPDTWNELLYFHLQSR

SEQ ID NO: 8695 - protein, 320 aa, Glycine max
  Clone ID: GLYMA-23APR03-C1356_1.p
MEDQSNQENPGRTTSGVSHHQFPIPKVAIAASSGRNGSHRTCLPKLTHHNYVEYLSESSTYNLPKTSTEFMMKSSYLPVGNISDGYGVSGTDRNFFYSDDPGKACSFKTIGSSSNDLDISKVGFWRADEGIKVETESSQNLVYAESHASWTSDSVGDKHNASHDPMFMVGAPTLLPKPGCSSSKQKARVTERQRRQRIADNLKALHELLPNPAEGSQAYVLDDIIDYVKYLQLQIKEQSGSRLLQADSTAIPLVFHEGYGHYINQKMLNEPLEEIMGKLVEDDSAAAVQLLESKGLFLLPMALVDELSEAVQMFGGSALV

SEQ ID NO: 8696 - protein, 184 aa, Glycine max
  unsure (1)..(184): unsure at all Xaa locations
  Clone ID: GLYMA-23APR03-C13582_3.p
RTAASVRSIKSRTTVASAPVPRSSQRAEKRMEFYTRLEDKHHAMEAAKNQSEARTKKEMEEAIKQLRKSLTFKASPMPSFYHEGPPPKVELKKXVSCMGQLPATRAKSPKLGRRKSNNGAVNLSEGDKEKGAGIRRKHHTLKTNNYGDKSDVNGLSDPKNKTKHIEGINATEVTGQANLEIGSQ

SEQ ID NO: 8697 - protein, 250 aa, Glycine max
  unsure (1)..(250): unsure at all Xaa locations
  Clone ID: GLYMA-23APR03-C13594_2.p
MKKLYRKGTVHPSPSPSPPTISDHLSFLPAAILTLTLSLSPKDQEVLAYLISCSSSSSSTTNFSGNHRRNPKVVVDGDHPPVFNCSCFRCYMSYWVRWNSSPNHQLIHEIIDTFEDSLAHXQNLRRKDKRNKRGSKTKPSELTRSEFPSSPPESVPESSSSSAGAGEVEAGQGGDGGGDXEKGSVRRFVXLXLEKGFGALGSEIKGKGGFNFTSFLLVLLFLFIYKLFFFFLYINFSAMYKRKMAVSFFA

SEQ ID NO: 8698 - protein, 224 aa, Glycine max
  Clone ID: GLYMA-23APR03-C13649_1.p
MIEGGRIWLKAWQQAAVAVGSAVGALLDPRRADLIAALGETTGKHAFERVLQRMKSSPEGRALLLERPRVVCAKVGHAWDLPANTFGAAYARFMGSRNFSPDDRPPVRFMDTDELAYVAMRAREVHDFWHTLFDLPTNLIGETALKLIEFEQMGLPMCLLSVIGGTARFNEKQRKLFYQHYFPWAIRAGMQSTDLMCVYYEQHFHEDLEDVRRKLQIVPAPTVP

SEQ ID NO: 8699 - protein, 130 aa, Glycine max
  Clone ID: GLYMA-23APR03-C136_1.p
MSGKGAKGLITGKTSAANKDKDKKKPISRSSRAGLQFPVGRIHRLLKSRTTANGRVGATAAVYSAAILEYLTAEVLELAGNASKDLKVKRITPRHLQLAIRGDEELDTLIKGTIAGGGVIPHIHKSLINK

SEQ ID NO: 8700 - protein, 236 aa, Glycine max
  unsure (1)..(236): unsure at all Xaa locations
  Clone ID: GLYMA-23APR03-C13726_3.p
MRRAIAFLVHPRFLLLFLVLSIFLIFTFSGSTTTNGFTNPKQVVEIIEEKPEEEPEITHRVFLDIDIDKQRLGRIVIGLYGQVVPKTVENFRALCTGEKGKSENGIKLHYKGTPFHRIISGFVIQGGDIVHHDGKGSESIFGGTFPDENFKIKHSHAGVVSMANSGPDSNGSQFFLTTVKARWLDGEHVVFGKVVQGMDIXYVIEGGAGTYSGKPRKKVVIADSGEIPKIHWDEET

SEQ ID NO: 8701 - protein, 341 aa, Glycine max
  Clone ID: GLYMA-23APR03-C13783_1.p
MVSVFNEILFPPNQTLLRPSLHSPTSFFTSPTRKFPRSRPNPILRCSIAEESTASPPKTRDSAPVDCVVVGGGVSGLCIAQALATKHANANVVVTEARDRVGGNITTMERDGYLWEEGPNSFQPSDPMLTMVVDSGLKDELVLGDPDAPRFVLWNRKLRPVPGKLTDLPFFDLMSIGGKIRAGFGALGIRPPPPGHEESVEEFVRRNLGDEVFERLIEPFCSGVYAGDPSKLSMKAAFGKVWKLEKNGGSIIGGTFKAIQERNGASKPPRDPRLPKPKGQTVGSFRKGLTMLPDAISARLGNKVKLSWKLSSISKLDSGEYSIITTHIYIPSSAECRYIVF

SEQ ID NO: 8702 - protein, 136 aa, Glycine max
  unsure (1)..(136): unsure at all Xaa locations
  Clone ID: GLYMA-23APR03-C13783_2.p
MKTTYLVVPFLTTIELSLPYAEEHTHKKKKKTYRIVSMMEEMEVRRVEWWXNMMYPVXRVWFVVATRLGIRKNGLLKLRHDVRACEYEDIRVMXEILNXXESFGHSSSSRKGNNNKKGHCWKLLRWARCAPYMCRA

SEQ ID NO: 8703 - protein, 96 aa, Glycine max
  Clone ID: GLYMA-23APR03-C13794_7.p
MSLRRFLGYSDGEVMRSDAKPCSRLMRHTAAIFSVGGALGFWVLCRMHYGPRITNPRSLRWAACGAVTASSGTALLVRLFSPECEPQNIAAYDNKN

SEQ ID NO: 8704 - protein, 168 aa, Glycine max
  Clone ID: GLYMA-23APR03-C13922_2.p
MDAETESPAPETSPAVIHPAVAPISYLLGTWRGQGEGGFPTINSFSYGEELHFSHSPNKPVIGYTQKTWKLSSGEPMHAESGYWRPKPDGTIEVVIAQSNGLVEVQKGTYSAEEKVIQLQSEIVGNASKVKEIRRCFQLVDGNLCYDVQMATNKITLQPHLKASLKKL

SEQ ID NO: 8705 - protein, 449 aa, Glycine max
  unsure (1)..(449): unsure at all Xaa locations
  Clone ID: GLYMA-23APR03-C13940_1.p
MAILPPASSLPSSSEGICCSTYGITSNSIKLPIDGRRWHDLASTRCKSPFFGSPHLLWLSTGHDLCLSKVNVAADYSDSIPDSSDQMDEQGYHPLEELKGSNDIQPARLSPAEIAKTTVEANKSALLVFPGMVHCEPHDQISWAEFQYHIDDVGDIYFEFSDDANLLADCGANNPVNALIGMDIPIYDNNRRTASEYDIFNNGSDDEFKFDDDDIEVSEMEEFNIPVNWGQSDTTKSVHPIYFSKCLAKAINNMEYVKRMNHPSNGVSIIGFLRPVYGEEKSYLRWMYHTXDGDVYISDWRDFYSNSDDDDERDTNLTLYRLEILSIELHSMYGYQSEISVLDFQDAEPDILAHSSSEILERFNQFCDDEIKALCKKKGLYGEGAYLVGVDSLGVDVRVLSGAEVKTHRFPFKVQAANANAAEKQIWQLLFPRSRRKKNMKKWWSASMI

SEQ ID NO: 8706 - protein, 136 aa, Glycine max
  Clone ID: GLYMA-23APR03-C13983_3.p
MGSGAGNFLKVLLKNFDVLAGPVISLVYPLYASIRAIESKSPIDDQQWLTYWVLYSLITLFELTFAKVLEWIPIWPYAKLIATCWKKDALGKRDDILTAAEKYIQENGTEAFENIINRADKSRRGDGYYTMYDETY

SEQ ID NO: 8707 - protein, 512 aa, Glycine max
  Clone ID: GLYMA-23APR03-C13996_1.p
LTSDNTRMSDHCLKSSKVDSSSSELCADDTILGDKCVVEDDSVSQYSINHISQTDNELSFLDNDGWLDIGNFEDVDRMMLSCDLTFGMGSLNNEEEFCWLRSSQGTEGSDDAFKSAFKFSSAEVSPLKSISDYNMDSKESIVGLPINDSNKRSSPLDEKIRSQMDVIDNGVPAPLSMFSESDSDMKSVNIDDLLPKEKLQRKLPKPSAGRRKNGYLQNGGSVHPYADPEQCADTKQSFGASSSGVTSLDSIQKHKLNIDSDSLGCIQTQIPMTRPDYSHAPNHTSLFPTLLWSQAEHDGASICHLHQIMDPMVIKTEKRIEKSMYRLFENENEGHSEVQGVGLGFSPEIDSSTVQESSSMGSALDQASPEANSFCHLQQIMDQLDIKTKMCIRDSLYRLAKSAEQRHNNSNANGCIGDDETCKAMMAQDANRCAGLMDMETDTNPIDRSVAHLLFHRPSDPSVLLPNETLPFKSSATMHNGSVINPPVKTEKQVCQEDSTGVEKKVLQGNTS

SEQ ID NO: 8708 - protein, 59 aa, Glycine max
  Clone ID: GLYMA-23APR03-C140880_1.p
MQLGNLVESIKSKVRSLKPKKGKKPYMKMDKSASVKVEIRSRKARKLIEKTLKAADISN

SEQ ID NO: 8709 - protein, 254 aa, Glycine max
  Clone ID: GLYMA-23APR03-C14448_2.p
MAYMSMGEAHRRITEYLNRFSDAISCQDGATFKSLFALSSNSPFLLSLGDALNLFQDANRLIKQSDNHSQFTDILVPLFRSLQNYRQNNLLEAYNAFEKTANAFIQEFRNWESAWAMEALYVIVYDIRVLAEKADKELVSNGKSPEKLKGAGSVLMKVFGTLAGKGSKRVGALYVTCQLFKIYFKLGTVHLCRSVIRSIETARIFDFEEFPKRDKVTYMYYTGRLEVFNENFPAADYKLSYALKHCNPQSEANI

SEQ ID NO: 8710 - protein, 129 aa, Glycine max
  Clone ID: GLYMA-23APR03-C14538_2.p
MYRNGGSNELNVSAWDDKPFEMLPSGNKAYLDEQDVVTFLDPPKDLIPFDPSSYNPAAYLWKKIEDIPQERRHRLLRLLKPRLVSIAWQIAGTRFDDPKLVKKSASTLLSSSTNDGIMLECYNCTSSGG

SEQ ID NO: 8711 - protein, 372 aa, Glycine max
  Clone ID: GLYMA-23APR03-C1468_3.p
AGKREMAGGRYCEKEVLPFTAMVAVECTNVGVNVLFKAATEKGLSYYAFIAYSFAVSTLFLLLPLPFVFRWSRGLPPLNLSLIFRIFLLGVIGLTAQLCGYKGLKYTSPTLASALSNLIPAFTFILAIIFRMEKVALRSPSTMAKILGSLVSISGALIVVLYKGPIILSTSSPQPSPTTDSPMDSTSQTNWVLGGSLLAIEFLLVPIWYIVQTNIMKQYPAEFIVVFLYNLTGTLISTPICLLLEANLSSWKINCDITLIAIIYSGFFSTGLSSLVHTWGLHLKGPVYISIFKPLSIVVAAALSVIFLGDALYFGTVVGAVILSFGFYAVLWGKAKEEELTVVDFDDIRPPSNTKSPLLQSYKVKDEDNQNI

SEQ ID NO: 8712 - protein, 334 aa, Glycine max
  Clone ID: GLYMA-23APR03-C146_1.p
MGRPPCCDKEGVKKGPWTPEEDIILVSYIQEHGPGNWRAVPAKTGLSRCSKSCRLRWTNYLRPGIKRGNFTEQEEKMIIHLQDLLGNRWAAIASYLPQRTDNDIKNYWNTHLRKKLKKMQVGCEGGSFGEGFSASRQIPRGQWERRLQTDIQMAKRALSEALSPEKPSCNLSASNSNPSDSSSSFSSTKPTTTQTVCYASSADNIARMLKGWMKNPPKSSRTNSSSVTQNSFNNFAAAGADTASSIGAKGPPSSAELSENNFESLFDFDQSLESSNSDEFSRSLSPEATVLQDESKPDVIGAEIMPFSLLEKWLLDEAGCQEKLVGCGDDAKFF

SEQ ID NO: 8713 - protein, 367 aa, Glycine max
  Clone ID: GLYMA-23APR03-C147144_1.p
MKFHLVLFVIIAAIFGVGLEGCQCKVVQFIFGDSLSDVGNNNYLSKSLAQASLPWYGIDLGNGLPNGRFSNGRTVADIIGDNMGLPRPPAFLDPSLSEDVILENGVNYASGGGGILNETGSYFIQRFSLYKQMELFQGTQELIRSRIGKEEAEKFFQGAHYVVALGSNDFINNYLMPVYSDSWTYNDQTFMDYLIGTLGEQLKLLHGLGARQLMVFGLGPMGCIPLQRVLSTSGECQSRTNNLAISFNKATSKLVVDLGKQLPNSSYRFGDAYDVVNDVITNPNKYGFQNSDSPCCSFGNIRPALTCIPASKLCKDRSKYVFWDEYHPSDRANELIANELIKKFGFVRVDQTKPPSPSPALAPSSDD

SEQ ID NO: 8714 - protein, 341 aa, Glycine max
  Clone ID: GLYMA-23APR03-C14790_1.p
MVGLALMQHVGVALTSCPGQLKPVTCEFRVRIRCSSNVGVSRQQVLEKLDKELAKGDDRAALALVKDLQGKPDGLRCFGAARQVPQRLYTLDELRLNGIETLSLLSPVDTTLGSIERNLQIAAIVGGLAAWNAFAISPQQIFYISLGLLFLWTLDAVSFGGGIGGLVVDTIGHSFSQKYHNRVIQHEAGHFLIAYLVGILPRGYTISSLDALQKVGSLNIQAGTAFVDFEFQEEVNSGKVSATTLNKFSCIALAGVSTEYLIYGFSEGGLDDIRKLDLLLKGLGFTQKKTDSQVRWSLLNTVLLLRRHEAARGKVAEALSMGKSVGSCIDIIENSIDVSDL

SEQ ID NO: 8715 - protein, 241 aa, Glycine max
  Clone ID: GLYMA-23APR03-C147993_1.p
MNKAIFTRFFHSTPLLERKSRTFGESRCNNYSKRFRKLRAKQTLLHDVNAYAQFMCQSWKEDVDEDGPSPSLGPSWFRKQYSPKGSGRHRNDNQRSKHQFRRNHEFCKDDFDVETVFRSAFGGNRSFYWSFINEENPQWRKSGGFSNHGKSWNWRRWSENGYNGTSTESDCSQSDLISDRLALGMSASGPLKLEDVKNAYRICALKWHPDRHDGSFKVIAEEKFKHCSAAYQSLCDKLALD

SEQ ID NO: 8716 - protein, 94 aa, Glycine max
  Clone ID: GLYMA-23APR03-C148539_1.p
MENYHSSKSLHLPCKTLSLVLLFVYLLLIGSCDAIRIGQTMKLNERREILKGKRNNQHGFPYKSMVFNFFPKGPVPPSGPSKRHNAVVDSTPNN

SEQ ID NO: 8717 - protein, 122 aa, Glycine max
  Clone ID: GLYMA-23APR03-C148769_2.p
HFPSTYEPWLMALLGFHVVLLLVTIISRKKTNFQMFLFLLTLAGVYLAERLNRFLGKNWKSFSSQNYFDPSGLFMSVLWSGPLLVISMIILINTLFSLCYLIVRWKRAELRHRARAARNKQD

SEQ ID NO: 8718 - protein, 229 aa, Glycine max
  Clone ID: GLYMA-23APR03-C149985_1.p
MWLPWRLRTTASRPNRSQSFTIPCSSFKDIQSILQSEPQPPSLFRRLIVSPSLIRSFSSPRAATSSIEPPPDSDRSAVVVYYTSLRVVRRTYDDCRAVRSILRGFAIAIDERDVSVDERFREELQRILVHRSVPLPSVFVGGLYIGGADEVRKLYESGELHELIGRLPKSQRNMCDLCGGLRFVVCDECDGSHKVFGEKSGGFRSCSSCNSNGLIRCPACFVVQPQHTK

SEQ ID NO: 8719 - protein, 112 aa, Glycine max
  Clone ID: GLYMA-23APR03-C150696_1.p
MMASNYPRKGLALTSSKAIANAASWYCAFVLVALALLSMFKDSSMLIPSQYASGQLLSRPCEEIYVVGEGETLHTISDKCGDPFIVENNPHIHDPDDVFPGLVIKITPSLRT

SEQ ID NO: 8720 - protein, 482 aa, Glycine max
  Clone ID: GLYMA-23APR03-C15156_2.p
MELLWKDHMRVQVIRLVCAVLLVTLLSSEVAESRKVKTVGTSFKYEAINCRTHSASLTDFGGVGDGKTSNTKAFQSAISHLSQYASKGGAQLYVPAGKWLTGSFSLISHFTLYLNKDAVLLASQDISEWPAIEPLPSYGRGRDAPAGRYTSLIFGTNLTDVIVTGGNGTIDGQGAFWWQKFHKKKLKYTRPYLIELMFSDQIQISNLTLLNSPSWNVHPVYSSNIIIKGLTIIAPVPSPNTDGINPDSCTNTRIEDCYIVSGDDCVAVKSGWDEYGIKFGWPTKQLVIRRLTCISPQSAAIALGSEMSGGIQDVRAEDITAIHTESGVRIKTAVGRGGYVKDIYVKRMTMHTMKWVFWMTGNYGSHADSHYDPKALPEINGINYRDVVADNVTMAARLEGISNDPFTGICIANVTIGMAAKAKKQPWTCTDIEGITSGVTPKPCNSLPDQGPEKIKACDFPQGNLPIDMLELKKCAYIMKHA

SEQ ID NO: 8721 - protein, 178 aa, Glycine max
  Clone ID: GLYMA-23APR03-C1520_52.p
KEGSCIHPFIHRRRQTKPNPISRILIHSAPNSKSPFPNPNPKTESSHETSHATLLRIRIRFDSLTLHKSLSSLCSFSMEGSAEDFGAPESWEVADLDESMNRLNLMLSSNNDSKQPHQRVADDDDAMPPPIPPPSSSGDEVSDDVINQVDQFLREAIQNPRERLSSRFTFESVEDIYL

SEQ ID NO: 8722 - protein, 570 aa, Glycine max
  Clone ID: GLYMA-23APR03-C1520_77.p
MKLSVFWFAWAFSLLISMASAATVEHTFIVQNKAVTLLCKERVIVTVNGLYPGPRIDVREGDAVVVHVINKSPYNITIHWHGVFQLFSAWADGPEYITQCNIRPQNSYTYKFNVIQQEGTLWWHAHSGVLRATVHGAFIIHPRSGLFPFPKPHKQVPIILGDWYDGNIVDIYQQVLLLGDVRPSAAYTINGLPGDLYNCSRNQMFKLKVKPGKTYLLRMINAAFNNNLFVKIANHSFTVVAMDASYIEPYVTDIITIAPGQTADVLFKADQPIGSYYMAASPYVVGQPEALFDTTTTRGIVAYEGYTTSLKDSKPIVPLLPPFNATPIAHKFFSNITSLVGGPHWVPVPLEVDQHMFITININLERCPRNGTCQGVFGQKFSASMNNESFVHPVGKGYSMLEASFYNVSGVYTTDFPDKPPIIFDFTNPKIALDTKYLFTPPKSTKVKKLKFNSTVEVVFQNTQIMNAQSHPMHLHGFSFHVLAQDFGNFNYTKDKYKFNLVNPIFRNTIAVPVGGWAVIRFKANNPGMWFVHCHVDDHQLWGLDMVFEVENGPTPSTSLPPPPADLPKC

SEQ ID NO: 8723 - protein, 295 aa, Glycine max
  Clone ID: GLYMA-23APR03-C1520_91.p
MSLLFSPPPSLTGLSLHPHVHFSPSMSILRRLPLNLRTTRRRRLATVSAALRQDTAVWTPAPLSEVEHAAESLFHIAIDVSDAPDLAASHTLAGQYLQLRVPDAPKPSFLAIASPPKLAAARGVFEFLVKSVAGSTAEALCALKRGDVVELSQVMGNGFDIDRIHPPENFGTVLVFATGSGISPIRSLIESGFDAGKRSDVRLYYGARNLQRMAYQDRFKDWESSGVKIVPVLSQPDENWTGESGYVQAAFSREKQISDPLTTGAVLCGQKQMTEEVTSILVADGVSADKILKNF

SEQ ID NO: 8724 - protein, 335 aa, Glycine max
  unsure (1)..(335): unsure at all Xaa locations
  Clone ID: GLYMA-23APR03-C1520_97.p
MSRLSILILLLIVLSFSSALSELCNPRDKQVLLKIKKELGNPTTLSSWLPTTDCCNNWVGVSCDTVTQTYXVHNLDLSDLNLPKPYSIPFSIGNIPYLEFLSITGTPNIIGTIPPTITKLTKLRNLYIKYTNVSGQIPRFLSQIKTLEFLDLSYNKLSGNLPAWLPSLPNLVGISFDGNRISGAIPDSFGYFPKSFVMLSLSRNRLTGKIPATLAKLDVKFVYLSKNMLEGDASLLFGSEKHTRHMYLGNNSFAFDLGKLGLSKTLEGLDLSHNRLYGTLPKGLTSLKDLYYLDVSYNNLCGKIPRGGKLQEFDASTYAHNKCLCGSPLPSCKRF

SEQ ID NO: 8725 - protein, 175 aa, Glycine max
  Clone ID: GLYMA-23APR03-C15212_1.p
MANNTKKLEISECGGPHCWTFLSTAAYGKQNKVPQENIPSATAAKVKAGMLDGVESALGLSKGSLPKPLYTRLQLWGAALPTNTPGVPCIFDPFGRAGICGDWLLGSNIEAAVLSGIALANHIADYFQSPGTDPGEFAVGLNNEFQPLEGHDIGQFPGLGSEEKMSEGQAYELAK

SEQ ID NO: 8726 - protein, 131 aa, Glycine max
  Clone ID: GLYMA-23APR03-C1530_4.p
MARSISYITGSQLLSLRRHPSIAVVDVRDDERSYDGHISGSLHYASDTFSDNISNLIQAVKGKDTLVFHCALSQVRGPTCARRLVNYLEENKEDTGIKNIMVLERGFNGWEASGRPVCRCTNIPCKGELSP

SEQ ID NO: 8727 - protein, 62 aa, Glycine max
  Clone ID: GLYMA-23APR03-C153169_1.p
MNRKFGGGKQPTGTPSLAWSCVVVVFSLLAGASVVHNIYKPNLTLPPVDGVDSTKQKHDEKE

SEQ ID NO: 8728 - protein, 386 aa, Glycine max
  Clone ID: GLYMA-23APR03-C1538_9.p
MGAGGRTDVPPANRKSEVDPLKRVPFEKPQFSLSQIKKAIPPHCFQRSVLRSFSYVVYDLTIAFCLYYVATHYFHLLPGPLSFRGMAIYWAVQGCILTGVWVIAHECGHHAFSDYQLLDDIVGLILHSALLVPYFSWKYSHRRHHSNTGSLERDERDEVFVPKQKSCIKWYSKYLNNPPGRVLTLAVTLTLGWPLYLALNVSGRPYDRFACHYDPYGPIYSDRERLQIYISDAGVLAVCYGLFRLAMAKGLAWVVCVYGVPLLVVNGFLVLITFLQHTHPALPHYTSSEWDWLRGALATVDRDYGILNKVFHNITDTHVAHHLFSTMPHYHAMEATKAIKPILGEYYRFDETPFVKAMWREARECIYVEPDQSTESKGVFWYNNKL

SEQ ID NO: 8729 - protein, 283 aa, Glycine max
  unsure (1)..(283): unsure at all Xaa locations
  Clone ID: GLYMA-23APR03-C15446_1.p
EREREKMAEEKGMSPWEQHSAVIKLPRFDYNAPSSLLRNSHSGFLITCTIKREKSATKEAISILHKFLGSGHYHTLNNPNEEDTTSKRRKICTQDAAEECFDESPTANSGADGKLSSPVKAEAEKDGIANLSLVKLTRNGLLLLTFPINTHPDTVTIVSNIIQALESGTVSLTVWCHRIFPIQCFMRLERKXIRVKLYFGKFHMFKLMLVSXAILDEDNYNCPCXFAVGFNRRGIEETTFAKEYSNDSNAFSLLVRNKCFGVVSSAVNHVVEDSVVDLSSPEL

SEQ ID NO: 8730 - protein, 157 aa, Glycine max
  unsure (1)..(157): unsure at all Xaa locations
  Clone ID: GLYMA-23APR03-C15453_4.p
MLKGTTKGGEMGGEGGREGDWECSSCNNRNYAFRSFCNRCKQPRLLVDTKTPLIPRWLPRIGDWICTGCTNNNYASREKCKKCGQPKEXVAAMPAIGMTGASFPPYSHYFSXGPGGPEQKMNIGLLGNSGPSQSLFNSNWAVPRADKYGVQPLSIWV

SEQ ID NO: 8731 - protein, 184 aa, Glycine max
  Clone ID: GLYMA-23APR03-C154787_1.p
MRWSSLFVPSFLLHILLLSCIFFTPTDSSDGDGDGDLVDQICKKTPFYDLCSSILHSNPLAPKSDPKGMALIMVNGILTNATDTLSYIEELIKQTSDEQLEQQLAFCAESYIPVVKYILPQAADAINQGRFGFASYCIVDAQKEVNACDKKFSGSTQAPLSDRNDIMQKLVDVAAAIIKLLLNG

SEQ ID NO: 8732 - protein, 282 aa, Glycine max
  unsure (1)..(282): unsure at all Xaa locations
  Clone ID: GLYMA-23APR03-C15482_1.p
MAAPNRIERAHQMYRDGSYEEALGFYTEAIALAKTNPQKIALHSNRAACYLKLHDFKKAAEECTSVLELDHKHSGALMLRAQTLVTLKEYHSALFDASRLLELNPSSEVYQNLQARLKTQLEXALAPIPESEEEFQEQEDEEPEVISQGENENEEMGEKYSSISNIRTDQKVELGKGIIIADCAPHETDLKFSSKQGRNQNHEPKKSIADAIAPKAPNRETTEQHSKGWQTIPKPKGHSALDYARWDSVEDDSSDDDDDDEDEESLPQYRFRVRTVGVRPVK

SEQ ID NO: 8733 - protein, 186 aa, Glycine max
  Clone ID: GLYMA-23APR03-C15498_1.p
MSSCSIDVAPEQLCYIPCNFCNIVLAVSVPCSSLFDIVTVRCGHCTNLWSVNMAAAFQSLSWQDVQGPGQCNPEYRIDTGSTSKCNNRIAMRAPTTHVTEERVVNRPPEKRQRVPSAYNQFIKEEIQRIKANNPDISHREAFSTAAKNWAHFPHIHFGLMLESNNQAKMDNVSEKHLMPRAALLNK

SEQ ID NO: 8734 - protein, 83 aa, Glycine max
  Clone ID: GLYMA-23APR03-C1550_15.p
MRVNTEFERVLKYFDEDGDGKISPSELRNRLGMMGGVLLFKDAEKLIEELDSDGDGFLSLEDFVKIMEMKKPLSCKAVPRVSV

SEQ ID NO: 8735 - protein, 106 aa, Glycine max
  Clone ID: GLYMA-23APR03-C15562_1.p
IKTKDGAEHQRGGESGARIGAFLAIHRLQSREVEQRRRFAPPLLPPFPALVSFTLHLPWLSSSTLRLKFQIPIHILSLSLYLCMYLFVKGRSCLCLFLGFCLIHSI

SEQ ID NO: 8736 - protein, 177 aa, Glycine max
  Clone ID: GLYMA-23APR03-C15566_1.p
MFVIWSHKTGFIMSHQLTFPNGEFSRKRRQTKKKIFLSRMEQILPWQNMGEVIKPFYPKVGNGRQPYPLETMLRIHCMQHWNNLTDGAMKNALEKIPSMRLFARLSLDSALPDRTTIMNFRHLLEQHQLARQLFKTINRWLAATGVMMTQGTLVRGSILGAPPSKPSMRPTKTNHMS

SEQ ID NO: 8737 - protein, 91 aa, Glycine max
  Clone ID: GLYMA-23APR03-C15869_1.p
MGFIMEFAENLVLKLMEDPKERDRRFREHVYRVKDRCEKTKEMWSYPMRPYGFWTFERHNSQLAWDAQISQVAGRRDPYDDLLQHFSTPPK

SEQ ID NO: 8738 - protein, 159 aa, Glycine max
  unsure (1)..(159): unsure at all Xaa locations
  Clone ID: GLYMA-23APR03-C15870_1.p
GGPTPPGGGGVFSSPPXFPHPHIFFPPLKGGAAGPALSLFFGGPPPPGGPLCAPRRGGGAGGPPPPAGXLCRGGAPPPPPPPRGGRAGGGGPPRPPFPVLARAFRPPFFFVLGRRDPPPPPTFLSPASPRGRFPGRYGGRARPPPRGPPPRARVFSGFF

SEQ ID NO: 8739 - protein, 135 aa, Glycine max
  Clone ID: GLYMA-23APR03-C15894_6.p
MDLLELWAIFGPGVAGAVFGAGWWIWLDAVVCSTVTVPFLHYLPGIFASLAALMFNCVRKEDIDYSPYDEGEWRLKLWLFIAYVVSFVSLAGSAGLLIQDSLDKSAPSVWTGVAGVLQCVFVLICGLVYWTSHPE

SEQ ID NO: 8740 - protein, 392 aa, Glycine max
  Clone ID: GLYMA-23APR03-C158_1.p
MEEAMRRLNGVAPIIGPDSKGDGGLIANNPKRTSAVNKRALREDGGGGGGGGAMRYRGVRRRPWGRYAAEIRDPQSKERRWLGTFDTAEEAACAYDCAARAMRGLKARTNFVYPTSPQPSSATTEHLFPNFNNNNNFHKHSLFNHHRNRHITGSNTCFDQPHSVDFSAPRNPSSLNMLLFRDLIHSNPSLLSSSSTQNFHDQFYNKSTSTFSSLPVSPSLAPPSYSMNNSCGGGSLSVKMNTFPTCGTNFAEKGDDGDGFFSRESSDSGLLEEIVNKFLPRTKPSKCETTFANPQEESLLLPPLVSESTLVSTGQQYYDDDMKKGFPKNGGLGVFYSDQGFPMQQFDTSNGFNSMAMENDQNIINNAENCVVEDVFQYQELLNAFAIRMQNA

SEQ ID NO: 8741 - protein, 107 aa, Glycine max
  Clone ID: GLYMA-23APR03-C159329_1.p
IIIISQSEMLAKTNVPHETLSPQKIHVQHVPKCVSDRLLEKFYDESELDFDYEQSGLWSPPVPRTVFLSSPGRIFTEQEMLERLRSKNASRRRGKRFRVCFSVLCCA

SEQ ID NO: 8742 - protein, 223 aa, Glycine max
  Clone ID: GLYMA-23APR03-C159372_1.p
MRKPSCDIKELNKGAWSKQEDQKLVDYIKKHGEVCWRTLPQAAGLHRCGKSCRLRWINYLRPDLKRGNFAEDEEDLIIKLHALLGNRWSLIAGRLPGRTDNEVKNYWNSHIRKKLISNGIDPNNHRLNHTIPSVYQNPPMSDDSSKHFGMKDNNSKNETSKSPRVYNHGEVSDAASGEAESSCALPDLNLDLSICEKNLKPFHESKLSRKVPFDSPSTLLLFQ

SEQ ID NO: 8743 - protein, 482 aa, Glycine max
  Clone ID: GLYMA-23APR03-C15993_1.p
MRVDTQLKRQTPHSHLLTSPAMHNPGGGGSDGVCHVVAMPFPGRGHINPMMNLCKILASKRPNEILITFVVTEEWLGFIGAEPKPDAVRLAAIPNVVPPERLKAANFPAFYEAVVTEMQAPFERLLDRLQPPPTAILGCVELRWPIAVANRRNIPVAAFWTMSASFYSMLHHLDVFARHRGLTVDKDTMDGQAENIPGISSAHLADLRTVLHENDQRVMQLALECISKVPRANYLLLTTVQELEAETIESLKAIFPFPVYPIGPAIPYLELGQNPLNNDHSHDYIKWLDSQPPESVLYISFGSFLSVSTTQMDQIVEALNSSEVRYLWVARANASFLKEKCGDKGMVVPWCDQLKVLSHSSVGGFWSHCGWNSTLEALFAGVPMLTFPLFLDQVPNSSQIVDEWKNGSKVETSKLDSEVIVAKEKIEELVKRFMDLQSQEGKEIRDRAREIKVMCLRAIAAGGSSYGNLDAFIRDISKPLTH

SEQ ID NO: 8744 - protein, 208 aa, Glycine max
  Clone ID: GLYMA-23APR03-C1602_2.p
MGRGKIEIKRIENSSNRQVTYSKRKNGILKKAKEITVLCDAQVSLIIFAASGKMHDYISPSTTLIDILERYQKTSGKRIWDAKHENLNGEIERLKKENDSMQIELRHLKGEDINSLNYKELMALEDALETGLVSVREKQMDVYRMFRRNDKILEEENRELTFLWQQRLAVEGAREVDNGFDQSVRDYNSHMPFAFRVQPMQPNLQERI

SEQ ID NO: 8745 - protein, 109 aa, Glycine max
  Clone ID: GLYMA-23APR03-C16085_1.p
ATHVPAPQMPYCSVICYPYNFLLFPFFQHLREERVFALHLFPKPQIPLSFFFFRTRLLLLSSFFPFLFMSVIRGLKLLRAFHVRVHCWSIPVLDISHSHTHSNHIVNNY

SEQ ID NO: 8746 - protein, 320 aa, Glycine max
  unsure (1)..(320): unsure at all Xaa locations
  Clone ID: GLYMA-23APR03-C16091_1.p
MDPSSVNGFYSFLTLGIDDLERVFLSTNFMSIQFLQRVVSVLRSFHTQLTLLVQKLQLPVGDKWLDEYMDESSKLWDACHLIKSGISAMDSYYSAALNITSSLDSHRHITPQVSRQVIRAIAGCRREAVGLEEENRALMEARIEALSLRFQERLSIESKLNGFNGFRGVLYAMRNVSSLLLMVLLYGLVYCYGDSSDFVLGGCGYEGCLFLGSAFMMSTARLQQRVAAEIGHMGGSPGMLXHEFRRSKVAMEELRGELERRGSGGSGXESEVAIRERVENLRTCFGVLRSGADNIVAQLDDFFDEIVEGRKRLLDFCSHR

SEQ ID NO: 8747 - protein, 159 aa, Glycine max
  Clone ID: GLYMA-23APR03-C1613_6.p
MIVKALEALNEPNGSNKSAISKYIETTYGELPDATVLGSHLNKMKDSGELSFKQNNYMKADPNAPPKRGRGRPPKPKAPLPPGTVVSPPRPRGRPPKDPNAPPKSPKAKATPGSGRPRGRPKKVPRSPAVAAPTAVSSGRPRGRPPKVKPQLTEVSVES

SEQ ID NO: 8748 - protein, 124 aa, Glycine max
  Clone ID: GLYMA-23APR03-C16208_1.p
MACRPSSFLALLLITTILLATTWQAVARRHIGPKHSNNGDKKEPQFLFPPEGNFHFPGFGGVGLPPFFGFTPQNPNTGGSGLGSGPAGRGYVPGGDDTFVPNPGFEVPNPGSGGGVPVPVPVNP

SEQ ID NO: 8749 - protein, 120 aa, Glycine max
  Clone ID: GLYMA-23APR03-C16208_2.p
MACKPSSFLALLLIATILLATTWQAVARRHIIPKHSNKGDKKEPQFLFPPEGNFHFPGFGGVGLPPFFGFTPQSPNTGGSGLGSGPLGRGYVPGGDDTFVPNPGFEFPNPGSGGGVPVNP

SEQ ID NO: 8750 - protein, 469 aa, Glycine max
  Clone ID: GLYMA-23APR03-C162135_1.p
MTTQPAAAATALKVIQVCSVAPLQEPSLSTVVVPNSLTLTFFDLLWLRFPPVERLFFYSFPHPTSSFLHSLLPTLQHSLSLTFHHFLPFAGTLTWPSHSPKPIINYTPGDAVSFTVAESNQNFNNLTSRLCEASQRHRLIPHLTASHDKASVLALQVTVFPNAGFCIGITTHHAAFDGKSSTMFIKSWAYTCSNLIQNNNTPLFLLPQHLTPFFDRSVIRDPSGIAEAYVDAWQESSGPNNRSLKVWESFTEIPSDGCKGVFELTPSQIQKLKQHAKSKLMKTKDFSFSTFAVTCAYVLTCLVKAKQPEEDDVGFVFSVDCRSRLNPPIPATYFGNCVAGQKVVAVTKNLVGISDGFISALEGISEALNIVKGEGVLSGAETWVSLMLERGESVPRLFSIAGSPLFEVYGTDFGWGRPKKVDMTSIDGTGAFSLSESRDNSGGIEIGLMLCQREMEAFSTLFVGGHESF

SEQ ID NO: 8751 - protein, 337 aa, Glycine max
  Clone ID: GLYMA-23APR03-C162266_1.p
MMMDPRQREKLLHKTEACAFVAGVVPELSLVTVPGNNNNTNNVNNNNNNVSHSQSHRSGRIHENHHHHLGLVAAVTTTFGTVHRKKRMARQRRSTNPTLLMNPLINNNNNKSGSSLPSPSIASSSHVPLSSSTLPPAREIDQRRLRFLFQKELKNSDVSSLRRMILPKKAAEAFLPALESKEGIVISMDDIDGLHVWSFKYRFWPNNNSRMYVLENTGDFVNTHGLRFGDSILVYQDSENNNYVIQAKKASDQDEFMEETSDTINDIFLNDYEVNKPGCFNVTYPAVNDTGMSFIYETTFSNDSPLDFLGGSMTNFSRIGPVETFGSVENLSLDDFY

SEQ ID NO: 8752 - protein, 349 aa, Glycine max
  unsure (1)..(349): unsure at all Xaa locations
  Clone ID: GLYMA-23APR03-C16266_1.p
MESATSWSNPLPLSSLPSPSHSRHPSAFKFMAFSTLHTFSLPSLSSPSSFHPFPLSSLSPKPTSFNPRPLFPRTMHASRIQDAVGGALALVQSSPATWQSALLSNALIFFLGSPILVSGLSLSGIGAAFLLGTLTWRAFGPSGFFLVATYFVIGTAATKVKMAQKVAQGVAEKKRGRRGPGSVIGSSAAGCICAFLTIFGVGGEAFSRLWRLGFVASFCTKLSDTVSSEIGKAYGKTTXYLVTTFKIVPRGTEGAVSVEGTLAGILASIVLALVSFLMGEVGSHEAIICVLAAQTANQGESKMADALQEKGGLKRLNQDAVNVINICMGSIWSFLKFRKRFRGAASIIT

SEQ ID NO: 8753 - protein, 265 aa, Glycine max
  Clone ID: GLYMA-23APR03-C16306_1.p
QTGVKSYAGQFSGLIAGVPIKKRRFPTFQPSSSPVSGEPCSLTEETELQRKENSITSQGSALPNAAGAPIKKRRFPCLPPSLEEASRSEESDALRKEHSSTSPGSTLSPSSSGLSDANGISAFEDKKASIDVTNANMVQSNSCFLTPKLEQSNVGTQSCTLNVMDSKEKVILSEGSNKKLESQTIKGNPELLLAAKEGLALSIGADVTKQNVQDICKQETPLVSGNTSLSLSLKEHLFPAVASMENNPQKIEKAQPVSLEKKKKK

SEQ ID NO: 8754 - protein, 170 aa, Glycine max
  unsure (1)..(170): unsure at all Xaa locations
  Clone ID: GLYMA-23APR03-C16330_6.p
EALEWACTSQLGGLYRLLLAGLCQQRQLLLILLLKIVRWLEPEVPPRIKFKRXLDKTARHIMQILDKEAVEEVRGQREIPDIKPGYIVQLKVEVPENKRRVSIIKGIVIARRNAGLNTTFRIRRQVAGVGIESLFPLYSPNIKEIKVLDKKRVRRAKLYYLRERMNPLKN

SEQ ID NO: 8755 - protein, 323 aa, Glycine max
  unsure (1)..(323): unsure at all Xaa locations
  Clone ID: GLYMA-23APR03-C1641_20.p
MEPQCRIKKDATELIGNTPMVYLNNIVDGCVARIAAKLEYMQACCSVKDRIALSMIEDAEKKGLITPGKTVLVEYTSGNTGIGLAFIAALRGYKLQVTMPSYVSLERKIILRAFGAEVYLTDPAKGIDGVIQKAEELIAKTPDSFMLNQFENPANPNIHYETTGPEIWRDSGEKIDALVSGIGTGGSIAGAGRFLREKNPDIKLYGVEPAESPVLNGGQPGKHLIQGIGAGIIPKVLDVNLLDEVIQVSSEEAIETAKLLALKEGLLXGISSGAAAAAAIKVGKRPENAGKLIVVIFPSFGERYLSSPLFESIRKEAEQMTFD

SEQ ID NO: 8756 - protein, 136 aa, Glycine max
  Clone ID: GLYMA-23APR03-C16448_1.p
MATASASCAVSFRNSFGVSKPSDLGFLSSRLNGLRICFPKLPPTPLTASPFPTPLPIVAKRVCPFTGKKSNRANKVSFSNHKTKKLQFVNLQYKRIWWEAGKRYVKLRLSTKALKTIEKNGLDAVAKKAGIDLRKK

SEQ ID NO: 8757 - protein, 333 aa, Glycine max
  Clone ID: GLYMA-23APR03-C16465_1.p
MSSLITDLLRQTGGTAVIDGGLATELERHGADLNDPLWSAKCLFSFPHLIRQVHLDYLENGADIIITASYQATIQGFKAKGYSDEESEALLRSSVEIAREAREVYYKNCAGCRSGDGDDDGRILKQRPILVAASVGSYGAYLADGSEYSGDYGDAITVETLKDFHRRRVQILADSGADLLAFETVPNKLEAEAYAQLLEEEDIKIPAWFSFNSKDGVNVVSGDSLMECGSIAESCNKVVAVGINCTPPRFIHGLIVLLKKVTTKPIVIYPNSGETYDADLKEWVQNTGVTDEDFISYVNKWCELGASLVGGCCRTTPDTIRKIYRTLSSSQSI

SEQ ID NO: 8758 - protein, 293 aa, Glycine max
  Clone ID: GLYMA-23APR03-C1650_3.p
MVVKPIEDIVVTNTCPKAVESKPRPQKEQAINCPRCHSINTKFCYYNNYSLTQPRYFCKTCRRYWTEGGTLRNIPVGGGSRKNKRSSASCSTPNNSHNNNNSTNKKLLSDLVITPPTLSHTQNPNSNNTIHQGQDLNLAFPSSTPDFRKISELVQQNNNNNNSSNNSMSASASSSSTTTTTSTSHLSALELLTGITSSSSAGLTSFMPVPVPSDPNSIYTCGFPLQDFKPTLNFSLDGIGNGYTSLQNVQSGRLLFPSDDLRQVSSSTITTMDQKQQGDSTGYWTGMLGGGSW

SEQ ID NO: 8759 - protein, 276 aa, Glycine max
  Clone ID: GLYMA-23APR03-C1650_4.p
MEGMAPNSCARPVVEKKARPQEQLNCPRCNSTNTKFCYYNNYSLTQPRYFCKTCRRYWTEGGSLRNVPVGGGSRKNKKVSVTASSSPKVPDLNPPNHSAISSHNPKIMHGGQDLNLAFPAMEKYHHHGMSPYNVEMQNSNTTTTHHHHQTSPSCSAPPANSLSALELLRSSMASRGLNPYAPNSSLMPNSTNNNNNALYPSGFPMQEVKPSLNFSSVDGIGNNRSYDQERGGGRVLFPFGDVKQLSAAAGAADQVEQQQQGNSTGYWTGMIGEGTW

SEQ ID NO: 8760 - protein, 264 aa, Glycine max
  Clone ID: GLYMA-23APR03-C16524_1.p
MLVQSSILLSPPPFPSNHNMDQFSHIIPTERSPRRELQLQGPRPTPLRINKDSHKIKKPPLAPQQPSHPHQPPPRQPIIIYTVSPKVIHTTPSDFMNLVQRLTGSSSSSSVVVPNNNNTHVDPFNNGAGMLSPAARYATIEKAMSPMGKKHVLLPSVNNIISDVEGIEISIGDGVLERSQQNMFQGILSPGPASLSPIPSNFFSPPSSSDPSMISFLRDLSPMFQSGRNFTEGGSSFVLPSPSSNFSFVSPHTPSIDLFNYFLD

SEQ ID NO: 8761 - protein, 303 aa, Glycine max
  Clone ID: GLYMA-23APR03-C1654_1.p
MTLETLQSNEFSNFIIYDTISATPFSSHGSPEASFLESFVNYQEQHDHPTFDNCAMRTRKREASEPESIGRRQNSVAVQGRKKRRRKPRVCKNTEEAETQRITHITVERNRRKQMNEHLAVLRSLMPESYVQRGDQASIVGGAIEFVKELEHLLQSLEARKLQLLHQEVAQTNENTAISKLMQPPFAHCFSYPQYTWSQTPNKYTSKTKAAIADIEVTLIETHANLRILTRRSSHGQLTKLVAGFQTLCLTVLHLNVTTIDPLVFYSFSAKVEEGFQLGSVDGIATAVHHLLARIEEEASLCC

SEQ ID NO: 8762 - protein, 289 aa, Glycine max
  Clone ID: GLYMA-23APR03-C166286_1.p
MSLNQVPVKRKKAEWCDKNTEIMLKVCIEEVNVGNKPHNHFTKLGWANIAEKFNKATNLRYEYKQFRNRWDSLKKEWQLWAKLIGKDTGLGWDGEKKTIAASDEWWEAKIQEDPEVAKFREQGLKFLPEMEFLFKGTIATGFAAYAPSEDSRQYEGFNTRTEETNDNIDDNTDMEVNEPEIDTTTQNTSSAKENGQRKRGREGDKKIGVAAKLSSQLDRIIQTFESSVSAQDPTSITTCVAKLKDLPGLERGSELFYKATKLMKKRANRITFVALEEPELQLGWIKSET

SEQ ID NO: 8763 - protein, 264 aa, Glycine max
  unsure (1)..(264): unsure at all Xaa locations
  Clone ID: GLYMA-23APR03-C16642_2.p
MLRVAARRLSSLSSSSPWRPNHAASAYVSRNAVVDDRRSDPSSHPLFPFRGFATESLIHPIENSIIPEIPATVTAVKNPTSKIVYDEHNHERFPPGDPSKRAFAYFVLTGGRFAYASLVRLLVLKXVLSMSASKDVLALASLEVDLSSIEPGTTVTVKWRGKPVFIRRRTEDDIKLANSVDVGSLRDPXLDADRVKDPEWLIVIGVCTHLGCIPLPNAGDFGGWFCPXHGSHYDXSGRIRKGPAPYNLEVPTYTFLEENKLMIG

SEQ ID NO: 8764 - protein, 143 aa, Glycine max
  Clone ID: GLYMA-23APR03-C16670_1.p
MENSNSNSRKPPKNWNRMILERGVVGLGIVAAMNSTDVVVSSAKAAANFRGTTTYDYGIFYASPLNNIGTRFPHFLNSCNLCDKHLHGVDIFIYRGEKAFCSAECRETHISISNDDHQDVVKCRSRVVEHNPVTLTSSILAAA

SEQ ID NO: 8765 - protein, 188 aa, Glycine max
  Clone ID: GLYMA-23APR03-C16727_1.p
SKTNRHSNINPGLYMGLRRERRTSRVVALQLCTHHVNFYHIILSSSKIRLLPLPLLPKFLRSITLTGLAISPLHTILQALYTHQAKDILIIPGLDMGLRREVSKSRVVALVTNLVISELLHNFRAGYHFRLHPQPKWKILTQLRLPYVGCKHKTYSLSLIFGHHKSNNGVLILRVLGLGFLQLQMQIA

SEQ ID NO: 8766 - protein, 209 aa, Glycine max
  Clone ID: GLYMA-23APR03-C168027_1.p
MDSLSLLLSPYPLSTKTHKFSTLKPFSHFSNPKIPPSQPHSPSLSALQTPSLNSLQNPLTKPFLSFTMLNLFTPLPCLADVASDDAGKINLESVLVSIDNFFNRYPFFVAGCTFIWLVVIPLAEEYLKKCKFVSAIDAFRKLRDDPNAQLLDIRDEKNVRFLKSSNLKMFEKEVAQVEFAEDGNEDEFVKKVLGRFKDAPNTVVCVLDR

SEQ ID NO: 8767 - protein, 342 aa, Glycine max
  unsure (1)..(342): unsure at all Xaa locations
  Clone ID: GLYMA-23APR03-C168027_2.p
MDSLSLLLSPYPLSTKTHKFSTLKPFSHFSNPKIPPSQPHSPSLSALQTPSLNSLQNPLTKPFLSFTMLNLFTPLPCLVDVASDDAGKINLESVLVSIDNFFNRYPFFVAGCTFIWLVVIPLAEEYLKKCKFVSAIDAFRKLRDDPNAQLLDIRDEKNVRFLKSPNLKMFEKEVAQVEFAEDGNEDEFVKKVLRRFKDAPNTVVCVLDXSFDGNSMKVAEVLFKNGFKEAYAIRGGVRGQQGWMAIQDSLLPPSVHIRKRVKASKKLNTNGNGAIQQNDSNNNSSLTQDRSSVENQTTDDGHVKSSVESISEVKTGSVASSSPYPNYPDLKPPSSPTPSKPQ

SEQ ID NO: 8768 - protein, 244 aa, Glycine max
  Clone ID: GLYMA-23APR03-C168507_1.p
MSHLNGAYYGPSVPPPKSYHRPSRGGRDGCCCGCLSCFCGCIFDCILGLICKILTTILIIVAILGFLFWFIVRPNVLKFHVTDASLTRFDYTTNNTLHYDLALNVSIRNPNRRVGVYYDHIEAHALYQDVLFGNQTLGPFFQHHKNTTFVNPLFKGQRVTPLAGNQVEVFDKEKGSGVYTIDLKLFMVVRFKFLLFKSASVKPKIRCALHVPLKSRNATTTISPDAAFQPTECGWDYGKKWWIH

SEQ ID NO: 8769 - protein, 125 aa, Glycine max
  Clone ID: GLYMA-23APR03-C168659_1.p
MPTLNQLIRHGREEKRRTDRTRALDQCPQKQGVCLRVPTRTPKKPNSALRKIAKVRLSNRHDIFAYIPGEGHNLQEHSMVLIRGGRVKDLPGVKFHCIRGVKDLLGIPDRRRGRSKYGAEKPKSI

SEQ ID NO: 8770 - protein, 182 aa, Glycine max
  Clone ID: GLYMA-23APR03-C1686_4.p
NDIHSPGFVCLSNFHYVLQIWYCSCTSYHGCLLLYYFPGYSHMSWKERKKIENRNVVSLGGKPQKNQRLPLSVARLMMKKQKEREQKMLQERLILGQFGGKLGGSSKRSAGKHKPGNRGLKSSEGHFRNGILNVKHLLNSTASRDRETGTNMSNTWKGKGGKKKNGNKGAGGKKHRSAHPCE

SEQ ID NO: 8771 - protein, 142 aa, Glycine max
  Clone ID: GLYMA-23APR03-C1687_1.p
MVAYISSYEFRAWEEVSDCLMGKRIGGDDNHHLGVSAMKMKKMKARRKVREPRFCFKTMSDVDVLDDGYKWRKYGQKVVKNTQHPRSYYRCTQDNCRVKKRVERLAEDPRMVITTYEGRHVHSPSNELEDSQTPSELSNFLW

SEQ ID NO: 8772 - protein, 400 aa, Glycine max
  unsure (1)..(400): unsure at all Xaa locations
  Clone ID: GLYMA-23APR03-C168_3.p
MLVVNNSSPTSEAENGTAAATNKRKRRPAGTPDPDAEVVSLSPKTLLESDRYVCEICNQGFQRDQNLQMHRRRHKVPWKLLKRETPVVKKRVFVCPEPSCLHHDPCHALGDLVGIKKHFRRKHSNHKQWVCERCSKGYAVQSDYKAHLKTCGTRGHSCDCGRVFSRVESFIEHQDACNVGRLGPETQPQPQTQTQAVQAAACLSRTASSETNFSNGAPWPQSGTVIIPKPSVTVLEPSSYSNPTTTAETNIINDVHPNLELQLSTATPSSKANYNHSIQTQLQLSIGIGSLEEQLRIAMAEKALAEEARKQAKRQIELAELEFTNAKRIRQQALAELDKAYALKDHAIKHINSTMLQITCXACKHHFQSPTSHDNSFVFSYITQAQSQLEKHRLKPIINS

SEQ ID NO: 8773 - protein, 380 aa, Glycine max
  Clone ID: GLYMA-23APR03-C168_5.p
MIDMLVIHNSLPPTSEAENGTAATATNKRKRRPAGTPDPDAEVVSLSPKTLLESDRYVCEICNQGFQRDQNLQMHRRRHKVPWKLLKRETTAVVKKRVSVCPEPSCLHHDPCHALGDLVGIKKHFRRKHNNHKQWVCERCSKGYAVQSDYKAHLKTCGTRGHSCDCGRVFSRVESFIEHQDACNVGRLGPETQSQAQAVQAAACLSRTASSETNFSTGSPWPQSGTIIIPNPTVTVVEPSSYTIVTAETNNKVHPNLELQLSNTTPTASSQEERVHQEQLRIAKAKKALAEEARKQAKRQIELAELEFTNAKRIRQEALAELDKAYAFKDHAIKHINSIMLQITCRACKHHFHSPTDDQIFSYITQARQVQKHRLKPIIN

SEQ ID NO: 8774 - protein, 466 aa, Glycine max
  unsure (1)..(466): unsure at all Xaa locations
  Clone ID: GLYMA-23APR03-C16935_1.p
MDNIPEHIVWEILSRIKKTSDRNAVSLVCKRLYYLDNAERNCIRVGCGMDPADEALSCLCIRFENLSKVEITYSGWMSKLGKQLDDKGLLILANHCPLLCDLSLSYCTFITDVGLRYLASSSKLSSLRLNFTPRITGCGILSLVVGCKNLSSLHLIRCLNVSSVEWLEYLGKLGRLEDLSIKNCRAIGEGDLIKLGPGWQKLTRLQFEVDANYGYMKVYDRLSVDGWQKQMFPGGPKLELSLVNCIISPGRGLACVLSKCKNLQKIHLDMCVGVRDSDIIXLSQRSSELKSGSLRVPSDFSLPSLVNNPLRSAAGSLTGLFQNCSRHGSSLLPGXLESLELVRCQEISXLCLIQRGLVRQLALDHVYSFNDVGMEALCSAEYLESLELVKCQEISDEGLQLVSQFPRLCILRLSKCLGISDDGLKPLVGSLKLDLLAIEDCPQISERGVQGAAKSVSFRQDLSWMY

SEQ ID NO: 8775 - protein, 342 aa, Glycine max
  Clone ID: GLYMA-23APR03-C16943_1.p
MASSVFFTHSHCYSSKPSSLVFRQVGVGPTSLRFSSSHVASVAAMAMDSSAKVIDGKSVAKQIRDEITAEVSRMRESIGVIPGLAVILVGDRKDSATYVRNKKKACESVGINSLEANLPENSTEEEVLNYIAGYNDDPSVHGILVQLPLPSHMNEQNILNAVRIEKDVDGFHPLNIGRLAMRGREPLFVPCTPKGCIELLHRYNVSIKGKRAVVIGRSNIVGMPAALLLQREDATVSIVHSRTSNPEEIIRQADIIIAAVGQANMVRGSWIKPGAVIIDVGINPVEDPNSPRGYKLVGDVCYEEAIRIASAVTPVPGGVGPMTIAMLLQNTLISAKRVHNFE

SEQ ID NO: 8776 - protein, 299 aa, Glycine max
  Clone ID: GLYMA-23APR03-C16984_1.p
MEETIPVIDVEKINSDEGECKKLREACERWGCFRIINHSIPATLMADMKKVIEALLDLPMEIKKRNTEFIAGSGYMAPSKVNPFYEALGLYDLASSQAMHNFCSQLDASPHQRQIMEAYGQAIHGLAVKIGQKMAESLGVVVADFEDWPCQFRINKYNFTPEAVGSSGVQIHTDSGFLTILQDDENVGGLQVMNNSGSFVSIPPFPGTLLVNLGDIARVWSNGRFCNLTHRVQCKEATKRFSIATFMIAPRNRNVEAPAELVDHDHPRLYQPFIYEDYRKLRISNKMHKGEALELLRLA

SEQ ID NO: 8777 - protein, 418 aa, Glycine max
  Clone ID: GLYMA-23APR03-C16997_1.p
MGASQSVQVVEDSEEEEDERNLNGPLMGRAQLGNHMVKKVLEQEPEMLPCHASASPLSPQLSSLGTPRLGPSIKVWDPYNVLGPPPPLPSPPALSRSFSGNGMVAVADDEAVTEVFLISHGECELNLAPDLVGGRCPAAALTANGKRHARALAVFLKSQGVRFSAVYSSPLDRARSTAVSVCKEVNFSEEQIQSTDALAEISQGNWEGCLRSEIYTPEIQGLIDRFQPDFTAPSGESLRQVEFRMIHFLNGTVLALHEKLLDLSSHQNDNQAFAQNNSHALLTNSLHDQDGPSLPPNQWDLLNRHRPPFSRKKSGKSRLQFVTTTGDEIEDEISSGNVNHGSSLHNSGFSSFSPTVSCIGLFTHSLPIKCLLTGLLGCSPLMSHKFCIEDSSVTVLQHSLRTGWQIKRLNDTAHLRLL

SEQ ID NO: 8778 - protein, 213 aa, Glycine max
  Clone ID: GLYMA-23APR03-C1703_2.p
MGGCCCCCCSAKETVLSAPPAYYYYPRASEEHVPLSSHQGAASAFSGRLLVDTNLDTSSPDTYRPPPAPIPFNVTLGTTQTPPAAQEIRSDKNNTSLHSTNSNAIQEPVAGDNHGTSAKLEELKESDCKVQTDLELDSAKGSEIELAKSGKPIDVVEEEDTCPICLEEYDAENPKLATKCDHHFHLACILEWMERSETCPVCDQDLVFDPPIE

SEQ ID NO: 8779 - protein, 316 aa, Glycine max
  Clone ID: GLYMA-23APR03-C17143_2.p
GAVGQAEGDEVAEGLGGVAEGGIVEGGLASTLRKLSGVWLSNLLNLTDLAVSDVNVKASAVGGPFVILARMTKLKTLTISNANLTGSLPGHLHSNLTHIDFSNNRLKGNIPPSITMLDSLQFLNLSSNSLAGEMPPSIGDLISLKNLSLSSNSFSGSIPDSVSALPSLIHMDLSSNQLNGTIPKFISQMKSLKHLNLANNNLHGVVPFNLSFIKRLEVFKVGGNSNLCYNHSMVSSKLKLGISPCDKFGMPVTPPSKDSSADDSSDDDYDEGDEEGSRHKKEHHHGPNKFVLGVAIALSSIVFLIVFLILCSKCCR

SEQ ID NO: 8780 - protein, 147 aa, Glycine max
  Clone ID: GLYMA-23APR03-C17175_2.p
MQGLRRCSNDVVQLDLSTPTTTTTTTTTTTNNTNSSSFSSSCSLSIDVDESTEARIQRLISEHPVIIFTRSSCCMCHVMKKLLATIGVNPTVIELDDHEIAALPLPDHRTPAVFIGGSSVGGLESLVALHVSGHLVPKLVQVGALWV

SEQ ID NO: 8781 - protein, 184 aa, Glycine max
  Clone ID: GLYMA-23APR03-C17221_2.p
MENQASSSMQFLILEQVQFLKVNDDSLLQWELVDVVDAEEEIDGFGSSDSSVSWFESDSSPCDAPIEEIRHLLLHPDVGLQDRHDGVDESEEDSGLENHHHYHYHHDDDDMGGDDNDEDDDGYGLDDELVPWNVSNKFGRQRMRKLGKRAFSKMHGSKKSPYLFVRPGCVRGKHGLGLKHITDS

SEQ ID NO: 8782 - protein, 79 aa, Glycine max
  Clone ID: GLYMA-23APR03-C17229_1.p
MDTNSNSNVGGGFRSRLNHYLYSGDKKHVFVGLTLITAVFTIPWYFMSRGTKHQSHQDYLEKADKARSQRLSSSSASAK

SEQ ID NO: 8783 - protein, 152 aa, Glycine max
  unsure (1)..(152): unsure at all Xaa locations
  Clone ID: GLYMA-23APR03-C1726_15.p
MVKAVAVLGSSEGVTGTIHFVQEGXGPTTVTGSLAGLKPGLHGFHVHAWGDTTNGCLSTGSHFNPNNKEHGAPEDENRHAGDLGNVNVGDDGTVSFTITDSQIPLTGPNNIIGRAVVVHADPDDLGKGGHELSKTTGNAGGRVACGIIGLQG

SEQ ID NO: 8784 - protein, 90 aa, Glycine max
  Clone ID: GLYMA-23APR03-C1727_23.p
WHINRHIYASLLKVGEALVKVTPLQLRLKLIQFSMINPNIPFWKDPPIQNVIYIFVPGFQGLESPGIKLSLWLKSNALPLPGCHPVGRTN

SEQ ID NO: 8785 - protein, 294 aa, Glycine max
  unsure (1)..(294): unsure at all Xaa locations
  Clone ID: GLYMA-23APR03-C1728_56.p
MSTSSINGWCLSSISPAKTSLKKATLGPSVFATREDMAKEYEQAIEELQKLLREKSELKATAAEKVEQITASLGTSSSDGIPSSEASDRIKAGFIHFKKEKYDKNPALYGELAKGQSPKFMVFACSDSRVCPSHVLDFQPGEAFVGRNVTNIVPPYDQSKYAGTEAXVXYTILHLKVSKMIVMEHSACGGIKELLSFPYDETYSTDFIEEWVKIGLPAKAKVKTQHGDAPFAELCSHCEKEAVNVSLGNLLTYPFVRDGLVNKTLSLKGGYYDFVKGSFELWGLQFGLASSFSV

SEQ ID NO: 8786 - protein, 221 aa, Glycine max
  Clone ID: GLYMA-23APR03-C1728_74.p
MDSLEDSGCWDFLDYSFIDQAPPDFLWSNNNNSVSTEIDIPGDAVACQENTKKRGRTDSCFKAGSKACREKLRRERLNERFCDLSSVLEPGRPVRTDKPAILDDAIRVLSQLKTEAQELKKTNEKLLEEIKCLKAEKNELREEKLVLKADKERIEKQLKALPVAPAGFMAPPVAAAAAAAYQAGVNKMAVYPNYGYIPMWQYLPQSVRDTSHDHELRPPAA

SEQ ID NO: 8787 - protein, 380 aa, Glycine max
  Clone ID: GLYMA-23APR03-C1739_2.p
MGDTVVAEVPAKRGRGRRALKEKTPSTNDANIIIATPISPSSDKAQVPSKKKQDSKKQQSFEKELLEMQEMLQQMRLEKEKTEELLKLKDEALKQKDEELKNRGREQEKLQSELKKLQKLKEFKPTMNLPVLKDNEEKKDKKKKGCSEKKRPSPPYILWMKDQWNEIKKANSEAEFKEISTMLGSKWKTVTAEEKKPYEEIYHAEKEAYLQMIAKEKRETEAMRLLEDEQKQKTAMELLEQYMQFKQEAEKEGKKNKKEKDPLKPKHPMSAYFLFTNDRRAALVAENKNFLEVPKITAEEWKNMTEEQKRPYEEMAKKNKEKYALEMEAYKQKKDEEAAHFMKEEEEHMKLQKQEALQLLKKKEKTENIIHARSRKPNNN

SEQ ID NO: 8788 - protein, 263 aa, Glycine max
  Clone ID: GLYMA-23APR03-C173_30.p
MACSATSASLFSANPIPLFSPKSSLSLPNNSLHLNPLPTRPSLSLTRPSHTRRSFVVKASSVSFLNSELPLVGNTAPDFEAEAVFDQEFINVKLSDYIGKKYVVLFFYPLDFTFVCPTEITAFSDRHAEFEALNTEILGVSVDSVFSHLAWIQTDRKSGGLGDLNYPLISDVTKSISKSYGVLIPDQGIALRGLFIIDKEGVIQHSTINNLAIGRSVDETKRTLQALQYVQENPDEVCPAGWKPGEKSMKPDPKLSKDYFAAV

SEQ ID NO: 8789 - protein, 149 aa, Glycine max
  Clone ID: GLYMA-23APR03-C1741_5.p
MVVSGGKGLKRAAKKRVTADFYDFLTFPTPALAESENFAGGPFRSNVRAFLTKHALLPPPSALFPHLLTWQIVFRVGELTEGPDAPAVCLDVVEEDVARSRSVYCDQCRVFGELTRQYFSRFSFLHESLWFYRFFQLSLRLPVPDHELT

SEQ ID NO: 8790 - protein, 307 aa, Glycine max
  Clone ID: GLYMA-23APR03-C17438_1.p
MRSIASCYNEHAIRVSDSYCSRPSNQAYLCPELNPSTRDSVTCMYKLSLIKTQKQLFITITWAKKLLGQGFTITISNSEHFLSPSNNKSNARQLRKNKGNETFQSQNFQVQVLWDLSDAKYEEGPEPVGGFYVDVLVDSELGLRLGDKNSSMEELLPNFDAKEATFSMVSRSETFSGTAAYATKAKFSQTGSSHDILIRCGAEAERGEPKGHVLSVCVDKKTMFQVKRLRWNFRGNQTIFVDGLVVDMMWDVHDWLFNSNSASSAVFMFRTRSGLDSRLWLEKSLHAHKEQDKIGFSLLICACKNND

SEQ ID NO: 8791 - protein, 194 aa, Glycine max
  Clone ID: GLYMA-23APR03-C17460_1.p
MSSKGKEIAEGSSTTTTATRSSHGGDDHHHHHNQQQQQQQQQLPLSRYESQKRRDWNTFGQYLRNQRPPVALSQCSSNHVLEFLRYLDQFGKTKVHSQGCLFFGQTEPPGPCTCPLRQAWGSLDALIGRLRAAYEENGGLPETNPFASGTIRVYLREVRDSQAKARGIPYKKKKKKRNVIKPNGDTSSSNLPMQ

SEQ ID NO: 8792 - protein, 226 aa, Glycine max
  Clone ID: GLYMA-23APR03-C17548_1.p
MASSSAAEGVSMDDDYETLIATTDVELLKRAWRNEKAAPEILRYESKLVSRVNKVIQLMEEIVEEKSSGGTDPLSVSLYQMDLDRTLFLLRSYLRIRIQKIEKYVFHIQKTEELRNRLSKYEKDFAKMCENDLEQHLDESVLSKLPKDYKSVLRQSSMSEEDDMVPEPQLDTFVLCRSKEYLTGIQLEDGPVDDRSKLFEMEPGVLHFICYKSIKALVESGKIDLL

SEQ ID NO: 8793 - protein, 69 aa, Glycine max
  unsure (1)..(69): unsure at all Xaa locations
  Clone ID: GLYMA-23APR03-C175919_1.p
ESFWNDSQSKEATLLEAENISCGNRQTHDVPVLKDCSICIPCGXFWMLIGPNGCGKSTLLKKKIRKLLE

SEQ ID NO: 8794 - protein, 280 aa, Glycine max
  Clone ID: GLYMA-23APR03-C17663_1.p
MEFVPEEGKHLHEDCSTLILPALSIGNVGQLVADLLISSMGSERVGYLDDPNVLPCVGNDAYGPFPQGDLALPLEAYDSPSNALTIIQQRSPVVKGMMIEFAKNMADFLAGSGKKHIVVLSSLDFGKWQKVDMSSGLQIYYLSSSNSNGTDENCEQLGWKKLQEYDPSQMHWKYLSDLAEGNVTVEDITSVEDELEEENYYASLPFAALFSFLKAKGLKVTCLLCYCSEGDNISDAFQLGDAVCKLLQLSHPTTGIEGGKWRVPLSWMSVYGPPPDVSIF

SEQ ID NO: 8795 - protein, 344 aa, Glycine max
  Clone ID: GLYMA-23APR03-C176778_1.p
MEAETNSPEDASAMAFGQHQVTDQTSVENVQPAETLIEVKNQENTNIKHPNLEGETTEINPTNDTKEQEKVPVSHTREEIENEDDGKYKQKKAKETEEATEMQLLKTATDSPPEDNVQSTVPTSEIVKGETEEISQQQTYKNDETVVIDTDKTTLQQGIEDVDTDQISQQQSLHNDESKAIVNGKGCIPEIEHDREYTVAEEPEQPETKDNVSIAQEEKADHQSEESSLQSVITNYITAEGPVTSQSITKLSDDADNDEQKTVESCSANNLQNKDAREIIAEEATDAKQSTDVDIPKSETKDMPEDKALQTIPNTTSVGNEAIDDSSQEERQPEAEFTEKKKKK

SEQ ID NO: 8796 - protein, 193 aa, Glycine max
  Clone ID: GLYMA-23APR03-C17728_1.p
MASVHDIAAHELGFEEGIFWLPSHVMDEACDSKIHMRNRHQKLLQHYRYPRETQSQYCSKFSTRSSYDQRPKHATGGPGMQAVFLVSGQGSCGTGVFLPQKAGTKSIRKPACAPVLLPARVVQAPNLKVHQLGLQISPSQAPKYSPRSGEVCTSESTKKKTNQKDALKQCSVVVSHESQSSSPEIFLPKEWTY

SEQ ID NO: 8797 - protein, 603 aa, Glycine max
  Clone ID: GLYMA-23APR03-C17729_1.p
MSQSLKLIKEHASNPKLWLVIGIGVAGIVVLVETRRRTRRGKTHKQDFGAFVERFELLPFPQPPPPAAKQSLSALTFAINDTFDVKDYVTGFGNSTWKSTHKAAEKTAVVVTALLMSGATCVGKTVVDEFSFGISGENKYYGTPTHPQMPSCKLGGSSCGSAVAVAAGLVDFAVGTDTTGCVRIPASFCGIFGFRPSHGAVSTIGVLPNAQSLDTIGWFARDPSILHRVGHVLLQLNSVETKRSRHFIFADDLFQLSKIPTQNTIYVIGKAIENMSGYQAPKHLNLCQYIDSRVPSLRLHQQSTHQQNEISILKTLSSVMLSLQGYEFKTNHEEWVKSLKYKLGCGVSDHVIAAINTTYDNIKALYKVRTEMRGAFQSLLKDDGILVIPTVAGSQLKLNTKKGFSSEFHDRTFALSSIASVSGCCQVTIPLGYHDDCSLSVSFISFHGADKFLLDTILDIYSTLQEQVSVGSYSLPLPNINGNRETSELLKEKGNAAFKERQWSKALSYYSEAIKLNGTNTTYYCNRAAAHLKLGCFQQAAEDCGKAILLDKKNVKAYLRRGTARESLLCYEEALEDFKHALVLEPQNKDASLAEKRLRKLMS

SEQ ID NO: 8798 - protein, 225 aa, Glycine max
  Clone ID: GLYMA-23APR03-C17747_2.p
MKPNFSFLFKLLILQYLADLSISQEFDFFYFVQQWPGAYCDTKHSCCYPKTGKPSADFIIHGLWPNYNDGSWPSNCDPDSVFDKSQLHLISNMEKDWPSLSCPSSNGMRFWSHEWEKHGTCAESELDQREYFETTLKLKQKVNLLRILKNAGIEPDDEIYTLERVTEAIKKGTGFTPGIECNRDSARNSQLYQVYMCVDTSGSNLIECPVLPRSRCGEQIQFPKF

SEQ ID NO: 8799 - protein, 350 aa, Glycine max
  unsure (1)..(350): unsure at all Xaa locations
  Clone ID: GLYMA-23APR03-C17941_1.p
METLCSALVFPSFRIRTSAFSKCGIRASIAVEQQTSQTKVALLRIGTRGSPLALAQAYETRDKLMASHAELAEEGAIQIVIIKTTGDKILSQPLADIGGKGLFTKEIDEALINGDIDIAVHSMKDVPTYLPDKTILPCNLPREDVRDAFISLSAASLADLPSGSIVGTASLIRKSQILHRYPSHKKWYNWKSTIXPRAYDTINKLMXITLWALAGRKRLNMTENVTSILSIDDMLPAVAQGAIGIACRSNDDKMAEYLASLNHEETRLAVSCERAFLEKLEGSCRTPIAGYASRNEDGNCLFRGLVASPDGIRVLETSRIGPYAFEDMIKMGKDAGEELLSRAGPGFFSR

SEQ ID NO: 8800 - protein, 392 aa, Glycine max
  Clone ID: GLYMA-23APR03-C1802_1.p
MCASRQKQNSSSGMRPPTLNIFPSKPMHVEPSSSKAKANIELVSPQTSGSKRPSEPSMELANPRNETASAPQPPKPVKRESNRKGPTSSSEHEGPKTPDPKTLRRLAQNREAARKSRLRKKAYVQQLESSRIRLNQLEQELQRARTQGMFLGGGALLGGEQGLPVTMNTISTEAAMFDVEYARWQEEHHRIVCELRAAVQEHLPENELRLFVDNCLAHYDQVMNLKSLVAKTDVFHLVSGTWKTPAERCFMWIGGFRPSELIKIIVRQIEPLTEQQILGICGLQQSTQEAEEALSQGLEALNQSLSDTITSDSLSYPPNMANYMGQMAVAMNKLSTLEGFVRQADNQRHQTIHRLHQILTTRQAARCFLAIAEYFHRLRALSSLWLARPRQE

SEQ ID NO: 8801 - protein, 320 aa, Glycine max
  Clone ID: GLYMA-23APR03-C18037_2.p
MGSAGALRNIVRSLSVASSRALLPRISTNASMAPICFALPSPCKPPQRLLPLWSHFHSLTDTRFPKRRPSERPRRKRASLRPSGPYAWVQYTPGQPILPNKPNEGSVKRRNEKKRMKQRPVCISLATKYWFGKNSSFLKAERMGFAGALRNIVRPLSVASSRALMPRISINASMAPFCPAFPSPCKPPQWLHPLWNQFHSLTDTRFPKRRPSEKPRRKRASLRPSGPYAWVQYTPCQPILPNKPNEGSVKRRNEKKRMRQRRAFILAEKKKRKAQLQEANRKKNIQRVERKMAAVAREREWAERLAELQRLEEEKKKSMA

SEQ ID NO: 8802 - protein, 200 aa, Glycine max
  Clone ID: GLYMA-23APR03-C1803_5.p
MAEQALEGSQPVDLTKHPSGIVPTLQNIVSTVSLDCKLELKSIALQARNAEYNPKRFAAVIMRIREPKTTALIFASGKMVCTGAKSEQQSKLAARKYARIIQKLGFPAKFKDFKIQNIVGSCDVKFPIRLEGLAYSHGAFSSYEPELFPGLIYRMKQPKIVLLIFVSGKIVLTGAKVRDETYTAFENIYPVLTEFRKNQQ

SEQ ID NO: 8803 - protein, 218 aa, Glycine max
  Clone ID: GLYMA-23APR03-C1803_8.p
MVLTLYMCLISILKLFSPVSVVQFILKNLHYFLNFLFSTFQYARIIQKLGFPAKFKDFKIQNIVGSCDVKFPIRLEGLAYSHGAFSSYEPELFPGLIYRMKQPKIVLLIFVSGKIVLTGAKVRDETYTAFENIYPVLTEFRKNQQWYGGGSASFAIGYTCCNPWARNIMNQYHCLYYFFFFVQLSEYNCVRCRAEVFLIEMTKFFTQFLFWVIYLYKF

SEQ ID NO: 8804 - protein, 488 aa, Glycine max
  unsure (1)..(488): unsure at all Xaa locations
  Clone ID: GLYMA-23APR03-C18074_2.p
MAESEVEVIHSWSAPRSLSTSLMYSFSQRDDIEVLDEPLYANFLRVTGLDRPYREELLSKMEADGDKVTNDIIFAPGKKKYRFCKHISKQRLQGLTDDLMKKGKHFILIEILDILGPKPIDGLWAPXWWYKSVHKSTGFEKPRKYPQPFPFSLYDLLEQSLPLYNMLRRHVKKKSSLLSPPLPNPDLPVPANEKLLAWVGDEIVTRDSAKVSVFDSVVQGGDSVWEGLRVYNGKIFKLEEHLDRLFDSAKALAFENVPTQDEIKEAIFRTLIRNGMFDNSHIRLSLTRGKKVSSGMSPAFNLYGCTLIVLAEWKPPVYDNTRGIVLVTATTRRNSPNNLDSKIHHNNLLNNILAKIEGNNAKADDAIMLDQDGYLSETNATNIFVVKKGRVLTPHADYCLPGITRATVMDLVVKEQLILEERRISLSEVHTADEVWTTGTMGELSPVVKVDGRIIGNGEVGPVTRRLQAAYKKLTEQSGVPIPTYLKT

SEQ ID NO: 8805 - protein, 108 aa, Glycine max
  Clone ID: GLYMA-23APR03-C18120_1.p
YRARPRVRTAAPRRDQSILLNSYNLLSFSKNSSNFFSLFLFSFIAMASPARTFFAFILAVVALFFAAANAQDLSPAPSPDAGAAGSVSSSVAMIGASVVLSLMAILKH

SEQ ID NO: 8806 - protein, 140 aa, Glycine max
  unsure (1)..(140): unsure at all Xaa locations
  Clone ID: GLYMA-23APR03-C18158_1.p
FILLIYLLFLLSVFCCVGALAITGSLDLVDKDLLGWWLCERQVKSGGLNGRPEKLPDXIMIDRVHWISKEKLIKFILDCQDTENGGISDRPDDAVDVFHTFFGVAGLSLLEYPGLKPVDPAYALPVDVVNRIFFTKEGLK

SEQ ID NO: 8807 - protein, 138 aa, Glycine max
  unsure (1)..(138): unsure at all Xaa locations
  Clone ID: GLYMA-23APR03-C18190_2.p
KKKLTVAYGHRFHRSIKDYGSAGRMDTNDSLRVASLWHSMHAISQQLSPVSGCLGIELLQADTFDLHCFQSLXGTKFFAVSEPGXQHMESLLKFVYELYTDYVLKNPXYEMEMPIRCELFDINLTQAVQKDRVTFLGR

SEQ ID NO: 8808 - protein, 211 aa, Glycine max
  Clone ID: GLYMA-23APR03-C18196_1.p
MDEDSDRPIRIMNFVSEDQLVEAKKTRGERVEDGTAQRDRPLYEILKENKDKKDAEFNERFKHRPPKALDEDETEFLDTYETTRREYERQVADEEAQQIRSFQAAVEAQSNIVHEVKEKTPLPVVQEQKSAGKKNPASGPLGMIIKVKPQAKKAKVDQGNAEEISKAGNTPVNDKSKSLETVQPLNGEADKSQVVALTGLVSYSNESDEDL

SEQ ID NO: 8809 - protein, 135 aa, Glycine max
  Clone ID: GLYMA-23APR03-C182395_3.p
MEGRRRGGYSGRRIVASRRGSGKGNANININNNNNNKNKNNINVIKKLQSREIWSKPHRAFASVTASHRFRSMCLTHQYDTHDPSKTPSSLWPFLMKRTKVVEIVAAKNVVFALYHSGLCAAFSRGEVALKNYDS

SEQ ID NO: 8810 - protein, 450 aa, Glycine max
  Clone ID: GLYMA-23APR03-C18243_1.p
MNMERYTLPAPPINIILEEEEEEENIAIAMGAPLIPSFKSMLQHQQQQPDSYFNFNFNSSISSATIPFVPNMESFPSLDPFSPSLSSLPFFNNNSSNNMAFDPGFDLGLDTTGLHSSVPPAPHLFSQAQMGFEFSELEALTGPGNGNNAPFADGAKVAAAMLLRPPPLDGAQQQQQQPTLYRKRRGTAAEIPGLETVRRKGRKWEEGGRGGEGEEGSSADVDGSGLNYESDEQNENNGNNGLKLSENNGGDNKGKRKGLPAKNLMAERRRRKKLNDRLYMLRSVVPKISKMDRASILGDAIDYLKELLQRINDLHNELESTPPGSLLTPSSTSFQPLTPTLPTLPCRVKEELYPGTLPSPKNQAAKVEVRVREGRAVNIHMFCTRRPGLLLSTMRALDNLGLDVQQAVISCFNGFALDVFKAEQCREGQDVLPEQIKAVLSDSAGFHGMM

SEQ ID NO: 8811 - protein, 209 aa, Glycine max
  unsure (1)..(209): unsure at all Xaa locations
  Clone ID: GLYMA-23APR03-C182_6.p
MVYDIHTPLSILLVLPFSPRICSMLKTLERYQKCSYGAVEVSKPGKELESSYREYLKLKARFESLQRXQRNLLGEDLGPLNTKDLEQLERQLDSSLKQVRSTKTQFMLDQLADLQNKEHMLVEANRSLTMKLEEINSRNQYRQTWEAGEQSMPYGTQNAHSQGFFQPLECNPTLQIGSDYRYIPEASEQQLAATTQAQQVNGFIPGWML

SEQ ID NO: 8812 - protein, 190 aa, Glycine max
  Clone ID: GLYMA-23APR03-C182_9.p
ICSMLKTLERYQKCSYGAVEVSKPGKELEQSSYREYLKLKARFESLQRTQRNLLGEDLGPLNTKDLEQLERQLDSSLKQVRSTKTQFMLDQLADLQNKEHMLVEANRSLTMKLEEINSRNQYRQTWEAGEQSMSYGTQNAHSQGFFQPLECNPTLQIGSDYRYNPEASEQQLAATTQAQQVNGFIPGWML

SEQ ID NO: 8813 - protein, 447 aa, Glycine max
  unsure (1)..(447): unsure at all Xaa locations
  Clone ID: GLYMA-23APR03-C18365_1.p
MDHQNKHVAVFAFPFGSHLMPLLNLVLKLAHSLPNCSFSFIGTHKSNAILFPKPHIPNNIKAYSISDGIPEGHVLGKNPTEKLNLFLQTGPENLHKGIELAEAETKKRVTCIIADALVTSSLLVAQTLNVPWIALWLPNSCSLSLYFYTDLIRQHCASRAGNKTLDFIPGLSKLRVEDMPQDLLDVGEKETVFSRELNSLGKVLPQAKVVVMNFFEELEPPLFVQDMRSKLQSLLYVVPLPSTLLPPSDTDSSGCLSWLDTKNSKSVAYVCFGTVVAPPPHELVAVAEALEESGFPFXWSLKEGLIGLLPNGFVERTKKHGKIVSWAPQTQVLAHDSVGVFVTHCGANSVIESVSSGVPMICKPFFGDQVVAARVIEDVWEIGVIMEGKVFTKNGLVKSLDLILVHQEGKKIRDNALKVKKTVEDAGRPEGQAAQDFDTLVEVISRS

SEQ ID NO: 8814 - protein, 165 aa, Glycine max
  Clone ID: GLYMA-23APR03-C18379_1.p
LVFLRSLTMTFNLMLLFCLVAVINNVVVPTSARQLMSTTTTSPDEKEVMMNIGTANRGHDEKHDHQVQVDDPTSKNYNVEKKEERFDKNQIIPPILPFPFGFPFPRPSFPFPRAAFPFPRFPLPTPFVPGLPWPISPDAVSSFPYPPVDMPASPYLHTTPSSPPN

SEQ ID NO: 8815 - protein, 232 aa, Glycine max
  Clone ID: GLYMA-23APR03-C183862_1.p
MEKLNFVKNGVSKLPPGFRFQPTDEELVFQYLKCKVFSYPLPASIIPEINVCKYDPWDLPGNCDLQERHFFSPKEAKYRNGNRMNRTTKCGYWKATGSDKRISSSTCNNGIVGVRKTLIFYEGKSPKGSRTHWVLHEYRLVSVETGAANSSHNNYVNEIGDWVLCRLSMKKRSLESDGSATHQKHRQNNTVQTSRPRLMFDFMMVGKTNSSTSSSCSSSSNIMEVSSNAFGP

SEQ ID NO: 8816 - protein, 193 aa, Glycine max
  Clone ID: GLYMA-23APR03-C18391_1.p
MASSSIITPEDVLESLMNDGTIDALRLKIINQLKANEELKSTTIKMAEQSKVLNTPGAEKQTKRELFDALRQELEASVLEKASKSVWDLILDNNGLGKEISETVERVFCRLSGQEPPLFPLPNGEPQPDKETDNRKEKGKQKENENTNSNTPSKKRSFSEINLDGADETATRSSDPAAVLEGSGKSPLSISKT

SEQ ID NO: 8817 - protein, 178 aa, Glycine max
  Clone ID: GLYMA-23APR03-C18440_1.p
MEKMNKAFEKVKIMVGMDVEDEEQQAAALDNSNSFAFMDDFNRNCTLSTTQRLYGFAICFASGLTCTLLSMLVFFKPIKFAIAFTLGNLLSLGSTAFLIGPKRQVTMMLDPARIYATAIYIASMIIALFCALYVHNKLLTLLAIILEFGALVWYSLSYIPFARAMVSKIMVSCFDTEF

SEQ ID NO: 8818 - protein, 73 aa, Glycine max
  unsure (1)..(73): unsure at all Xaa locations
  Clone ID: GLYMA-23APR03-C184545_1.p
IWVTGXPPXXXATXAPPPNRNIERAFSLYFTFCTPLIRYGTNIQGLRSFPPPRSLLRRLRSRIIPRLVSGTVA

SEQ ID NO: 8819 - protein, 352 aa, Glycine max
  Clone ID: GLYMA-23APR03-C18473_1.p
MAYSRWCWFPLYLAASIALGIIAISSAIRSTSNKNPPQDPPIPHDISLNASNALRKAGFIVMADLLHHSPSFFKPPQNSTIFAIKDSAIKNTSHPLWFLKTLLLYHTTTSNAYSFNDLVKIPQGTCLPTLLRDKNVSLTKLDLDHAPNSVEINHVLISNPNIFLGEQLAVHGVLAPFSPLQPQDLLQRGFGFAIRTPTCRSNDVNVSVSKNGVEWNRVVHLLRAKGYASFSIALHSVLDGIKRDFSGSLGYVTIFAPRDLTLLGYPLTILDRAVRLHILPQRFVYKEISSLPVRSLLKTLMPDEHLEIDGVLDFVPGMVVNGVVIVAPDMIISEKFVVHGISRAFKMAEVTS

SEQ ID NO: 8820 - protein, 159 aa, Glycine max
  Clone ID: GLYMA-23APR03-C18475_1.p
MDSLHAKMTSITQNVLVGRLLKMCWVSSLVIAKVVAAVPEVQTIDNNNALLEKSTGSQVEATYLAVEKNEDKEHSSSDENVRTISLEEPKPREFDSEVSASVSQSPIPESTIDAEHVKDSDTPECSDNQPLVASVPPVVQKTSWLSCCGLFDVLSGSNR

SEQ ID NO: 8821 - protein, 192 aa, Glycine max
  Clone ID: GLYMA-23APR03-C187432_1.p
MLLRGAISTPLPPSLRLRASPAARRTVAVASSSPSGGGDYPLSVSDTALESRGFSLRRGAEGLDLELLNSVFAAVGFPRRDPEKIRVALEHTEAVLWVEHRKTRRPVAFARATGDGVFNAIIWDVVVDPSFQGIGLGKAVIERLLRELRGKGISNIALYSEPRVLGFYRPLGFVADPDGIRGMVYSRKQKKK

SEQ ID NO: 8822 - protein, 352 aa, Glycine max
  Clone ID: GLYMA-23APR03-C18775_1.p
MKASALLNLKSFTLSRHSPTSNSFFPPFLCPSHPRHRRIHHSRNPIMSATSVNSERARAPPAIPLPPPPLSNFKIGLCQLSVSPDKDSNIAHARTAIQDAASKGAQLVLLPEIWNSPYSNDSFPVYAEDIDAGASPSTAMLSELSRLLKITIVGGSIPERSGGLLYNTCCVFGTDGNLLAKHRKIHLFDIDIPGKITFIESKTLTAGETPTIVDTEVGRIGIGICYDIRFPELAMIYAARGAHLLCYPGAFNMTTGPLHWELLQRARATDNQLYVATCSPARDTGSGYVAWGHSTLVGPFGEVLATTEHEEAIIIAEIDYSILEQRRTNLPVTKQRRGDLYQLVDFQRLNSQ

SEQ ID NO: 8823 - protein, 268 aa, Glycine max
  Clone ID: GLYMA-23APR03-C18879_2.p
MKKSSSASKGAAANDGVIKGGSIDWELRPGGMLVQKRQPLDSSSSSMIKIKVSHGSYHHEVTVPAQSTFGHLKMVLTSETGLEPKEQRLLFRGKEKEDEECLHMVGVKDMSKVILLEDPASKERKLEEMHKSEDISKACEAISKVRTEVDKLYQKVVALETTVCGGAKVEDKEFAILTELLMVQLLKLDSIAAEGEAKGQRRVEVRRVQSYVDTIDNLKARNFAAFSNAGNNAVPVIWEALESGVGSLKSPTSFPTSTVITQNWEHFE

SEQ ID NO: 8824 - protein, 119 aa, Glycine max
  Clone ID: GLYMA-23APR03-C18899_2.p
MVSTIRGKKRSDVSAINCVKAAFPGGSMTGAPKLRSMELLDSIESCSRGIYSGCIGFFSYNQRFDLNIVIRTVIIHEGEASIGAGGAIVALSNPEDEYEEMVLKFCLELICQRNSFFLS

SEQ ID NO: 8825 - protein, 195 aa, Glycine max
  Clone ID: GLYMA-23APR03-C18920_1.p
MQLQLVPPCRVPRVGDIHRIETSTSTSTVTVRRRRRRNAVTTAMRAVVQRVASASVEVEGRIVSEIGPGLLVLVGIHDSDSDADADYICRKVLNMRLFPNENTGKAWDHSVMQKNYQVLLVSQFTLYGFLKGNKPDFHVAMAPQRAKPFYASLVDRFRNAYNSDAIKDGVFGAMMKVDLVNDGPVTMQLDSNSPN

SEQ ID NO: 8826 - protein, 126 aa, Glycine max
  unsure (1)..(126): unsure at all Xaa locations
  Clone ID: GLYMA-23APR03-C1902_3.p
LVLVGELRENRYFFSNRSNGNIKRPAGXGCWKSVGKEKQIIHSESNQVIGMKETLFFCKGSHETRTQWVMHELRLVASYPCQMPVADFAVYRIFQKNKMKTRRSHGKKPSSSSKLQRLVDVKASGF

SEQ ID NO: 8827 - protein, 282 aa, Glycine max
  Clone ID: GLYMA-23APR03-C19109_1.p
MSPFDSPQTTADSSLSMSTSTSPSGGDALLKWGHRKRSRLSRAAIEDSSSSVHTNNRRITHTVPPNLSMPPPPLVSSTASSGRGRKHNSPRNLEDPSLGGSESPSRSQGSNPVVSRSAAAPKLSSCGMERSSRRMLSSGSAKCQKPSGFSTTQEASERLNNSSHASVQSEKEGGVATAPATSSLAANGNKVTVGVIQWPKIYIALSRKEKEDDFLAMKGTKIPQRPKKRAKNVDRILQCCFPGMWLSELTKSRYEVREKKSVKKQKRSRGLKGMENLDSDSE

SEQ ID NO: 8828 - protein, 103 aa, Glycine max
  Clone ID: GLYMA-23APR03-C19114_2.p
MDMYIRVKRSKTTYFIRCKPSDKILDIKQKLQELVDQPANNQRLILPVTGEVLEDSKTLADQKVENDAVVALTLRKDDNEFEEVNIVRPNDFYQARDADGANW

SEQ ID NO: 8829 - protein, 241 aa, Glycine max
  Clone ID: GLYMA-23APR03-C19132_1.p
MALRSCSTLLRSTFFHQHPQASRTLVSILFPRSTSPTCIHESHKDIHLAPSFSKRSILLTTFLWGQGMLLPNARDALLLAQELELQRYTDSDEGFTLLTPSSWTKVDKAGATVLFQEADMGSNNIGVVVNPVRLKTLEEFGTPQFVADKLLQAERRKESTKEVELITVAERSGEGGLQIYEFEYKVDSTRGGMKRIFSAAFVASKKLYLLNIVHSDKLEIPLDPNKRMILEQVLHSFDAAA

SEQ ID NO: 8830 - protein, 189 aa, Glycine max
  unsure (1)..(189): unsure at all Xaa locations
  Clone ID: GLYMA-23APR03-C191_19.p
EHPSPYVVQHPSGGEVNLVITDYCMXGMTAYDLLKKIKESSSLRNIPVVIMSSENVPSRITXCXEEGAEEFFLKPVRLSDLNKLKPHMKKTKLKDQKQGTVEKLEDLEVQQQQPQQQIIIQNEQQQAPKSRDLLQPESESHPHAQPTIEQQQQSLQQANNNSKRKTMEQGLSPETDRTRPRYSGIATVV

SEQ ID NO: 8831 - protein, 281 aa, Glycine max
  Clone ID: GLYMA-23APR03-C191_8.p
TPFPPPVPTLLCLNILQSTNSITFTFFGLLLFLFVLSSIFRNRGAATRKAPPEARGAWPLIGHIHLLGGSKPPHVTLGHMADKYGPVFTLRLGAHKTLVVSNWEMAKQCFTVNDKAFASRPKSVSFELLGYNYSMIGFIPYGSYWRHVRKIITLELLSTHCIDMLKHVMVAEVKAAVKETYKNLKGSEKATTEMKRWFGDITLNVMFRTVVGKRFVGENEENERIRKALREFFDLTGAFNVSDALPYLRWLDLDGAEKKMKKTGERVDGFSSLAKKHKVKE

SEQ ID NO: 8832 - protein, 230 aa, Glycine max
  Clone ID: GLYMA-23APR03-C19209_1.p
DILLSCKSKSLIDFTAGALAAGTAAWAATWKLSEPFRINLSAGAGAFCGLWMFSRSLYSYADQILTMDGSILQKELANIMVTKYQNDPLLMPLISKHFYSERIFDDSTSNNPTLRWRYRNFFSDNAVHGHRTHDRESNDKSQGRSENVTDSKRTNLETKRTFKNASPDIMSEGDPLDCLFGYAPPVEDIHHSNSPNKPSGIHNRARRKSHRRRRMRNHDDLSNSESAAAI

SEQ ID NO: 8833 - protein, 184 aa, Glycine max
  Clone ID: GLYMA-23APR03-C192491_1.p
MASALISRSSRRFLKPCSSSVSLYPAIFNPVISSQQSASQNPSQNPPFKLPQLQSFNFEFRKTTGSLSSFHLVAHVSTWPSKENKNHQSGGNVSSSWVELYLPRKVQPYARLARLDKPIGTWLLLWPCMWSITLATTPGHLPDFKMLALFGCGALLLRGAGCTINDLLDRDIDTMVERTKLRPV

SEQ ID NO: 8834 - protein, 97 aa, Glycine max
  Clone ID: GLYMA-23APR03-C19254_2.p
MDDYTREMMDLKTLVTRTLEKKGVLARIRAELRASVFEAIEEEDHVIEKEQALPPALLGSCNDRAKKFYIFRSAFSSLSTLSKVPTHSFVFICSYVQ

SEQ ID NO: 8835 - protein, 238 aa, Glycine max
  unsure (1)..(238): unsure at all Xaa locations
  Clone ID: GLYMA-23APR03-C1935_12.p
QQQPRLIPLGGSTTWINFRHNVLSSVEIDNLPMQIDDTQYPKTFFYEQDLHPGKTMNVQFSKSPFTQPFTILTWLKGLKIKDIDKEGYTFDELCIKTKPNGAEHKFCAKSLETLIGFAISKLGKNIQVLSSSFVNKQELYKVEGVQNLGDKAVMCHRLNFRTVAFYCHEVRGTTAFMVPLVAGDGTKTXALAVCHSDTSGMNRHILHQTMGVDPGTNTVCHFLGSKXILWVPNLLWTL

SEQ ID NO: 8836 - protein, 276 aa, Glycine max
  unsure (1)..(276): unsure at all Xaa locations
  Clone ID: GLYMA-23APR03-C1935_13.p
MEFRCSVISFTILFSLALAGESHVHASLPEEDYWEAVWPNTPIPTALRELLKPLPAGVEIDELPKQIDDTQYPKTFFYKEDLHPGKTMKVQFTKRPYTQPYGVYTWLTDIKDTSKEGYSFEEICIKKEAFEGEEKFCAKSLGTVIGFAISKLGKNIQVLSSSFVNKQEQYTVEGVQNLGDKAVMCHGLNFRXAVFXCXKXRETTAFMVPLVXGDGTKXQXLAVCHSXTXGMNHHMXHELMGVDXGTNPVCHFLGSKAXLWVPHLSMXTAYXTNVVV

SEQ ID NO: 8837 - protein, 165 aa, Glycine max
  unsure (1)..(165): unsure at all Xaa locations
  Clone ID: GLYMA-23APR03-C19387_2.p
MISGTLCAAQSFIQFLYRFVHFPLVLPCASLQPLIIYLFAPNMDAKSRISPTRLTDKKCVPCNLKELRPMSEDAAHTLMPQVAEWNLVNEDGVMKLRRSWAVKTFTKGLEFFRIVAXLLENEGHHPDLHLVGWNNVTIEIWTHAVGMNYSLFNFKLFNQKLLDEK

SEQ ID NO: 8838 - protein, 337 aa, Glycine max
  Clone ID: GLYMA-23APR03-C194194_1.p
MPFARCNSQIPAPLPSPIPTGRGTRSAANEIFSQFLEKTLQIPELTLPGPHLPPAPAEIDFRSLTLVSTDLMLRSAREFGAFRIRCHGISGSELGTMADEAERVFQKSRNVVVVERNGTGGEMIPCVRSSKGALEFAAQTITGDQTHRNFWVHMGNVASRLDTIVEQVTMVLQHKTSKEFKERIQDTESWICLCRYPHDNVPKQNEDTSVKKKDKLCDHALRFYLPMEQCIFYVQTERGPLSFDAGPENIVVTVGKQLEEWSHGVFKCVPGEMIFMPSFQSSPASFSIELVCLASSNDLSHSLDNSDNCDKIISLADQILIVFCLVFLYNFLYFVFS

SEQ ID NO: 8839 - protein, 404 aa, Glycine max
  Clone ID: GLYMA-23APR03-C19426_2.p
MILSKRNVFGTKGKMGIDFMILVLTLSWFCLTTICVSATKQAYPPTPQPNQNLRFDQNGEFKILQVADMHYANGKTTHCLNVLPSQNFSCSDLNTTIFLNRMIKAEKPNLIVFTGDNIFGFDSSDSAKSLDAAFAPAIASNIPWVAVLGNHDQEGTLSRAGVMNHIVGMKNTLSKFNPPEVHIIDGFGNYNLDVGGVQGTDFENKSVLNLYFLDSGDYSQVSTIFGYDWIKPSQQLWFQRTSAKLKKAYISKPVPQKDAAPGLAYFHIPLPEYASFDSSNMTGVKQEPDGNGISSPSVNSGFFTTLLAAGDVKAVFTGHDHINDFCGNLMNIQLCYGGGFGYHAYGKAGWPRRARVVVASLEKTGKGSWGDVKSIKTWKRLDDQHLTGIDGEVLWSKSTGGNQG

SEQ ID NO: 8840 - protein, 623 aa, Glycine max
  Clone ID: GLYMA-23APR03-C1943_51.p
MRARFPLLLLGVVFLASVSVSFGIAYWEKQNPKHNKCLQSCNSERDSYRNQACHARCNLLKVEKEEECEEGEIPRPRPRPQHPEREPQQPGEKEEDEDEQPRPIPFPRPRQPRQEEEHEQREEQEWPRKEEKRGEKGSEEEQDGREHPRPHQPHDEDEEQDERQFPFPRPPHQKESEERKQEEDEDEEQQRESEESESSESQRELRRHKNKNPFHFGSNRFETLFKNQYGRIRVLQRFNQRSPQLQNLRDYRILEFNSKPNTLLLPNHADADYLIAILNGTAILSLVNNDDRDSYRLQSGDALRVPSGTTYYVVNPDNNENLRLITLAIPVNKPGRFESFFLSSTEAQQSYLQGFSRNILEASYDTKFEEINKVLFSREEGQQQGEQRLQESVIVEISKEQIRALSKRAKSSSRKTISSEDKPFNLRSRDPIYSNKLGKFFEITPEKNPQLRDLDIFLSIVDMNEGALLLPHFNSKAIVILVINEGDANIELVGLKEQQQEQQQEEQPLEVRKYRAELSEQDIFVIPAGYPVVVNATSNLNFFAIGINAENNQRNFLAGSQDNVISQIPSQVQELAFPGSAQAVEKLLKNQRESYFVDAQPKKKEEGNKGRKGPLSSILRAFY

SEQ ID NO: 8841 - protein, 93 aa, Glycine max
  Clone ID: GLYMA-23APR03-C1944_5.p
MDSLLGNWPSFDPHNFSQLRPSDPSSSSRMTLPTYHPTHSRTLPAPDQVISTEAKNILVRHIYQHAEEKLKPKRAASDNLLPDHGCKQPRVSS

SEQ ID NO: 8842 - protein, 204 aa, Glycine max
  Clone ID: GLYMA-23APR03-C1961_10.p
MAEIEATVPDPSQIDVKLFNRWSFDDVEVTDMSLADYIGVSPSKHATYVPHTAGRYSVKRFRKAQCPIVERLTNSLMMHGRNNGKKLLAVRIIKHAMEIIHLLTDQNPIQVIVDAVINSGPREDATRIGSAGVVRRQAVDISPLRRVNQAIYLLTTGAREAAFRNIKTIAECLADELINAAKGSSNSYAIKKKDEIERVAKANR

SEQ ID NO: 8843 - protein, 581 aa, Glycine max
  Clone ID: GLYMA-23APR03-C1966_23.p
MCGILAVLGCSDDSRAKRVRVLELSRRLKHRGPDWSGLHQHGDCFLAHQRLAIVDPASGDQPLFNEDKSVIVTVNGEIYNHEELRKQLPNHNFRTGSDCDVIAHLYEEHGEDFVDMLDGIFSFVLLDTRDNSFIVARDAIGVTSLYIGWGLDGSVWISSEMKGLNDDCEHFECFPPGHLYSSKERGFRRWYNPPWFSEAIPSAPYDPLVLRHAFEQAVIKRLMTDVPFGVLLSGGLDSSLVASITSRYLANTKAAEQWGSKLHSFCVGLEGSPDLKAAKEVADYLGTVHHEFTFTVQDGIDSIEDVIYHIETYDVTTIRASTPMFLMSRKIKSLGVKWVISGEGSDEIFGGYLYFHKAPNKEEFHRETCRKIKALHQYDCLRANKSTFAWGLEARVPFLDKAFINAAMSIDPEWKMIKRDEGRIEKWILRRAFDDEEHPYLPKHILYRQKEQFSDGVGYSWIDALKAHPPKHVTEKMMLNAGNIYPHNTPKTKEAYYYRMIFERFFPQNSARLTVPGGASAACSTAKAVEWDAAWSNNLDPSGRAALGVHISAYENQNNKGVEIEKIIPMDAAPLGVAIQG

SEQ ID NO: 8844 - protein, 254 aa, Glycine max
  Clone ID: GLYMA-23APR03-C19783_1.p
MIAPPSLHPFFTPTNIKYGINRSRCLNTKGSVLCLCKSNESESQAPQPGDIRKQELLAQIAMLQTQKVCLTDYFDERSEYLTQFGEEAKAEFDKIGKDALQGLDEASAIITANIESQMVEFEESAELNRQEIQEHEKELGEFEVQMEDGRNEGLFFKNLRRRTPVDKSKAKEEAEKIKDVAREKAGSRTRKGFYLLFIGLLTFAIVDSIASSSTDWKKIAVLGATLVALVSQFIYEQNVIRNWRKKKDRHRRGK

SEQ ID NO: 8845 - protein, 294 aa, Glycine max
  Clone ID: GLYMA-23APR03-C19902_4.p
MVEQSVLVLEKQGPNPVLSEGIHDWVFECHGLLHNAVLIIASFLFVLYLALQAKKSFLRLSHGRSYIIISYYASLWLVSILNLLWCFSQAWECSPGKEFAWNLLSLFTTSGMLFLEVSLLAFLLQGNSTTGLEALTRTFGISGIIVGFDILLKAIYLFAFGIPIFINSGYPTPHVKWNLWVTHKLLLTLVYGFILFMYHSRWRERLPARPAYYKYVTIMFILNAIALFACGITGNGAAFGFWLYHFTVVCYHAAYLPLLYITFLADFFQEEDLHLENVYYSEMKDAGFFEADWN

SEQ ID NO: 8846 - protein, 447 aa, Glycine max
  unsure (1)..(447): unsure at all Xaa locations
  Clone ID: GLYMA-23APR03-C1993_20.p
MGKEKVHISIVVIGHVDSGKSTTTGHLIYKLGGIDKRVIERFEKEAAEMNKRSFKYAWVLDKLKAERERXITIDIALWKFETTKYYCTVIDAPGHRDFIKNMITGTSQADCAVLIIDSTTGGFEAGISKDGQTREHALLSFTLGVKQMICCCNKMDATTPKYSKARYDEIVKEVSSYLKKVGYNPDKIPFVPISGFEGXNMIERSTNLDWYKGPTLLXALDQISEPKRXXDKPLRLPLQDVYKIGXIGTVPVGRVETGVLKPGMVVTFAPTGLTTEVKSVEMHHESLTEAHPGDNVGFNVXNVAVKDLKRGYVASNSKDDPAKEAANFTAQVIIMNHPGQIGNGYAPVLDCHTSHIAVKFAELMTKIDRRSGKELEKEPKFLKNGDAGFVKMIPTKPMVVETFSEYPPLGRFAVRDMRQTVAVGVIKNVEKKDPTGAKVTKAAQKKK

SEQ ID NO: 8847 - protein, 139 aa, Glycine max
  Clone ID: GLYMA-23APR03-C1993_21.p
MASSSLTSVPLSSSSLNIPHSSSKASASFVSSPIGAFSRTPKTLFAESRFHFHPKRNDYGFSIKAQTLDFSDSFFEGGFGSEDDPSSPGGPGFTAVEEKEEPQCPPGLRQYETMMVLRPDMSEDERLASNCCCGSHQER

SEQ ID NO: 8848 - protein, 214 aa, Glycine max
  Clone ID: GLYMA-23APR03-C1993_22.p
MASSSLTSVPLSSSSLNIPHSSSKASASFVSSPIGAFSRTPKTLFAESRFHFHPKRNDYGFSIRAQTLDFSDSFFEGGFGSEDVPSSPGGPGFTAVEEKEEPQCPPGLRQYETMMVLRPDMSEDERLALTQKYEEVLVAGGGMYVEVFNRGVIPLAYSIKKKNKAGETNTYLDGIYLLFTYFTKPESITPLEETMLTDDNVIRSMSSKIRKRKN

SEQ ID NO: 8849 - protein, 237 aa, Glycine max
  Clone ID: GLYMA-23APR03-C1998_21.p
MEGRMGLLFLVVLGAAWACDARELAKPDLLSKLSRKPDACALCEEYSTKVLDYLNENKTQQEIIDILHNICHQTSSFKQKCITLVDYYAPLFFLEIVTIQPGEFCHKVNLCQLITYISLLVQEDTSGFCKDTVSTLSAKLKDSDTKLEIIETSLKVCNSVEKYANKCKRMVLEYGPLVFDNAEKFLESTDICTAIYAMQIFNSGWPANLSFRFLWKQRSNRFVMYLLQKIAIYITTQ

SEQ ID NO: 8850 - protein, 265 aa, Glycine max
  unsure (1)..(265): unsure at all Xaa locations
  Clone ID: GLYMA-23APR03-C1999_8.p
MPSMKTSSSKTSESSTQFDSPHSPLRSFPLFDNADPFHSPQNDNSRAIVIVETTSTQFAQAAPPAPESEHRNPPPEAVVTRPVWPETKSSATVGRTRPRPVAPPSSVVPKREMMAKKVALGFRLSEVVLCLISFSVMAADKTRGWSGDSCDRCXNCRYCLSVNVIAFVYAAFQACDLAYQVVTGRRIINHHLRYHFDFFMDQVLAYLLVSAASSAATRVDDWQSNWGKDDFTEMASASIALTFLAFVAFAISSLISGYNLCTLFS

SEQ ID NO: 8851 - protein, 148 aa, Glycine max
  Clone ID: GLYMA-23APR03-C200036_1.p
MMHLTLYWGKKVTILIDSWKTDSWTSYVLSLLACLVVAAFYQYLENRRIRLKLLAGDRRPLPAPEIRTPLLRWGVAGGDNARLGVKFAEAVLFGVNSAIGYLLMLAIMSFNGGVFLAIVVGLTIGYFFFRNEGEDDALVVDNNSCACA

SEQ ID NO: 8852 - protein, 621 aa, Glycine max
  unsure (1)..(621): unsure at all Xaa locations
  Clone ID: GLYMA-23APR03-C2003_1.p
FEHLTYPTVILLRKFQLHHHWWHILWLRISHLARHLVKLVLNPHSKKTDMLLISCSVTGHFQLLMLLHPIIYQMNESMRVILSFVGLNSLSVITLHLHLYKLSRKMIQGSIPILIGQMNVLYSLDLTGNQLSEEIPKHIFGVGHRLHFLKLSNNRLEGPTLKIPNGLKTLXMNNNXFSGRLPNRIFHASIISLDVSNNHLVGKIPSLIKNLSGLYELCLSNNHFEGSIPLELGELEYLTSLDLSQNNFIGLVPSFTNSSVAFIHLNNNRLSGLSKRMFHGNSSLVMLDLSYNEISNNLKDLIHNLSYKRLNILLLKGNHFMGDIPKQLCQLIDLNMLDLSHNNFSGVIPKCLGKMPFENKNPKNLLARFSTFDPDPNNLAQSPDLAQSPTPVSGPTLNLQEKANFTTKERTDTYIGRVLFYMSGIDLSHNKLKGNIPFELGYLTKIRALNLSHNDLTGKIPVTFSLLAQTESLDLSFNMLNSQIPPQLSMLTSLEVFSVAHNNLSGPTPDFKGQFSTFDESSYEGNPFLCGLPLPKSCNPPPTIIPNDSNTDGDNDSLLDMYVFCVSFAVSCTSALLVTAAALYINPYWRQAWFYYMELVSMNCYYFIKDNLSKVFKIGNM

SEQ ID NO: 8853 - protein, 353 aa, Glycine max
  unsure (1)..(353): unsure at all Xaa locations
  Clone ID: GLYMA-23APR03-C20220_1.p
MGRLATLSEEPINDQDNKRSTSSSSKXWRNWNWIKTHFFHKKPDLKILLSVLACPLFPVPPNTPSDPPLNQLSSSAQYIIQHFTAATGCRKLEGTVKNVFATGKVEMWAVDEVGNTGVSERGCFVIWQMLPDKWQIELAVAGHKVVAGSDGTVAWRHTPWLGAHAAKGGIRPLRRAVQGLDPLAVSAVFSAAQYMGEKQISGIDCFVLKLSPDQKDLVDRSDNTAEMIKHVAFGYFSQRNGLLVHLEDSYLTRIQSPGTHPTYWETTMSTKIEDYKMVDGVMIAHAGHSTVIITRFGDNLKTGPAITRLEESWTIDDVAFNVQGLSMDCFIPPKELHKDYPQEDLDWRSPLHR

SEQ ID NO: 8854 - protein, 91 aa, Glycine max
  Clone ID: GLYMA-23APR03-C2027_17.p
VTVRLFGRGNSLRNPASKAYEQVFAPHHGWAIRKAVSVGMYVLPTKEQLLKKLNEDEASAKGHMQSYVTASAPLIQYIDKLFVSRDLGIDW

SEQ ID NO: 8855 - protein, 269 aa, Glycine max
  Clone ID: GLYMA-23APR03-C20285_2.p
LHSDICSVYQPNGQAPISSTDKLLAPQGRGDGIDEVHYTPPRRLRTDEIPHIVNDFRLAARNAIQAGFDGVEIHGAHGYLIDQFLKDKVNDRTDQYGGSLENRCRFALEVVEALVDEIGAERVGIRLSPFAEYSESGDSNPKELGLYMMNALNKYGILYCHMVEPRMKTVGEKTECPHSLVPMRKAFNGTFIAAGGYDRQDGINAVAENRADLVAYGRWFLANPDLPKRFALNAPLNKYHRETFYTPDPVVGYTDYPFLHAEESNVVAS

SEQ ID NO: 8856 - protein, 125 aa, Glycine max
  Clone ID: GLYMA-23APR03-C20386_2.p
ERRVITRKKGKEKMPCLYISTNINLDGVNIDPIFSQATTAVSTIIGKPEKFVMVILKGSVPISFEGNKEPAAYAEIVSMGGINPEVKRKLINTIGTILQSNLSIPRTRFFLKVFDTTLFRTKSKM

SEQ ID NO: 8857 - protein, 498 aa, Glycine max
  Clone ID: GLYMA-23APR03-C2038_1.p
MVKSCCVMCLCLILLHIFLRFVPIQSAPESAIVTQIPGFSGTLPSKHYAGYVTVDKSHGRNLYYYFVESEGKPSEDPVVLWLNGGPGCSSFDGFIYEHGPFNFEAAKTRGGLPTLHLNPYSWSKVSSVIYLDSPAGVGFSYSENKTDYITGDIKTATDSHAFLLKWFELYPEFLSNPFFIAGESYAGVYVPTLASEVVKGIDAGVEPKLNFKGYMVGNGVTDEQIDGNALVPFVHGMGLIPDELFEEVNRECNGNFYDPTSANCSSKLSKVDELVDEINIYNILEPCYHGTEAEKITESYIRMPSTFRKLGETERPFPVRKRMFGRAWPLRAPVRDGIVPTWPQLMNSKSAPPCTDDEVANSWLNNEAVRTAIHTAQKSVVSSWDLCTDRIYFDHDAGSMIKYHKNLTSKGYRALIFSGDHDMCVPYTGSQVWTRSVGYKIVDEWRPWSSNGQVAGYTQGYDKNLTFLTVKGSGHTVPEYKPREALDFYKRFLAGLPI

SEQ ID NO: 8858 - protein, 192 aa, Glycine max
  Clone ID: GLYMA-23APR03-C203945_2.p
MDLEGKKFGKGNREFGSTRDLINQNRLWPYYKFFCKKSLPVSISETHYLRNVVGDTKIRKGEGMELDQLCKNMDTSEKKTCMCPFDLDVLSEAFHMRDMNPVHLSSKGLPNAVPKLENQFRDHERKNKKVKDKGEKYRKQKHRLHRINNGSCIENIRIRPHDPHPLQLKNQQDKVCSQSFIPLFCVVCLTLN

SEQ ID NO: 8859 - protein, 339 aa, Glycine max
  Clone ID: GLYMA-23APR03-C2057_2.p
MEERYETLKELGSGNFGVARLAKDKETGELVAIKYIERGKKIDANVQREIVNHRSLRHPNIIRFKEVFLTPTHLAIVLEYAAGGELFERICNAGRLSEDEARFFFQQLISGVSYCHSMQICHRDLKLENTLLDGNPAPRLKICDFGFSKSALLHSQPKSTVGTPAYIAPEVLSRKEYDGKVADVWSCGVTLYVMLVGAYPFEDPEDPKNFRKSIGRIMSVQYAIPDYVRVSKECRHLISCIFVANPAKRISISEIKQHLWFRKNLPREIIEPERRGYVDHKRTQPSQSVEETMRIIQEARTKIHTGEQAGTGTSDAVHGDEANEEVDINDHYAKYLALN

SEQ ID NO: 8860 - protein, 308 aa, Glycine max
  Clone ID: GLYMA-23APR03-C2057_6.p
SVFLLCELCLWYQIDENVQREIINHRSLRHPNIIRFKEVLLTPTHLAIVLEYASGGELFERICTAGRFSEDEARYFFQQLISGVSYCHSMEICHRDLKLENTLLDGNPSPRLKICDFGYSKSALLHSQPKSTVGTPAYIAPEVLSRKEYDGKISDVWSCGVTLYVMLVGAYPFEDPEDPRNFRKTIGRIIGVQYSIPDYVRVSSDCRNLLSRIFVADPAKRITIPEIKQYPWFLKNMPKEIIEAERKGFEETTKDQPSQKVEEIMRIIQEARIPGQGSKAGEVGQVGTGSLDIEDDEEIDVSGDYEQV

SEQ ID NO: 8861 - protein, 343 aa, Glycine max
  Clone ID: GLYMA-23APR03-C2062_4.p
MQSRGSSHRVSSMGNNRSRIPALLISMFAAFASIYVAGRLWLDAENRVYLIKELDRITGQGQSAISVDDTLKIIACREQHKKLDALETELAGARQEGFVSNPLIETNGTYSTRRPLVVIGILTKFGRQKNRDAIRKAWMGSGASLKKIEEGKGIIVRFVIGRSENRGDSQDKDIDHENRLTNDFLILDNHVETNDAFPKKVKLFFAHAADKWDAEFYAKVNDDVYVNIDALGATLATHLDKPRVYMGCMKSGEVFSELNHKWYEPEWWKFGDKKSYFRHASGEMYVISRALAKFISINRSILRTYAHDDVSAGSWFIGLDVKHVDEAKFCCSSWSTGAICAGV

SEQ ID NO: 8862 - protein, 389 aa, Glycine max
  Clone ID: GLYMA-23APR03-C20636_1.p
MELLCTANAILPSRSLSIPTPYSLPLKTSLPFPRFNFPKIERLRGLQPCVSVSEGSSAEAEVLEESRIRRVCDKLIGVFMVDKPTPTHWRRLLAFSREWSNLRPHFFARCLERADAAEEDPAMKEKLLRLARKLKQIDEDVQRHNDLLEVVRRDPSGISEIVSKRRKDFTEEFFVHFHTVAESYYENKEEQNELAKLGNACLAAVQAYDAATESVEKLQAAELKFQDIINSPSLDAACRKIDNLAEKKELDSTLVLMITKAWSASKESNMMKDEVKDILYHLYKTAVGNLQRLVPKEIRIVKYLIRIEDPEEQLSALKDAFTPGEELEGTDVDNLYTTPEKLHTWIKSVLDAYHLSGEGTLIREARDLLNPEVIQKLEVLKKVVEKNFM

SEQ ID NO: 8863 - protein, 171 aa, Glycine max
  Clone ID: GLYMA-23APR03-C20717_2.p
MLTIMSSRKNHFSSRSHRFLPVASDIDDSASLTMDSESAFEFDESELYNSVQANSFEFQRSLHSRGSNNSSAKKKPSSSSGAPALMPVNIPDWSKILGDEYRRRNSFDDDDNDDNNEGYDDERSGRVPPHEFLARNRVASFSVHEGVGRTLKGRDLSTLRNAIWAKTGFQD

SEQ ID NO: 8864 - protein, 89 aa, Glycine max
  Clone ID: GLYMA-23APR03-C20778_1.p
MKKRQVVVKSVANTSSSVMRNIRYGECQKNHAANIGGYAVDGCREFMASTGEGAGGALTCAACGCHRNFHRREVNTEVVCEYSPPNSGR

SEQ ID NO: 8865 - protein, 351 aa, Glycine max
  Clone ID: GLYMA-23APR03-C207822_1.p
MVKCGFGIHFSIGQCHQHGYIVPHMVLLLLLVVLPLETINLSAQGRDGTVKVWELGDAGLSRIPVLTIKTNTYHFCKFSMVKKHSVWSKEGKASEDSYRSELGGVPDREILEDRREEAYTNQSCSESFGENMYNEGLQYVALSGEKSSEVEIWDLKSAEKVVQLPSSNPSNSSSPCNKGMCMALQLFLPSESQGFLNVLAGRPRYEDGSMLWWDVRNPGVPVTSVKFHSEPVLSVCNDGSCKGGISGAADDKIVMYSLDHSSGTCVVKKEISLDRPGISGTSIRPDGKIAATAGWDHRLRIYNYRKGNALAILKYHHGTCNAVTYSSDCKLMASASEDTTVGLWELYPPRI

SEQ ID NO: 8866 - protein, 270 aa, Glycine max
  unsure (1)..(270): unsure at all Xaa locations
  Clone ID: GLYMA-23APR03-C2083_1.p
MERKRSHASFTMFAMLVGLLSQSLVIPVISTTVADQKNYYTPDPHAGSPPTAPGSHNSSPPSHGHGSSPPSHHHSSPSTPSTPSGGNCGSSPPQHHDPTTPSTPSTPSNPPSGGYYGGSPPTPVTVSPPTTPVDPGTPSIPSPPLIPSPSPFTGTCNYWRNHPAIIWGILGWWGTLGSAFGVTGTTXYQGSRPGLSLXQALSNTRTDGLGALYREGTASFLNSMVNNKFPYTTNQVRDRFVGXSLNSNKAAEAQAQLFKMANEGRMKPRP

SEQ ID NO: 8867 - protein, 302 aa, Glycine max
  Clone ID: GLYMA-23APR03-C209313_1.p
CRVFQEHCVRNLKRSLLWHSKQKFTEGSASPFFQNLRMAQNASFQQQKFIIPNKYGYKLVGILHESGTKEIVLLCHGGRASKENFIMTNLAAALENAGISSFRFDFTGNGESEGSFEIGGFWREADDIHAVAQHFQEANRTVIAIVGHSKGANAALLYASKYHDIKTIVNLSGCHDLKVGLENRFGKDFLERLRKEGFIEFKAESGINYRVTEESLTDRLNIIMLEECLHIDKKCRFFTVHGSADIQIPVVAAHELAKILPNHKLHIIEGADHVYTDHQAELASVVLNFIKETLKLDKLNAS

SEQ ID NO: 8868 - protein, 319 aa, Glycine max
  Clone ID: GLYMA-23APR03-C2093_1.p
MAYEPPFLETYKTLVQQHLGDSRNEFIVERCDIPLIDLGRLSLEREECMREIAEAAREWGFFQVVNHGISHELLKSLQIEQKKVFYQPFLNKSSTQGKAYRWGNPFATNLRQLSWSEAFHFYLTDISRMDQHETLRSSLEVFAITMFSLAQSLAEILVCKLNTKSNYFREHCLPKSSFIRLNRYPQCPISSKVHGLLPHSDTSFLTIVHQDQVGGLQLLKDGKWVGVKPNPHALVVNIGDLFQALSNGVYKSIKHRVVAAEKVERFSMAFFYSPSEEAIIQSQIKPPIYRKFTLREYRQQTEKDVKQTGDKVGLSRFLL

SEQ ID NO: 8869 - protein, 77 aa, Glycine max
  Clone ID: GLYMA-23APR03-C209527_2.p
VGLYVNYVQAKSILMLANRKLEERVRTPTGSEPSSPTVMQSNNQLYSPGTGPSMRKSLQRFLQKRRNRVQEASPYRH

SEQ ID NO: 8870 - protein, 89 aa, Glycine max
  unsure (1)..(89): unsure at all Xaa locations
  Clone ID: GLYMA-23APR03-C21016_4.p
MNILRSFGNSPTDLKTTHXXDPXFNWXFLLRDVCLFGTVREGFAWVVRPRNLHLLACHVTNETMQLYQLSRWFRAQRTLEQNKKETDAE

SEQ ID NO: 8871 - protein, 103 aa, Glycine max
  Clone ID: GLYMA-23APR03-C21016_7.p
MNILRSFWNSPTGLKTTHFWGPAFNWSLPFAAAMDTKKPPETISVNMTGVMCVYSALCMRFAWMVRPKNPHLLVCHVSNETVQLYDSSFTIDCFNLLGYFSPL

SEQ ID NO: 8872 - protein, 66 aa, Glycine max
  Clone ID: GLYMA-23APR03-C21044_1.p
MANAASGMAVHDDCKLRFLELKTKRTHRFIVFKIEEQQKQVIVEKLGEPAQGYEDFTASLPAAPQS

SEQ ID NO: 8873 - protein, 61 aa, Glycine max
  Clone ID: GLYMA-23APR03-C21044_2.p
EDLVYVGKLVAGSFAGGAAIKYGSALFPEITTPNLVVALLLILTPVLVAVFLLIKESRTNP

SEQ ID NO: 8874 - protein, 125 aa, Glycine max
  Clone ID: GLYMA-23APR03-C2105_1.p
MGKSVVEKLLWMAIVCLVLGVISITPKAQAAVTCNQVVSNLTPCISYVLNGGKTVPGPCCNGIKTLFNLAHSTPDRQTVCKCIKNAVSAFHYGKSNVDRAAALPKQCGVNIPYQISPSTDCTRVQ

SEQ ID NO: 8875 - protein, 275 aa, Glycine max
  unsure (1)..(275): unsure at all Xaa locations
  Clone ID: GLYMA-23APR03-C2111_13.p
APPPLICAIENYALVPVDPSTLPLQVSAMKALKESLRVPDRMGWNGDPCAPTNWDAWEGVTCRMTNDKTAHVISQIDLGSQGLKGFISDQISLLSDLVSLNLSSNSLGGEIPPGLGQKSLIQVDLSNNQLMGFIPDSLASSNLKLVLLNGNLLEGRVPEQLYSVGVHGGAIDLSGNKGLCGVPSLPSCPMFWEHGRLSTRGKIAIALXCLFVFCVILLLVYIYIRRRRNDYDFALPHELTSLATKRNRYQRQKSLMVLEMESQHAKGLPSHFTTQ

SEQ ID NO: 8876 - protein, 296 aa, Glycine max
  unsure (1)..(296): unsure at all Xaa locations
  Clone ID: GLYMA-23APR03-C2111_23.p
MIDISTLNAAQITVLGSAFCAMLSMHFTSQLLSQHLFYWKNPKEQKAIIIIILMAPIYAAVSFVGLLDIRGSKEFFTFLESVKECYEALVIAKFXALMYSYLNISISRNIVPDEIKGREIHHSFPMTLFQPRTVRLNHHNLKLLKYWTWQFVVVRPVCSVLMIALQLVGLYPTWLSWAFTIVLNISVSLALYSLVVFYHVFAKELAPHKPLAKFLCIKGIVFFCFWQGMLLELLAATGVIQSRHLRLDVEHIEEAMQNILVCLEMVIFSVLQQYAYHPAPYSGEVEKMLKQNKKNE

SEQ ID NO: 8877 - protein, 160 aa, Glycine max
  unsure (1)..(160): unsure at all Xaa locations
  Clone ID: GLYMA-23APR03-C2122_32.p
VTQMKQEHDKRQASLIAEHNEQLKRTQLQAENELREKTMFMRNDHEAQIKALRCELEDECRKLEEELHLQKXKEDRQRALLQLQWKVMSDKPKEDQEVNSKQVDLCLNLFVCVCLQMDAIFAHFHVGLPLVVWFDILHLSFGRHSWGNEKTFVVYLNVLL

SEQ ID NO: 8878 - protein, 245 aa, Glycine max
  Clone ID: GLYMA-23APR03-C2128_1.p
MTMSGPEEHGSMSLMGSLRVIELQLVAFALVFSASGLVPLLDLAYSALISIYLMLLGRFAFPSHGCAPGPMFHESGLFQVYVVVGTTVGLFLPLAYVLGGFGRGDKQAVRSASPHLFLLAFQILTENVISSFSLFSPPVRAMVPLMYTVRRIFVDIGWIHDVCLNKTLPPYANLKDKAWFWFGRVLAVANLVYFSINLFGFLIPRFLPRAFMRYFQERGEIYAKLVEEKRYVNVVNNKSHPPDKK

SEQ ID NO: 8879 - protein, 324 aa, Glycine max
  Clone ID: GLYMA-23APR03-C2132_2.p
KQQRQQGYSEAPLPCRDSLVTKLFAMNNSGSSQSELDDEEEDQPYAEFWMGSHVSGPSFIVLDGSEQRVTLKSWLLENPNVLGPKVVEKWGGDLPFLFKVLSVDKALSIQAHPDKNLARTLLKLHPDVYKDGNHKPEMALAGTEFKVLCGLVTLKELKAVLTVPEVVELVGVENVNLVLQITDEDGEEKVKAILQSLFTDVMSESKESVTGAVDKLRNRLHKESQLTDKEQLVLWLEKQYPSDVGVIAAFFLNHVKLAPDEALFLGANEPHAYIYGECIACKATSDNVVRAGLTPKHRDVQTLCSMLTYKQDYTVCYGYTSIHT

SEQ ID NO: 8880 - protein, 133 aa, Glycine max
  Clone ID: GLYMA-23APR03-C21347_2.p
MTLHLQHPNINMAAKLTLSSPLSFKTSFLPKSPSFSPGLCSPRTNVTGVKVHAKLGPVHAKLGGGDEQAKNGGKKKFITREEEPQQYWQTAGEREGENPMKTPLPYIIIFGMSTPFVILAIAFANGWIKVPVR

SEQ ID NO: 8881 - protein, 362 aa, Glycine max
  unsure (1)..(362): unsure at all Xaa locations
  Clone ID: GLYMA-23APR03-C2136_5.p
DKLEAGTVSSYDRKSEIKAFDDSKTGVQGLVENGVTKVPLMFYSENSNLNDGVTGASYSKISIPIIDLTGIHDDPILRDHVVGKVRYACEKWGFFQVINHGIPTHVLDEMIKGTCRFHQQDAKVRKEYYTREVSRKVAYLSNYTLFEDPSADWRDTLAFSLAPHPPEAEEFPAXCRDIVNEYSKKIMALAYALFELLSEALGLNRFYLKEMDCAEGQLLLCHYYPACPEPELTMGNTKHSDGNTITILLQDQIGGLQVLHDSQWIDVPPMHGALVVNIGDIMQLMTNDKFISVQHRVLAKDQGPRISVASFFRTGISRVFGPIKELLSEEHPPVYRDISLKDYMAHRYTSGSGTSALLHFKL

SEQ ID NO: 8882 - protein, 74 aa, Glycine max
  unsure (1)..(74): unsure at all Xaa locations
  Clone ID: GLYMA-23APR03-C2144_10.p
MSSPSKRREMDLMKLMMSDYXVEMINDGMXEFYVQFHGPNDSPYHGGVWFSFLPTYLSLTNKRANLCVHNFLMA

SEQ ID NO: 8883 - protein, 477 aa, Glycine max
  Clone ID: GLYMA-23APR03-C2155_2.p
MGRKGNWFSSVMKALSPDSKEKKEQKSSKSKKKWFGKQKLETSVSYSEAHKAPPPPRPIPPPEAIKLTDIENEISHDHDYVVEVATAMDAEEPVPAVQIEPVRVEAAPIAHYAGKPKDEVAAIKIQTAFRGYLARRALRALRGLVRLKLLMEGPVVKRQATSTLHSMQTLSRLQSQIRSRRIRMLEENQALQRQLLQKHARELESLRMGEEWDDSLQSKEQIEAKLLSKYEATTRRERALAYAFTHQQNWKNSSRSVNPMFMDPTNPSWGWSWLERWMAARPWESRSHMDKELNDHSSVRSSSRSITGGEISKSFARFQLNLEKHSPTACQNPGSPSFQSTPSKPASISAKKPKKVSPSPRGSWVTDEDSKSLVSVQSDRFRRHSIAGSLVRDDESLASSPAVPSYMVPTQSAKAKSRTQSPLAPENGKAEKGSFGSAKKRLSFPASPARPRRHSGPPKVESSSLNAELAVDKGVDS

SEQ ID NO: 8884 - protein, 108 aa, Glycine max
  Clone ID: GLYMA-23APR03-C21606_2.p
SYQMLILQYIIHNSQCLDPSVIYLSRNYGKKGTAGVGMIIILLSDQDLILGLSLPVVGRTTGSPLVLGRMVGVLMTRRIRHPADPRVLGAMIVVLQGLVHGHTVHADL

SEQ ID NO: 8885 - protein, 107 aa, Glycine max
  Clone ID: GLYMA-23APR03-C2173_4.p
MPAGHGLRSRTRDSFSRPFRKKGTIALTTYLRTYHVGDYVDVKVNGAVHKGMPHKFYHGRTGRVWNVTKRAVGVEVNKQVGNRIIRKRIHVRVEHVMPSRCTEEYSL

SEQ ID NO: 8886 - protein, 527 aa, Glycine max
  Clone ID: GLYMA-23APR03-C2174_9.p
DHPVFLWLDDPNGPMYYKGWYHFFYQYNPNGAVWGDIVWGHAVSRDMIHWLHLPLAMVADQWYDMQGVWTGSATILPNGEIIMLYTGSTNESVQVQNLAYPADPSDPLLVDWIKYPGNPVLVPPPGIGTKDFRDPTTAWLTSEGKWRITIGSKLNKTGIALVYDTEDFKSYELKEGLLRAVDGTGMWECVDFFPVSKKNENGLDTSVNGDEVKHVMKVSLDDDRHDYYAIGTYDEKSVLFTPDDAKNDVGVGLRYDYGIFYASKTFYDQNKERRLLWGWIGESDSEYADVAKGWASVQSIPRTVELDRKTGSNLLQWPVAEVESLRLRSDEFKNLKAKPGSVVSIDIETATQLDIVAEFEIDKETLEKTPESNEEYTCGNSGGSKQRGALGPFGLLVLADEGLFEYTPQYFYVIKGSNGNLKTSFCADQSRSSQANDVRKQIVGSAVPVLKDEKFSLRILVDHSIVESFAQGGRTVVTSRVYPTKAIYGAARLFLFNNATEATVTASLNVWQMNSAFIRPFHPDQKN

SEQ ID NO: 8887 - protein, 334 aa, Glycine max
  Clone ID: GLYMA-23APR03-C217_3.p
FSERSAAMDLPRDVDDYIKQTLDDTLGIPVSSKTLESKLRASQDSQWRLRERLLSLLPQLKQKDQLIDRLKSEAGMNARALKKFVEENQRLATECERLLARCHQLENECALYDKDREALMEFGNNADERAREAQTRVLDLERDLLFMGNELNKYKHQHQLVNSSVCTPGEKNLLDSVLATPTLTSKDDDSTYAFLQVNSENEACKQLLSMWNCINPSTRSVLSLVAKVKSLEKDKEHLRTNLHKAEEEVKLLFDENNVLEKENKRLLRIYKERNHPDSGGEYTNSPSAKSNKRKSSPRTSSPMQRKIDFDDQEVARRPLSPLRHNSPDCRMHKK

SEQ ID NO: 8888 - protein, 298 aa, Glycine max
  Clone ID: GLYMA-23APR03-C2181_35.p
MVYVKSQKSKAYFKRYQVKFKRRREGKTDYRARIRLINQDKNKYNTPKYRFVVRFSNKDIVAQIISASIAGDIVLAAAYAHELPRYGLEVGLTNYAAAYCTGLLLARRVLKTLEMDEEYEGNVEATGEDYSVEPAESRRPFRALLDVGLIRTTTGNRVFGALKGALDGGLDIPHSDKRFAGFDKEKKELDAEVHRKYVFGGHVAAYMKILAEDEPEKYQSHFSEYIKRGIEADGIEALYKKVHAAIRADPSLKKSEKQPPKEHKRYNLKKLTYEERKAKLIARVAAINSAADNDEDDE

SEQ ID NO: 8889 - protein, 341 aa, Glycine max
  Clone ID: GLYMA-23APR03-C2189_2.p
MEDNNNNNHHQAEKQQDDSSHHHPSLLLPNPNHSTTINNNTKEDHHHRLKRDEWSEGAVTTLLEAYEAKWVLRNRAKLKGHDWEDVAKHVSARANSTKSPKTQTQCKNKIESMKKRYRSESATTADASSSWPLYSRLDVLLRGTAPISSSLSPPPIAAARPIIAAPSSQSPHNQALVLLEPPPSVAPPPIAIAQNSYGSNGVERLLAKEDGIGAKSSEHVSNKNPMDSDSSTPALYSEKDKVRCNKRKMKSENNKRRRNNNNEDMEIVESIRWLAEMVVRSEQTRMDTMKEIERMRVEAEAKRGEMELKRTEIIANTQLEIAKIFASVNKGVDSSLRIGRS

SEQ ID NO: 8890 - protein, 340 aa, Glycine max
  unsure (1)..(340): unsure at all Xaa locations
  Clone ID: GLYMA-23APR03-C2189_3.p
MGVVEQEMEEEEKEKHTNNQDQNRLNHPSSLHPIKEECVSVRKPFSGDRVKRDEWSEGAVSTLLEAYEAKWVLRNRAKLKGHDWEDVARHVSARANCTKSPKTSTQCKNKVESMKKRYRSESAATADHASSSWPLYSRLDLLLRGTGPVLSSPPPPPPAMMPAAMPVLSPVEPSQPPQLSPPPAAPSGPLANAQNSHGSNGVDEKLAKVNSVVHNFSVLGLFLFLISTDSSTPALYSKKDGLRCNKRXKKSIDDTGRRRKECVEIAESLRWLTEAMIRSEQARMDAMKEIERMRVEAEAKRGEMDLKRTEIIANTQLEIARIFASVNNKGVDSSLRIGRS

SEQ ID NO: 8891 - protein, 128 aa, Glycine max
  Clone ID: GLYMA-23APR03-C2192_1.p
MQSQQTVKEEDDEGPPPGWQPLPAQPPPPPRPSGWAQMVCGSCRRLLSYPRGAKHVKCSCCQTVNIVLEADQVGQVKCGSCAVLLMYPYGASQVRCSSCRFVTEIGAHNKRPPWSVQQRKPSPPKTGC

SEQ ID NO: 8892 - protein, 337 aa, Glycine max
  unsure (1)..(337): unsure at all Xaa locations
  Clone ID: GLYMA-23APR03-C21940_2.p
GTPYAQEQVNIGSGPPDSKVRWFRSSSNEPRFINTVTFDSKDDSPTLVMVHGYAASQGFFFRNFDALASRFRVIAIDQLGWGGSSRPDFTCRSTEETEAWFIDSFEEWRKAKNLSNFILLGHSFGGYVASKYALKHPEHVNHLILVXPAGFSSESERITKFLSTWKGSILNQIWESNFTPQKIIRGLGPWGPDMVLKYTSARFVTYTTGETLTESESRLLTDYVYHTLAAKASGELCLKYIFSFGGLPRSPLLHSASEWKVPTTFIYGFQDWMNYEGAQEARKQMKVPCEILRVPQAGHFVFIDNPSGFHSAVFYACRRFLRPDPDSESLPEGLTSA

SEQ ID NO: 8893 - protein, 265 aa, Glycine max
  Clone ID: GLYMA-23APR03-C2194_2.p
MAIPYPHFIATEKAAMDAGLLHPSSPSSVILTQDDLKKIAAYKAVEYVESGMVLGLGTGSTAKHAVDRIGELLRQGKLKDIVGIPTSTKTHDQALSLGIPLSDLDSHPTVDLAIDGADEVDPFLNLVKGRGGSLLREKMVEGACKKFIVIVDESKLVNYLGGSGLAMPVEVIQFCWRFTAARLQKLFQEAGCVAKLRTFAEKDEPYVTDNGNFIVDLYFERSIGDLKAASDAILQLAGVVEHGMFLDMATTVIVAGELGLTVKNK

SEQ ID NO: 8894 - protein, 364 aa, Glycine max
  unsure (1)..(364): unsure at all Xaa locations
  Clone ID: GLYMA-23APR03-C221081_1.p
MASCLVCCIIVTSLFMSLSFASAQQGRAFFVFGDSLVDSGNNDFLATTARADAPPYGIDFPTHRPTGRFSNGLNIPDIISENLGLEPTLPYLSPLLVGERLLVGANFASAGIGILNDTGFQFLNIIHIYKQLKLFAHYQQRLSAHIGKEGAWRHVNQALILITLGGNDFVNNYYLVPYSVRSRQFSLPDYVTYIISEYRLILRRLYDLGGRRVLVTGTGPMGCVPAELALRSRNGECDVELQRAASLFNPQLVEMVKGLNQEIGAHVFIAVNAYEMHMDFVTNPQDFGFVTSKIACCGQGPXNGVGLCTPLSNLCPNRDLYAFWDPFHPSEKANRIIVQQMMTGSDQYMHPMNLSTIMALDSRV

SEQ ID NO: 8895 - protein, 194 aa, Glycine max
  Clone ID: GLYMA-23APR03-C2211_1.p
NQLNVTQKTFLSSVPKVQNQTKQLLETSRKGYLAAISASSYSYVPLLKHFLPILNPGGSSISLTYIASERIIPGYGGGMSSAKAALESDTRVLAFEAGRKRKIRVNTISAGPLRSRAAKAIGFIDMMIDYSSANAPLQKELSAEEVGNTAAFLASPLASAITGTVLYVDNGLNAMGVGVDSPIFKDLDIPKDQH

SEQ ID NO: 8896 - protein, 120 aa, Glycine max
  Clone ID: GLYMA-23APR03-C22142_2.p
SLNWHWNSTLLFLCRRTSSFRKMLENLQAPPSTTESAPVVKHYAPPNQRNRSANRRKSSGWTAAIQSYNNPKDSSEKPVMYSSGTSVWTAATSASSSVSQRDFLGELRRQMHSANPSFTT

SEQ ID NO: 8897 - protein, 451 aa, Glycine max
  Clone ID: GLYMA-23APR03-C2220_2.p
MEVVEKEKKKYITSEELKGHNKEGDLWISIQGKVYNVSDWVKEHPGGDVPISNLAGQDVTDAFIAYHPGTAWSHLDKFFTGYHLSDFKVSEVSKDYRKLASEFSKLGLFDTKGHVTSCTLASVAVMFLIVMYGVLRCTSVWAHLGSGMLLGLLWMQSAYVGHDSGHYVVMTSNGFNKVAQILSGNCLTGISIAWWKWTHNAHHIACNSLDHDPDLQHMPVFAVSSRFFNSITSHFYGRKLEFDFIARFLICYQHFTFYPVMCVARVNLYLQTILLLFSRRKVQDRALNIMGILVFWTWFPLLVSFLPNWPERVMFVLASFAVCSIQHIQFCLNHFAANVYVGLPSGNDWFEKQTSGTLDISCSSSMDWFFGGLQFQLEHHLFPRLPRCQLRNISPLVSDLCKKHNLPYRSLSFWEANQWTIRTLRTAALQARDLTNPAPKNLLWEAVNTHG

SEQ ID NO: 8898 - protein, 152 aa, Glycine max
  Clone ID: GLYMA-23APR03-C22258_1.p
MPTLHKFKFLATQCAVAGSPTRSPTTSPVIHLRRRKTLRMFLARRRFHPPPQDPPPLPDSEARVRHKLKDLFISSPPPPPLNDEKTIFHNHQQQQEDQHEELLPNSAVSVRFRTGSPFRRGASTAALRPVSSVFRYRLLRRAWRPVLVSIPE

SEQ ID NO: 8899 - protein, 307 aa, Glycine max
  Clone ID: GLYMA-23APR03-C22375_1.p
MDPVAAQGRPLPPPFLTRDLHLHPHHQFQPHHNHQNTEDEAGNGRGQKRDRDENAGGGGGATTPPQGGGEGKESGSGDGGGSDMGRRPRGRPAGSKNKPKPPIIITRDSANALRSHVMEIANGCDIMESITAFARRRQRGVCVLSGSGTVTNVTLRQPASPGAVVTLHGRFEILSLSGSFLPPPAPPAASGLAIYLAGGQGQVVGGSVVGPLVASGPVVIMAASFGNAAYERLPLEEEETPVAVHGNGGLGSPGIPGTQQQPQQQQQQQLVGDPNSSSLFHGMPQNLLNSIQLPAEGYWGGSARPPF

SEQ ID NO: 8900 - protein, 211 aa, Glycine max
  Clone ID: GLYMA-23APR03-C223878_1.p
MDFSSTVDTSRPFTSVKEAVAIFGERLLLGEIYSPIKRESSWRLSSPSPSPSSRPMKTDEENNNNNNGQLADIIKKLEAELEQTKVELKLLKERGSETEVALATLNAELHKNMSKLAQAEATAAGKAATTKTVRFEISEDRKDGTVEKKKESQSLSHMLSLGEKDHLFGGKKGKKQKQKQKPIIPLVGDLFFKRKSSSTTSHHNPLYASPF

SEQ ID NO: 8901 - protein, 219 aa, Glycine max
  unsure (1)..(219): unsure at all Xaa locations
  Clone ID: GLYMA-23APR03-C2238_3.p
MDSACATLNGRHLAKVSEGIGRNRTSGFWGESTRGSVNTKRFLSVQSCKTSRTNRNLRNSKPGSGIARAVLTSDIDEDSMAFQGVPTFEKPEVDPKSVASIILXGGAGTRLFPLTGRRAKPAVPIGGCYRLIDIPMSNCINSGIRKIFILTQFNSFSLNRHLSRAYSFGNGMTFGDGFVELGEDGTRHRVECEIVGEVEQDENRRRKWETSPTFLFSSF

SEQ ID NO: 8902 - protein, 163 aa, Glycine max
  Clone ID: GLYMA-23APR03-C2252_2.p
MLRRLLSSHLKTLASSAAAAATATPRSASASARFAALSRSCLYFSTQSEDATAIKKKVEDIMPIATGHEREELQAELEGRNILEIDHPEGPFGTKEAPAVVKSYYDKRIVGCPGGEGEDEHDVVWFWLEKDKPHECPVCAQYFVLEVVGPGGPPDGHGDDDHH

SEQ ID NO: 8903 - protein, 138 aa, Glycine max
  unsure (1)..(138): unsure at all Xaa locations
  Clone ID: GLYMA-23APR03-C2267_29.p
MSNMIEVRVPNLDCEGCASKLKKALFKLKGVDEVEVEMEAQKITVRGYGLEEKKVLKAIKRAGKAAEPWPFPGXSHFSSFYKYPSYIXNHYYDAYKSEATNGVHTFFHTPAVYSVAVASDEAFASLFSDDNPHACTIM

SEQ ID NO: 8904 - protein, 294 aa, Glycine max
  Clone ID: GLYMA-23APR03-C229527_1.p
MASATIRNAVVTGANKGIGFGICKQLVSNGITVVLTARDEKRGLEAVEKLKEFGVSDQVVFHQLDVTDPKSIESLANFIKTQFGKLDILVNNAGIHGAYVDRDALAAAGEKVANVDWRKISTENFEAAEAGIRTNYYGVKLMCEALIPLLELSGTPRIVNVSSSMGKLEKIPNAWARGALSDAESLTEEKVDEVLNQFLKDFKEGSLETKGWPHAFSAYIVSKAALTAYTRILAKKYPSFCINAVCPGFVKTDLNYNTGYLSVDEGAESVVRLALLPNGGPSGLFFSRSEVAPF

SEQ ID NO: 8905 - protein, 461 aa, Glycine max
  Clone ID: GLYMA-23APR03-C229573_1.p
MSTITASYNVTPNEPTPNVSLWLSESDQVARWSHTSTIYIYKENQTQNALERMRDSLSKILVHYHPLAGRLTWLEGGKVALNCNGKGVTLIEAESQKTMDDYGDFAPSEKLKNELIPPVDYSQPIEELPLLLVQLTRFKKGSSNNNNNNQLGLAIGVAFCHVLCDGLAAIRFINAWAKLTRGEVLDSIEMFPFLDRTIMNSTYPPRAPRFDHPELKPLPLKLGTTDTIEEQKKEKTAVILRLTSQQVEKLKKKTNDERPQKEETLRPYSRYEVIASHIWRCASKARELEDLQPTVVRVSADIRNRLNPPLPRNYFGNALAVALTPKCHTKELITNPLSHGAQKIREAIELLNDEYIRSQLDFIRCHEQLDRIRASYLDQGEPKNAPFYGNPNLTIVSWMSMPVYEADFGWGKPGYFGPGAVYPDGKAYIIRSSDEDGSLVVSAHLQTAHKELFKKFFYEDI

SEQ ID NO: 8906 - protein, 156 aa, Glycine max
  Clone ID: GLYMA-23APR03-C2301_8.p
LCPSGRTLLPSSVSDFRPAFDVLDADRDGKISRDDLRAFYAGVGGGGDDVIGAMMTVADTNKDGFVEYEEFERVVSAERKPVGYCGAMEDVFRVMDKDGDGKLSHHDLKTYMACAGFPATDNDINAMIRFGGGDQNGGVTFDGLLRILALDCSPAN

SEQ ID NO: 8907 - protein, 126 aa, Glycine max
  Clone ID: GLYMA-23APR03-C23024_1.p
MASLEIKSGALVSLQDLRPSSPFFKQGASLRITGKLHEYSIETGLATIIDGDDILKVSTKHLRDLTFQVGSVYQFIGELLIQPDNEGVLQARVGRNVDGIDLNLYHQSLLLLRQFQTNHLNNPATM

SEQ ID NO: 8908 - protein, 370 aa, Glycine max
  Clone ID: GLYMA-23APR03-C2310_8.p
MTENLKHTVDLECSDNNINRPSKISIIEYPIDSDIDEEEEMIQNPRNGIQRYLVAIEYIGTRFSGSQKQLNVRTVVGVLEEAFSKFVGQPVSVSCSSRTDAGVHALSNVCHVDIQRISKRRPGEVLTPHEPAVVGRAVNHFLQKQDSDLMVIDVRCVPSDFHARFKAQERIYFYRLLSGPEPLSTFEKDRAWHVPEELSLPAMQEACRVLVGFHDFSSFRAAGCQAKSPIRTLDELSVNEVIESPYFPSLMDREQHNKVSGDLRSCPNNSETDIPPTSNPSIDKVMASSQDVGFGKRRRHRCLVVTARARAFLYHQVRLLVGVLKAVGTGNLTIPDVERILNARTVTAASPMAPACGLYLGEVKYDLPTT

SEQ ID NO: 8909 - protein, 114 aa, Glycine max
  Clone ID: GLYMA-23APR03-C2325_29.p
MSGIIHKIGETLHVGGHKKEEEHKGEHHAGEYKGEHHGEHSSEYKGEHHGEHKAGEYHGEHKPEHKEGFLDKVKDKIHGEGGAAEGEKKKKKEKKKKEHGHEHGHDSSSSSDSD

SEQ ID NO: 8910 - protein, 294 aa, Glycine max
  Clone ID: GLYMA-23APR03-C2325_36.p
YKSPPPPPYYYKSPPPPSPTPYYYKSPPPPSPTPYYYKSPPPPPKYPPPYYYNSPPPPVVYPPHPYHPHHHPLIVKVVGKVYSYKCYDWEYPEKSHNKKHLKGAVVEVKCKAGRNIIKAYGETKSNGKYSITVKDFNYVKYGSTVCKAKLYAPPKGSPFNIPTKLNEGTELKVKSKDKYEVVLKAKPFAYASKKHFEECYKPKPSPTPYYYKSPPPPSPIYIYKSPPPPSPTYVYKSPPPPVKSPPYYYQSPPPPSPVPKPPYYYKSPPPPSPVPKPPYYYQSPPLFFFFFCRI

SEQ ID NO: 8911 - protein, 251 aa, Glycine max
  Clone ID: GLYMA-23APR03-C2325_49.p
MRNMASLSSSLVLLLAALILSPQVLADYEKPPIYKPPVYTPPVYKPPVEKPPVYKPPVYKPPVEKPPVYKPPVYKPPIYKPPVYKPPVEKPPVYKPPVYKPPIEKPPVYKPPVYKPPVYKPPVYKPPVYKPPVYKPPVEKPPVYKPPVYKPPVYKPPVYKPPVEKPPVYKPPVYKPPVYKPPVYKPPVYKPPVYKPPVYKPPVEKPPIYKPPVYKPPIEKPPVYKPPVYKPPVKKPPIYKPPYPKYPPGSN

SEQ ID NO: 8912 - protein, 293 aa, Glycine max
  Clone ID: GLYMA-23APR03-C23349_1.p
MSGLKLGTTASIYVRTAKTKSKPLLSWRSPPQHPRSRRYMLSPSKNQILGFTPRNKFPCYSLGRAGLVTDFGSSVPQPQPQPQPKPEPEPEPEPSKLLTLPTILTLGRVAAVPLLVATFYMDGWRGTAATTSIFVAASITDWLDGYLARKMKLKSSFGAFLDPVADKLMVAATLVLLCTRPLDGGVFGQAPWLLTIPAIAIIGREITMSAVREWAASQDSKLLEAVAVNNLGKWKTATQMTALTILLATRDWSHGGGAAIVVGSGVALLYTSAGLALWSLVVYMKKIWRVLLR

SEQ ID NO: 8913 - protein, 178 aa, Glycine max
  Clone ID: GLYMA-23APR03-C2334_6.p
PSLHNDSQTLSSLVGGGQRRKIVANKGEKDPIDKRHIVWSSFYYQQGSRQDAWRLWNTTFSNSATPISEKMLSMNSQGNSFNIPCYFTSKPYSSTINSSVQCSCSFSVWNVNSAMKIVAIEFKTILHGLQGKGTQWDFNKLDTIRHQFKGSSSRHIHNSVGKQYHPVETGEKVKGQEM

SEQ ID NO: 8914 - protein, 127 aa, Glycine max
  unsure (1)..(127): unsure at all Xaa locations
  Clone ID: GLYMA-23APR03-C2357_6.p
MNVVSALMVTRNQLGAPEGIPFGSVWLFVYAGISFSLVIFAGIMSGLTLGLMSLGLVDLEILQSSCSPSXKKQAAVILPVVQKQHQLLVTLLLCNAAAMEIDCRRGHDSYSPIESTFSLDVNSKLDW

SEQ ID NO: 8915 - protein, 175 aa, Glycine max
  Clone ID: GLYMA-23APR03-C2373_111.p
MSNPDTRSFNWHYTELDDRDLEIRGRTLFFVIVLFSIILLVTVLFIYTRWVCRYQGRLPTTAFSAAAVHAPPLAPPQGLDPASIKKLPIILHHAPADRDESAWDETECCICLGEFRDGEKVKVLPACDHYFHCDCVDKWLTHHSSCPLCRASLKVESSFPKILIQEPPLRIDFQF

SEQ ID NO: 8916 - protein, 173 aa, Glycine max
  unsure (1)..(173): unsure at all Xaa locations
  Clone ID: GLYMA-23APR03-C2373_145.p
MAAMNSSVLACSYAISGAACSELNGKVTSVAYVACSGYKLPLIKAEARVPKAKESEGGRRGALVLLAATLFTSAASNSSANAGIIEDYLERSKANKISLCAXELNDKKRLATTGANFARAYTVEFGSCKFPENFTGCQDLAKQKKVPFLSDDLELECEGKDKYKCGSNVFWKW

SEQ ID NO: 8917 - protein, 83 aa, Glycine max
  Clone ID: GLYMA-23APR03-C2373_33.p
SSCVVCLGNGVECVEESHEIFVIEEHDHQKFLSRDLSNQQPHCQVDADTNSALGHPIEFICLDLPEPAVCKYCGLRYVQDHHH

SEQ ID NO: 8918 - protein, 271 aa, Glycine max
  Clone ID: GLYMA-23APR03-C2373_97.p
MSFLPHELFSPKAPRCSSRWKDLLGLKKFYQATNNAKAAPPSSAKSLKNLLHRKTTSSSTSSFSSENAPLLASNSSDAESLSITSSRLSLSSSSSSHDHDDLPRLSLDSDKPNPNLSLNTNQISLHRNPNRRIRLVKNRTNSFDANKHSSDQPSQLSRPGRSPIRRESETVTCRGVSVDSPRMNSSGKIVFQSLERSSSSPSTFNGGPRFKHRGMERSYSANVRVTPVLNVPVCSLRGASKSGFIGFGQLFSSPQKKEGTTTGKGHRSIRN

SEQ ID NO: 8919 - protein, 82 aa, Glycine max
  Clone ID: GLYMA-23APR03-C237555_1.p
SQDFRPLTFVFLNLTIESYYPSRSYWQRANDAYAGSRCPSLALERIEVEFELLSCRIRKVKSHTKSQRTCSRESGLFCSGQT

SEQ ID NO: 8920 - protein, 207 aa, Glycine max
  Clone ID: GLYMA-23APR03-C2389_3.p
MIMMMMNRFLPLFVFALLFMWSVHADNAPAPSPKSSPSSPTAKPPSPATHPAPPAKSPTLSPPSQSPAVSPSGSTPPPATAPPAKSPATQLPSSVPPASSPSNNVSSPPAPSPATPPPTVAPVSSPVGTPPVAEAPTPDSPAGIPSSAVPAGSPITLPSSSASPGTAPASSPESSRGSVGDESGSSSKCRAPMILGGVALWVALAMI

SEQ ID NO: 8921 - protein, 200 aa, Glycine max
  Clone ID: GLYMA-23APR03-C2392_9.p
MAKHDVEGGSFSAKDYHDPPPAPLIDAEELTQWSFYRALIAEFIATMLFLYITVLTVIGYKSQSDVKAGGDVCGGVGILGIAWAFGGMIFILVYCTAGISGGHINPAVTFGLFLARKVSLIRAIMYMVAQCLGAICGVGLVKAFQKAYYNRYGGGANELSEGYSTGVGLGAEIIGTFVLVYTVFSATDPKRNARDSHVPV

SEQ ID NO: 8922 - protein, 112 aa, Glycine max
  Clone ID: GLYMA-23APR03-C24117_5.p
MVKGRQGERVRLYVRGSILGYKRSKSNQYPNTSLIQIENVNTKEEVAWYCGKRMAYIYKAKVKKDGSHYRCIWGKVTRPHGNSGIVRAKFKSNLPPRSMGARVRVFMYPSNI

SEQ ID NO: 8923 - protein, 254 aa, Glycine max
  Clone ID: GLYMA-23APR03-C24150_3.p
MSGPLLRPQFVMFGSSIVQYGLYDEGWMADLSHLYARKVDIVLRGYAGWNSRRALQVLDKIFPKDAPVQPSLVIAYFGGNDSSTPHSSGLGPHVPLQEYIENLRKIVNHLKSLSENTRILLLSAPPINDATITPNSDGKPSRTNEACRIYSQACWDVFRKMNIKATDLWSASNKINNWQYVCFIDVIHLSSEASDIVLKEIPKVLKYAEWKPSVYWKSMPSEFDEHSPYVPIAPDGKSAIDISSWAFPVNGKWE

SEQ ID NO: 8924 - protein, 191 aa, Glycine max
  unsure (1)..(191): unsure at all Xaa locations
  Clone ID: GLYMA-23APR03-C2427_11.p
MKKQLKGKGKNGDGEEKKEKKEKEKKKEKKDXDEETDTLKEKGKNGEGEDDEENNEKXTKKDKKEKEKDHKKEKKEDGKEEGEKEKSKVEVSVRDIDIEETTKEGEKEDKEKDDGKEVKEKKKKEDKDKKEKKKVTGKDKTKDLSALKQKLEKINGKIQPLLEKKADIERQIKEAEAEGHVVNGKDKDEVQ

SEQ ID NO: 8925 - protein, 331 aa, Glycine max
  Clone ID: GLYMA-23APR03-C24426_1.p
MEQRGRGRVCVTGASGFLASWLIKRLLLSGYHVIGTVRDLGKQKKYEYLWCLEGATERLQLVQADLMEESSFDNAIMGCKGVFHVASPVLNTISDPKSEILEPAVKGTLNVLRSCGKNPALCRVVLTSSSSTLRLRDDFDPNTPLDESSWSSLEICEKLQAWYAMAKTQAERAAWEYCIENGINLVTVLPSFIIGPSLPPNLCSTASDVLGLLKGETKRFQLLGRMGYVHIDDVALCQILVYENEGSHGRYLCSSTVMDEDDLAALLANRYPTLPISKRFEKLDRPNYELNTGKLRSLGFNFKSVEEMFDDCIASLVKQGHVTLQQGHGPI

SEQ ID NO: 8926 - protein, 376 aa, Glycine max
  Clone ID: GLYMA-23APR03-C245578_1.p
MDLGLSILLQPLFGDSPVLPLPFPITCNGSIQSCFFFRILLFIPLVLNITQQLTTLLLLFSMRLHLLLLLLLLLCFSAPHASAQSSQARSLDAILQEYAFKALVKPRTGTIYNATATQLPSNLTGVKISALRLRSGSMRRKGFPSYNEFEIPIGVIAKPYVKRLVLVYQNLGNWSNSYYPLPNYTYLAPVLGLLVYNASNLSATNLPTLNVNASGDPIKVKFLHVKVPPLGAVPKCVWFDLQGSSNFSNVTGGNTCSTSSQGHFSIVAESSALPPPAPSQPPSPPPPPAAVVPKESKSSNKVGVIVGSVLGGFAFLVLLSLLVLWLLKYKQKKKIQQMERAADAGEALHMASVGDTKAPAATVTRTQPTLEHEYAP

SEQ ID NO: 8927 - protein, 69 aa, Glycine max
  Clone ID: GLYMA-23APR03-C246331_1.p
MPKQIHEIKDFLLTARRKDARSVKIKRSKDVVKFKVRCSKYLYTLCVFDAEKANKLKQSLPPGLTVEEV

SEQ ID NO: 8928 - protein, 315 aa, Glycine max
  unsure (1)..(315): unsure at all Xaa locations
  Clone ID: GLYMA-23APR03-C2463_6.p
MEISLGKLAFDIDFHPSDNLVAAGLITGDLHLYRYTPDSTPVRMLEVHAHTESCRAARFINGGRAILTGSPDCSILATDVETGSTIARLDDAHEAAVNRLINLTESTVASGDDEGCIKVWDTRERSCCNSFNAHEDYISDMTFVSDAMKLLATSGDGTLSVCNLRRNKVQAQSEFSEDELLSVVLMKXDRFTDLSSNSIDAMLKLDEDRIITGSENRIINLVGILPNRVSTQMTHDSEYHVEGHAFSHDRKFLVSIAYDQMLTIWGLDNILQGSRXTNTNSSGVIDSHDDEMDLDGNKRNNGHAVGCSDKFFVDL

SEQ ID NO: 8929 - protein, 66 aa, Glycine max
  Clone ID: GLYMA-23APR03-C2464_8.p
MGTRVCAVAEPDRPLWSSMAGELEYFTDTTSLFFIGAWFQYIYTATCPIDNLFAHLADPSYTNHFN

SEQ ID NO: 8930 - protein, 267 aa, Glycine max
  unsure (1)..(267): unsure at all Xaa locations
  Clone ID: GLYMA-23APR03-C2464_9.p
MASAXASSAITAVAISTPSSGXXNGSGGCFLSGRKLRVKKERAAIGGRSMGTTVCAVAEPDRPXWFPGSTPPPWLDGTLPGXFGFDPXGLGSDPESLRWNVQAELVHCRWAMLGAAGIFIPEFXTKIGVLNTPSWYSAGELEYFTDTTTLFIVELFFIGWAEGRRWADIIKPGCVNTDPIFPNNKLTGTDVGYPGGLWFDPLGWGTGSPQKIKDLRTKEIKNGRLAMLAVMGAWFQHIYTATGPIDNLFAHLADPGHATIFAAFTPK

SEQ ID NO: 8931 - protein, 269 aa, Glycine max
  Clone ID: GLYMA-23APR03-C2466_3.p
MYSNVGSQPGVQQPQTSLPPNPFGSAFNVAGSGLIRGGLGAYGGKILGSSSEYVQSNISRYFSDPQYYFQVNDQYVKNKLKVVLLPFLHRGHWTRITEPVGGRLSYKPPIYDINAPDLYIPLMAFGTYVILAGLSLGLHGKFSPEALNLLFIKGLLGWFMQAALLKVTLLSLGSGEAPLLDIIAYAGYTFTGICLAVLGRIILGYSYYFLMPWTCLCMGVFLVKTMKRVLFAEVRSYDSSRHHYLLLFIALVQFPLFTWLGNITINWLL

SEQ ID NO: 8932 - protein, 96 aa, Glycine max
  Clone ID: GLYMA-23APR03-C2468_5.p
MRFLSPLQLLIILLVFSFVLSSAALQTTRRLLPNKEKTPTQITSDKFQGVEELKNGEEMFDMAEEFMVERRIDLESNDYPGTGANNRHDPHTPGGP

SEQ ID NO: 8933 - protein, 305 aa, Glycine max
  Clone ID: GLYMA-23APR03-C246_1.p
MKDCWFFDNNFNGLSDESLDDVMDMELLDLPLDFEDVETDAVEEQDWDAQLKLLEDPPPPLGVFPLQQSSAFCGQTRNENAKLGSKSFSASLAKTVRPAYGKTIPVQKVSLKGKDLLQFQTNSPVSVFESSSSSPSVENSNFELPVIPTKRPRTKRRRLSNISLLYSIPFILTSPAFQKFQRMDFSKSDIQTQPSGELLCKFKKKQRKKDIPLPTNKIEMKRSSSQESVAPRKCLHCEVTKTPQWREGPMGPKTLCNACGVRYRSGRLFAEYRPASSPTFVASLHSNSHKKVLEIRNRATQVTVR

SEQ ID NO: 8934 - protein, 116 aa, Glycine max
  Clone ID: GLYMA-23APR03-C25060_2.p
MKLVRFLMKLNNETVSIELKNGTIVHGTITGVDISMNTHLKTVKLTLKGKNPVTLDHLSVRGNNIRYYILPDSLNLETLLVEETPKIKPKKPTAGKPLGRGRGRGRGRGRGRGGGR

SEQ ID NO: 8935 - protein, 111 aa, Glycine max
  unsure (1)..(111): unsure at all Xaa locations
  Clone ID: GLYMA-23APR03-C25060_4.p
NRFLXKLNNETVSIELKNGTVVHGTITGVDISMNTHLKTVKLTLKGKNPVTLDHLSVRGNNIRYYILPDSLNLETLLVEEAPKIKPKKPTAGKPLGRGRGRGRGRGRGRGR

SEQ ID NO: 8936 - protein, 182 aa, Glycine max
  Clone ID: GLYMA-23APR03-C252_10.p
PPQTLLFSPSTNPSPQFPHYLRHHTNYNSLSPPINPLSPTLPTPSPSEQPCSPPGRPPPPTSGACSPNPAPTSPSSAPTSPWNAAAPTSSRICCATAESLMPLAIRVGSLQAVKLLEASGCKIDESVLHEAAAMDRIDTMKFQLERYGNDGEELEVDAVYSEGRTAIHVAREGHASVIQFHS

SEQ ID NO: 8937 - protein, 86 aa, Glycine max
  Clone ID: GLYMA-23APR03-C2530_2.p
MCIFYVFNYRPDTQHIFVDVGFGFHVEFTWSEALNYIEKREEKIARQIEEYTQLIASIKAQIKLVCEGIRELLQLPAEKSLPERIF

SEQ ID NO: 8938 - protein, 129 aa, Glycine max
  Clone ID: GLYMA-23APR03-C25400_1.p
MGRIFVVELEGRSYRCKFCRTHLALADDLISRAFHCRRGKAYLFNNAVNFTIGTPEERMMLSGLHTVADIFCCCCGQIIGWKYESAHEKSQKYKEGKFVLERGRIVDEVDFSTEFYIDSHASMSDAEEP

SEQ ID NO: 8939 - protein, 127 aa, Glycine max
  Clone ID: GLYMA-23APR03-C2540_10.p
MGVFTFEDEINSPVAPATLYKALVTDADNVIPKALDSFKSVENVEGNGGPGTIKKITFLEDGETKFVLHKIESIARHGGGSAGKLTVKYETKGDAEPNQDELKTGKAKADALFKAIEAYLLAHPDYN

SEQ ID NO: 8940 - protein, 158 aa, Glycine max
  Clone ID: GLYMA-23APR03-C2540_16.p
MGVFTFEDEINSPVAPATLYKALVTDADNVIPKALDSFKSVENVEGNGGPGTIKKITFLEDGETKFVLHKIESIDEANLGYSYSVVGGAALPDTAEKITFDSKLVAGPNGGSAGKLTVKYETKGDAEPNQDELKTGKAKADALFKAIEAYLLAHPDYN

SEQ ID NO: 8941 - protein, 141 aa, Glycine max
  unsure (1)..(141): unsure at all Xaa locations
  Clone ID: GLYMA-23APR03-C2540_9.p
MVLLSSKHLLVELRSIILSIIMGDVAFEDEINCHVAPACLYKTVLTDRDSVIAKSLDSFXSVENAEGNAGSGSIKKITFVEDVESKYVLHKIESIXKLTVKYETKGDAEPNQXDELKTGKAKADALFKAIEAYLLAHPDYN

SEQ ID NO: 8942 - protein, 208 aa, Glycine max
  Clone ID: GLYMA-23APR03-C25432_4.p
MIKRRFFKLDHGDREASDPSSSSSDSELEAVAETSEEESEEDAIAEVKPNDDEAGSNSSGYASEDSSANDVDVNSAGLLFSEDDAGAINERQMLINRELLSKVFKCRLCPRIICLSEETLRDHLQSKRHARSEKLLSEGRLKAMLNSDGEIDNQEISEIQTKDTEDNAEKNLKRKNQHKKRLRKKKSAKANSRKILSTKGAAKRGRNK

SEQ ID NO: 8943 - protein, 260 aa, Glycine max
  Clone ID: GLYMA-23APR03-C2546_2.p
MPQGDYIERHRRDYGYRLDHFERKRKKEARQVHKRSAIAQKALGIKGKMIAKKNYAEKAQMKKTLAMHEESSSRRKTDDNVQDGAVPAYLLDRDNTTRAKVLSNTIKQKRKEKAGKWDVPLPKVRPVAEDEMFKVVRTGKRKTKQWKRMVTKATFVGPGFTRKPPKYERFIRPTGLRFTKAHVTHPELKCTFNLELIGVKKNPNGPMYTSLGVITKGTIIEVNVSELGLVTPAGKVVWGKYAQVTNNPENDGCINAVLLV

SEQ ID NO: 8944 - protein, 358 aa, Glycine max
  Clone ID: GLYMA-23APR03-C25594_2.p
MELDLTPKTAEALFEGDGGGYYTWSSSQVPLLAKNNVGAGRLVLQPRGFALPHYADSSKIGYVIQGTDGVVGMVLPNTKEEVVLKLKKGDVIPVPIGAVSWWFNDGDSDLIIAFLGETSKALVPGQFTYFFLTGALGLVGGFSNELTSKVYGLDNDEVEKLTKSQTGVLIIKLDKSQPMPKPQMNMTKKLVYNIDAARPENVVENAGLVKTLTEKDFPFIGDVGLSVMRVKLEPGAIKAPSYPTNPTVQLIYIARGSGKIEIVDFSGKSVLNTQVEAGHLLVVPQFFVLAEIAGEEGIESYSIVITTKPLFEELAGRGSIWNAFSPTLQQVSLNVDSDFQKFFISKIKESTNLIPPTV

SEQ ID NO: 8945 - protein, 347 aa, Glycine max
  Clone ID: GLYMA-23APR03-C2572_2.p
MSQAVINENEVDIVIGALHSDLTTFMNEWKPIFSRFHLIIIKDPDLKEELRIPEGFSVDVYTKSEIERVVGSSTSVRFSGYSCRYFGFLISRKKYVVCIDDDCVPAKDNLGILVDAVAQHIVNLQTPATPFFFNTLYDPFCKGADFVRGYPFSLRSGVDCALSCGLWLNLADLDAPTQALKPGQRNLRYVDAVVTVPSRAMVPVSGINIAFNREVVGPALVPALRLAGEGKLRWETMEDIWCGMCVKVICDHLGLGVKSGLPYVWRTERGDAIQSLKKEWEGVKLMEDVVPFFQSLRLPQSATTAEDCVVEMAKTVKEQLGKVDPMFSAAAEAMEEWVKLWKSVRSV

SEQ ID NO: 8946 - protein, 382 aa, Glycine max
  Clone ID: GLYMA-23APR03-C25741_1.p
MEHGDGEAVIIGGMVLDIHATPSMLANPGTTTPGKVYYVQGGVARNVAECMSKLGAKPYMISALGFDMAGNLLLNQWKSAGLSIEGILKDKDIETPVVCNIFDVNGEVAAGVASVEAFEKYLTPDWIFRFKNTLLSAPVLMVDANLSHPSLEAACKMAIDMECPVWFEPVSVTKSRRISSIVEYVTFASPNEDELIAMANALSGSDEFHPLKESQKKNISVLSLFQMLKPAIWVLLEKGIKVVLVTFGSNGVFLCNKGWPRQFKMPAEKTNQCGFRGQLFKTVMQKCPPSRYSGFSELDRSSHLFAVHFPSLPASVVRLTGAGDCLVGGTLTSICAGLDIMQSVSVGIAVAKAVVEVEANVPSTFSLSAITGAKVLFPQSML

SEQ ID NO: 8947 - protein, 262 aa, Glycine max
  Clone ID: GLYMA-23APR03-C2578_3.p
MIYGTCVTASKSLIFRALVLQKPLNFQVKFSSKCFPTKIRMESNLNHSIEGNNKASRGALVVLEGLDRSGKSSQCSRLVSFLEGQGISAELWRFPDRTTNVGQMISAYLTNTSQLDDHTIHLLFSANRWEKRSLMESKLKTGTTLIVDRYSYSGVAFSSAKGLDFEWCKVPEIGLPAPDVVVYLDISPEKAAERGGYGGERYEKLEFQKKVADWYKVLHDVSWKDVDACQPIEDVEKQLQEIVLDCVTECRKGKPLSTLWSK

SEQ ID NO: 8948 - protein, 99 aa, Glycine max
  Clone ID: GLYMA-23APR03-C26038_2.p
MKVRSSVKKMCEFCQIVKRRGRIYVICSGNPKHKQRQGMATFASEGPSQPVSSKTSSCKIMIKPAQIARPGRICTSPQRHSLSMLYGWRVGLASILSIK

SEQ ID NO: 8949 - protein, 184 aa, Glycine max
  Clone ID: GLYMA-23APR03-C261_3.p
MSQESFIYSFVARGTMVLAEYTEFTGNFPAIAAQCLQKLPSSNNKFTYNCDHHTFNFLVEDGYAYCVVAKESVSKQISIAFLERVKADFKKRYGGGKADTAVAKSLNKEFGPVMKEHMKYIIDHAEEIEKLIKVKAQVSEVKSIMLENIDKVCSCFRVRHGIFFRSSVISPRASLRAMGKVLPL

SEQ ID NO: 8950 - protein, 530 aa, Glycine max
  unsure (1)..(530): unsure at all Xaa locations
  Clone ID: GLYMA-23APR03-C26280_1.p
MLLNHIGAGFCWVDPPRPDPNPRTRIGPSRFHRRGASTPRPARHAAFHGVRMEKKGGKRRSICTADELHRVAVSNSNWXIPFWQCNDMKLLGPXRNHPLLLLSGVATNAIGYDLSPESSFARYMSAQGFDTWILEVRGAGLSTLGDSLEEDEECLKNFSKIDSVINDDIGESSASFVSEVPHMKTRGSEVVTKYEEMQLMTRFMEILTRISERLAGFLNGDLLEGQNSAIAGQIKDFNRRLRAIIEGQLLFPAKILELQDRFAANLEEFQKQLELMVKYDWDFDHYLEEDVPAAMEYIRAQCQPRDGKLLAIGHSMGGILLYAKLSSCCFDGKDSGLASVGTLASSLDYTPSRSSLKLLLPLAEPTRALNIPVIPVGPLMATVHPLASYPPYVFSWLNSQISAQDMMDQNLFEKLVLNNFDTVPSKLLLQLSSVFQKGGLRDRSGTFFYKDHLHKSNVPVLAIAGDRDLICPPEAVYETVKLIPEELVTYKVFGEPGGPHYAHYDLVGGRLAADQLYPCITEFLIHHDIV

SEQ ID NO: 8951 - protein, 128 aa, Glycine max
  Clone ID: GLYMA-23APR03-C26346_1.p
MTVGELMDAYEVCISNLRKAQSRRRISSLKRISPVNFTKEARLQVPEEILHKIRSLNDLDLQLYEYAKAIFNKQHKTSLLITEESWDNISGSAYGLWRVVTLAITCVFFIFLFLLIVNVRRRTSKVKK

SEQ ID NO: 8952 - protein, 129 aa, Glycine max
  Clone ID: GLYMA-23APR03-C264449_1.p
MQIFVKTLTGKTITLEVESSDTIDNVKAKIQDKEGIPPDQQRLIFAGKQLEDGRTLADYNIQKESTLHLVLRLRGGIIEPSLQALARKYNQEKMICRKCYARLHPRAVNCREEKWGHRNQLRPKKKKEI

SEQ ID NO: 8953 - protein, 260 aa, Glycine max
  Clone ID: GLYMA-23APR03-C264456_1.p
MAVGKNKRISKGKKGGKKKTVDPFSKKDWYDIKAPSVFSVRNIGKTLVSRTQGTRIASEGLKHRVFEVCLADLQGDEDQAYRKIRLRAEDVQGRNVLTNFWGMNFTTDKLRSLVKKWQTLIEAHVDVKTTDNYMLRLFCIGFTKRRPDQVKRTCYAQASQIRQIRRKMVEIMINQASTCDLKELVSKFIPEVIGKEIEKSTSSIFPLQNVFIRKVKILKAPKFDLGKLMEVHGDYKEDVGVKLERPVEGDEAGQEVAAAE

SEQ ID NO: 8954 - protein, 255 aa, Glycine max
  Clone ID: GLYMA-23APR03-C26499_1.p
MQYLVASGSSSFIEGYSYSLLRHSYPLPRIRKLSLLKPHCSQRQQSRRSLRTSWASVSLTLFGTGFLLGPLLDGLHSRVNLVVYESGSIDIGPLHTNIWVPFLLGLFYSSVGLLQLYLDEKVLNKVQEASLAKTIVSLILLALFIELSADLYKAGISNNIEAYILFAAAEFIWFFLDRTWLGFTLACIVGLGCPLAEVPIMKLFHLWYYPQANIEIFGQGLVTWTLTCYFVYTPFLINLSRWLRTVYAPQTEDSA

SEQ ID NO: 8955 - protein, 359 aa, Glycine max
  Clone ID: GLYMA-23APR03-C266407_1.p
QCDNFGKMKNSRGRSMKHAHLFHCEDQRSQEHKKIVRDRLEGNSNNTFRTREIPIKRLFNVGHFTNASGDLSGYSKGKNFSAGMNVMDYDIPELVVFIQEDHQQFVKDNCIGKGVSPEGKCMSEDCALDHDIMSRHFENDMTSRRDSNLRTMEAMSINSNGPEYASKPLTLKDAMEFYDSRGLVMDGEVDSGYKISIDHLTKKTTPETLREALTKEAEFSRSFKNWQINSFLGTIGSKVEFPSCSDCVQIADTIMCRSKMANSHSPSGSGKRQENDPQETCSCSCAVGRTPYAAPATTSSSASHHSNDSISSTHSFAFPILPAEWNGSPERMLEADKSQLRKDRWQKIRVWFPCCKVDC

SEQ ID NO: 8956 - protein, 137 aa, Glycine max
  Clone ID: GLYMA-23APR03-C2687_2.p
MADLPGYLRACLNTGKLASLAILVSGGIVLQILACALYNNWWPMLSVLTYVLLPMPLLFFAGSDDSIFSESDNSWVNFTKFLTGASTVGGIAIPSILKHAGVIGWGAFAMELSSYFVFGMAIICYLWMSGDDDYSIL

SEQ ID NO: 8957 - protein, 98 aa, Glycine max
  Clone ID: GLYMA-23APR03-C2700_5.p
MATSLVRSGFLRSALRGSARGSQVPKRNFASSGHHDDAYETAKWEKITYLGIVSCTGLAVYNLSKGHPHFKEPPAYPYLHIRNKEFPWAFAKPILLPI

SEQ ID NO: 8958 - protein, 620 aa, Glycine max
  Clone ID: GLYMA-23APR03-C27040_1.p
MASRPGILTDWPWKPLGSFKYLLLAPWVVHSSYSVLVKDKSERDISTFLIFPFLLWRMLHNQIWITLSRYRTAKGNARIVDKGIEFDQVDRERDWDDQILFNGLLYYLASYTLSGASRIPLWRTDGVVMAILLHAGPVEFLYYWLHRALHHHFLYSRYHSHHHSSIVTEPITSVIHPFAEHILYFLLFAIPKLTLVFTKTASVGAMLGYVTYIDFMNNMGHCNFEVVPKWLFDIFPPLKYLMYTSSFHSLHHTQFRTNYSLFMPLYDYIYGTTDKASDKLHESALKQEEEIPNVVHLTHLTTPESIYHLRLGFAYLASKPYTSKWYLCLMWPVTAWSMILTWVYGRTFIVEGNRFDKLKLQTWAIPKYSLQYFMQSQKVAINTMIEEAILDADRKGIKVLSLGLRNQGEDLNIYGGLYVSRHPKLKVRVVDGSSLVVAVVLNSIPKGTTQVLLRGKLTKIAYALAYTLCQQGVQVAALYEDDYVRLKKSFNSSETNLAFTKSSTQTTWLVGDGLTEEEQLKAPKGTLFIPYTQFPPRKYRKDCFYHCTPAMLAPCSVENIHSCEDWLPRRIMSAWRIAGIVHSLEGWTEHECGHTMHNIDNVWHSTLQHGFQPLPVPINE

SEQ ID NO: 8959 - protein, 384 aa, Glycine max
  Clone ID: GLYMA-23APR03-C2714_2.p
MLHCANTSGNLAVAGDMTVLERQRARMKWQEEQGYFSGNSFNGVFSSSSLHVHDSIMVAADSGCALAEVVAQAQARSTNSSSISRTFSCPPALVEPESESKPKPKPTDSSVGKDGFKKRKPDKPHHPKVVAENDNKDKRIKFGSDDGESKITKSNTTNTNTNNNKETCAETSNSKASEKPDYIHVRARRGQATDSHSLAERVRREKISERMKYLQDLVPGCNKVTGKAGMLDEIINYVQSLQRQVEFLSMKLAAVNPRLDLSIDDLFDKDVFSTCATNFPNIGISSTSDISNPAYLQFNSPQQIFSYDGLDPSDMGLRRTISAPVSMPETYLQSSCFTQMLPSSTWEGDFQNLCNFDFDQARATSFPSQLLSGLVEAGNLKMEM

SEQ ID NO: 8960 - protein, 360 aa, Glycine max
  Clone ID: GLYMA-23APR03-C27181_1.p
MAVGMGSEGMVLTTLILTSGASGRILGFFNALLLLLLYLFPTTTMRLASWKSTSTWTSSRRALAIRRVLEDADSDGTTFREYHLFSTSRCDTIFTQSWIPRSPSNTIRGLVILMHGLNEHSGRYTHFAKHLNANGFKVYGMDWLGHGGSDGLHGYVHSLDDVVSDTKIFLEKVLNENPGLPCFCFGHSTGAAIILKALLDPKVESRIAGAVLTSPAVGVSPSHPILLALAPIASILLPTYQCSSAYKKGSPVSRDPEALIAKYSDPLVCTGPLRVRTGYEILRITSYLQRNLRKLRVPFFVLHGTADSVTDPIASQKLYVEASSSDKTIRLYDGFLHDLLFEPERDAITQDIIQWLNNRV

SEQ ID NO: 8961 - protein, 102 aa, Glycine max
  Clone ID: GLYMA-23APR03-C27240_3.p
MYVDHAFSISDEDIMMDGPYTVSNKAPIKEISLAVSLLVFGTLAIIIGSLMAYNHVGGDTAHGLFFAILGTLLFIPGFYYTRFAYCAYKGYKDFSFSNIPPV

SEQ ID NO: 8962 - protein, 47 aa, Glycine max
  Clone ID: GLYMA-23APR03-C2725_11.p
VLLSICSLLTDPNPDDPLVPEIAHMYKTDRNKYESTARSWTQKYAMG

SEQ ID NO: 8963 - protein, 351 aa, Glycine max
  Clone ID: GLYMA-23APR03-C2735_7.p
MVSPMSTVLVTGGAGFIGSHTVLQLLKQGFRVSIIDNLDNSLIEAVHRVRRLVGPHLSNNLTFFHGDLRNVQDLEAVFSKSKFDAVIHFAGLKGVGESVAKPRRYYDNNLVGTINLFEAMAKYKCKKMVISSSATVYGEADRVPCVEEEVHLQAMNPYGRTKLFVEEIARDIQRAETEWRIILLRYFNPVGAHESGQIGEDPRGIPNNLMPYIHQVAVGRLPQLNVYGHDYPTKDGTPIRDYIHVMDLADGHIAALRKLFATDHIGCSAYNLGTGRGTSVLEMVAAFEKASGKKIPLKMCPRRPGDATAVYASTDKAEKELGWKAKYGIEEMCRDLWNWTSKNPWGYQGKH

SEQ ID NO: 8964 - protein, 405 aa, Glycine max
  Clone ID: GLYMA-23APR03-C275221_1.p
MNTQTTSPVIKEEEEKEEGTKEVVQEEEEASHPYAFHVSGPRNLANLNWRDLISSSWKDANYKRTVIACFIQAVYLLELDRQENRTQENALAPNWWIPFKYKLTQTLIDERDGSIFGAILEWDRSAAMADLVLLRPSGAPKAVLALRGTLLKSPTMRRDIEDDLRFLAWESLKGSVRFKVALEVLKSVSDTYGSSNVCIAGHSLGAGFALQVGKALAKEGIYVETHLFNPPSVSLAMSLRNIGEKAELVWKRLKSMLPSSSNEEAQAGNDGDKSLSIGLKSWIPRLSSSFKNAGFGVGKWVPHLYVNNSDYICCSYTDPECSGGGEKINDADKENIGPMNGQVAAKLFVVSKEKQKFHEAHALEQWWSSDAQLQQANSKLISRQLKSLYTSGGTSPQVMQGKLPR

SEQ ID NO: 8965 - protein, 531 aa, Glycine max
  Clone ID: GLYMA-23APR03-C2758_1.p
MAATFPSSDIHDLRSPMLPAAAVAAKKPAMEKLCIDDMLQKHCGEFGRWQLKHFILTSLAWALEAFHTMVMIFADREPDWKCVAGAACDGGDLCGLSPESREWIGGRGGSTVSDWGLICGDKFKVGLVQAVFFFGCMIGAGTFGHLSDSSLGRKGSLTVVCALNTIFGCLTALSPNYWIYVLLRLLTGFSSGGVGLTAFVLATEPIGPTKRGAAGMSTFYFFSGGIALLSGIAYIFQTWRYLYIASSIPSFLYIILVLPFISESPRWYLIRGKVTEAMKLMSTIASSNGKHLPDGVLLALDNETSPTTNQGSGYDITEIMTYKNENKDALIGSIIDVVCSPITRMRLFIAVALNFLASVVYYGLSLNVMNLETNLYVNVMLNSVAEMPAFTITAVLLDRFGRKPLTVATMWFSGFFCLMGSLVSNVGVWKVVRMVCGVLGIFGMAGTYNLLFIYTAELFPTVVRNAALGCTTQAAQMGAILAPFVVVLGGYLPFAVFAACGIVGGMFAFNLPETLNQPLYDTFGGLEAGLA

SEQ ID NO: 8966 - protein, 322 aa, Glycine max
  Clone ID: GLYMA-23APR03-C2758_3.p
MGEEKEQPKNETEKKPEEAAAAPKKDDGPIPVVYKLDLHCEGCVKKIKRTCRHFQGVETVKADLSSNKVTVTGKLDAEKLRDKIAERTKKKVDIISAPPKKEAAATENPPEKKVEEKKPEEKKPEEKPKESMVVLKIKLHCDGCIAKIRRIIMRFKGVQSVSLDGSKDLVTVKGTMDVKEMVSYLNEKLKRNVEVVPPPKKDDDKKEKEGDGGEKKEKEKDGAGEKKEKDVAAAAEVINKMEYMHQMAPPSFWYDGGHFPGQTNYAMEVHPGYGASANNHYVEPGYVNQGYPLQPPLPYYMHPHAPPPQMFSDENPNACSIM

SEQ ID NO: 8967 - protein, 403 aa, Glycine max
  Clone ID: GLYMA-23APR03-C27718_1.p
MACGSVLSSFLHITNSMAIKGVLSFAPNPPLLLRLPKAVTFLSFSASTKSPTKSFQVRSIAGTTEAASGFDEMVSGTKRKYYMLGGKGGVGKTSCAASLAVKFANNGHPTLVVSTDPAHSLSDSFAQDLTGGALVPVEGPDYPLFALEINPEKSREEFRNAAQKNGGTGVKDFMDGMGLGMIADQLGELKLGELLDSPPPGLDEAIAISKVMQFLESQEYSMFTRIVFDTAPTGHTLRLLSLPDFLDASIGKILKLRQKIASATSAIKSVFGQEETRQNAADKLEKLRERMIKVRELFRDTDSTEFVIVTIPTVMAISESSRLSASLKKENVPVKRLIVNQILPPSTSDCKFCAMKRKDQMRALDIVQNDPELSSLLMIQAPLIDVEIRGVPALKFLGDIIWK

SEQ ID NO: 8968 - protein, 184 aa, Glycine max
  Clone ID: GLYMA-23APR03-C277436_1.p
MAGKGGSTPATYSPSPTTDKKKPSLFNEDLARPDGRSFHQCRPAFFRTGAVNAASGSAYAEVGNTKVIVFSECVAGDLPVVISCASLALADAGIMMYDIVASVSVSCFNKNLVIDPILEEEIGQDGSLMITCMPSRYEITQLTVTGEWSTTKINEGMQLCLDACAKLAKIMRSCLKEVASDSQE

SEQ ID NO: 8969 - protein, 134 aa, Glycine max
  Clone ID: GLYMA-23APR03-C27835_1.p
MALFFSHHPLLHGNKLLLALQSQRITSSKPNNTCAFTYPSIRCCSSLNQKNSINLKTCKNCKTQFDPSLNHPHACRFHTSHFGGETKRKFESVYEGGTMNTPDSGKVFQYWHCCGSEDPFDPGCTASPHSSYDD

SEQ ID NO: 8970 - protein, 154 aa, Glycine max
  Clone ID: GLYMA-23APR03-C27936_1.p
MATFPYYTLHPLSSSLTPSSKGSVHLCPCSSTRSRSLPQFPSKLRRKATIKPRLLTIIDPILLFNGVATTFYFDTQTLIVTVSVLAAIALSLFLGLKGDPVPCERCGGNGGTKCVFCNDGKMKQEMGLINCKVCKGSGLIFCKKCGGSGYSRRL

SEQ ID NO: 8971 - protein, 335 aa, Glycine max
  Clone ID: GLYMA-23APR03-C2795_2.p
MENSTQESHLRSENSVSYESPYPIYGMSFSPSHPHRLALGSFIEEYTNRVDILSFHPDTLSLTPNPSLSFDHPYPPTKLMFHPRKPPSSSSDLLATSGDYLRLWEVRDNSVEAVSLFNNSKTSEFCAPLTSFDWNDIDPNRIATSSIDTTCTIWDIERTLVETQLIAHDKEVYDIAWGEARVFASVSADGSVRIFDLRDKEHSTIIYESPHPDTPLLRLAWNKQDLRYMATILMDSNKVVILDIRSPTTPVAELERHRGSVNAIAWAPHSSTHICSAGDDTQALIWDLPTLASPTGIDPVCMYSAGCEINQLQWSAVQPEWIAIAFANKMQLLKV

SEQ ID NO: 8972 - protein, 415 aa, Glycine max
  Clone ID: GLYMA-23APR03-C28059_1.p
MGETQEPQLSPETCFTIHMGEPQEVQLSKIEPSGAKETNSLEDNSFGGPMNESIMSNKKRYYRWLRVAIHSSLVLVCASAAVLLGRLYYEKGGKSKWMGTLVQLAGFPIQLPVYFFLAPKNLTTNNSIHPKQPSVSMLSFIYVSIGLLVALDCYLYSVGLWDLPVSTYSLICSSQLAFNAFFSYFLNSLKFTPYIINSLVLLTISSTLLVFQNESSSDDDDDSDSTKISKKKYVIGFICTVGASAGYGLWLSLTQLVFKKVIKRETFKVVLDMILYTSLVATLATLVGLFASGEWSGLKNEMKEYELGKASYLLNLTFTAILWQVFTIGCLGDISEVSSLFSNAISALGVPIVPMLAVLFFHDKMDGIKGISMVLAIWGIVSYVYQQYLDDTKSENRNTTSHVPKASSPIEEVHR

SEQ ID NO: 8973 - protein, 180 aa, Glycine max
  Clone ID: GLYMA-23APR03-C280822_1.p
MSLRKRLRNLGHNLKDKASVIAASLSLKRHVSSVRIHVLHATTHRLSAPPSTSQIAAVLSAGKGSYLLSRTCIDTIMDRLHRTRSATVALKCLFTLHNIVSERKGPLTLKDNLSHYPSNGGRNALNVSTFRDDTDVETMELSAWVRWYANVLEHVLTVSRVLGYYLINSNDGTREVFSSV

SEQ ID NO: 8974 - protein, 266 aa, Glycine max
  Clone ID: GLYMA-23APR03-C28128_1.p
MGKKGGAKKLESVSHTPISLREEATGKIQTKAASNTKSKLRFEHLKNLAVWATAIPSLGAFYGHQFAAFGEATGIPPDPSLITCQRCETILQPGFNSTVRIEKNQSKLRHRHKKSGNITQNKVVYKCHFCLHQNLKRGTPKGHIKGICPSKDKSSLESTPPSKSITSDSSKLEKGILSKDEANEINVFPLRDVANVDGLATPSSTNTTTLSKKAIKTINKSAKQVAKSASTSNKRRRKSWTSLKEIAQSNEHKNNPIANLTIPFFL

SEQ ID NO: 8975 - protein, 164 aa, Glycine max
  Clone ID: GLYMA-23APR03-C2833_2.p
ILQVVEIGKGSKVKYELDKRTGLIMVDRILYSSVVYPHNYGFIPRTICEDGDPMDVLVIMQEPVLPGCFLRAKAIGLMPMIDQGEKDDKIIAVCADDPEYRHYNDIKELPPHRLAEIRRFFEDYKKNENKEVAVNDFLPASAAYEAIKHSMTLYAEYVVENLRR

SEQ ID NO: 8976 - protein, 404 aa, Glycine max
  Clone ID: GLYMA-23APR03-C28433_1.p
MGKKTELKDHKEIAKVETVLELLRKQTPLTVKQEKFCNYACVKRFLKAKGDSVKKASKQLKACLAWRESVIADHLIADDFSAELADGLAYLAGHDDESRPVMIFRLKQDYQKLHSQKMFTRLLAFTIEVAISTMPKNVEQFVMLFDASFYRSASAFMNLLLPALKIVAEYYPGRLCKAFVIDPPSLFAYLWKGVRPFVELSSWTTVVSSLDFEESLDFNDFAAYPRASSLRFDSASVKSTAKIGSCSSSRFSFTVSHHLDSLKPWYLSLADTSASKVGPTSPSAALISPLNARSLSFASPVARTPRGPPATRKGLFPSTPLPQRVTAPPRTSFLQSPATFFRRDSHVAAKGERCRESFLPYVKFYRRPYDEMVYRSKMRPPLGGLISIVSPHITRRHVSVSQRF

SEQ ID NO: 8977 - protein, 87 aa, Glycine max
  unsure (1)..(87): unsure at all Xaa locations
  Clone ID: GLYMA-23APR03-C2850_13.p
SETEGGSVRSYGDESXEEATRVTRSIMIVKPPGYXSGSPPVSPAGSTTPISPFSGGKDSFRFRRRSASDAYEKRGQNRSGPSSPFDV

SEQ ID NO: 8978 - protein, 458 aa, Glycine max
  unsure (1)..(458): unsure at all Xaa locations
  Clone ID: GLYMA-23APR03-C2867_2.p
MWCSGEVGMAAVSVSVTVRVRWCTRKPPTPTPTRFSVNALFGDWGFGNRTRNSLQQQFTFTLADSKVISVSVVSSISDVASSEWDACALDATGPDNFNPFLSHAFLSTLEHSASAVRETGWIPHHIVAKANNNSNNNVVAVVPLYLKXHSYGEFVFDHSWANAYHSYGYNYYPKLQSCVPFTPVTGPRILLRNTSFKHQVFDIIVSAMKELALTSQLSSLHVTFPSENEWHKLTEKGFLPRIGMQYHWKNRNYKNFDDFLMDMKQSKRKNIRQERKKISAQNLIMKRLRGYEIKARHWDSFYSFYRNTTDNKWGTPHLTREFFHELGAKMGDNVLLVVAEEGDELVAGALNLIGGDTLFGRLWGCQPRSYYPSLHFEACYYQAIEAAIELNLKTVEAGAQGEHKIQRGYLPVTTYSCHYLIDEEFREAIQDFLIREAAQVKLVIKLLHDSGPFKEGIL

SEQ ID NO: 8979 - protein, 217 aa, Glycine max
  unsure (1)..(217): unsure at all Xaa locations
  Clone ID: GLYMA-23APR03-C28706_2.p
MRVPTVLVLPFPGVGHVNPMMSLSQKLVERGCRVIFVRSDFNHKRVMSSMVYEQQGSLDDKSLMKLVSIPDGLGPDDDRMDPGALYDAVVRTMPTTLEKLLENTHEDGDNRIGFIVADLAMLWALEVGRKFGIKGAIFCXIAATMFALLCNSPKLIDDGIINSDGSLLTTKKXIRLSPNMPXEMNPGTFFWLNMPGTKDGMNMMHITRTLNLTEWWL

SEQ ID NO: 8980 - protein, 283 aa, Glycine max
  Clone ID: GLYMA-23APR03-C28728_1.p
MFILGMEFMGQSLARKLHNQGWVVSGTCTAHVKKKQLQDMGFHVHLLGANHPDVDVLQVLTNYTHILVSVPPLVGIGDPTLRHEELLRSSMIDGDLRWLCYLSSTSVYGDCDGELVDEDYPTNPKSESAKLRLASEEGWSNLAHNLGISLLLFRLGGIYGPGRSAVDTIIKHKPMSEGQKRRKNRKYTSRIHVDDICQALMATVLAPPPREVYNIVDDDPAPREEVFEYATRLVEKKWPGSKLQSVEQRQKEWSNVKNPRGEKRLCNARMKRELGVQLLTNQD

SEQ ID NO: 8981 - protein, 407 aa, Glycine max
  Clone ID: GLYMA-23APR03-C2885_1.p
MFEAHVLHLLRSYLGEYVHGLSTEALRISVWKGDVVLKDLKLKAEALNALKLPVTVKAGFVGTITLKVPWKSLGKEPVIVLIDRVFVLAHPAPDSRTMKDEDREKLFEAKLQQIEEAESATLDAISKSKLGSPSSGNSWLSSLISTIIGNLKISISNVHIRYEDSVSNPGHPFSSGVTLAKLAAVTMDEEGNETFDTSGALDRLRKSVHLERLALYHDSNQLPWEIDKRWADINPQEWIEIFEDGINEPTGDHKLVPKWARNRTYLVYPINAVLQYHRLGNQERVNPDIPFEKVTLVLTDISLTLTEAQYHDWIKLLEAVSRYKTYMEVSHLRPVVPISKAPYLWWQYAAQAVLQKQQKCYRLSWDQIRHLCQCRRRYIQFYVASLQHSSHVNQTEIKKKKKNFFFC

SEQ ID NO: 8982 - protein, 212 aa, Glycine max
  Clone ID: GLYMA-23APR03-C288693_1.p
QHPTTRCCGNSFFRRLTLVLVSIFVIIMAIISIAWLAMHPHDPGFRLTSLSVTNFALSDSQVRGKYEVGLTITNPNKIKAQVVLHRVHTLRLYGEEWHSMAVQQQQQTVFMEKFTNKSVKVDMEVRDSRQKVVPDVLFKNWTKGVVNFNMVVLGVKVRFQSGIWPSMDKLFDVQCMNLDVEFLSPTKDTGKLLGIGKNCHTVNARGTARSRK

SEQ ID NO: 8983 - protein, 328 aa, Glycine max
  Clone ID: GLYMA-23APR03-C288694_1.p
MFFSSTSISSTDSSSLGFSSSDTESISRASCFAPQVGRGGGGSASFRSEKQGMRIFDSFCRTSSHRSSEHAHSQFCITSRRHLSVSEDHKQIRHGHRQVTACDEEEEALMIKSKSRALKIYNNLKKVKQPISPGGRVTSFLNSLFANTKKTTTTTTSTSSRTCGEVNTPSSSSCYYSSTCSSASSFSRSCLSKTMSSERDRLRNGVKRTVRFYPVSVIVGEDSRPCGHKRLCEEKEASREFLREYNNRHNPKIKSNDKLVLKDLSLRTTNVDVDDNDDDDDASSYASSDLFELDHLAVFGSDRYSEELPVYETTHVSTNRAIANGLIV

SEQ ID NO: 8984 - protein, 281 aa, Glycine max
  Clone ID: GLYMA-23APR03-C28_2.p
MQSSISQSDIFITDYLVPQEVPFQFQFQDMSKNDNNMPMNHTNNNLQMPQITSFSKPPRSSSNLSNRKPSLKNITIPSITSGLATAMSQTTATTTTIATTMYNNNQVSSSSFSSDETNNTKDDKHYRGVRRRPWGKYAAEIRDPNRKGSRVWLGTFDTAIEAAKAYDKAAFKMRGSKAILNFPLEIGSDQSKEESSSSSSSVSSSSIVIKVGVKREREEESERKNNYEKSEFNNNSNSNKHVKKEECPLTPSCWKGFWDTDVMGTIFSVPPLSPLSPLMVV

SEQ ID NO: 8985 - protein, 387 aa, Glycine max
  Clone ID: GLYMA-23APR03-C2900_2.p
MEDKLATTSEGQPIRCKAAICRKPGSPLSIEEIIVAPPMPREARIRVICTSLCHSDVTFWKMEVPPAICPRILGHEAVGVVESVGEDVTEVTKGDVVVPIFLPDCGECIDCKSSKSNLCSKFPFEVSPWMPRHATSRFTDLKGDIIHHFLFVSSFSEYTVVDIAHLTKIDPAIPPNRACLLSCGVSTGVGAAWRTAGVEPGSTVVIFGLGSIGLAVAEGARLCGATRIIGVDVNPEKYETGKKFGLTDFVHAGESENKSVSQVIIKMTGGGADYCFECVGMATLVQEAYASCRKGWGKAIVLGVEKPGSMLSLSCNEVLHSGKSLVGCLFGGLKPKSDVPILLKRYMDKELNLDEFVTHEVEFKDINKAFDLLIEGQCLRCVIWMDR

SEQ ID NO: 8986 - protein, 319 aa, Glycine max
  Clone ID: GLYMA-23APR03-C2902_13.p
NSARGELSRPKFRPRPYATKEEHDHRFGVFKSNLRRASCTPSSTPRVHGVTKFSDLTPAEFRRQFLGLKAVRFPAHAQKAPILPTKDLPKDFDWRDKGAVTNVKDQGGCGSCWSFSTTGALEGAYYLATGELVSLSEQQLVDCDHVCDPEEYGACDSGCNGGLMNNAFEYILQSGGVQKEKDYPYTGRDGTCKFDKTKVAATVSNYSVVCLDEEQIAANLVKNGPLAVAINAVFMQTYVGGVSCPYICGKHLDHGVLLVGYGEGAYAPIRFKNKPYWIIKNSWGESWGENGYDEICRGRNVCGVDSMVSTVAAIYPSSH

SEQ ID NO: 8987 - protein, 109 aa, Glycine max
  Clone ID: GLYMA-23APR03-C2902_24.p
MASSSASPRPSAAAEHSRKILGFMAHAKQRKDSFIQFFAMTGILLLSMRSLSQKYKIHGLQEDIHALRVDHGSLTDRINNIKNDLLREASQDSTGLFASRLRHLFAEQH

SEQ ID NO: 8988 - protein, 150 aa, Glycine max
  unsure (1)..(150): unsure at all Xaa locations
  Clone ID: GLYMA-23APR03-C290711_1.p
MAAKMLALFALLALCASATSATHIPGHLPPVMPLGTMNPCMQYCMMQRGLASLMACPSLMLQQLLALPLQTMPVMMPQMMTPNMMSPLMMPSMMSPMVLPSMMSQMMMPQCHCDAVSQIMLQQXLPFMFNPMAMTIPPMFLQQPFVGAAF

SEQ ID NO: 8989 - protein, 497 aa, Glycine max
  Clone ID: GLYMA-23APR03-C29112_1.p
CVLQNVLPSQLLSLLHSLYESLQDLLSPYSYFEIPEFNGYCGVDLNDLYRHAHLYLNASNHAPATACRRLTLSRSPSSNRISFAVAPNHTVHDAFRGHRVAWTHHVETAQDSLEERRSFTLRLPKRHRHALLSPYLAHVTSRAEEFERVSRERRLFTNNTTSSGSFESGWVSVPFRHPSTFETLAMEPELKKNIKNDLTAFADGKEFYKRVGRAWKRGYLLHGPPGSGKSSLIAAMANFLCYDVYDLELTKVSDNSELRSLLIQTTNRSIIVIEDIDCSVDITADRTVKVKKSQGAKLSLRSSNKKGQTGCEESGRVTLSGLLNFTDGMRSCCGEERIVVFTTNHRDSVDPALVRCGRMDVHVSLATCGAHAFRELARNYLGLESHVLFQAVEGCIRGGGALTPAQVGEILLRNRGDADVAMREVLAAMQGRMLAVAAAANDQAENEEAVGVRSPESVLLMGSPNWDAFSGRKEQHGCNLDKVFFVRLRSLTRDPGR

SEQ ID NO: 8990 - protein, 234 aa, Glycine max
  Clone ID: GLYMA-23APR03-C2928_4.p
MQGPLSSMTSFRPKLQQKQLDPSQSKVSLTRETSAQLTTNNLSAAPVKSGVIPKKSITCDPDPRKHPSQTGVQPTQSGRPTTLDPLHNDSSTLPKNTQGKAGQPPQRLSTQPPASSNISSSSAPTLNTAKNNKLNPISNLLSSLVAKGLISAETESPTMVPSEVPKGSKDQTEIITTSCSLPVTSISGSAAVPVSSSGDEVDSATKTSLASPQSTSTEIRNLVGFDFRPNVIRE

SEQ ID NO: 8991 - protein, 153 aa, Glycine max
  Clone ID: GLYMA-23APR03-C29457_2.p
MNRREKLSLLNAFFRTRRPFHQSPIVAPFTPPTHVASTSKFHSFPTIPHTHFAIRQYPRSFAGGSGALDHTKEVDTINLKFAEAREEIEMALESKDTVYFDEEAECARAAVNEVLGMFEGLLAKLPERERGALQRSMGLKIEQLKAELAQLNE

SEQ ID NO: 8992 - protein, 177 aa, Glycine max
  Clone ID: GLYMA-23APR03-C294764_1.p
MLPLPTVTPNSFSMEVTFAIAVFVPLIFAGASSARELRPSDHGLTFQTLSPAGPHSSPEMRSFFNSANSSPSMSSSSDVALPRAMDSGEASPPAWWQTDGGHSVEGVGKALTMASLGCGVAGAVLLVASGLIYLLKYRNRNRNRKQKLNAAFCGENENRGENIDEENNKLQLVVRNP

SEQ ID NO: 8993 - protein, 200 aa, Glycine max
  Clone ID: GLYMA-23APR03-C29549_1.p
MAEELSIAIPQSQASTTKKRASKNEKLCLEDYLHLVHSRQTLHLTINQLNQVIRIHGFKKIHHAPKKVLVQAVESLELVDLPRSTVSESVSAFAAVVLEDVVADLGELSWQECCVISVEKISFSDGQSVFPAACSDQSLRVVNHSLSQAQKENRIDETRNLIPEAFRKDLKPTKMVPKRKRSNVRDYVASTLDSASLASC

SEQ ID NO: 8994 - protein, 490 aa, Glycine max
  unsure (1)..(490): unsure at all Xaa locations
  Clone ID: GLYMA-23APR03-C2969_64.p
TKNEDTKKSYTSNVAEFDLVMQTVKSGTHDSESCLKEETCLPLGGYXSVWSSLPPINISSLQRSKPILLTVASMDSASFFRDKSLGADSPISGLIALLAAVDALSHLDGLGDLSKQLVFAVFTGEAWGYLGSRRFLVELDMHSDAVHGLNHTLIETVIEIGSVGKGLSQGVKNFFAHKEGDSSATNQTVAALKRAQESLISENIKIASASASNPGIPPSSLMSFLEKNPAISGVALEDFDSVFVNKFYHSHLDDLSNVNSSAVVAAASLIARTLYMLASETEDVQNSTLAAINVNVSLVEQLMGCLLDCDPGLSCELVTKYISPMSTCPSHYVGVILDEPSSTPYTGYINDVPRFIWNFLADRTSIPRENNSSDCQHGCNGRDEVCIKAETDGKGVCVLSTTRYVPAYSTRLKFESGVWNVLPPNSSDKMGVVDPVWTESNWNTIGMRVYIVQNAAYDRLVLFGGITLTVFAYLAIATARAFFNKAMKRD

SEQ ID NO: 8995 - protein, 237 aa, Glycine max
  Clone ID: GLYMA-23APR03-C2979_176.p
MSSMLRFPFSFLQPQRPQFPRPFTAFAAAAAVSSSDRSFLRNALNSFFSVNPSMPLLGSLSLADSGVCVVEAKTGTSFPSILDSSQKLCGIGLRKKNVLGLKNIDVYAFGVYATDEDIKRHLSEKYGKLSASELQGNKEFTEDLMESDISMTIRLQVVYGRLSIRSVRSAFEVSVGSKLQKFGGSDNKELLQRFTSQFKDEFKIPRGSVIHLSRDKGHVLRTSIDGQEVGSIQSKLL

SEQ ID NO: 8996 - protein, 96 aa, Glycine max
  Clone ID: GLYMA-23APR03-C2979_200.p
SGNFLLLLSSDFLTGNFLLLLFLFCFLPIFDWEFSSFFIFFRGQGLTFSPWVKVYDKLGFWLKDCRTAGHDICQGLASGSRIKGMSHIISMIHMQQ

SEQ ID NO: 8997 - protein, 186 aa, Glycine max
  Clone ID: GLYMA-23APR03-C2979_228.p
ERIERLLNENNASSSEDKSLDLSFREDGRSGTFMIGNEQFPASLLDLPCVVESYKTYDDNSLIKTANIGQMIMVRESGDAAPDVIEYRHGLTPPMRDARKRRFRREPDLNPELVSRVEKDLLKIMAGGTADNLDVETAEQEEGDENARGANKKSAPKPAPKHDIPENLTNAGEADRSDSEESDDSV

SEQ ID NO: 8998 - protein, 213 aa, Glycine max
  Clone ID: GLYMA-23APR03-C2979_254.p
MANAAAIAAAFGGGLPPGITGTNERCTVLVANLNPDRIDEDKMFNLFSIYGNIVRIKLLRNKPDHALIQMGDGFQAELAVHFLKGAMLFGKRLEVNYSKHANITQGADTHEYANSNLNRFNRNAAKNYRYCCSPTKMIHLSTLPQDITEEEIVSLLEEHGTIVNSKVFEMNGKKQALVQFETEEQATEALVCKHASPLSGSVVRISFSQLQNI

SEQ ID NO: 8999 - protein, 363 aa, Glycine max
  unsure (1)..(363): unsure at all Xaa locations
  Clone ID: GLYMA-23APR03-C2979_264.p
MKNLQTSEELQSSTQASHEPKSEQPNNHTTDAPVTDTGSASATSNDXQKVSRQDIEFVQNLIERCLQLYMNKDEVVKTLLTRAKIDPGFTTLVWQKLEEENADFFRAYYIRLKLKKQILLFNHLLEHQYHLMKCPMPAKVPLAPIQNGIHPMPVNNLPMGYPVLQQPPMPATGQPHIDSMGCGLSSCHVVNGVPASGNFHPIRMNSGNDMMMDHSAPDMVPVIPPNGTMSSVSEMPVSPTSVASSGHFPFTASEIPGMGADTSALDTAFTSDVASSVGLQLAADGGNGISRSLDQIQWNFSLSDLTADLPNLGDLGALGNYPGSPFLPSDSDILLESPDQQDIVDDFFVNSEPPCSQSDEEKS

SEQ ID NO: 9000 - protein, 89 aa, Glycine max
  Clone ID: GLYMA-23APR03-C2979_297.p
VFNYMYDNTKKLRTPLPRGSSLCEGMGEGCCTQPYPCICKEAVSGFEPMTNKSPRHNFTAAPGLALSTFIVNLGYNFSIHLIIRSMQTD

SEQ ID NO: 9001 - protein, 287 aa, Glycine max
  Clone ID: GLYMA-23APR03-C298592_1.p
MDKEFSTIPVAGRSSDDVSFADTVFGFWDSSNSSNDRDDDDDDDDDDETICTAENGKAFWEEQYQLLKAILCRTSSYETKVRQATKGVLRELNISEMLCICRRAEVAKSCRNCLLREVCDRLLNLGYNCAICKSKWRSSPEIPSGEHTYLEVRNNVSNTKRGAVKVVIELNFRAEFEMARANEEYNKLIKRLPEVFVGKSDRLRALVKIMCSASKKCMKEKKMHIGPWRKHKYMQAKWFSTCEMSTMESLPTIMNSAQQPKSKASMLTFDLLDNIIHGLHCTTVEVV

SEQ ID NO: 9002 - protein, 485 aa, Glycine max
  Clone ID: GLYMA-23APR03-C29886_1.p
MIICNAQLHLAPSLIMKSIHKPIKTKPLMKFILVSSSFCAISLCVSVLLLATPKIVEVGSSPQYVSDPTTVDHLVFGIASSGISWPKRKEYSKIWWNWKLNKTMRGCVFVDTLPHEENANNNNDGSRPPLCVSEDTSQFLYTYKPGGLRSAIRVARVVKETVALNHSGVRWYVFGDDDTIFFPQNLVKTLSKYDHRLWYYVGSYSEIYEGSQVFGFGMAFGGGGFAISSSLAQVLAKVFDSCIQRYSHLYGSDARVYSCITELGVGLTHEPGFHQVDLRGDIFGLLAAHPLTPLVSLHHPDHTDPIFPNMTTTKSLQHLFEAVNVDSERILQQTVCYERRFSWTISVSWGYGVQVFQNNMLLPDVLRVEKTFKQWKEGNVLAGIYTFNTRELHPDQCKRPTIFYLDKVSSGKDGIISSYRKYSQNCSYKEPMKKLEVIKVFTNKLYLDNKQIPRRHCCDVLPSNAGDSMEIAIRECKYEEMIYMH

SEQ ID NO: 9003 - protein, 301 aa, Glycine max
  Clone ID: GLYMA-23APR03-C29952_1.p
MLSVLVCPSHELATPFQCLHFPNTDYSLKCSPKLQLGSTPSQRNPFKCFCNRKEHVTPFSQGFSELQEDDSPWESGNVWSNLALYLFTLHIPFSFGGLSVVALFNGQPVLDPQTEALSLLTIQILEFGGALVLLKYTAKPQYKFSNFSRKNKLLSNRNWFLSSAVGFGFLVLLIFLTSLLADRLFGSKPVNNPILKDMLLNSDISRLSCVLAYCIVTPLLEEVVYRGFLLTSLSSTLEWQQAVAISSVVFSAIHFSGENFLQLFIIGCVLGCSYCWSGNLSSSIAIHSLYNALTLVITYFY

SEQ ID NO: 9004 - protein, 104 aa, Glycine max
  Clone ID: GLYMA-23APR03-C3000_3.p
VFCSFFCLISAAGTGTTPVTTTPTMGTTPTTGTPSTSTGTGTGTGTGTTPYSTTPGVLGGIGSGMGPSGSGMNDESHGGIGLVHSSSFFSMALFSAFMMMLCWG

SEQ ID NO: 9005 - protein, 238 aa, Glycine max
  Clone ID: GLYMA-23APR03-C3013_4.p
MSGPECCSNSPVLNPNAGAGHVEKLAALDSYLSGSPNSIAILLVSDVFGYEAPNLRNIADKVAAAGYYVVVPDFFYGDPYNPENASRPLSVWLKDHGTDKGSEAAKSIIEALKSKGVTAIGAAGFCWGGKVVVELAKSRLIQADVLLHPAFVSVDDIKGVDIPTAVLGAEIDKMSPPELVKQFEQVLTAKPGVDCFVKIFPKVSHGWTVRYNPEDAEAVKAAEEAHQDMLNWFAKHLK

SEQ ID NO: 9006 - protein, 125 aa, Glycine max
  unsure (1)..(125): unsure at all Xaa locations
  Clone ID: GLYMA-23APR03-C30234_2.p
KRVGSGEWCVWESVAMEGGEEGXEMMVDSKDLQQQSKALDKLTDRVEDRQLDSTRVLEAMASIAASAQADRNAMRIREKXLAAVKINAADVDIIANELELDIKVAERTLREHKGDAVAAIRHLLH

SEQ ID NO: 9007 - protein, 310 aa, Glycine max
  Clone ID: GLYMA-23APR03-C3054_11.p
WTRGYKSLQPTLDEALIGNETVAESSRDDRQPEAEFTEKINEEVKPPQNDKEETAEINTNGTEKQEEIPASQAEEKLGIEDDGKFDQEDAKQIEEATKTRLPEEEVKKTLPTAASVHGDTDQIPQQQTLDDDDSEVMDIAKNIDTPEIELGGRSTVVEEPEQSETKDNVGVVKEEQVDHQSEQLSISNVITNYTILEGHITSESSTKLTGDVDVDGWTIVVTRSKENLENKDACEITAKKKTDANQPTDVEIPKTETKGVHEDRSVQPIPDETLISNETVAESDQDERQEAEFTEKINDEVKTPQDTLET

SEQ ID NO: 9008 - protein, 81 aa, Glycine max
  Clone ID: GLYMA-23APR03-C3054_4.p
EQHQRGVANGIAVTGMSLFNAIGPAAGGAVLTWSQKRMDASFLPGTHMVFFALNIVEALGLLMLFKPFLAEKKKRHSDQLH

SEQ ID NO: 9009 - protein, 278 aa, Glycine max
  unsure (1)..(278): unsure at all Xaa locations
  Clone ID: GLYMA-23APR03-C3054_7.p
MMIKYASEITAEKETDANQLTDVEIPKTETEGVHEDKSLQPTLDETSIGNEIVVESSQDEREEEEEFTEKLNEEVKIPQNDTEETGEINTNDTEKQEEDQASHAKEKLGIEDEGQLYQEEEKGIKEATEPQFPEEENKDTRETTAEKETDANQSTDVEIPKTETEGMHEDNSLQPTLDEASIGNETIAESSQDERQTEEELTEKFNEEVKTPQNDTEETAEINTNDPEKQEEDPASHAEEKLGIENDGXLDQEEAKGIEEQQTAVLEEEANTLPLCFV

SEQ ID NO: 9010 - protein, 480 aa, Glycine max
  Clone ID: GLYMA-23APR03-C305_2.p
REEVRRSRGRKKGLECYGERGESGDREWRLPSVGTDAKKRRVTYFYEPCIGDYYYGQGHPMKPHRIRMAHNLIVHYGLHRRMQVNRPFPAAEADIGRFHADDYVDFLSTVSPQILSENSHSHYRQLKRFNVGEDCPVFDGLFDFCRASAGGSIGAAVRLNREDADVAINWAGGLHHAKKAEASGFCYVNDIVLGILELLKVHRRVLYIDIDVHHGDGVEEAFYTTDRVMTVSFHKFGDFFPGTGHIKDIGVGAGKNYSLNVPLNDGLDDETFRGLFRPIIQKVMDVYQPDAVVLQCGADSLSGDRLGCFNLTVKGHADCLRFLRSFNVPLMVLGGGGYTVRNVARCWCYETAVAVGVEPSPKLPYNEYYEYFGPDYNLHVEPSTMENLNTPRDLEKIRNTLLEQLSRLPHAPSAPFQTTPSVIEVPEEEEEDMDVRPKRRIWSGEDFDSDHDDDMASSKNSDLTAQTSRSVADDMDEDKD

SEQ ID NO: 9011 - protein, 178 aa, Glycine max
  Clone ID: GLYMA-23APR03-C3115_1.p
MFRSLLRRPFSTTSARALKHCENHEFLSKNSFLGSWDAPRDPKEAEAKLTRLRREYALQVKEVRKEYIREMEVMKIEKERKDEARREALRVANEERKKLKAQAAQLRAQERDIERQQFRETLLKERAEKLENWKMKVKMHEEKKAEKKEFLHRQSSAWIEEGNLEKKVVEAMVEIMHL

SEQ ID NO: 9012 - protein, 403 aa, Glycine max
  Clone ID: GLYMA-23APR03-C312849_1.p
MVPSPIAKQNALAPKKKLHRNRRWDCEYDIYIHLQEKNRVLKSETEKSNYFHNLLQDFDVKDRKGDSELVQFMNGFYGNIVQSRLFHLDQNPNNIENTAEENGTNDDDDDDDVMVDPQHMYFMDHVRSHGKSYVLDIPEDGVFVVYEPDQSSIPENTATITTDYSNHVSNEEVNVCLDTEMHVNVDDSNRVVKHRGRKPKGAKLSAATNGNVKGSDVASKSKPKKHVYNLKGRRRSKRLKLKAPPESPGSRTLVIEDSDDEAEDLTRSMRGQIVEHCWQEYKYNEANASTLFREKLMEELKAPYCEEEYKRLLHDITIQKPIQHHRDLRGGIKIYEKPDLGKSFLGYHVDLAMKIKTVRDDHFRVLNLMRGFFYWLKNLSHEGAFPPWRDPSCLNVLPQQLEG

SEQ ID NO: 9013 - protein, 422 aa, Glycine max
  Clone ID: GLYMA-23APR03-C3128_2.p
MAENASIELNKFVFFCLLVLIQVAVSEIIFEERFDDGWRGRWVKSDWKSSEGKAGSFKHTAGKWASDPDDKGIQTSSDAKHFAISAKIPEFTNKNRTLVLQYSVKFEQEIECGGGYIKLLSGFVNQKKFGGDTPYILMFGPDLCGTDTKKLHVILSYHGQNYPIKKDLQCETDRLTHFYTFILRPDATYSVLVDNRERDSGSMYTDWDILPPRKIKDVKAKKPKDWEEREYIEDPNDVKPEGYDSIPREIPDPNAKEPENWDEEEDGKWKPPKIPNPAYKGPWKRKKIKNPNYKGKWKTPWIDNPEFEDDPDLYVLKPIKYVGIEVWQVKGGSVFDNVLICDDPDYAKQVVEEVFANREIEKEGFEEAEKVRKAKEEEEAQRAREEGEKRRRERGHDRRYRDKYRDKYRRHRHHDYDDHDEL

SEQ ID NO: 9014 - protein, 252 aa, Glycine max
  unsure (1)..(252): unsure at all Xaa locations
  Clone ID: GLYMA-23APR03-C3142_3.p
MAEERFTGVVQWFNNGKGFGFIKPDDGGEDLFVHQSSIRSDGYRTLLEGDRVEFAIATGDNDKTKAVDVTGVDGAPLQPRAAAGNNNRAAGSGFGFGARRNGGGGAAXYQCGEFGHLARDCNRSSNSGGGGGGSGGGCFNCGGFGHLARDCVRGGGGSVGIGGGGGGGSCFRCGGFGHMARDCATGKGNIGGGGSGGGCFRCGEVGHLARDCGMEGGRFGGGGGSGGGGGKSTCFNCGKPGHFARECVEASG

SEQ ID NO: 9015 - protein, 281 aa, Glycine max
  Clone ID: GLYMA-23APR03-C31506_1.p
MAQQLGVPFKLSCKPSHIHALKPFHSLPPLRTFTTKPSLNAKSHHHHHPLLTLLRSHRTLAPCCNSNKSDIMSQLELGKPEQKGKPEKRVNGIFWIILLNIAIFVADHFFRVNGIKALYLYHNWPSWYQFVTATFCHANWKHLSSNLFFLYIFGKLVEEEEGNFALWLSYILTGVGANLVSWLVLPRNTVSVGASGAVFGLFSISVLVKMSWDWRKILEVLILGQFVIEKVMEAAQASTSLSGRGGYALQSVNHIAHLSGALVGVLLVWLLSKVPSDPSDQ

SEQ ID NO: 9016 - protein, 396 aa, Glycine max
  Clone ID: GLYMA-23APR03-C3151_1.p
MFLLTRLTRQNPSRATLLTRHLSSAASKLHSNYTFKPPSSLPPQPQCSNFPPSKPNQKKPKPRYRPPSSLDQAGRKPVRSNDLPFDFRFSYTESSAKVRPIGLREPKYSPFGPGRVDRKWTGVCAPAVDPTVESLEGPEDPKLEEQRKKKREMIQGKPLSSEERKTLVSQFERSKTNRHVNLGRDGLTHNMLNVIHNHWKFAEAVRIKCMGVPTMDMNNICTQLEDKTFGKVIFRHGGTLILYRGRNYNPKKRPVIPVMLWKPHEPVYPRLIKTTIDGLSIKETKEMRKRGLSVPALTKLAKNGYYAFLVPMVRDAFLSCELVRIDCEGLERKDYKKIGCKLRDMVPCILVTFENEQIVVWRGKDYKHPKDGYFLKDRESFDDDDDFCVGKEQQAM

SEQ ID NO: 9017 - protein, 178 aa, Glycine max
  unsure (1)..(178): unsure at all Xaa locations
  Clone ID: GLYMA-23APR03-C316520_1.p
MAVWTLSRCCQWRHPWFCTLRCFTAFMDFVVVDSDNGNEAEHSCLEESTSIFEGVEVQEPYVGMEFDSEEDAREFYVDYARRIGFVVRXMQRRRFGIDGRTLARRLGCNKQGFSPNNMGILGPEKKLRPSAREGCKATILVKLEKSGKWVVTRFVKDHNHPLIATANGFSTAVSFLLV

SEQ ID NO: 9018 - protein, 226 aa, Glycine max
  unsure (1)..(226): unsure at all Xaa locations
  Clone ID: GLYMA-23APR03-C316532_1.p
MAINDGSCQMASLCTKVQDCPEQACLGSVLAKEHDKRILNKGGLSVEKFKHNIVGQSSKSLIVDEMDIGVDGDDGVVERNHPTSSSLTDSSNGSGSMMHSSSSGSRSFENQDQSXSNEPSXDCGSKLIVKATYREDTIRFKFDPSEGCFRLYEEVAARFKLQNGLFQLKYLDDEEEWVMLVNDADLQECIEILDDIGTRSVRFLVRDMPSVLSSSGSSNSYLGGSS

SEQ ID NO: 9019 - protein, 214 aa, Glycine max
  Clone ID: GLYMA-23APR03-C3169_2.p
MSLFGIGRNQRTFRPKKSTPSGSKGAQLRKHIDATLGSGNLREAVKLPPGEDLNEWLAVNTVDFFNQVNLLYGTLTEFCTPENCRTMSAGPKYEYRWADGVQIKKPIEVSAPKYVEYLMDWIEAQLDDESIFPQKLGSPFPPNFKEVVKTIFKRLFRVYAHIYHSHFQKIVSLKEEAHLNTCFKHFILFTCEFGLIDKKELAPLQELIETIIPY

SEQ ID NO: 9020 - protein, 134 aa, Glycine max
  Clone ID: GLYMA-23APR03-C318737_1.p
IIHYNTQMGKLRYDPNCYHHKEANTLKTMQKNPKKTVKITYISNPVLVRACDASEFRSVVQQLTGKDTNKKVETPRKEYNSTLMQQRVMQREDAGNGLYHYNGSMMTSLELDEDYYWKELARSLLPSPSCVVLV

SEQ ID NO: 9021 - protein, 127 aa, Glycine max
  Clone ID: GLYMA-23APR03-C31928_1.p
MFHREAYLYNSLTIAQFLINSVRLCSKRKTNQSIMTKVVCALLLIFVMAFVTQVAYGGGEGSLTPQECPGACDYRCSKADRTKKACLNFCNMCCAKCLCVPSGTYGHKEECPCYNNWKTKRGTPKCP

SEQ ID NO: 9022 - protein, 253 aa, Glycine max
  Clone ID: GLYMA-23APR03-C3200_4.p
MAMMGSMLLSLRPFLTTIFFLTLTVLKVSASSSVIFYNKCQHPVWPGIQPSAGKPVLARGGFKLAPNRAYSLQLPALWSGRFWGRHGCAFDVGGRGRCATGDCGGSLFCNGIGGSPPATLAELTLGNEQDFYDVSLVDGYNLPISITPFKGSGKCSYAGCVSDLNTMCPVGLQVRSRDNKRVVACKSACSAFNSPKYCCTGSYGSPQACKPTVYSKIFKTACPKAYSYAYDDPTSIATCTKANYFLTFCPHRP

SEQ ID NO: 9023 - protein, 190 aa, Glycine max
  unsure (1)..(190): unsure at all Xaa locations
  Clone ID: GLYMA-23APR03-C3223_15.p
MADLLEWSKXDKXRMLHVVYRVGDLDXTIKFYTECLGMKLLRQRDIPEEKYANAFLGFGPEESHFVVELTYNYGVTSYDIGDGFGHFAIATQDIYKLVEHIRAKGGNITREPGPVQGGTTVIAFVKDPDGYTFGLIQRPTVHDPFCQVMLRVGDLERSIKFYEKALGMXVVRXVDKPEYKYTIAMLGYGE

SEQ ID NO: 9024 - protein, 120 aa, Glycine max
  Clone ID: GLYMA-23APR03-C322568_1.p
SIIMEENPWGSWSADMEVDDEVVNESLCHTNLFDEEFLRDILQRPQEGAPNLNNSSIMSSLVLKTLSQLPYFQPLTYSLSTIPLHCYQQKLIVIFLLPNCPHQIQGPTMESRSLEALRSH

SEQ ID NO: 9025 - protein, 165 aa, Glycine max
  Clone ID: GLYMA-23APR03-C322591_1.p
MRTIPTTTSTTIAPTATTSSLTTSPSQHSSTWHSPVPYLFGGLAAMLGLIAFALLILACSYWKLSGQLQNEENAERDLESVVGGEKQGDSANKESVTVYEEKILVIMAGDEKPTFLATPKASSFVPHGVPNHFEENLENHVTSEKSEKNHVQQPTSPQQQSQPRQ

SEQ ID NO: 9026 - protein, 393 aa, Glycine max
  Clone ID: GLYMA-23APR03-C3228_1.p
MRGGEERSTGIRKKGSGVRQWLVLDGRGETEVVEAGKHAIMRRTGLPARDLRILDPLLSYPSTLLGRERAIVINLEHIKAIITAHEVLLLNSRDPSVTPFLQELQARILRHHHQTLADANPNPDDAIKILPFEFVALEACLEAACSVLENEAKTLEQEAHPALDKLTSKISTLNLERVRQIKSRLVAITGRVQKVRDELEHLLDDDDDMAEMYLSEKLAEQDDLEKAEDTSSADDVDDHIDRTAPEISLDNVVGRDSHGTRDSATYSAVTKQLDVEELEMLLEAYFVQIDGTLNKLSTLREYVDDTEDYINIMLDDKQNHLLQMGVMLTTATLVVSAFVVVAGIFGMNIHIELFDDQKAGMTQFLWTVGGSTAGTIFLYVVAIAWCKHKRLLE

SEQ ID NO: 9027 - protein, 124 aa, Glycine max
  Clone ID: GLYMA-23APR03-C3236_1.p
IEIAEKQRQRERELEEKEKQRREALLGRAAAEPAPPARPLESGSAAPAAAAAAAAAPTPGKYVPKFRRERTESAGAAPPPETDRWNSSSRPDGDRWRSDDRRTAFGSGGGSRSSSTWSSSRNAR

SEQ ID NO: 9028 - protein, 91 aa, Glycine max
  Clone ID: GLYMA-23APR03-C3237_3.p
MASAAARSIFRSCSASRSAFRVASESKPVRSPFRIASNKPLSQSQSTLRFPVELSSCVESMMPYHTATASALMNSMLSISSRTSAWIPEGS

SEQ ID NO: 9029 - protein, 224 aa, Glycine max
  Clone ID: GLYMA-23APR03-C32391_1.p
MVSFHKALAEIPITEVPPEFEAPPKKRKWEGETLTEEFFMHDPTDEKRKSIFDIELHLETPLPSHKLQQYLTIQSRQIHLCNTGMTMMKTQDFERNSDPKVPSLGQMSLDLELSLKKKEDGYDTDEKKNHGSTGSAFGERDLMIESSNKCKKDDSCVLTRSPPWWLSSEGDDHKEMITTVCMRCHMLVMLCKSSPACPNCKFMHPPDQNPSKFLKRKKVQPLLC

SEQ ID NO: 9030 - protein, 813 aa, Glycine max
  Clone ID: GLYMA-23APR03-C32513_1.p
MKEEATKQGDADGNEGLCPKPLLDKPIPIFPQEENAETSRQNPNPTPRKKKKKNVEGAEQVQTCDPSILTGVEPDVMKEEGAQQGSDLPAETTRQIHAPTPKKNKKKDVQGAQQQLQTCDPSIMIGVEPNVMKEEGAQQGEANETAVFGINEECPGPDSMPLKDTLRKKKNVLKSQGAEPEPKSKESNNTHHPQQCYSDSELKMKMKKGAEANAENSAVCPKPKLALPSDIAIPNNSQVNKRAEPTEAKVEDQACSKPKLASPIDLPAPTNSEKKKEVEPVQNPDARAQPPQPQPCYAPCAEPPGDPATPIDQRRRKQKSKREKETIIICSEEVENQGSPLHMDITLNQAPDQVQQDQATPISLQPASLMDQTILVDPATPIDLELTMKKIKKKQRKKTTSTELPEISIQTSTCLIEASPIDPAIPMDPCLAISTGPEQEMSKKKKKRKSKLESEAAELNEHYKLPEAAPPEAPVQKSIYHTDAPSIDPVGPSPPVDTETPIDQGQQMTKKKRKKKKRIVIIIEGTETNEHGVKPPETLVQKFAYPTVTTSIDPTIPVPAPPIDQGQKMRKKMRKRSALISKGAEPDEHDDKPPGTPVQRSIHPIAEPSIDPTIPASQTPPVDPATPVDPEPMTKKKRKKKRNSAKNEGLESEKHNADRIAETPVQKTEGSTTENSMGRCNVEPAGKTLVQITDTLRVTKSPFKHHGESSLRCRACRQPGHRFQQCQRLKCLSMDEEVCFFCGEIGHSLGKCDVSQAGGGRFAKCLLCYGHGHFSYNCPQNGHGIDPKVLAVNGAINRTAVEARRELLPRFNM

SEQ ID NO: 9031 - protein, 186 aa, Glycine max
  Clone ID: GLYMA-23APR03-C3252_2.p
MEEVNVVETKDGTVSVAAAFAGHQEAVQDRDHKFLRKAVEEAYKGVDCKDGGPFGAVIVHNDEIVASCHNMVLCNTDPTAHAEVTAIREACKKLKQIELADCEIYASCEPCPMCFGAIHLSRIKRLVYGAKAEAAIAIGFDDFIADALRGTGFYQKATLEIKRADGNEAIIAEEVFEKTKEKFQMY

SEQ ID NO: 9032 - protein, 245 aa, Glycine max
  Clone ID: GLYMA-23APR03-C32530_1.p
MDVPLPLDKLALDLIDNEPSPANMSNSRIYVILVATGSFNPPTFMHLRMFELARDALNSDGYCVIGGYLSPVNDAYKKKGLISAEHRIQLCHFACKSSDFIMVDPWEASQSTYQRTLTVLSRVHNSVCETGLVSQESLKVMLLCGSDLLHSFSIPGFWIPDQVKTICKDYGVVCIPREGQDVEKTIFKDDILNENKDNIKVVNELVPNQISSTRVRDCIARGLSIKYLTADEVIDYIREQQLYLN

SEQ ID NO: 9033 - protein, 301 aa, Glycine max
  Clone ID: GLYMA-23APR03-C325316_1.p
MGSLVYQVISSAALFTLGIYHLITTTRNYLKSPLSYAAKPFHPFPYPRRLPLYLVITSLLLAMAHHLLISADADPLVRGATAVHRITSLQSAASLFLFLLLALALLLADASPALLPLPPDLSFALASALFLLHASLASARASLQTSAIEAKCLSVSASLSHLSALLCLLLAALPRLFPADVALSAAFCLRGLWALQSGLSLYADAFIPEGCHRLLDVTSGVEGSTQCDLDESKLRAVAILDLAFLIHTIFVVLIVLLTYALVCRSVGGRRLGSYEALPTAASPTDANHSHIQMKAFTGTQA

SEQ ID NO: 9034 - protein, 472 aa, Glycine max
  Clone ID: GLYMA-23APR03-C3260_3.p
MEKTRYIAVIPGVGFSHLAPILQFSKQLVELHPHFHVTCIVPSLGSLPSASKAILETLPPNYINTILLPPVNPNDQLSQEDIPVLVKIHLTMSHSMPSIHKALKSLTSKATLVAMVVDSFAFEALDFAQEFNMLSYVYFPAAATTLSTLLHLPKLDEEISCEYRDFSDPIKVPGCVPFRGGDFYGPAQDRTSPVYKFLLQRVNRIRHVDGIFINSFLEMETSPIRALKDEDKGYPPVYPVGPIVQSGDDDAKGLDLECLTWLDKQQVGSVLYVSFGSGGTLSQEQITELAFGLELSNHKFLWVLRAPNNATSDAAYLGAQNDVDPLKFLPCGFLERTKEKGMVVPSWAPQIQVLSHSSVGGFLTHCGWNSILESVLHGVPLITWPLYAEQRMNAVVLCEDLKVGLRPRVGENGLVERKEIADVVKRLMEGREGGEMRKRMKKLEVAAVNALKEDGSSTKTLSELALMWKNVA

SEQ ID NO: 9035 - protein, 111 aa, Glycine max
  Clone ID: GLYMA-23APR03-C32714_2.p
RNSWKLHAGGYGTLEELLEVITWAQLGIHDKPVGLVNVDGYFNSLLSFIDKAVEEGFISPNARHIIVSAPTAKELVKKLEDYVPCHEGVASKLSWQIEQQLAYPQDYDMSR

SEQ ID NO: 9036 - protein, 364 aa, Glycine max
  unsure (1)..(364): unsure at all Xaa locations
  Clone ID: GLYMA-23APR03-C3271_4.p
MMSSESVLPLPENPIIVGFGGVGVDFLAVVPSFPKPDSKIRTTEFTVQGGGNNGNTMTCAARLGLKPRIISKVRXMLEELEAEGVDTSFFVVSKEGTSPFSYIIVDNQSKTRTCIFTPGYPEMVPQDLSRANLLSALDGARVVYFDARMPDNALVIAQEAFHQNISILIDAERPREGLNDLLSLADYVVCSEKFPQAWTEASSIPRALVSIILRLPRLKFAIVTLGKDGCIMLEKCVDDEGSHIEEMDVDSCFVSLTTRKEDSTAMPTCIPSPVTKLRAEGIEESVCGRLYYGTSEKIPPSELVDTTGAGDAFVGAVLYSICANLSLEKMLPFASYVAAANCRALGARRGLPYRTNPRLASFTE

SEQ ID NO: 9037 - protein, 79 aa, Glycine max
  Clone ID: GLYMA-23APR03-C32790_2.p
RFWLEENTHPTMAATIPFSLLRNCAPLKLATPFARKASIFNLLLPLQPRRLVSSTCAVNNEEATAKTAAVNFDSEAPTM

SEQ ID NO: 9038 - protein, 130 aa, Glycine max
  Clone ID: GLYMA-23APR03-C32850_2.p
MKPSVLRLSLLVFVPLLLSLFYVALMPKKETSMKTYEVFGVKIEKNPSQSKLTDLGVSTWPMWEGGPTKIPWSFKEEETMYLLEGKVRVTVEGSVESFEIGGGDLVVFPKGMNITWEVIEAVKKHYSLKK

SEQ ID NO: 9039 - protein, 305 aa, Glycine max
  Clone ID: GLYMA-23APR03-C3300_16.p
MASAVEKEGGASEETLSLELPAPPGWKKQFIPKKAGTPKKNEIVFTAPTGEEINNRKQLEKYLKAHPGGPAVSEFDWGTGETPRRSTRISEKAKAAPPTQREPPKKRTKRSSASQKEISQEEKEEETKEAEMQEADDTTKGDNDIEKEKVVVNENHDKSVEDTDVNKSTRYGEEAKAGENVEVPIEEEKSNAADGELPALKDKADDKVTEGSEVFLRKDEEKIEQPQEETKEYSGFGEPEKLETCTTADKTVEVEGVNKEDHVKSTHEFEVGEIEGTKVNGEEHHKLDEINKAEAELTVNGTHES

SEQ ID NO: 9040 - protein, 371 aa, Glycine max
  Clone ID: GLYMA-23APR03-C330_1.p
AETEKKKMEMYQIWSRRIALGAFAFVLLFLSASADDVVVLSEDNFEKEVGQDRGALVEFYAPWCGHCKKLAPEYEKLGSSFKKAKSVLIGKVDCDEHKSLCSKYGVSGYPTIQWFPKGSLEPKKYEGPRTADSLAEFVNTEGGTNVKIATAPSNVVVLTSENFNEVVLDETKDVLVEFYAPWCGHCKSLAPTYEKVATAFKLEEDVVIANLDADKYKDLAEKYDVSGFPTLKFFPKGNKAGEEYGGGRDLDDFVAFINEKSGTSRDVKGQLTSQAGIVESLDVLVKEFVAASDEEKKFVFTRLEEEVEKLKGSASRHGKIYLKAAKNYLEKGSDYAKNEIQRLQRILDKSISPAKADELTLKKNILSTYAA

SEQ ID NO: 9041 - protein, 511 aa, Glycine max
  Clone ID: GLYMA-23APR03-C3333_17.p
MLLELALGLCVLAWFLHLRPTPSAKSKALRHLPNPPSPKPRPPFIGHLHLLKDKLLHYALIDLSKKHGPLFSLSFGTMATVGGSTPELFKLFLQTHEGTSFNTRFQTSAIRRLTYDNSVAMVPFGPYWKFVRKLIMNDLLNATTDNKLRPLRTQQIRKFLRVMAQSAEAQKPLDVTEELLKWTNSTISMMMLGEAEMIRDIAREVLKIFGEYSLTDFIWPLKYLKVGKYEKRIDDILNKFDPVVERVIKKRREIVRRRKNGEVVEGEASGVFLDTLLEFAEDETMEIKITKEQIKGLVVDFFSAGTDSTAVATEWALAELVRRSTAVVGKDRLVDEVDTQNLPYIRAIVKETFRMHPPLPVVKRKCTEECEINGYVIPEGALVLFNVWQVGRDPKYWDRPSEFRPERFLETGAEGEAGPLDLRGQHFQLLPFGSGRRMCPGVNLATSGMATLLASLIQCFDLQVLGPQGQILKGDDPKVSMEERAGLTVPRAHSLVCVPLARIGVASKLLS

SEQ ID NO: 9042 - protein, 159 aa, Glycine max
  Clone ID: GLYMA-23APR03-C33649_2.p
MSLLQKGLCCVFDIRNNVRSLRLPSCSTRIRNFHAPNNSNSPLQSLTRGKSRRMISKPISAALPAPPPLDLTENNVKQVLEDARKELGQIFDSSVGITGVVELADLDGPFVKISLKGRFWHKRSTVLARVANYLKQRIPEILEVDIEDEKQLDDSPENF

SEQ ID NO: 9043 - protein, 324 aa, Glycine max
  Clone ID: GLYMA-23APR03-C336539_1.p
MSSLSNLERFLLRVTPDVPSLTLQSCCSDLNAQWLPPGKDTIEYFTLKDLWDCYYEWSAFGAGIPMILENGDTLVQYYAPYLSATQIYISKSRIRKEYGEGVEVECDSLSEDSASDNLSRSPSNNSSKAWDDASLDSGSDQVGSCTTKDMLGALYLQYSENSPPYQRVPFSEKITELAKSHPGLMRLKSVDISPTSWMAVSWYPIYSVPCHKNKRDQTSFLTFHSLSSFQDCASKYDEIHTGNNKSCLIDWRSIVGEKCKKKERGCMSLSPFGLATYKMRKNIWLNPYNNNQVVTDLYNAADWWLKHINADHPDFNFFTRQPTL

SEQ ID NO: 9044 - protein, 188 aa, Glycine max
  Clone ID: GLYMA-23APR03-C33786_1.p
MLNDGDANHVSIEKSFRIKEDDRFFSRLMSKEISMANSSSRVFYYGETSIAVPFMWEAQPGTPKHPSSETSLPPLTPPPSYYSNSKSKNKRRNSKANIFSCFMPKFIGSRKAHVSPTSSRSSSSSSSSSWSLVYPAYSYSMRDTDQGSISFSRSTTVRSFLKHKASNGFRGFYPFGNINNAIVSHGAV

SEQ ID NO: 9045 - protein, 164 aa, Glycine max
  Clone ID: GLYMA-23APR03-C33996_1.p
MWASAEGGAPEVTLETSMGSFTVELYYKHAPRTCRNFIELSRRGYYDNVKFHRIIKDFIVQGGDPTGTGRGGESIYGAKFEDEIKRELKHTGAGILSMANAGPNTNGSQFFITLAPCPSLDGKHTIFGRVCRGMEIIKRLGSVQTDNNDRPIHDVKILRTSVKD

SEQ ID NO: 9046 - protein, 291 aa, Glycine max
  Clone ID: GLYMA-23APR03-C34002_1.p
MATLFNFNSTLRPSCYHPSSPSSSYPHFSKTLSTTFLGHTVTLKYAATSASIPPRSLSAHMSWDGPLSSVKLIIQGKNLELTDAVKQHVEDKVGKAVQKHSHLVREVDVRLSIRGGGEFGRGPRTRRCEVTLFTKRHGVVRAEEDAESTYGSIDLVSSIIQRKLRKIKEKVSDHGRHMKGFNRLKVREPVEQLPVEEDEILSPQEEEESIDEVVRTKYFDMPPLTVAEAIEQLENVDHDFYGFRNEETGEINIVYKRKEGGYGLIVPKGDGEAEKLEPVVLEPAIESSLKE

SEQ ID NO: 9047 - protein, 419 aa, Glycine max
  unsure (1)..(419): unsure at all Xaa locations
  Clone ID: GLYMA-23APR03-C34159_2.p
MASSIPLYQPTNTLFSNTQFKGSRRGFLWRPSYSFGSRAENRARPIKASVGAPPFPLFKPPQVEETSSXFLELEPADPDFYKIGYVRSMRAYGVQFKEGPDGFGVYASKDVEPLRRARVVMEIPLELMLTISKKLPWMFFPDIIPLDHPIFDIINSTNPETDWDLRVACLLLYAFDCEGNFWQLYGDFLPSADECTSLLLASEEELLELQDPDLASTIRKQQQRSLEFWENNWHSDVPLKIKRLARDPQRFAWAVGIAQSRCINMQTRIGALNQEANMLIPYADMLNHSFEPNCFFHWRFKDRMLEVLINAGQQIRKGDEMTVNYMSAQKNDMFMQRYGFSSPVNPWDKIKFSGNARIHLDSFLSIFNISGLPEEYYHNNCLSKAGDXFCXMGAVIAAARTLPTWXDXDVPPIPSMERK

SEQ ID NO: 9048 - protein, 95 aa, Glycine max
  Clone ID: GLYMA-23APR03-C34254_4.p
CYKYFKYFLTVMDLTMSFFLIKFLVEMSCKPYPILDLGPLLFSVGNTVSEQLPATMMIETFCYPHFQTSCRVCGLALWIFAAHSLIGRIMAKTTT

SEQ ID NO: 9049 - protein, 389 aa, Glycine max
  Clone ID: GLYMA-23APR03-C342591_1.p
MMIESSSKVHGANNQQEGDDNNIKIEKLSKAPSTSSSSRSWSAFRNPRIVRVSRSLGGKDRHSKVCTIRGLRDRRIRLSVPTAIELYDLQEKLGLNQPSKVVDWLLETTKSDIDKLPPLQFPHCFAHHHQQTLLPGTSQFSLGGFYDAAANGGNENHLMATKSTRYWDIDSHSLNNGKDLVESVSNSLKGKSWIKTNEQENHQDGGIGGSSSTHNNREEYSSAHYKLFPIGTTTNNSYLPGLLNNGMTHNSSNHHSEPSSLSLSHFGSHGLFPSSHNAHPSSCSGVPFSSCNFSAASSGPQLLFCPPTSATPASAFYSVESDPRQSNNNVQIFSSSSQVMMPHPLIQSLHSTNSTLNRRIPTSFSSKLLDSDNNNDRSQPNKGSSTTRS

SEQ ID NO: 9050 - protein, 301 aa, Glycine max
  Clone ID: GLYMA-23APR03-C34671_1.p
MRTHQQPKLKTQLFSCAFFRHCAQTLLSPTATTPPPFQCESSTSSSSATSQSFTQWRFSPPTPNTTTNNNNNNLIQTNTNPPSPPPPPQIHNLQELFHISEFQLSTDPTSALNLLERSLVPNPPQEQPPCPPNLMRALTANLAQAKPATKILFALCLSDANRRVAVEAGAVSAVVEAAPDLDGAPAERALAALELMCTLPEGAEELRAHALAVPVMVTMMAKTAARGKEYAIGALAVVYGAAGAENHYTAPPEEVARAVELALQGECSARGRRKGTQLLKTLQQLSQAEIEASETHAHDGN

SEQ ID NO: 9051 - protein, 115 aa, Glycine max
  Clone ID: GLYMA-23APR03-C34741_2.p
TLRIAAITINKTLTFSFESFGNGNRFRRIMCLYYLLLLLLDDGVPLVFAILVDCGGADHCGADEGNKTEELGAGGAGNLFSGHVYPPPVTATNSLLFTSCLVRSLSSHFSLQGLV

SEQ ID NO: 9052 - protein, 367 aa, Glycine max
  Clone ID: GLYMA-23APR03-C34757_1.p
EKKMDVEKAFHMTGGVGKTSYAKNSSLQKKESDKVKHIIIQTVEELYLATTPKSIGIADLGCSSGPNTLSIIKDIFQAIQGISHRIMHHSTEFRVYFNDLPTNDFNSIFKAIPEFQNLLRQDRKNGFPSIFMGGYPGSFYGRLFPNSYLHFVHSSYSLHWLSRVPPALYDEHKRPLNKGCVYICESSPEVVSQAYYHQFQEDFSLFLRSRSEELVVGGRMVLIFLGRRGPEHVDRGNSFFWEILSRSFAILVSQGEIEQEKFDSYDAHFYAPSREEIEEEVRKEGSLKMERLEMFEMDKSNNEQESSESYGTQVAVAVRAIQESMISHHFGEGILESLFENYARLVDEEMAKEDIRPISFVLVLRKI

SEQ ID NO: 9053 - protein, 886 aa, Glycine max
  Clone ID: GLYMA-23APR03-C3477_13.p
MAASVDNRQYGTHINAVVRACGPDFNTPLPSDFDLDSSSDDEDQNDDASFLKELIQKANAETEASLLDPRDEGTADQWIPRNASMVRFTGKHPFNGEGPLPRLMHHGFITPSPLRYVRNHGPVPKIKWDEWTVEVTGLVKRSTHFTMEKLMREFPHREFPATLVCAGNRRKEHNMVKQSIGFNWGAAGGSTSVWRGVPLRHVLKRCGILARMKGAMYVSFEGAEDLPGGGGSKYGTSVKREMAMDPSRDIILAFMQNGEPLAPDHGFPVRMIIPGFIGGRMVKWLKRIVVTEHECDSHYHYKDNRVLPSHVDAELANDEGWWYKPEYIINELNINSVITTPCHEEILPINSWTTQMPYFIRGYAYSGGGRKVTRVEVTLDGGGTWQVCTLDCPEKPNKYGKYWCWCFWSVEVEVLDLLGAREIAVRAWDEALNTQPEKLIWNVMGMMNNCWFRVKTNVCRPHKGEIGIVFEHPTQPGNQSGGWMAKEKHLEKSSESNPTLKKSVSSPFMNTTSKTYTMSEVRRHNNADSAWIIVHGHVYDWTRFLKDHPGGTDRILINAGTDCTEEFEAIHSDKAKQMLEDYRIGELTTTCYNSDSSSSNPSVHGRSDTIPLTPIKEVITPMRSVALIPREKIPCKLISKTSISHDVRLFRFGLPSDGLLMGLAVGKHIFLCVTVDEKLCMRAYTPTSSVHEVGYFDLVVKVYFKGVHPKFPNGGIMSQHLDSLPIGSVLDVKGPLGHIEYTGRGNFLVHGKPRFATRLAMLAGGTGITPIYQVVQAILKDPEDCTEMHVVYANRTEDDILLKEELDEWAKKYDRLKVWYVIQESIREGWEYSVGFITESILTEHIPNASPDTLALTCGPPPMIQFAVQPNLEKLGYDTQNNLLVF

SEQ ID NO: 9054 - protein, 280 aa, Glycine max
  Clone ID: GLYMA-23APR03-C3477_9.p
THLPLIKEITTTPPPPPRDVVLKTREKIPCKLVSKTSISHDVRLFRLGLPSKDQLLGLPVGKHIFLCATINEKLCMRAYTPTSSVDEVGFFDLAIKVYFKGVHPKFPRGGLMSQHLDSLSIGSVLDVKGPLGHIEYTGRGNFLVHGKQRFAKRLAMLAGGTGITPIYQVAQAILKDPEDPTEMHVVYANKTEDDILLKEEMMCGEEQCDRFKVVVRVETAREGWEYSVGFITESIMREHLPETSTDALALTCGPPPMIQFAVQPNLEKMGYDIKADLLVF

SEQ ID NO: 9055 - protein, 131 aa, Glycine max
  Clone ID: GLYMA-23APR03-C34792_2.p
FHVPVEISVVLLLYFLLLTSAGKQVCNVELIQGDTIVMGSDGLFDNVFDHEIVPTIVRYKDVAEAAKALANLASSHAMDSNFDSPYSLEARSRVRIFQGFEPPLWKKILGMKLTGGKLDDITVIVGQIVSS

SEQ ID NO: 9056 - protein, 179 aa, Glycine max
  Clone ID: GLYMA-23APR03-C35065_4.p
INDVLIHCDIVFKFLFYAAAIQCLKRKRLYEQQIEQLGNFQLRIHDQMIMLEGAKATTETVDALRTGAAAMRAMQKETNIDDVDKTMDEINEQTENMKQIQEALSTPIGAAADFDEDELEAELEELEGAELEEQLLQPATTAPAAPVHVPAGWQPTRPVSSKPTAEEDELAALQAEMAL

SEQ ID NO: 9057 - protein, 255 aa, Glycine max
  unsure (1)..(255): unsure at all Xaa locations
  Clone ID: GLYMA-23APR03-C35128_2.p
LVETHFSVSNADEDVLQIFFKERALNGDFISRASDLLWRRDFRSSGDYDISELTNNTSQQTEQIIETDNDAGFLKLTRTQEWLTGDNSPPINTKVTAKALQDSSARRKKLNMLKYESLKRELLLLSVGIGLACSGYCLVILSVQVAISYAIGVLFSCLYLQLLXYQHADNLSXEDVPQIFKKKKSKKIGIRSEDLEDFLERTIKGSGISLSSPRLVIPATIYGLWILFHQYFTNDIFDFQVILGSMYIKKSYLKS

SEQ ID NO: 9058 - protein, 427 aa, Glycine max
  unsure (1)..(427): unsure at all Xaa locations
  Clone ID: GLYMA-23APR03-C35228_1.p
MNLAGRGGPCSARGGPRGAGERVGVGGAAGGGGAACGGGGSGGANDGAGAATPWPRGRSVASCPPGAPTPPGRCDAHAYCRLSHHLAHCSRLNHECDRFQQQLKSVVVLNFFPFTFSRESTCQVCVKQETRCSFFSKRGLHQVGMWMHECHCGASSTSFDCLGLNNGWDLPSSLCPCCEPSSPVSEQLHCWRDYYKWRCIPLDSPVALLLQWPLTIYHAARLVGITALNPEISDKLYIHYLGPEKELLQLAVFGELLALFPGVRIHIELVGPAIPPQXDGEMIHISKYPCCNEDECECKIGSKNTFLETQSGITSTLTLQLWQGFYHDRYRDIVKDSFPRLIIAPNGGIAAYSSWLPSIELIKKIDVPVVFTDYCEEACHLAANCIKTVTGSPLKLPVQLNPFRQPMAVEDSVLLLPCYSNCYLFGM

SEQ ID NO: 9059 - protein, 342 aa, Glycine max
  Clone ID: GLYMA-23APR03-C352_2.p
MSVSCSNCFPDDDDSFLLCGEDSSGIIDSSPECSSDLDSPPPSEAEAESIAGFIEDERNFVPGFEYLNRFQSRSLDASAREESVAWILKVQAYYAFQPLTAYLSVNYLDRFLNSRQLPQTNGWPLQLLSVACLSLAAKMEEPLVPSLLDLQVEGAKYVFEPKTIRRMELLVLGVLDWRLRSVTPFSFLDFFACKLDSSGTFTGFLISRATQIILSNIQEASFLAYWPSCIAAASILHAANEIPNWSFVRPEHAESWCEGLRKEKVIGCYQLMQELVINNNRRKPPKVLAQLRVTTRTRMRSSTVSSFSSTSSSSSSTSFSLSCKRRKLNNRLWVDDEKGNSE

SEQ ID NO: 9060 - protein, 311 aa, Glycine max
  Clone ID: GLYMA-23APR03-C353863_1.p
MVMANSSINSVLHQGSMLPHEFPLASLQRPASFHSFSSTWAITNGALHVSPKRWNCSASSCCFRFRECRCRWKRIVRSCSTSEFVISNDENYSNKQVVSLTPRLYDYVLKNVREPEILRQLRQETASMRGSQMQVSPDQAQLLAMLVQILGAERCIEVGVYTGYSSLAIALVLPESGHLVACERDAKSLDVAKKYYQLAGVSHKVDVKLGLAMDSLESLILNGEAGSYDFAFIDAEKKMNEKYFELLLQLVRVGGLIVIDNVLWHGKVSDPLVNDPKTISIRNFNEKLMEDKRVSISMVPIGDGMTICRKR

SEQ ID NO: 9061 - protein, 184 aa, Glycine max
  Clone ID: GLYMA-23APR03-C35590_2.p
MTDETEELEPLFDYSRVQPLNPIDLDDDFDDYEDVICVDSKKRKNSQAVGNEKTNGKGVTVVDIEDDDWLPPPPKIASNAQKTTDEDSTLKKLRLKKQELAWFAESAKELLKDVEESSKLEINNSLQSSVVGVDEKSTEHSERAKMVISVQDKDGTKQIRMFMDDNCFSKYVYIVKCTIYILGR

SEQ ID NO: 9062 - protein, 315 aa, Glycine max
  unsure (1)..(315): unsure at all Xaa locations
  Clone ID: GLYMA-23APR03-C35884_1.p
MSTEAPKRDQWQWENATAGAAAGFATVAVMHPLDVVRTRFQVNDGRVSNFPSYKNTAHAVFTIAXRSEGLRGLYAGFLPGVLGSTISWSLYFFFYDRAKQRYARNREGKLSPGLHLASAAEAGAIVSFFTNPVWLVKTRLQLQTPLHQTRPYSGVYDAFRTIMREEGFSALYRGIVPGLFLQVSHGAIQFTAYEELRKVIVDFKSKGSTVHNQNPDKLLNSVDYAVLGATSKLAAVLLTYPFQVIRARLXRPSGDGVPRYMDTLHVVKETARFEGIRGFYKGITANLLKNAPASSITFIVYENVLKLLKPARRND

SEQ ID NO: 9063 - protein, 200 aa, Glycine max
  Clone ID: GLYMA-23APR03-C358995_1.p
MTRFEVVFIATPALGNLVPIVEFADLLTKHNPQLSATVLTVTTPQRPLISTYVQSRASSATNLKLLHLPTVDPPTPDQYQSFIAFVSLHIQNHKHQVKNALLNLKKNESNSFDSVRLVALFVDMFSTTLIDVAAELAVPCYLFFASPASFLGFTLHLDRVDPVESESELAVPSFENPLPRSVLPNLVLDANDAFSWVAYH

SEQ ID NO: 9064 - protein, 189 aa, Glycine max
  Clone ID: GLYMA-23APR03-C35923_1.p
MTTQFVILSLLVSCNTLIYANAEDTGFVGSLDHKALGLKKKDKVSHFRFYFHETFTGSNATTVFVVPPLPQYSSTSSFGAIGVMDNVLTAGPERTSKVVGRVEALAAATSQTEFNLLIFFNFILTQGKYNGSTITVLGRNRISLKVREIPVVGGTGVFRFATGYAETNTIFFDPQTRSTIEYNIYVSHY

SEQ ID NO: 9065 - protein, 195 aa, Glycine max
  Clone ID: GLYMA-23APR03-C360333_1.p
MNTFSSEICSSGCESGWTLYLEQSFLNQKAGGTEGSYEEEHKDKRFKDEEEEDLSMVSDASSGPPHFPDYDEANYFNEEVNGCFYSASKKAVMQAKSGTKKKKIKENQQHLEDQQHLPSFLYDTASSPVFDFSTNNVNVANQQISIGSMLDYSQGFSATYFEGRSSFQGEHFGFLQSGNELQGKKWYGGKGMGIR

SEQ ID NO: 9066 - protein, 125 aa, Glycine max
  Clone ID: GLYMA-23APR03-C36118_1.p
RGPDSLRAKKVLLQLLGQIGVSSFTVEDRRRCSRRCYRNRETSFLRCHTAAPGECSTFPPTLGSPSASSHRASGSVRTAMSLPGLRCERIEEDACEIVPRLSFSPQLLLLIYQCVGNNFWLWFLL

SEQ ID NO: 9067 - protein, 199 aa, Glycine max
  unsure (1)..(199): unsure at all Xaa locations
  Clone ID: GLYMA-23APR03-C36319_3.p
MALQRLLKRKGGVDELNDDVPLASPATKIRRLDAELPPIVEEDKPLLLPNEERALVLFKPLVHSHSSXLSLSILTLXNGIRNNQYLWSKECERVTELESREKENDELALVPWVPSPSYHYQFSPVDDSDNTNAELMEADETGSMMMDIEQEHDTDIDAKISTSSIHYPTTHGGITEGFQQHCLLPQLPHNTSTPITWTR

SEQ ID NO: 9068 - protein, 530 aa, Glycine max
  Clone ID: GLYMA-23APR03-C36337_1.p
MDPASYVQTIAGILALLIAYILFRSVKSPNGSKQRKGNQVPEPRGALPFIGHLHLLNARKPYFRTFSAIAEKYGPIFILKLGCHPTLVVNSREIAKECLTTNDKVFASRPITSAGKILGYNNAVFGFSPYGKYWREIRKMAILEILSSYKLEKLKHVRDTETLSLVKDLYSSISCPKNVNGSTTHVPISNLLEHMSFNIIVRMIVGKRFGGDTVNQEDNEAWRLRNAIKNATYLCGVFVAADAIPSLSWIDFQGYVSFMKRTNKEIDLILEKWLEEHLRKRGEEKDGKCESDFMDVMISAFQEEEEICGYKREMVIKATSVLLILTASGSTAITLTWALSLLLNHPKVLKAAQKELDTHLGKERWVQESDIENLTYLQAIIKETLRLYPPAPLTGIREVMEDCCVAGYHVPKGTRLLINLWNLQRDPKVWPNPNKFEPERFLTTHHDINFMSQNFELIPFSIGRRSCPGMTFGLQVLHLTLARLLQGFDICTKDGAEVDMTEGLGVALPKEHGLQVMLQPRLPLGLYERL

SEQ ID NO: 9069 - protein, 376 aa, Glycine max
  Clone ID: GLYMA-23APR03-C36586_1.p
MVMVTDSKPIIPRRGLVVGNYCHDVLHRDGEAVAETLGGAASFISVILDALTLPFHTVSRVGPDFAYAAATSNHPPLIIPTSQTMLFHAHFGSVYPDRLLNRVRSCDSILPSDLPDQTRFGFGLAVGVGGEILPETLEKMLSICDHVFVDIQALIRRFDNINGRVSHVALRDSGFFHLLPRVAFLKASADEAVFIDVEEVRKLCCVVVTHGKDGCEVFCPNGAFKVAPFVADQVDPTGAGDCFLGGFAAGIVRGLAVPDAALLGNFFGSIAVAQLGPPKLDFNLIQIVKDEMHKRKLQGIPFLERRDESPGFRKPPEQDQFYASLVTAKAIIMCQIQESGRNLLSSPKVLEQNNAKTILSLTSVHEEPIPSVDGKP

SEQ ID NO: 9070 - protein, 339 aa, Glycine max
  Clone ID: GLYMA-23APR03-C3667_1.p
MGRVMCVGFPLVALVVVSMCYGLADAEVKTPNLRWHYYKVTNRCHDAEEYVRHQVNLFWKNDRSITAKLLRLVYADCFVTGCDASILLDEGANPEKKAAQNRGLGGFAVIDKIKAVLESRCPGTVSCADILHLATRDAVKLAGGAGYPVLTGRKDGMKSDAASVDLPSPSVSLQKVLEYFKSRNLNELDMTTLLGAHTMGRTHCSFIVDRLYNYNGSGKPDPSMSVTSLESLRKLCPPRKKGQADPLVHLNPESGSSYNFTESYYRRVLSHEAVLGVDQQLLYSDDTKQISEEFAVGFEDFRKSFATSMYKMGNYRVLTGNQGEIRRYCRYTNKGNPNK

SEQ ID NO: 9071 - protein, 557 aa, Glycine max
  Clone ID: GLYMA-23APR03-C3686_24.p
MEKKENGPSEKASNGGIDGPTNPMVTPLLNDLYQFTMAYAYWKAGKQQERAVFDLYFRKNPFGGEYTVFAGLEECIRFIANFKLTEEEIDFVRQCLSSSCEDGFLDYLRGLDCSDVEVYAIPEGTVVFPKVPLMRVEGPVAVVQLLETPFVNLINYASLVSTNAARHRNVAGKSKTLLEFGLRRAQGPDGGVGASKYCYIGGFDATSNVAAGKLFGIPLRGTHSHAFVSSYMSLDEITDRSLNRKDGSSTCDDFVSLVQTWLNKIQLSNGVFGETNQSELAAFTSYALAFPDGFLALVDTYDVMRSGIPNFCAVALALSDLGYKAVGIRLDSGDLAYLSCEVRKFFYSIENEFGVPGFGKLQITASNDLNEETLDALNKQGHEVDAFGIGTYLVTCYAQAALGVVFKLVEINNQPRIKLSEDVSKVSIPCKKCCYRLYGKEGYPLVDIMTGENEPSPKVGERILCRHPFQESKRAYVVPQRVEELLRCYWSGSTDIKKDTLPALRDIRERCINQLEQMRPDHMRRLNPTPYKVSVSAKLYDFIHFLWLNEAPVGELQ

SEQ ID NO: 9072 - protein, 162 aa, Glycine max
  Clone ID: GLYMA-23APR03-C36875_1.p
MAIRINSLTLSSALPKMELRGGISGLWVGSQMMPQMRKEARGRRVWRRRKLIKKDEYMHPKMERIPFMEEQVRMVREQGKLLTMDIERLMLSEDNRFDFVNEIAAEANSYVENNRDEYGGEKKAILHVLSNRMNDTGIYRPEAYYEPDPFKPGPHYLREEFT

SEQ ID NO: 9073 - protein, 183 aa, Glycine max
  unsure (1)..(183): unsure at all Xaa locations
  Clone ID: GLYMA-23APR03-C36985_2.p
MPELQSKPETALAPAPVAAEVPSNDAVAKKASETEESKATVVASEKTPVPENKQSSRGSIDRDIALAEVEKEKKLSYVKAWEESEKAKAENRAQKQLSAIAAWENSKKATLEAELKKIEEQLEKKKAEHGERMKNKVALVHKEAGEKRAMIEANRCEEVLKTEEVAAKYRATGNXPKKTIGCF

SEQ ID NO: 9074 - protein, 181 aa, Glycine max
  Clone ID: GLYMA-23APR03-C3703_3.p
MGLSFTKLFSRLFAKKEMRILMVGLDAAGKTTILYKLKLGEIVTTIPTIGFNVETVEYKNISFTVWDVGGQDKIRPLWRHYFQNTQGLIFVVDSNDRDRVVEARDELHRMLNEDELRDAVLLVFANKQDLPNAMNAAEITDKLGLHSLRQRHWYIQSTCATSGEGLYEGLDWLSNNIASKA

SEQ ID NO: 9075 - protein, 312 aa, Glycine max
  Clone ID: GLYMA-23APR03-C371820_1.p
MMMMNNTIIPWSTIGVVIAWYTSNIGVLLLNKYLLSNYGFRFPVFLTTCHMLVCSLFSYVIVSVTEAVPLQRVRSRSQFWRIVALGVVFCFSVVCGNVSLRYIPVSFNQAIGATTPFFTAVFAYAVSAKREAWVTYATLLPVVAGVVIASGGEPSFHLFGFIICVSSTGARAFKSVLQDILLSSEGEKLNSMNLLLYMAPIAVMVLLPTILLMEGNVIQITMDLARKDIRIFWYLLLSSSLAYFVNLTNFLVTKHTSALTLQVLGNAKGAVAVVVSILIFKNPISMIGMLGYALTIIGVILYSETKKRYSKN

SEQ ID NO: 9076 - protein, 583 aa, Glycine max
  Clone ID: GLYMA-23APR03-C37261_1.p
QLSYVGPPPPKFYLHKFPLLSKSNRLQKLVSKANEENSDDIYLDDFPGGPKTFEICAKFCYGMTVTLNAYNVVAARCAAEFLEMTEDVDRGNLVSKIEVFLNSSIFRRWKDSIIVLQTSKSLLPWSEDLKIVGRCIDSIASKTSVDPAYITWSYTCNRKLTEPDKIVEDKMTFLEKIESVPKDWWVEDICELDIDLYKRVMVAVRSKGRMDGVVIGEALKTYALRWIPDSVDTLVSDANTSRTKSVVETIVCLLPYDNGISCSCSFLLKLLRVAILVGVNESSREELMKSISLKLHEACVKDLLIPARSPQTTTYDVHLVQGILNHHMNHEKGICGMEVAEEKHGGEDKYTLARRSLLNVGKLVDGYLGEIAHDPNLGLSSFVDLSQSIPDFARPDHDGLYRAIDIYLKQHLNLTKAERKKLCGLMDVRKLTAGASVHAAQNERLPLRLVVQVLFFDQVRSSISFRTPGSNSTRDPLCSPLYRDEGCVTTAGDSCQPLKNQMSHLRIKDEELGKKNRKNSKSGIQLLPSRSWRIFDKLWSMRKRHGENRSSETSGSCSSPTSIGQGDTKSYGLSLRHHRHSIS

SEQ ID NO: 9077 - protein, 128 aa, Glycine max
  Clone ID: GLYMA-23APR03-C37346_2.p
CSPQVDYSCTPEEVQQHFQSCGTVNRVTIRTDKFGQPKGYAYVEFLEVEAVQEALLLNESELHGRQLKVTAKRTNIPGMKQYRPRRTINPYMGGFRGRTPYAPPFIYSPYGYGKVPRFRMAMRYSPYY

SEQ ID NO: 9078 - protein, 167 aa, Glycine max
  unsure (1)..(167): unsure at all Xaa locations
  Clone ID: GLYMA-23APR03-C3761_22.p
MKNAKGKRAARASKESLKPVDDRKVGKRKASGKPGRSSAPKKEKKAKKDPNKPKRPPSAFFVFXLEEFRKTFKAENPNVKAVSVVGKAGGEKWKSLSSAEKAPYEAKAAKRKAEYEKLIKAYDKKQASSADDEESDKSKXEVNDEDDASGEEEEEDDEEEEDDEDDD

SEQ ID NO: 9079 - protein, 186 aa, Glycine max
  unsure (1)..(186): unsure at all Xaa locations
  Clone ID: GLYMA-23APR03-C3764_7.p
CSKLGLTKSIGVSNFGXKKLSELLQNATITPALNXIEMNVAWQQGNLRKFCQEKGIHVSAWSPLGANGASWGSLAVIDSPVLKDIAIATGKSVAQIALRWIFEQGVTPVVKSFNKVRMNENLPIFDWNLSXADLEKIKQIPQFRAVLARAPPPEDGPFKSLEDLWDGEGVISDGYMICLNAKNRLK

SEQ ID NO: 9080 - protein, 114 aa, Glycine max
  Clone ID: GLYMA-23APR03-C37675_3.p
MDGDIFGELGNSTQVDSRLLQVFQKSLLQAQDILNQNRLLINEINQNHESKMPDNLSRNVGLIRELNSNIRRVVDLYADLSNSFTKSREASSEGDSSGTLKSDGKVNQKRIRSS

SEQ ID NO: 9081 - protein, 95 aa, Glycine max
  Clone ID: GLYMA-23APR03-C3779_3.p
RIKRKAMKTASGLSGVQSVSVDINDKKMTLLGDVDPVSAVSKLRKWCHTEIVSVGPAKEEKEKEKVEPAKEPVPLKLYDAYPFYYHMTPPLYLYS

SEQ ID NO: 9082 - protein, 320 aa, Glycine max
  Clone ID: GLYMA-23APR03-C378154_1.p
MTKLKELIGIMKDKASQGKAAILSKRATLSLLRATSHDSYAPPTCDHISMLLSSGDGSRATSSAAVHLLTHRLQTTQSSAVALKCLIVVHHVIKRGSFIMRDQLPYSGGGRNYLNLSKFRDKSNPVCWELSSWVRWYAKHVEQLLWASRIVGFLPTEKERVSGLTNGELLRETEALLTVLEGIGNIPDAASMEENKLVSEIATLVEEDGVATLSEVFVRVNEFRERLAMGCLGFGEVVELVYVLNRLDRCKEILVMVVITEKQRLWDLVRELKVKVEKMEVYREEGKRTLTTHRATKSDRFALTFVNSVDLGRFPSARFL

SEQ ID NO: 9083 - protein, 140 aa, Glycine max
  Clone ID: GLYMA-23APR03-C378503_1.p
MSKVRLLNFSHGLILSTLFIHYSLADVGTAAQYGPPFLPTTCFGRDASQFPSSNMFAAAGEGIWDNGAACGRQYQVRCISAAAPRTCVPGQTIQIKIVDRAQSSVSRPSLGGTSMVLSVTAFQAIANVSASFINIEFQQV

SEQ ID NO: 9084 - protein, 340 aa, Glycine max
  unsure (1)..(340): unsure at all Xaa locations
  Clone ID: GLYMA-23APR03-C3786_3.p
MRRGAKRKTKQDQEAKHVAAEDNKTEAQPRAKRAKTSKPQSEPEYFEDKRNLEDXWKETFPVGTEWDQLDTVYQYKWDFSNLENAFEEDGVLYGKKVYLFGCTEPQLVMFKGESKVVLIPAVVAVVSPFPPSDKIGINSVQREAEEIVPMKQMKMDWVPYIPLEDRDSQVDRLKSQIFILSCTQRRSALKHLKLDRLKKYEYCLPYFYQPFKEDELEQSTEVQIIYPAEPKPVFCEFDWELDELEEFTDKLTEEEELSEDQKDAFKEFVKGKVREAKKANREAREARKKAIEEMSEETKAAFESMRFYKFYPVQSPDAPDVSNVKSPFINRYYGKAHEVL

SEQ ID NO: 9085 - protein, 181 aa, Glycine max
  Clone ID: GLYMA-23APR03-C379_8.p
MNVKGIMDGKIEAGNTNCIVKEDVNDDSISIGSVSEDSMNSVCSSSSSELAEDASSSSASYLSTSSSHSNGPLFELSELMSQLPIKRGLSMFYQGKAQSFSSLASVESIGDLPKKKERFYRKKMKSCKSFAGGLDSSHRISFAPKATISKKSSRATFVSVLTKRGSFLGGSRTSFSVQKNF

SEQ ID NO: 9086 - protein, 338 aa, Glycine max
  Clone ID: GLYMA-23APR03-C380441_1.p
YQIKLIQRERHKKMASGRNLKNAVIAFLVPLPSIFFYLSFLNHYDSAKSPSFWSTLWSWCYHHPLLLANALFFLNVNVLFWLIGLIQSSHWMIDPYWTVIPVMLVHYYATHPLAPYDLWRSKIVILLTWVWSVRLTHNYFRRERWQWGAREDWRFTEMSQQYGKQWWWVSFFAVYVSQQMFLIALSLPLYAVHTVNQPLNMWDLVATVVCLCGIVIAYFADTQLYEFVSRNNKLKGLGKPVVSVLDSGLWYYCRHPNYFGEQLWWWGLVVFAWSLGVGWTFIGAFVNTMCLAYVTRLVEDRMLKQESRAEAFRVYQNTTSVWIPWFKSSPSGVKNKNA

SEQ ID NO: 9087 - protein, 144 aa, Glycine max
  Clone ID: GLYMA-23APR03-C38152_1.p
MKKRPELQQHQDFEVLKAVAQAWYSHSGTCKPMSEFEAHRRNFRGKPSRFKLEALNKPQASSSSSRDTSTYWDFQQSLWDSYELVTVSRRIETGLTLDNPFDELCGSPPIQQKRKPESKNSLRNLFNLMSSRRFNAPKNIPHQK

SEQ ID NO: 9088 - protein, 93 aa, Glycine max
  Clone ID: GLYMA-23APR03-C3815_2.p
LCWLFAPSCMVLLLNLYVCGVSVSILLVLFVKSGYLLMLFYHLNSFASSCIVLEELNICMGIITCFGASFVHFFSPVFHHPFGPNRLLFVCFF

SEQ ID NO: 9089 - protein, 239 aa, Glycine max
  Clone ID: GLYMA-23APR03-C3820_1.p
LFASDILHIFSFLPRDLNFIEHTSNIGWKEHQRARPIIIDPGLYHSKKSGVYWAKEKRSVPSSFKLFTGSAWVVLTKSFLEFCVWGWDNLPRTLLMYYTNFLSSPEGYFHTVICNHKDYQNTTINHDLRYIRWDNPPKQHPVFLKLEHFDDMVHSGAPFARKFTKDDPVLNKIDKELLRRSDGHFTPGGWCIGNPLLGKDPCAVYGNPIVVKPTLQSKKLEKLIVKLLDSENFRPKQCK

SEQ ID NO: 9090 - protein, 158 aa, Glycine max
  Clone ID: GLYMA-23APR03-C3827_2.p
ASTMASSSSESAVSERRGIPGAQFVEDVQTYLTQSGLDVGSALAFLQERLQQYKVVEMKLLAQQRDLQAKIPDIEKCLDVVATLKAKKGTGEELIADFEVSEGIYSRARIEETNSVCLWLGANVMLEYSLEEVTIARVYNWDVHQRRVQQAVATTAQD

SEQ ID NO: 9091 - protein, 329 aa, Glycine max
  Clone ID: GLYMA-23APR03-C38296_3.p
MELALSLGDTSKSFTFLDKAAVNLPTNKDPPGLFSLAPSFAATAAAADKRSDAAERRGFSSDPPVQLDLLPFSPVLRPQQQPPSQLRIPWLTEACGAARVLDVNLFRAATAEDGDDGTSLSSSPNSAVSPFQMDFCTRNCNAEFGGRNKREQQEAEGRASDDDENGSTRKKLRLSKEQSAFLEESFKEHTTLNPKQKLALAKQLNLRPRQVEVWFQNRRARTKLKQTEVDCEYLKRCCETLTEENRRLQKELQELRALKTSQPFYMQLPATTLTMCPSCERVATNSTTTNQTTTVNNNASQIPVELSLSKPRILPFPNGQAQAHQIASS

SEQ ID NO: 9092 - protein, 141 aa, Glycine max
  Clone ID: GLYMA-23APR03-C3838_6.p
ASSHSKFHFETSPASTLDTFFLSLSLSLSLNHSLLCEIEKKTVSFERNATLNDIFQQRFTKTPTLVNGFSNLYAMEVDPTVEHEDMGGADGMDSLFSELAGAIPRIDEAMSFAEMLKAIAMEGTENRVSLLTIHSNQDTAF

SEQ ID NO: 9093 - protein, 282 aa, Glycine max
  unsure (1)..(282): unsure at all Xaa locations
  Clone ID: GLYMA-23APR03-C384300_1.p
MSQQTLTILLFTLLSLTSSPATCLYSSPSPPTAPFSESTPHTDPEPRAEEWLPAHATHYAATDAVGGACGYGDLLNGGYGMATAALSEALFGRGQICGACFEVRCREEDSDFDRRWCISGTTVAVTATNFCAPNYGSDAESVAGHCNPPKQHLVLPIEAFEKIAIWKTGTGNMPVEYRRIKCAREGGIRFTITGSGIFIXSVLISNVAGIGDIXAVKVKGSRTGWLPMGRNWGQNWHINALLQNQPLSFEVTSSDGITLTSYNVAPKDWSFGQSFEGKQFES

SEQ ID NO: 9094 - protein, 339 aa, Glycine max
  Clone ID: GLYMA-23APR03-C384574_1.p
NWNVDGILIPSSSSSSSKNRFSVTFLKMDEDSLKRYTDCVYFLASPLTCKKGAECEYRHNEIARLNPRDCWYWLSGQCLNPTCAFRHPPLDGHTGAPVPSEPTQTSLPANKTLVPCYFFFNGFCNKGDRCSFLHGPDDSIFNIKPVKNENGSTDALNLENKAPSGNRTGVTSTPTDRSVAAPKNLSDLKHQPKEDHQLELPKNVKQQGDYLELSASEYKEAAVSRSDSSIPDDGFVHNVPHLCTGQSSEEQVNSHIEPEEWWESSPHSPGFDVLVHDEVENLGYEEDSEYLPVVDRDEQELNDQYFRYEFIDPVEYDTICPEADILYEQETYDGYRCLE

SEQ ID NO: 9095 - protein, 94 aa, Glycine max
  Clone ID: GLYMA-23APR03-C3846_2.p
MASGGKVSFKVTLTSDPKLPFKVFSVPEAAPFTAVLKFAAEEFKVPPQTSAIITNDGVGINPQQSAGNVFLKHGSELRLIPRDRVGAYEMFRDI

SEQ ID NO: 9096 - protein, 198 aa, Glycine max
  Clone ID: GLYMA-23APR03-C38518_1.p
VMPPLWCRIDRLWYPHPGILEGSMTRQPFLCPLDHVFEVNVMLKKLPEEEFGPQIDFREYSILDNPSLPSEVKKSWLDVQLCKDGTQDCDASASNDTNVGGGVLKFPKHSNEETFMKVFSSFKDVKVIKFSSVQEAFTGFTDKEREDKFRNRVKRYVGIWCCVPDHTPGHIYYDMYWDEKPGWKAVPPQTSEDDHPPY

SEQ ID NO: 9097 - protein, 278 aa, Glycine max
  Clone ID: GLYMA-23APR03-C388_2.p
MEDRAHAALPPGYRFYPSEEVLVGYYLTKKNENREEGFYGSDLIRELDLYDHDPFELPDAACFSYGYKGRKKHWFCYAKETKRRNRKRKVKSGFWLRKGRVRDICDNRDDVVLATMTRFVFYVGNSLKNAARTDWILYEYALVDRVLASFVLCRVVSKPPHQNSPSEIGLSCCAEESVGVAVRQVGVQCDGCAESDVVEAKVCDDGFVNRENEIAENPIRCGGEHGDPAAPVSVAPGSQPERLSGLPSGSALFVEAMTSQQLMLSIQEEDFIELNDIA

SEQ ID NO: 9098 - protein, 259 aa, Glycine max
  Clone ID: GLYMA-23APR03-C3903_16.p
MSKVVCVTGASGAIGSWVVLLLLQRGYTVHATVQDIKDENETKHLEEMEGAKSHLHFFEMDLLDIDSIAAAIKGCSGVIHLACPNIIGQVEDPELYYPIAKTLAEKAGWDFAKETGFDVVMINPGTALGPLLPPRINSSMAVLVSVLKGGKETYEDFFMGTAHFKDIALAHILALENKKAAGRHLCVESIRHFSDLVDKVAELYPEYDVAKLPKDTQPGLLRASGKDASKKLIDLGLEFTPVEQIIKDAVESLKSRGYV

SEQ ID NO: 9099 - protein, 133 aa, Glycine max
  Clone ID: GLYMA-23APR03-C39223_2.p
QVNAESLGRLNELEEMRQKLESKKMLMENMSICSRLAKEEASKQEEQLSGAVQSLLVSGGALSVTSRNLQESSRLLSEENGYVHLRKLQKMLRKRQQYMTSQISMLYPVKILVGPAQEQELEAYPLGSLAGND

SEQ ID NO: 9100 - protein, 237 aa, Glycine max
  Clone ID: GLYMA-23APR03-C3947_2.p
MEQGRRRRSSFGPMSSTIPCLLLLLFCLSGSAEAYKNYTVGDSLGWFDNTEKSNVNYQKWADSKEFSLGDFLIFNTDTNHSVVQTYNFTTYKECDYDDAQDKDTTQWSAADPSNTQTHPVTVSVPLVKEGMTYFFSGDYDGDQCKSGQHFKINVTYGQGLPKSLKSPEDAPSPASPVAGDDESAPDTIVPSNFSHPKEESDDDKASDSDKQKSSSSISISMYAQLHIVLLGILLFLF

SEQ ID NO: 9101 - protein, 172 aa, Glycine max
  unsure (1)..(172): unsure at all Xaa locations
  Clone ID: GLYMA-23APR03-C40031_1.p
MALEAVVFPQDPFTYGCNNKDFLYSLVGGDGGGGGGSHEYGFQASSEDKPHVGIIINNNNIDHTLHANWDSSSPSVLQSVKEQWDSHSSPEACTVDQSLPRAFPLPPSSSSPEAAATGRRKRRRTKSAKNKEEIENQRMTHIAVERNRRKQMNEYLAVLRSLMPXXYVQRGD

SEQ ID NO: 9102 - protein, 404 aa, Glycine max
  unsure (1)..(404): unsure at all Xaa locations
  Clone ID: GLYMA-23APR03-C4005_3.p
MVANQFFKTQCHYVFEGVFLIFLGISKTSPSSVPSNLSILSYSEASDFSNLPTPRSEGEILSSPNLKAFTFNELKNATRNFRPDSLLGEGGFGYVYKGWIDEHTFTASKPGSGMVVAVKKLKPEGLQGHKEWLTEVDYLGQLHHQNLVKLIGYCADGENRLXVYEFMSKGSLXNHLFRRGPQPLSWSVRXKVAIGAARGLSFLHNAXSQVIYRDFKASNILLDAEFNAXLSDFGLAKAGPTGDRTHVSTQVMGTQGYAAPEYVATGRLTAKSDVYSFGVVLLELLSGRRAVDRSKAGVEQNLVEWAKPYLGDKRRLFRIMDTKLGGQYPQKGAYMAATLALKCLNREAKGRPPITEVLQTLEQIAASKTAGRNSQLEQKRVHAPVRKSSVQKGSHLNHTPTAFP

SEQ ID NO: 9103 - protein, 164 aa, Glycine max
  Clone ID: GLYMA-23APR03-C403318_1.p
MAEHNDPPQEPTLPSKRMSDPDLQDLPSKIPKLDLKETLPTANDNDLQNDDEDDDDNDDDEEEQEDNRKGKGIMRDDKGKGKMIVEEEDDDDDDSDEDSASDDDGSDFSNDSLTEVDLNNILPSRTRGRTVSSGVHIAGDSGNAAAAVAAGIDDEDSDSDDSDA

SEQ ID NO: 9104 - protein, 85 aa, Glycine max
  Clone ID: GLYMA-23APR03-C404163_1.p
SSRDFHGEDYLSRGCMEDANLNYAESNRVSILTVDKFSRRMVLQFLGFNHVICYASPALAAPIMPDIKEPEVIRFVCLLSNFIIT

SEQ ID NO: 9105 - protein, 275 aa, Glycine max
  unsure (1)..(275): unsure at all Xaa locations
  Clone ID: GLYMA-23APR03-C4044_2.p
IVQTSRHGKVAIPDGYIQLTENDEFAYQEMLIHLALCSIPNPKKGFCSFFLFLACTXLSYLMKKETFVXTLQVLLVGGGDGGILREISRHSSGEHIDICEIDKMVIHVYKKFFPDIAVGYEDPRMHVHIRDXXAFINSVPEGTYDVVILDAFPAMGHSADVLADKCFLESIAKALRPRGVLLWHTNSEVADTIANCKIFKGSVNYAWATVPAYXAIGFMLCSTEGPPVNFKHPINKLNPEKNGVAKGPPKFYNSEIHATAFFCGQGWLIQQDIHK

SEQ ID NO: 9106 - protein, 105 aa, Glycine max
  Clone ID: GLYMA-23APR03-C40491_3.p
MDHFAAHEEQLASQRMRQKLEEVNVAAQTNLAPVQDYVNYTLQERLNRSLMVCQDKYEAARLQKKNDAMNDLVSCADQSIQESIKTLPHLANKLKASFGISDNGS

SEQ ID NO: 9107 - protein, 156 aa, Glycine max
  unsure (1)..(156): unsure at all Xaa locations
  Clone ID: GLYMA-23APR03-C405_29.p
RCYSHLGFRPPPTVTRCSALPSLPPRVSKHQNHFVXPSLNNXSVSRKSSLLQTRASSEESSSVDAXEVFTDLKEKWDALENKSTVLLYGGGAIVAIWXSSILVSAINSVPLLPKIMELVGLGYTGWFVYRYLLFKSSRKELATDIESLKKKITGTE

SEQ ID NO: 9108 - protein, 176 aa, Glycine max
  Clone ID: GLYMA-23APR03-C405_35.p
MAAAAAVTVLLPPRIPTATNVTRCSALPSLPPRGTNTKTTLLLSSLNHFSVSRKSSLLQTRASSEESSSVDANEVFTDLKEKWDALENKSTVLFYGGGALVAFRRAGNEEKKAFKFLFLHQRIKLVGLNMKHIYSMKRLSHLHGCSLCYRNARPLACGASYGRSFKSKAQTRFTSG

SEQ ID NO: 9109 - protein, 126 aa, Glycine max
  unsure (1)..(126): unsure at all Xaa locations
  Clone ID: GLYMA-23APR03-C4064_2.p
QLRGVGPPFGPPGFSLFFFGFFFLGDFGGEKIFPREQLLPRFSPTWKLPPLKGKKKGGSPXGXXLXXFGVPRXAXKSFFFFFLIFFFFYXXNFFFFFFFXFFFXFFFFESPNTKSVIYTLYASIVD

SEQ ID NO: 9110 - protein, 469 aa, Glycine max
  Clone ID: GLYMA-23APR03-C4068_1.p
MTEVLHFSSSSSPATSSSDGILQEPPPPSSVSVVVDGFSTVTDCDARRVTVTDRTHQELSLLAILVTLLRKSLIACNKSDEGQGAMEIGWPTNVRHVAHVTFDRFNGFLGLPREFEPEVSTRPPSASATVFGVSTESMQLSYDTRGNSVPTILLLMQRHLYALGGLQAEGIFRINADNSQEEYVRDQLNRGLVPEDVDIHCLAGQIKAWFRELPTGVLDSLSPEHVMQCQTEEDCAELASQLPHTEASLLDWAINLMADVAQEEHLNKMNARNIAMVFAPNMTHMADPLTALMYAVQVMNFLKNLILRTLRERKDCVVESSPGFCLEPSDENGDSSLPESCQQDDDVAAENEEAGETFVSEKTELECSPESLQSKYSTEGGCGSLIGSPENLVCEEDLYCEFPSKGNIGKSKSVQSSNSSSKKGSQKTRGMLQPVIHATVAADKKGISNQPHRFEIRADRSLAVKEESL

SEQ ID NO: 9111 - protein, 440 aa, Glycine max
  Clone ID: GLYMA-23APR03-C4075_4.p
MAKMRPALPLLLLLLLFLFSPSAAEIKSLTINSDSRPMILLEKFGFTHKGHVSIAVSSVSVGVLSSSVQPESSRLGFFLLNEEALLQVLMEIQQNPSFCVLDSHYILLLFTFRDLSPPPFASFNRSYPVTSPNEYSLFFANCAPETSVTMSLHTEAYNLDADGSRDYLSAGQTLLPSLYFLFFLTYLSFFSFWLYICYTNKLSVHRIHLLMSLLLLMKALNLICAAEDKHYVKVTGTPHGWDVLFYIFQFFRVVLLFTVIVLVGTGWSFLKPFLQEREKKVLMIVIPLQVLANVASVVIGETGPFIKDWVTWNQVFLLVDIICCCAIIFPIVWSIRSLRETSKTDGKAARNLAKLTLFRQFYIVVIGYLYFTRIVVFALKTIAAYKYQWVSNLAEEAASLAFYVVMFYMFRPVERNEYFVLDEEEEEAAEIALRDEEFEL

SEQ ID NO: 9112 - protein, 377 aa, Glycine max
  Clone ID: GLYMA-23APR03-C407692_1.p
MASLSMLRFLFLATLFVITATSSTNDVKAIYWLEQPLFPPSAINTSLFTHVYYAFLAPNNVTYKLHVSNSTATNLAKFTTTLGSTVATLISIGGANSNATLFSLIAANSAARATFINSTITLARTFGFHGVDLDWEFPRTASEMKNLGLLFKKWRAAIAAEAAATGREPLLLTAAVYFSVDYFLSETSSLRYPVGSINENLDWVNVMSYDLNGPWSNHTGPPAGLFNPKSNASVGYGLGSWIRGGVIPKKVVMGLPLYGRTWQLRDRSVHGIGAPTIGPVPGSDGVMALFQVLQFNKETGAKVVYDRETASVYSYSGSYWIGYDDPISVAVKVGFAQAFSLRGYFFWAAGLDTSDWKISTQALNAWMLCIKETGRMN

SEQ ID NO: 9113 - protein, 139 aa, Glycine max
  Clone ID: GLYMA-23APR03-C409599_1.p
ADIYQAISIYYFTFHNLLGPLPKLLAAQTDKQIYIKLSLSINEDAAGCSNENDGYHDNIYAENRRKKQGAKVDEEESDDSMASDASSGPIHYHHAYAHSQGSHGTAASKKDKQDHGSKCSSKKNANKQEKKRVDSRSKK

SEQ ID NO: 9114 - protein, 200 aa, Glycine max
  unsure (1)..(200): unsure at all Xaa locations
  Clone ID: GLYMA-23APR03-C4099_2.p
MPENPLQALFHNIEQVSSFVQHHLSNFIGIHFQPSGPHSGSLLSISSSTKAPLAKTASSVQLGDTAVKGKSAAPVTKEELGRATTXLMTKFSFQYPDNPTRQQKKDVKELVQMLPRIYPCRECRDHFKEVLRANPVLTGSHAEFSQWLCHVHNVVNRSLAKPIFPCERVDARWGKLDCEQNACEIIGSTSIFGRIWQKST

SEQ ID NO: 9115 - protein, 136 aa, Glycine max; identical to SEQ ID NO: 7171
  Clone ID: GLYMA-23APR03-C40_21.p

SEQ ID NO: 9116 - protein, 160 aa, Glycine max
  Clone ID: GLYMA-23APR03-C4106_1.p
MADPQQQDNYMKRKPSNSNVLVLAALVPFGVSLLILVGLTLSATVISLTVVTPLFVIFSPVLLPAALFIALAVAGFLTSGVFGITSISSFAWLATNLRRSHSPEHPQRPRDDADRVAQKTDEAVRQAQETVHQAQKETATKAQKDISETRKAHKESVATS

SEQ ID NO: 9117 - protein, 190 aa, Glycine max
  Clone ID: GLYMA-23APR03-C411749_1.p
MFSPSHLKTLYPLQQAFSVKPSSTISSMKLKRIVHTLIVSHLCRIIRALSKVKDVMVEILKENSTTIHFPHKKHCNRRKKIILGSFRLHYNWCSSKSSHVLPVPEPIYATCRDDDDEDCPYLRWLEEKKVEGEGGGDSNNKGASATRNEHVEMNEIDVLAEMFIANCHEKFRLEKQESDRRFHEMLARSM

SEQ ID NO: 9118 - protein, 135 aa, Glycine max
  Clone ID: GLYMA-23APR03-C411_6.p
MAGRGKTLGSSAAKKATSRSSKAGLQFPVGRIARFLKAGKYAERVGAGAPVYLAAVLEYLAAEVLELAGNAARDNKKTRIVPRHIQLAVRNDEELSKLLGDVTIANGGVMPNIHNLLLPKKAGGSSKAAAADDDS

SEQ ID NO: 9119 - protein, 212 aa, Glycine max
  Clone ID: GLYMA-23APR03-C4134_2.p
MNIFTKKPTAKEALRDSKRQMTNATRGIEKEIGALQLEEKKLVAEIKRTAKTGNEAATKILARQLIRLRQQIANLQGSRAQMRGIATHTQAMHAHSSVAVGLKGATKAMVAMNKQMEPAKQAKIIQDFQKQSAQMDMTTEMMSDAIDDALDNDEAKEETEELTNQVLDEIGVDVASQLSAAPKGRVATKNAENVSSSGIDELEKRLAALRNP

SEQ ID NO: 9120 - protein, 366 aa, Glycine max
  Clone ID: GLYMA-23APR03-C4154_2.p
MGTSDTHLFLSLMQIFILCFICFIAKVEASNKKLSGFYVFGDSTVDPGNNNYIKTPFRSNFPPYGRDFPNQVPTGRFTNGRLATDYIASHVGLKKDVLPPYLDPNLRIEELMTGVSFASAGSGFDPLTPSMTNVIPIEKQLEYFRECRKRMEDALGKRRIENHVKNAAFFISAGTNDFVLNYFALPVRRKSHSILAYQQFLIQHVKQFIQDLLVEGARKIAITGVPPMGCLPLMITLNSPNAFFQRGCIDKYSSIARDYNLLLQHELHGMQLQLNMSTPDAKIYYVDTYKPIADMIQARKRFGFDEVDSGCCGSGYIEASILCNKLSNVCLDPSKYVFWDSIHPTEKTYHNIFLAGLSTIDFIANN

SEQ ID NO: 9121 - protein, 101 aa, Glycine max
  unsure (1)..(101): unsure at all Xaa locations
  Clone ID: GLYMA-23APR03-C41736_1.p
GILLMSSDNFNQSSDRIKESRKTMLETEDLGEFILRDLHQQRESLLHAHKTIHGVDDNISKSXKILSAMSRRMSRNQWIVSSLMTALVLAILIILYFKLTH

SEQ ID NO: 9122 - protein, 258 aa, Glycine max
  Clone ID: GLYMA-23APR03-C418783_1.p
MSSTIATDSHGLSDSWTIGERVCAALMPLIAVVEVLILTVTGCFSYCPCISIIDQNHKCTYTAKDFAILADETRFTVEEVEALHVLFKRLSSSLIDDDSIHKEELQLALFQTPYGKNLFLDRVFDVFDQKRNGVIEFDEFVHALSVFHPYAPMDEKIDFAFKLYDLRQTGFIEPEEVKLMVVAILIEFDMNLPDDLLEAIVHKTIADADKDNDGKISREDWKAFVSRNPSLLINMTLPYLKDITSVLSSFVFKTEAKP

SEQ ID NO: 9123 - protein, 239 aa, Glycine max
  Clone ID: GLYMA-23APR03-C4196_1.p
MDTRSPVNAVHDNIISKLEVTFSESLHIHDAQNSEHASEGDHIGNCDVGERNLREGVGLRVTTLGFKCGGACSTFPGPETMLPSSASDEGAPAPSPSLRAPRLFYSCSVSLPAPRKLVSAMKGSREKERGSQMKLTVKWAPDVYDPVPTLLSHTVKNKKQQKPRIKKSEKKNGKKGQKVSYSKRGSSKDKQYRNRWFYSHDEVFEASSDNAANHDSYCGTSYYLETSLTKVHWSIGEAL

SEQ ID NO: 9124 - protein, 229 aa, Glycine max
  Clone ID: GLYMA-23APR03-C4197_5.p
MQIFVKTLTGKTITLEVESSDTIDNVKAKIQDKEGIPPDQQRLIFAGKQLEDGRTLADYNIQKESTLHLVLRLRGGMQIFVKTLTGKTITLEVESSDTIDNVKAKIQDKEGIPPDQQRLIFAGKQLEDGRTLADYNIQKESTLHLVLRLRGGMQIFVKTLTGKTITLEVESSDTIDNVKAKIQDKEGIPPDQQRLIFAGKQLEDGRTLADYNIQKESTLHLVLRLRGGF

SEQ ID NO: 9125 - protein, 431 aa, Glycine max
  unsure (1)..(431): unsure at all Xaa locations
  Clone ID: GLYMA-23APR03-C419_44.p
MLRSLTTSMGIVSVAPTQTVVYLVPRYPPSISTYLYASSLTKAKTIHQPTQSYVHSKSVETAIESTSQLVPFPLLTNGNYTACTIPWRFPSDDPSIPTPTELSWINLLLNTIPTFNSDLXRKHAENDTSVPDAAXKAENFAQRYARILEDFKKDPASQGRPLDNXLFLCRLREQXVLREQGFRDIFKKIKDVENANAISLFQNVVHLNDAIEDEGKRLENLVRGIFAGNIFDLGATQLAEVFSRDGVSFSTTCQNLVPRPWIIDDLETFRIAWSKKSWKKVIIFVDNSGADVILGILPFARELLRRGSQVILAANDLPSINDVTYSDLIEIIPKLKDEEGRLTGVSTSNLLIANSGNDLPVIDLTRVSQELAYLANDVDLVILEGMGRGIETNLYAQFKCDSLKIGMVKHPEVAEFLGSRLYDCVIKYDEV

SEQ ID NO: 9126 - protein, 263 aa, Glycine max
  Clone ID: GLYMA-23APR03-C4221_14.p
STIGVSLFSVTLKPCLRVPLLTQPPTPAPTNKFPPSTTQSSRRKLTPRFPPFPFFFLLYFISYSLPRSFFSQEDDAPIVEDVKDDDKEETEDEDEDDDDDDKEDDAQGGAEGGKQSRSEKKSRKAMLKLGLKPVTGVSRVTIKRTKNILFFISKPDVFKSPNSETYIIFGEAKIEDLSSQLQTQAAQQFRMPDVGSVLAKQDQDAAAAAAQPEEEEEEVDETGVEPHDIDLVMTQAGVSRSKAVKALKTHNGDIVGAIMELTT

SEQ ID NO: 9127 - protein, 449 aa, Glycine max
  Clone ID: GLYMA-23APR03-C4223_1.p
AQIRKDFFFFINYCLFQYKTGIVANNGTGEVSVDQYHRYKEDIDLMASLNFDAYRFSISWSRIFPNGTGQVNWKGVAYYNRLINYLLEKGITPYANLYHYDLPLALEERYNGLLSRQVVKDFADYAEFCFKTFGDRNWMTFNEPRVVAALGYDNGFFAPGRCSKEYGNCTAGNSGTEPYIVAHNLILSHAAAVQRYRAKYQEKQKGRIGILLDFVWYEPLTRSKADNFAAQRARDFHIGWFIHPLVYGEYPKTIQNIVGNRLPKFTSEEVKIVKGSIDFVGINQYTTFFIYDPHQSKPKVPGYQMDWNAGFAYAKNGVPIGPRANSYWLYNVPWGMYKSLMYIKERYGNPTVILSENGMDDPGNVTLPKGLHDTTRINYYKGYLTQLKKAVDDGANVVGYFAWSLLDNFEWRLGYTSRFGIVYVDFKTLKRYPKMSAYWFKQLITKKKY

SEQ ID NO: 9128 - protein, 132 aa, Glycine max
  Clone ID: GLYMA-23APR03-C4239_3.p
MGRLFVVNLEGKIYSCKHCHTHLALYDDIYSRTFHCRHGKAYLFNNVVNVSVGEMEDRPMMTGLHTVADIFCVGCGSIVGWRYETAHEKSQKYKEGKSVLERYKVSGPDGNNNNNYWVSHEAHVGGSDADDA

SEQ ID NO: 9129 - protein, 619 aa, Glycine max
  unsure (1)..(619): unsure at all Xaa locations
  Clone ID: GLYMA-23APR03-C42424_1.p
MNKSSDAAASPYCRGRSKKPNLRSSKSQPPSHVEFSSKTPEKPPQRIRNRGVALSVADIRKAACKRLQDQKQCTETTSSSLSSSSSLSKSVRRQISLGPSSPSKPMATEDESSNLPEKYEILDEFFNRLDTLVSLHRLKRWTPTFTSISSRIESLTDRRFTHSHLAQLKFILRKAIVLRKHLVLDERTSCMKPDIHISLDPDAVEADAAKLPPQGGRVSLKKVFRARLKEFWESHPEGDEIPEGTLPEPFNRQKKDSVVDMLETPLPTKLPPCMRYSDIVNNADLDEKLYVPVNATVEFPNEHLAAPSHMAPSFRADDVQQNPLLDSLQPLAFPVSESSQKENPPLVDTESHLKTSPAKFSSEASSSESCLTICASLESSSPHPATPSKTIEYTEKKDGSLKSIDAMSTPTSRTNKYTENKDGSLESIDATSTPAKLVSTPIRLMSATPALRSPKRRYMSPDDHSISSLNKLARHPSRSRSLKFDTPVKNKDDISDTLQEEFIQSIREKERLAMEERDPAITQAKKKKKNIASLPKLFDMIRGLLRQRNCITKAELVSKIISSRCDIADRSXVEEQLNLLQELAPEWISEKQVSSGDLLLFINKMLSPETVRASLEEAT

SEQ ID NO: 9130 - protein, 52 aa, Glycine max
  Clone ID: GLYMA-23APR03-C42561_2.p
MFKMKSLFLFYTYYWIVLIYSIQYVLAQIDNCIQYGEDADVKVKDFDPEDDE

SEQ ID NO: 9131 - protein, 164 aa, Glycine max
  Clone ID: GLYMA-23APR03-C4257_3.p
NRHDLHCASCPPYLQPPNHRGNLQCRRRCHRGSNEQPGLRRSSPSAVLSWILFGAPTMPSPSDAPPLRRSVWLLRIRLASVFRNDVEGLYEKLLAGESSITPIDRFDASKFRTCFGSQIRGFSAEGYMDDKNDRRFNDCLHYCIVAGKKALENADLAPNKHSKD

SEQ ID NO: 9132 - protein, 225 aa, Glycine max
  Clone ID: GLYMA-23APR03-C426_2.p
MGQDQNQRSLIYAFVSRGTVILAEYTEFSGNFNTIAFQCLQKLPASNNKFTYNCDGHTFNYLVDNEFTYCVVADESIGRQLPMAFLERVKDEFVSKYGGGKAATAPANSLNKEFGPKLREHMQYCVDHPEEISKLAKVKAQVSEVKGVMMENIEKVLDRGDKIELLVDKTENLHNQAQDFRTSGTRIRRKMWLQNMKIKLIVLGILIALILIIVLSVCRGFNCGK

SEQ ID NO: 9133 - protein, 194 aa, Glycine max
  Clone ID: GLYMA-23APR03-C42953_2.p
MFSWLTWSSSPHKCTYIFCTFHVAGGMNGSIVYELERPENAGLKKSVKVLQKAKTQIDAIQPVSWADMIAVAGAEAVEVCGGPPIQVSLGRLDTLVPDPEGRLPEESLNASGLKKCFQSKGFSTQELVALSGAHTIGSKGFGSPISFDNSYYKVLLEKPWTSSGGMPSMIGLPSDHALVEDDECLRWIKKYADS

SEQ ID NO: 9134 - protein, 314 aa, Glycine max
  Clone ID: GLYMA-23APR03-C432926_1.p
MGSAFGLILMIFSWVLFTFPGSDAQDGVKSAHVLDLIIRDHTFKALDKNFKTAIPQSVDLPSNLSGIGVDAVRFRCGSLRRYGAHLKEFHLGTGVTVHPCIERVMLIRQNMGYNWSSIYYANYDLSGYQLVSPIVGLLAYNADEDANSSNPFQLGIVAGEKPMTIDFTNATRMNQEGGIKPLCASFEGDGRMTLAKAPNPSRPLVCVAKRHGHFGLVVEYSPPDQFRNKPLSRWKVAVGSTIGAALGAFLLGLLLVAMLVRVKKRSRMVEMERRAYEEEALQVSMVGHVRAPTALGTRTTPIIEHEYMPHHHPR

SEQ ID NO: 9135 - protein, 250 aa, Glycine max
  Clone ID: GLYMA-23APR03-C433421_1.p
MASGDTDSFSDKVEEKFHDHNSDSDSYSDSDDDHNNRPPPKTTVSNNVYRLFGRDQPVHKVLGGGKPADILLWRNRRSTGVVLGAGTAFWIFFELMQYHLITFICHLLIVSLAALFLWSNASVFIHKSSLHIPHVALPEECVHQVASALTIEINRAFVIVREIGTGRDLKKFLSVIAVLWVISVIGSWFNFMTLFYLFFVSLFTLPLLYEKYEDQVDALGEKAMIEIKKQYAVFDAKVLSQIPIAGFKKD

SEQ ID NO: 9136 - protein, 400 aa, Glycine max
  Clone ID: GLYMA-23APR03-C434_4.p
MDDDIVGLGFRPTEQELVDFYLKHMLLGDDPRVHVIPVIDLCDVEPWNVPVILASSSAIRFGDPDWFFFSPVDFKYLKSKRFNRTTKCGFWKATGKDRDIRTGDTDNTVIGTKKTLVYYQGRVSCGVKSNWVIHEYHAVTFHENQRTFVLCCLMKKPGKTTEGGTDPLICDEGEPSRSMVSDYENQPTAEGIASEGTFTGIEAIFQATPWAENCFSPIQQSPTLIEQEGASFPNYAFNNAYFRNEDNIMQTPFETTKEDEFLNLILADESIVINEENKHDFVNSSTQSESLKRVYCESSDTDAEVISKLDDNIVDISTACNDYPNSDEYYSSKRFKSSHDAVHGGICFLPSNLEANQEKNESMFQDSFWGAETSSCDSTLDKPLEINYIDISSSPFTPWR

SEQ ID NO: 9137 - protein, 405 aa, Glycine max
  Clone ID: GLYMA-23APR03-C434_5.p
MDDDIVGLGFRPTEEELVDFYLKHMLLGNDPRAHVIPVIDLCDVEPWDVPVMLAKSSSTIRFGDPDWFFFSPVDFKYSRSKRFNRTTKCGFWKPTGVDREVRTFETNTLIGTKKTLVFYKGRVSRGVKSIWVIHEYHAVTFHESQRTFVLCRLMKKPGKTTEGGTDALICDEGEPSRHMISVYGNQEKAEGIPSGSTCIGMETILQATPQAEKYFSPIHQSQTGIEEEASFSSYPFNNAYFRNENNPMQTSFETTEEMQTSFEITEEVEFLNSILVDESFVIDKESMHVFVNSSTQSESLSDTDAEVVSKLDGNTVDISTVCHEYPNSDEYHSSKRLKSSHDVVHGGICFPSSNPEAKQETKESMFQDDLWGLETSSCESTADKPLKISCIEISSSPSTSWRWEN

SEQ ID NO: 9138 - protein, 400 aa, Glycine max
  Clone ID: GLYMA-23APR03-C43545_1.p
MANTSLSTILVILFWGLTLATGRKLSPLSTTATLSSPPSDGICSSMVMTQGYTCGEHLVTSQDGYILNLARIRMGESRGPPVLLQHGLFMDGITWLLLPSNQSLAFLLADNGFDVWVANTRGTKFSRQHTSLPSNSSDYWNWSWDELVAHDLPATFKYVHDLTGKKLHYVGHSQGTLIALAALSQDQLLNMLRSAALLSPIAYAGQMTSPLAKNAAENFIAESLYNLGIFEFNMRGGSVIKFLKDLCNNTGIDCTNLLTSFTGQNCCLNPSIVNVFLDHEPQSTATKNMIHLSQMIREGTTSMFDYENRDENMKHYGQPTPPAYDMKRLPNDLPLFLSYGGADALSDVKDVQRLLEILKDHDADKLVVQYRNDYAHADYVMGENAHRDVYEPLISFFRLQ

SEQ ID NO: 9139 - protein, 242 aa, Glycine max
  Clone ID: GLYMA-23APR03-C4363_2.p
MTDGYWNRQQTLLSQSGMLKRPHSDYGNEMHNNFARDDDRTGHRMLKDTKTIGSAYDRYLQSGQLSSFTSGEASTVGGLGLARGGGGLSDHSLADPSVMGRHGGGGPDLAPNGRGVNYGGQLPVDAVSRPGPETVPLPPDASSTLYVEGLPSDSTRREVAHIFRPFVGYREVRLVSKESKHRGGDPHYLCFVDFANPACAATAMSALQGYKVDELNPESSHLRLQFSRYPGPRSGPAFRGKR

SEQ ID NO: 9140 - protein, 243 aa, Glycine max
  Clone ID: GLYMA-23APR03-C4363_4.p
MADGYWNRQQAFLPHSGMLKRPRSDYGNEMHNHIARDDDRTGHRMLKDTQTIGSAYDRYLQSGQLSSFTSGEVSTVGGLGLARGGGGGLSGHSLADPAVMGRHGGSGSDLAPNGRGVNYGGQLPVDAVSRPGPETGSLPPDASSTLYVEGLPSDSTRREVAHIFRPFVGYREVRLVSKESKHRGGDPHYLCFVDFANPACAATAMSALQGYKVDELNPESSHLRLQFSRYPGPRSGPAFRSKR

SEQ ID NO: 9141 - protein, 385 aa, Glycine max
  unsure (1)..(385): unsure at all Xaa locations
  Clone ID: GLYMA-23APR03-C44098_1.p
MADNIVTSSNSSTASLNPTRIICHVCQKQFSQYTCPRCNSRYCSLQCYKSHSLRCTESFMKENVVQQLHQMQPDEQTKNKMLDILKRFHSQEEMDEDXQEISFDDLSLEEKKRFHRAIAYGELSKMIKPWDPWWSKPSARNICLSKEGTQHLWIHGXELLDDDIGSDEFSKVPLGPETPLPPLSRLSSKEPSPLLTVHLVDILYSYCFTLRLYNGDWKSDALGSVMVVLSVSLVLGQGAQPETVLEALSHCLEQVCCPVYRHMGGLQFGLGVIDDVISLLGLGTPALVCALCDMHRLIQEGEKEAKSERPRKLRTDGTRSAIKLAERRIYFITCWVHEQPEEAWFSLAAIVRAEKTSAMEFQQSNKSEDLNNKAEAKGKSLIQEI

SEQ ID NO: 9142 - protein, 286 aa, Glycine max
  unsure (1)..(286): unsure at all Xaa locations
  Clone ID: GLYMA-23APR03-C44152_1.p
MLSLRLWFSSLATHNTLSCSSRRSLFLVPHQILNNNTLISNTSKILSCCYEKPIKQNGIFSVASDLQSSSFSSSFPKDSPFSGLEDALVSYLFGKKRATDIAHMVWKHVVQKGDTVIDATCGNGFDTLAMLNLVADDSHNGCVYALDIXQKDALDNTSLLLEESLNPNEKQLVKLFNICHSKMENAVPRNASFRLVAFNLGYLPGGDKEIITRSKTTLLALEAAKRILMPGGLISIVVYVGHPGGREELEVVESFAGRLCVENWICCKLQMLNRPCAPIPIFLFKR

SEQ ID NO: 9143 - protein, 505 aa, Glycine max
  unsure (1)..(505): unsure at all Xaa locations
  Clone ID: GLYMA-23APR03-C4447_1.p
MVMELQSQNNPFSIHLITFFLFLLFLLFKLVKKSSSNNTSKLPPGPKTLPLIGNLHQLVGSKSHHCFKKLADKYGPLMHLKLGEVSNIIVTSKELAQEIMRTQDLNFADRPNLVSTKIVSYNATSISFAPHGDYWRQLRKLCTVELLTSKRVQSFRSIREDEVSELVQKIRAGASEEGSVFNLSQHIYPMTYAIAARASFGKKSKYQEMFISLIKEQLSLIGGFSLADLYPSIGLLQIMAKAKVEKVHREVDRVLQDIIDQHKNRKSTDREAVEDLVDVLLKFRSENELQYPLTDDNLKAVIQDMFIGGGETSSSTVEWSMSEMVRNPWAMEKAQAEVRKVFDSKGYVNEAELHQLTYLKCIIRXMRLHPPVPLLIPRVNRERCKINGYEIPAKTRVFINAWAIGRDPKYWTEAESFKPERFLNSSIDFKGTNYEFIPFGAGRRICPGISFATPNIELPLAHLLYHFDWKLPNNMKNEELDMTESYGATARRAKDLCLIPITVRP

SEQ ID NO: 9144 - protein, 303 aa, Glycine max
  unsure (1)..(303): unsure at all Xaa locations
  Clone ID: GLYMA-23APR03-C444_20.p
RRTPLLLSPKHKTCNEMAFFPANFMLQTPHHDDHHHHQPPPSLTSILPTCAPQEYHGGVTILGKRSMSFSSGIEHGEEANNAEEDLSDDGSQAGEKKRRLNMEQVKTLEKSFELGNKLEPERKMQLARALGLQPRQIAIWFQNRRARWKTKQLEKDYDVLKRQYEAVKSDNDALQAQNQKLQAEILALKSREPTESINLNKETEGSCSNRSENSSDIKLDISRTPAIDSPHSTHQQQRXRPFFPPSSVRPAGVAQLFQTSSRPELASCQKIDQMVKEESLSNMFCGMDDQSGFWPWLEQQHFN

SEQ ID NO: 9145 - protein, 225 aa, Glycine max
  Clone ID: GLYMA-23APR03-C44571_1.p
MNNPSSPSPCAAFADFYEQWFEELQSLMQQLRGEGRKEEVMEKVMWHHQNYYVAKSAAAEKDPLNVFLSPWATTLERSLHWITGWRPTTAFHLIYTESSLMFESHIIDILQGLRTGDLGDLSPSQFRRVSDIQCDTVKEENAITEELSEWQDSVSEMMGPGANINDKIGRLVCIIKKADDLRLRTLRSVVGLLSPQQAIEFLIASAELLVGIRGWGLNHDRPRGR

SEQ ID NO: 9146 - protein, 251 aa, Glycine max
  unsure (1)..(251): unsure at all Xaa locations
  Clone ID: GLYMA-23APR03-C4504_3.p
QEKELQRQKRWWRLPSSVPRLRKKKKAGGGGGSADTATNKNKNNKGKKDGGGGGGGGGKFDKIDFDFQDFDIPPTKGKNGKGGNNGKNNNDKGHGSNNGNVGHHMGPMGQMGPMVQRGPMNQMGPMDHMRNMNINMPAVQGLPAATAAAAMNGGYYQGMXMQMQQPNPYNMQQQQQQQQLMPMMMNQHQQQQQQANMNMYPPXHDDGRPHHHQHQHPSMNYFPPPPMPSHPMADPITHVFSDENTESCSIM

SEQ ID NO: 9147 - protein, 268 aa, Glycine max
  Clone ID: GLYMA-23APR03-C45098_1.p
MEKSGKRVLLTSNGDDISQGIAFHLVKQGCRLVLLGDQNSLRSIANKIMDSLSLADRGTVQVVGLDMEDQSESTFHHSVDKACQILGKLDAFVNCYAYEGKMQDHLELAESEFKKIVKINFMAAWFLLKAVGRKMREFNTGGSIVFLTSIVGAERGLYPGAAAYASALAGVQQLVRASALEIGKYQVRVNAISRGLHLHDEFPLSVGKERAEKFVKDAAPLERWLDVKNDLASTVIYLISDGSRYMTGTTIYVDGAQSITRPRMRSFM

SEQ ID NO: 9148 - protein, 133 aa, Glycine max
  Clone ID: GLYMA-23APR03-C4517_4.p
MAATEEKILSRIDRLDNVLRHLEEIRGCNPSPKSSCASTPTSGSDGHVSSTDFSPKSLEKHCRPIENIMMETEAKGTMIERLNQVEDRMLKLEEELVAKKKEEGEKMNSPKKGFKQLVKQSMKPRGKHSNKEA

SEQ ID NO: 9149 - protein, 130 aa, Glycine max
  Clone ID: GLYMA-23APR03-C452_9.p
MAALIRSPAVILAILTISACIACTASYGGLVGGRSKIPDVKANKKVQDLGRFSVEEHNRMLRQAQKEEEQVTFVEVVEAQQQVVSGIKYYMKISATQGGDGGDSRIFESVVVVKPWLRSKQLLNFAPSTQ

SEQ ID NO: 9150 - protein, 111 aa, Glycine max
  Clone ID: GLYMA-23APR03-C4551_2.p
NHVSLERVFFAASAAVFSVSIFRHNGINFSFSEYSQHVARTMPRVTQNRKLCLLRRGFLSSLSSCFLCFNLSNDGINFSFLQLMQTMLLSHHSNFYVLASALHNLITYDGK

SEQ ID NO: 9151 - protein, 310 aa, Glycine max
  Clone ID: GLYMA-23APR03-C4571_2.p
MRMEGREGFSSGVTVIGAEAPSAYHMAPRSEAPSQVPPPVPEATAGAIGVSPVSVGLDGTAAKKKRGRPRKYGPDGLNSMALSPMPISSSAPFANNFSSGKRGKSRGMEYKLLKKVGVDLFGDSVGTNFMPHIITVNTGEDITMKVISFSQQGPRAICILSASGVISNVTLRQPDSSGGTLTYEGRFEILSLSGSFMPTDNQGSRSRSGGMSVSLSSPDGRVVGGGVAGLLVAAGPVQVVVGSFLPNNQQDQKPKKPKSDYAPANVTPSITVSSAPPPTNGEKEDVIGGHLLHNNSGTTLNSNLTPPSAF

SEQ ID NO: 9152 - protein, 633 aa, Glycine max
  Clone ID: GLYMA-23APR03-C45741_1.p
MKKSCRNSNGFQMHTGIVYQDRSSAGSPRRFSVTKFAPEYCKSGSALNDGPFQSKPSCDFGLQQYVDITKMKENTVPPAKPTDCESGSSQMGLQLVDLKEFITQKQQALLCTGDVNSGCNVNNCSEYDSSHTAEHVLPLPSSVLDATTPENSAGKASTEKLDVQMLLDRMQNLSELLLSHCLNDACELKEQDCNVLKNVISNLNTCALKNEQIAPVQECLFNQPETSKHAGESRKFRQNLCLKRPQLTKIGPESSKIEFENPLVAEANFCFRSGKPHRKLSDSISPRVDTEMTKADNMTKDLKRILSENFHGDDDEGAEPQTVLYKNLWLEAEATLCSVYYRARYNQMKIEMDKHSYKEKVMEKQSKSEVIPTLSQSQSSATKVHYPNPDSSADLKFPVLDVTNLEELSRLNISTDMNKSNAITPEGRGQNLDSFIDNYLVPCSVNKTERNDESSVMMARYQVLKARIDQSSTVTTNLEEPLDVADSSSPRGRDNQNQVNLCQDSPIPEKNSAEYETSVLARFHILKSRDEGSSSISSEGKQLHGDESAAVEGMDGITVATNVSEGKSLDVHANPVVVHLNSYTAVDKSIPKEFHLDSEDNQETQPSGTCEFQPPTYYSDGFASDWEHVEKSL

SEQ ID NO: 9153 - protein, 255 aa, Glycine max
  unsure (1)..(255): unsure at all Xaa locations
  Clone ID: GLYMA-23APR03-C45961_1.p
MACTTGERNFNRFGGCLGKNSTMGKNLRLLDDLHVHILASRESSSGRDTIRMEYLTLLKEMTEPLPTLPKAEAVQQVVELMNTYSISQEDFDTIVKLSKFRFLIVNEXRDHPNPIDVIRLSYVGPPPPPYKEQSSSRVVRVADLITLPGVKKVPKKRIAAILEPAGEEVEKGEGDTLDESEEENSSDNEELEGTKGEKLQSELQSYNSKATQIQLELKGTGNSSSKKTSGGRGKGASASGKKVAQAPKTTAKRKW

SEQ ID NO: 9154 - protein, 139 aa, Glycine max
  unsure (1)..(139): unsure at all Xaa locations
  Clone ID: GLYMA-23APR03-C45_8.p
MDAGGKIKKGAGGRKGGGPKKKPVSRSVKAGLQFPVGRIGRYLKKGRYAQRVGTGAPVYLAAVLEYLAAEVLELAGSAARDNKKNRIIPRHVLLAVRNDEELGHXLHMVINPVLLPKKTERAAKEPKSPSKATKSPKKA

SEQ ID NO: 9155 - protein, 150 aa, Glycine max
  unsure (1)..(150): unsure at all Xaa locations
  Clone ID: GLYMA-23APR03-C4617_13.p
MRGGQSNGSVRGIASPDRGAHDKRGTQNNHLNDNNNKSVVSSDTAHDSKKGGGGSPSGSGDAAPPVWPPKFVIALTNKEKEEDFCXLKGSKLPQRPKKRAKFIQRTLNLVSPGTWLCDLTLAPYEVREKKISKKRPRGLKAMGNMDSDSE

SEQ ID NO: 9156 - protein, 310 aa, Glycine max
  Clone ID: GLYMA-23APR03-C46272_1.p
MGPTCCTLTRARPPCRRSLNRRSGKRGRPRKYGTPEQSSGREKSRNAVCLTRSLHTRRPTLRSPPSKKSLPLTKSHAWPGFNPHVISVAAGDSVAAGEDVGQKIMLFMQQSRREMCILSASGSISNASLRQPATSGGSITYEGRFEIISLTGSYVRNELGTRTGGLSVCLSNTDGQIIGGGVGGPLKAAGPVQVIVGTFFIDNKKDNGAGLKGDASASKLPSPVSEPVSSLGFRQSVDSSSGNPIRGNDEHQAMDGSHFMIQQLGLHGTPPRSTDWGRPDSRNTGFELTGRTGHGAHQSPENGGYDQIPD

SEQ ID NO: 9157 - protein, 318 aa, Glycine max
  unsure (1)..(318): unsure at all Xaa locations
  Clone ID: GLYMA-23APR03-C4631_2.p
MDLAEKLFFAAFLILSVAIDGMQADTMVTGTVFCDQCKDGQRSLFDYPVNGAKVILSCADSNGQITMSREETTNWFGSYTMRFNGAPDLSGCSAHVSGSGEGSTTGCGEGAGPSQNPKLMFRMFDMEXYTVDXLLAQPAQPMQYCSTSSNPVPAPDTPPNSPPHFKLPPVPPLPSLPPLPSLPPLPPVIFAEASACPXRIFRKWTLPEYKCYWRGVNRDTKVAVAFGMVAARRYGTDITLWHGLQGRGDPYRTLLREGITALLNSYNSFQFSYHPLGVVQHMNLALMGTTRSVLHTALRFKRANSGAGNVTCKFTTCK

SEQ ID NO: 9158 - protein, 141 aa, Glycine max
  Clone ID: GLYMA-23APR03-C46369_2.p
MAFKMATTGMWVTDECKNSFMDMKWKKEHRYIVFKIDEGSRLVTVDKLGGPTEGYDDLTASLPTDDCRYAVFDFDFVTVDNCRKSKIFFIAWSPTASRIRAKILYATSKDGLRRALDGISYELQATDPTEMGFDVIRDIAK

SEQ ID NO: 9159 - protein, 104 aa, Glycine max
  Clone ID: GLYMA-23APR03-C46395_1.p
ENWLNLGISIKLSVIIIFWVLVIFQEMSQLRYVLCPRHLKESQFWKIYFKLARSHVLEYELRDIQREKLKQMAVEDEKSSDNNPYEVEMAEANHENFIEPLPPS

SEQ ID NO: 9160 - protein, 140 aa, Glycine max
  unsure (1)..(140): unsure at all Xaa locations
  Clone ID: GLYMA-23APR03-C468_8.p
MTLGSSGSSVVVPRNFRLLEELEKGEKGIGDGTVSYGMDDGDDIYMRSWTGTIIGPYNTVHEGRIYQLKLFCDKDYPEKPPSVRFHSRINMTCVNHETGVVESKKFGLLANWQQRFXMEDILTQLKKEMAASHNRKLANL

SEQ ID NO: 9161 - protein, 981 aa, Glycine max
  Clone ID: GLYMA-23APR03-C4709_2.p
MRSCVCYTLLLFVFFIWLHVATCSSFSDMDALLKLKESMKGDRAKDDALHDWKFSTSLSAHCFFSGVSCDQELRVVAINVSFVPLFGHVPPEIGELDKLENLTISQNNLTGELPKELAALTSLKHLNISHNVFSGYFPGKIILPMTELEVLDVYDNNFTGSLPEEFVKLEKLKYLKLDGNYFSGSIPESYSEFKSLEFLSLSTNSLSGNIPKSLSKLKTLRILKLGYNNAYEGGIPPEFGTMESLKYLDLSSCNLSGEIPPSLANMRNLDTLFLQMNNLTGTIPSELSDMVSLMSLDLSFNGLTGEIPTRFSQLKNLTLMNFFHNNLRGSVPSFVGELPNLETLQLWENNFSSELPQNLGQNGKFKFFDVTKNHFSGLIPRDLCKSGRLQTFLITDNFFHGPIPNEIANCKSLTKIRASNNYLNGAVPSGIFKLPSVTIIELANNRFNGELPPEISGDSLGILTLSNNLFTGKIPPALKNLRALQTLSLDTNEFLGEIPGEVFDLPMLTVVNISGNNLTGPIPTTFTRCVSLAAVDLSRNMLDGEIPKGMKNLTDLSIFNVSINQISGSVPDEIRFMLSLTTLDLSYNNFIGKVPTGGQFLVFSDKSFAGNPNLCSSHSCPNSSLKKRRGPWSLKSTRVIVMVIALATAAILVAGTEYMRRRRKLKLAMTWKLTGFQRLNLKAEEVVECLKEENIIGKGGAGIVYRGSMRNGSDVAIKRLVGAGSGRNDYGFKAEIETVGKIRHRNIMRLLGYVSNKETNLLLYEYMPNGSLGEWLHGAKGGHLKWEMRYKIAVEAAKGLCYLHHDCSPLIIHRDVKSNNILLDAHFEAHVADFGLAKFLYDLGSSQSMSSIAGSYGYIAPEYAYTLKVDEKSDVYSFGVVLLELIIGRKPVGEFGDGVDIVGWVNKTRLELSQPSDAAVVLAVVDPRLSGYPLISVIYMFNIAMMCVKEVGPTRPTMREVVHMLSNPPHFTTHTHNLINL

SEQ ID NO: 9162 - protein, 373 aa, Glycine max
  Clone ID: GLYMA-23APR03-C47253_1.p
MATSVKNNFLNPALVSNLQQALLRRKDSVQEQQHHNRANEPTKASSKPVVLVTNGDGIDSLGLTLLVEALLCDALLDVHVCAPETDRSVCGHSVTTGETLAVCSVQVGGANAYQVSGTPADCVSLALSGALFSWSKPVLVISGLNKGTTCGYDTLYSGAVAGAREALICGVPSLCISLNWEKNVSCESDLKDAVTVCLPLIHAAIRDIQKGIFPKNCFLNIGIPSCPLTNKGVKVTRQSPQRSSLSWQAVSTNKNPSAGHYMSNQQSLGIMLAQLGRDASAAAAARRLNSNRKNVEVESVGVAGKFSSQQTIKKYFRMELTEKEQQDIEEDLDSRELEEGFVTVTPLSLYANVHMEIQSSVSSWLAIALSGDQ

SEQ ID NO: 9163 - protein, 172 aa, Glycine max
  Clone ID: GLYMA-23APR03-C4734_13.p
MGSKTRSSLALFLTVNILFFALVSACGTCPSPTPRHKHKPVKPSPSGGSGGSGGSGGSGGSGGSGGSGGSGGSGGSGGSGGSGGSGASCPRDALKLGVCANVLNGLLNVTLGQPPVTPSCSLLNGLVDLEAAVCLCTALKANILGINLNLPISLSLLLNVCSRNAPRDFQCA

SEQ ID NO: 9164 - protein, 598 aa, Glycine max
  Clone ID: GLYMA-23APR03-C4735_19.p
MGVCTSKPQKPSPYALREAEAEADPSQIPKTPLSPAAADTPRRKDDAITGKRSPFYPFYSPSPARFLKKSPAPAGGSRSASSTPRRFFRRPFPPPSPAKHIRAVLARRQGKKASATAAIPEEGEEGAADLDKRFGFSKEFTSRLEVGEKVARGHFGYTCSAKFKKGELKGQQVAVKVIPKAKMTTAIAIEDVRREVKILRALNGHSNLIQFYDAFEDQDNVYIVMELCEGGELLDMILSRGGKYSEDDAKAVMVQILNVVAFCHLQGVVHRDLKPENFLYAKKDESSELKAIDFGLSDFVRPDERLNDIVGSAYYVAPEVLHRSYSTEADVWSIGVIAYILLCGSRPFWARTESGIFRAVLKADPSFDETPWPSLSLEAKDFVKRILNKDPRKRISAAQALSHPWIRNCNNVKVPLDILIFKLMKTYMRSSSLRKAALRALSKTLTADELYYLRGQFALLEPSKNGSISLENVNKALMKYATDAMKESRILDFLSSLNSLQYRRMDFEEFCAAALSVHQLEALDRWEQHARCAYELFDKDGNRAIVIEELVSELGLGPSIPVHVVLHDWIRHTDGKLSFLGFVKLLHGVSSRSLAKVQ

SEQ ID NO: 9165 - protein, 234 aa, Glycine max
  Clone ID: GLYMA-23APR03-C475861_1.p
MRFTLLSRAPVPFLSAAFLKFKPVAPSTATFTRVSCMAASPSSAAVRDGAPSASSAIDFLSICHRLKATKRTGWVRKDVKNPESIADHMYRMSLMALIASDVPGVDRNKCIKMAIVHDIAEAIVGDITPLDGVSKAEKNQREQEALDHMCKVLGGGSTAKEIAELWMEYEANSSPEAKFVKDLDKVEMILQALEYEDEQGKDLDEFFQSTAGKFQTETGKAWASEIVSRRKNTK

SEQ ID NO: 9166 - protein, 485 aa, Glycine max
  unsure (1)..(485): unsure at all Xaa locations
  Clone ID: GLYMA-23APR03-C4773_2.p
MAKAVVGEETRLKLAEDRLSQSAVPSEVGLLIGKFSSALGRAFLFDLIPTPHNDSGEPACSLTEPDKKKGPKSKSKSELADSSSLFIDKDWVAEHVRQVSRMLVGGIKVVGLYVWVSDAAFKNSTIMLCQTVKGVADAAPGLDGNWDERLLLHISYSPRRWNCRNCSLSSNITSSSLRPCDFKMGKVLTSLQTFKCMHNFNLRLPILRDSASKFQTLSDVLRHAISIHAKELAGAKALIDGKLVVESESYSSDGVHEVELLLSFLNDSSIEAKXVVGILSFSGLICSFAYLNSKEPISQAITDIKGDIIXSLQSRLDIIXDEVDADSGNQXDVGSQVSDELSAETPVPQLVLHLLRKGCSLPFPRRVFAPWLAVVYVCDYLQPFETVEVLKDHCMELLSMKAPTDVSKILEPEKEELSFKTKSFWDVAVPSYSEIHLMEDKSKRDGGSESSSSKTVKPGHINVVAAGLILLLSVLVGFLLFALKG

SEQ ID NO: 9167 - protein, 222 aa, Glycine max
  Clone ID: GLYMA-23APR03-C47809_2.p
MNPPEIPFGGAPLPKKELQLQGPRPPPLKVSKESHKIKKPPPHPAHHHHNYPHAPPDQNLQQQREPVIIYSVSPKVIHVTPGDFMDVVQRLTGASIGEEPPSGRGDVSPAARLASIEKTSPSERERERVLHNIDDNIAWMLGEGVEVGQFPGILTPEPGTLPPIPAEVFSPVREAQTAASYWNDFSPSYWSASSFLASPSGFLSVTVASPQPSPNLFSLFDL

SEQ ID NO: 9168 - protein, 117 aa, Glycine max
  Clone ID: GLYMA-23APR03-C48229_3.p
MKGGLQTGGGRKMKKSSTPYIPQNSTPCATLFVANLGPSCNEQELIQVFSRYPGFLKLKMQSTYGAPVAFVDFQDVGSSTDALNSLQGTILHSSQSGEGMRLEYAKSRMGMRRKPNR

SEQ ID NO: 9169 - protein, 176 aa, Glycine max
  Clone ID: GLYMA-23APR03-C4824_2.p
MCSTSISIASSHQSFLTNALIPPKFRTTRISIVSCSSPQQSPRKKNNENKLAKLAMVAVAVGVLTLGSVHDASAAKTGGRIGGQAFKSAAPRSAPRINNSRTNIYINPRVAPPLVGGYGYGYGGWGWSPFSFFAPGPSVAVGVGGGFDTILLFMFLGVAAAVVRRFFGSRNEDDDY

SEQ ID NO: 9170 - protein, 235 aa, Glycine max
  unsure (1)..(235): unsure at all Xaa locations
  Clone ID: GLYMA-23APR03-C482609_1.p
MSSGNGGGGSSSGTGSPCGACKFLRRKCVSGCIFAPYFDSEQGTSHFAAVHKGFGASNVSKLLLSIPVHRRLDTVITHFXYEAQSRIRDPVYGCVSHIFALQQQVVSLQAELSYLHGHLAQMELPQPPPPLPLPQTMAAPPPGFSIADLPSATVAAAAATTYDLSSLFDPLGQTSWAMQQRAIDPRQYNMAAAPSTATTGADIQAVASDIPHRHGSPPSPPASSSNASPSLSLSK

SEQ ID NO: 9171 - protein, 169 aa, Glycine max
  Clone ID: GLYMA-23APR03-C4839_3.p
VYPNMRAALVDILQTRGFRGLYAGLSPTLVEIIPYAGLQFGTYDTFKRWTMAWNQRQYSNPTAESLSSFQLFLCGLAAGTCAKLVCHPLDVVKKRFQIEGLQRHPRYGARVEHRAYKNMLDAMKRILQMEGWAGLYKGILPSTVKAAPAGAVTFVAYELTVDWLESILT

SEQ ID NO: 9172 - protein, 438 aa, Glycine max
  unsure (1)..(438): unsure at all Xaa locations
  Clone ID: GLYMA-23APR03-C4855_6.p
MPVAASAIYFLNLRGDVLINRXYRDDVGGNMVDAFRTHIMQTKELGTCPVKQIGGCSFFYMRISNVYIVIVVSSNANVACAFKFVVEAVALFKSYFGGAFDEDAIRNNFVLIYELLDEIMDFGYPQNLSPEILKLYITQEGVRSPFSSKPSDRPIPNATLQVTGAVGWRREGLVYKKNEVFLDIVESVNLLMSSKGVVLRCDVTGKVXXKCFLSGMPDLKLGLNDKIGLEKESQLKSRPTKSGKTIELDDVTFHQCVNLTRFNSEKTVSFVPPDGEFELMKYRITEGVNLPFKVLPTIKELGRTRMEVNVKVKSVFGAXMFALGVVVKIPVPKHTAKTSFTVTSGRAKYNASIDCLVWKIRKFPGQTEPTLSAEIELISTMTEKKSSTRPPIQMEFQVPMFTASGLRVRFLKVWEKSGYNTVEWVRYITKAGSYEVRC

SEQ ID NO: 9173 - protein, 330 aa, Glycine max
  Clone ID: GLYMA-23APR03-C4864_2.p
MEAVESIAVPEPDEDDPSSTLLDLSSYQLHDLDSVELPPSLTELDLTANRLSTLDPRIGNLSHLKKLSLRQNLITDAAVLPLSSWNAISSLEELVLRDNQLKNIPDVTVFKKLLVFDVAFNEISSLHGLSRVSDTLKELYVSNNEVAKIEEIEHFHQLQILELGSNKLRVMENLQSLENLQELWLGQNRIKVVNLCGLKCIKKISFQSNRLTSMTGFEGCVALEELYLSHNGIAKMEGLSSLVNLRVLDVSSNKITSVDDIVNLTKLEDLWLNDNQIASLEGIAEAVSGSKEKLTTIYLKNNPCAKTPNYTGILREIFPNIQQIDSDIFS

SEQ ID NO: 9174 - protein, 141 aa, Glycine max
  Clone ID: GLYMA-23APR03-C4880_2.p
MTGKNCCFNESRVEFYLEQEPHPSSSKNLKHLFQMIRKGTYSKYDYGKLKNLIEYGKFNPPKFDLSRIPKSLPLWMAYGGNDALADITDFQHTLKELPSTPEVVYLENYGHVDFILSLQAKQDLYDPMISFFKSSGKFSSV

SEQ ID NO: 9175 - protein, 623 aa, Glycine max
  Clone ID: GLYMA-23APR03-C490593_1.p
MVKHRFRESIKSLFGSHIDSNKEEQLQEAKAEIEDKVKRILKLIKEDNLEEDGTPVEHSKKEPLVELIEDFHNQYQSLYAQYDHLTGELRKKIKGKREKGSSSSSSDSDSDSDYSSKDRDNKNGQLENEFQKTIHDLRQELEVVHIEVAELNRKLTITHEEKEDLNSKYLAALSKIQEADKINMDLKTDAEALGTQRLKLLVENAELNKQLDTAGKIEVELSQKLEDLTAEKDSLTMEKETALQQIEEEKKITDGLRTLVDQLKDENLALGKELEAVTGEFSILKQQLEHAEQQMTDIRHNLKVAEEENESLKVKLSQASNEVHLAHNRIQDFVAESSQLKEKLDESGREISALTQMHEGYQKESSNQIRELEAQATTLEQELESLQNQKRDMEEQIKSSTTEAGELGELNSGLQNQISELEIKSREREEELSAMMKKLKDNENESSSKMSDLTSQIDKLLADIGTLHAQKNELEEQIISKSDEASTQVKSITNELNALRQEVESLQHQKLDLEFQLVEKVQENSEYVIQMQTLKEEIDRKILEQERLLEDKENLAMKLRTLELEMNTIKNKNSEAEEQIRAKSHEISHMSKGMLELHEKIAKKKKKKNSCCLNSLKSLRGVY

SEQ ID NO: 9176 - protein, 70 aa, Glycine max
  Clone ID: GLYMA-23APR03-C490960_1.p
MGADWGPVIIAVALFILLSPGLLFQFPARYRVVEFGNMSTSGIAILVHAIIFFCILTILVVAIGIHIHIN

SEQ ID NO: 9177 - protein, 392 aa, Glycine max
  unsure (1)..(392): unsure at all Xaa locations
  Clone ID: GLYMA-23APR03-C49170_2.p
MGCCLSARIKAESPPRNGLSSKDGNXKKMAXSSKASTPSVPPTPRTEGEILKSSNMKSFNFSELKTATRNFRPDSVVGEGGFGCVFKGWIDEQTLAPVRPGTGMVIAVKRLNQEGLQGHSEWLTEINYLGQLRHPNLVKLIGYCLEDDHRLLVYEFLTKGSLDNHLFRRASYFQPLSWNIRMKVALDAAKGLAYLHSDEAKVIYRDFKASNILLDSNYNAKLSDFGLAKDGPAGDKSHVSTRVMGTYGYAAPEYMATGHLTKKSDVYSFGVVLLEIMSGKRALDSNRPSGEHNLIEWAKPYLSSKRRIFQVMDARIEGQYMLREAMKVATLAIQCLSVEPRFRPKMDEVVRALEELQDSDDRVGGVGSSRDQTTRRSGPRQHRGRQHETTRK

SEQ ID NO: 9178 - protein, 384 aa, Glycine max
  Clone ID: GLYMA-23APR03-C49257_1.p
MDFHLKQWRNQHESEEQHSTKMPKLLPESHQQQQPSASALPLFVPEPNSSKVSTLSDSTLASATMTSTTTNRLFPRMGSYFSLSQWQELELQALIFRYMLAGAAVPPELLQPIKKSLLHSPHYYLHHPLQHYQPSALLQSGYWGRGAMDPEPGRCRRTDGKKWRCSRDVVAGQKYCERHMHRGRNRSRKPVELPTPTSAINNCGVTGVGSLGPGASSSSICSPPLASASFKSPFDLHLDERSSGTKNEDEDHVGGDGRSGGGGGHMLRHFFDDWPRSLQDSDNVENNAAAGRSLSISMPGASSDVSLKLSTGYGEDSGPGNENVSLEPEQLQLNWAGGWASSNQVASMGGPLAEALRSSTSTSSPTSVLHRHLPRGSETSFIST

SEQ ID NO: 9179 - protein, 311 aa, Glycine max
  unsure (1)..(311): unsure at all Xaa locations
  Clone ID: GLYMA-23APR03-C4952_1.p
MAMVSMAFCVSTATFPNLNRCRGVAYASLSNKASTTSLGVRVTEGEGNLPKLVLTSPAGSEAEIYLFGGCITSWKVPSGKDLLFVRPDAVFNGNKPISGGVPHCFPQFGPGPIQQHGFARNMDWTVVDSENTEGNPVVTLELKDAPYSRAMWDFSFHALFKVTLNAKSLATELTVKNTDNKAFSFSTALHTYFRASASNASVKGLKGCKTLNKDPDPKNPVXGKEERDVVTFPGFVDCVYLDASSELQLDNGLGDLISIKNTNWSDAVLWNPYLQMEACYKDFVCVENAKIGSVQLEPEQTWTAVQHLSIA

SEQ ID NO: 9180 - protein, 94 aa, Glycine max
  Clone ID: GLYMA-23APR03-C49708_2.p
MDTQKSQPEKQSSSTATAPSVTSCRKKKNEEAAFLDDLKDHIDEFINASMDEHKTCFKKTIQKMFGMSKAVAEGQSNASKEVESSLPLQTTVQD

SEQ ID NO: 9181 - protein, 134 aa, Glycine max
  unsure (1)..(134): unsure at all Xaa locations
  Clone ID: GLYMA-23APR03-C4978_6.p
MANTLQRALRATMARRFSTDALAEIKRGEIGMVSGIPQEHLRRRVVIYSPARTASQQGSGKXWENPLMGWTSTGDPYSHVGDSALTXDXEEAAKAFAEKHGWEYSVKKPHTPLLKVKSYADNFKWKGPPKSGEE

SEQ ID NO: 9182 - protein, 271 aa, Glycine max
  Clone ID: GLYMA-23APR03-C49987_1.p
MVYSFYDKTSSSSGSDISGLFNPTLHNLGACNDLSSSPHSLVFESDKGELVKCLAAAKVGKSEICEAKALAALKNHSEAERRRRERINGHLATLRGLVPSTEKMDKATLLAEVISQVKELKKNAAEVSKGFLIPKDADEVKVEPYNDHEGGEGSMSYSATICCDFRPEILSDLRQTLDSLPLHLVKAEISTLAGRMKNVFVFTCCKENINNIDFEKCQALASTVHQALCSVMEKASASLDFSPRTSHASKRRRLCFIETSNSTCNHGSCLC

SEQ ID NO: 9183 - protein, 117 aa, Glycine max
  Clone ID: GLYMA-23APR03-C50001_1.p
MSSIEMVSASAIKLPYQILRHEPCSDDERDQRVILRSRKWCRPRGVPLRRRFRVKVPSWRRVWMIKKVMLVCAKVKRRFNEGQGHFGDLFAGNYVFTQINPTSLKYLEKKLTQAKLA

SEQ ID NO: 9184 - protein, 136 aa, Glycine max
  Clone ID: GLYMA-23APR03-C500172_1.p
MTKTTHSRNHHQPPTPIHWKPLPPPPAPHPTPQPNPRTTPDRSPTPLTTSPKMRPPPTAPRSPRNPAAKKATAPTRTRRRRSRSSSPLSRRIQRRRMEPTMRRRPLRRQRTARHRRNRRRRATTCGRRSPRGKGKK

SEQ ID NO: 9185 - protein, 247 aa, Glycine max
  Clone ID: GLYMA-23APR03-C501046_1.p
MMASSNSRKSETSPSPAPQFTTTNFIPIPAAAAPKTVDDVWQEIVTGDRRECKEEALDDDDDDDNEMMTLEDFLAKADAVDDADHDHDHAHDHDPDYHNDDVKMPMPLTERLGSGTLFSFDHLPTTPFHDPSEGSVIGFGNGVEVIECGRGKRSRPVLEQLDKAAQQRQRRMIKNRESAARSRERKQAYQVELESLAVKLEEENDKLLKEKAERKKKRYKQLMEKVLPIAQKQKPPCILRRARSLQW

SEQ ID NO: 9186 - protein, 223 aa, Glycine max
  Clone ID: GLYMA-23APR03-C501145_1.p
MGTQKSNMFDAPFKYMVPEDKEIPDRPLPSHWTPSMQAYNTSGSTPTPFLNQQAAGSHMPLYMWVNQVNNTLLQSDALHDPRMLSSKPTVAGDFPSTKKQHCNLMLENASSTKLNQDLETGLDASDANAQLVNLEKDEIRRERKRQSNRESARRSRMRKEKECEELHKQMEMLKDENSVLTQRLKSLSEECLEICNENDAIEEELIKMYGPESIADLLLFKPT

SEQ ID NO: 9187 - protein, 365 aa, Glycine max
  unsure (1)..(365): unsure at all Xaa locations
  Clone ID: GLYMA-23APR03-C50250_1.p
MARHSPFLALSPLSLSRNRDLACVCHRKRIMSVCAGSGDWVEESVEGDDDLRSRIFRLRLPKRSATNVLQKWVLQGNPITLSQLRDISKELRRSQRYKHALEXRYFEGLPLATKTTETYTALLHSYAGAKLTEKAEELYQRIKDSNLSFDALTYNEMMTLYMSVGQFEKVPIVVEELKQQKVSPDIFTYNLWISSCAAILNIDEVRRILDEMSHGAGSNESWIRYLNLANIYISVAHLDNASSNTLVETEKRITQRQWITYDFLIILYGGLGSKDKLDQIWNSLGMTKQKMISRNYMCIISSYLMLGLTKEVGEVIDQWKQSTTTDFDMLACKKILVAFRDIGLAEIANNLNVILIEKNLSLGSD

SEQ ID NO: 9188 - protein, 128 aa, Glycine max
  Clone ID: GLYMA-23APR03-C50306_1.p
MPSTLQSFKLLATRCATTTATQSPTASPVVLRRRRRKTLRMFLHDPPETADKDIRVRSKLKDLLLSSPPPPPMIKKRQEREGLLPGGGGGGFGFRLRSGSGFRRGGAASLRLRLLRRAWRPVLQSIPE

SEQ ID NO: 9189 - protein, 349 aa, Glycine max
  Clone ID: GLYMA-23APR03-C5049_10.p
ADLCRQIVTVVHDCHTMGVMHRDLKPENFLFLSKDENSPLKATDFGLSVFFKPGDVFKDLVGSAYYVAPEVLRRSYGPEADIWSAGVILFILLSGVPPFWSKKEQGIFDAILRGHIDFTSDPWPSISSSAKDLVKKMLRADPKQRLSAVEVLDHPWMREDGASDKPLDVAVLSRMKQFRAMNKLKKVALKVIAENLSEEEIIGLKEMFKSMDTDNSGTITFEELKAGLPKLGTKVSESEVRQLMEAADVDGNGTIDYIEFITATMHMNRMEREDHLYKAFEYFDKDRSGYITMEELESTLKKYNMGDEKTIKEIIVEVDTDNDGRINYDEFVAMMRKGKPDLVTNRRRK

SEQ ID NO: 9190 - protein, 86 aa, Glycine max
  Clone ID: GLYMA-23APR03-C50564_5.p
MDSFSNQSRGSSSQLSAQDLKNQLKNQLAIEYAQQFLETVGRKCFEKCVTKPGSSLGGSESSCISRCVDRYIEATGIISKALFSSQ

SEQ ID NO: 9191 - protein, 554 aa, Glycine max
  Clone ID: GLYMA-23APR03-C5083_1.p
MMGGRCYSSYRSNAVAAVMRDRKWKSNSKSEEADVVVIGSGIGGLCCGALLARYEEDVLVLESHDQPGGAAHSFDIKGYNFDSGPSLFSGLQSRGPQANPLAQVLDALGESLPCATYDSWMVHIPEGQFLSRIGPTEFFKDLQQYAGPNAVLEWRKLLDAVLPLSTAAMALPPLSIRGDLGVLSTAAARYAPSLFKSFLQMGPRASLRATKLLRPFSEILDDLQLNDPFIRNWIDLLSFLLAGVKANAVLSAEMIYMFAEWYKPGCCLEYPLHGSAAIIDALVRGLEKFGGRISLQSHVENIVVENDRAIGVKLGSGQFIRAKKAVVSNASMWDTLKLLPKEVVPKSYSDRVNTTPQCDSFMHLHLGFDAEGIRSDLGIHHIVVNDWKRGVDADQNVVLISIPSVLSPNLAPHGKHVLHAYMPGTEPFELWEGLDRRSAEYRNLKAERSEVMWKAVERAVGTGFSREKCEVKLVGSPLTHERFLRRNRGTYGPAVQAGSDAFPGHSTPIAQLYCCGDSTFPGIGVPAVAASGAIVANSLVSVSQHSKLLDAIGI

SEQ ID NO: 9192 - protein, 78 aa, Glycine max
  Clone ID: GLYMA-23APR03-C5084_2.p
DLYFKLNDFILQACEKLNQIELSDCEIYASCEPCPMCLGAIPLSRVKRSVYGAKPPPWGPSPLALEPHPPPIQHVSIE

SEQ ID NO: 9193 - protein, 332 aa, Glycine max
  Clone ID: GLYMA-23APR03-C5136_1.p
MDITPTTTINNNNTTPSATTKSPENETETPTRITTPITPTTTKTSSFSNGVLKRTHHHHHLHHPIPPVVTYKECLKNHAANLGGHALDGCGEFMPSPTATAADPSSIKCAACGCHRNFHRREPEEPPIASTTTHVIEYQPHHRHHPPPPLHAAAVATRSPNSASPPPISSSYYPSAPHMLLALSAGLAAPPESTAAPAAAPTRKRFRTKFSQEQKEKMHKFAEKVGWKIQKRDEDLIHEICNEVGVDRSVLKVWMHNNKNTFAKKDNNNIVTSNDINITTKNNISTDNDANGSDVKVFENPNNDGGEDRAEDPSSNHYDGVNVVGANGSSSS

SEQ ID NO: 9194 - protein, 176 aa, Glycine max
  unsure (1)..(176): unsure at all Xaa locations
  Clone ID: GLYMA-23APR03-C5147_5.p
GTKLNSHSYVAEKENPSSPFQDARSSLKTLTGKTITLEVESSDTIDNVKAKIQDKEGIPPDQQRLIFAGKQLEDGRTLXADYNIQKESTLHLVLRLRGGMQIFVKTLTGKTITLEVESSDTIDNVKAKIQDKEGIPPDQQRLIFAGKQLEDGRTLADYNIQKESTLPLVLRLRGGF

SEQ ID NO: 9195 - protein, 111 aa, Glycine max
  Clone ID: GLYMA-23APR03-C515536_3.p
MAPPQPKSGLFVGINKGHVVTKRELPPRPCHRKGKSTKRVSMVRGLIREVAGFAPYEKRITELLKVGKDKRALKLAKRKLGTHKRAKKKREEMAGVLRKMRSAGTHTDKKK

SEQ ID NO: 9196 - protein, 153 aa, Glycine max
  Clone ID: GLYMA-23APR03-C5167_2.p
ITLVHHYILGFSYNILPPPHNILNVLTCALVPTTPLSPPSYRVFPVPMMASVPSAASTTSSSKSQGSVARAPWRFCFSCHGRGSLAAAVAAEIGFRISKARGTCRRENYRSHSARSFRSMFKLQKSSRHDGGGTPEQEWEAKKILAEEQGKWD

SEQ ID NO: 9197 - protein, 380 aa, Glycine max
  Clone ID: GLYMA-23APR03-C5175_2.p
MGGEELSLMENERKGRRLWKKVKYQLVEYHSLPGYLRDNEYILAHYRSEWPIKQVLLSAFTIHNETLNVWTHLIGFFIFLALTIYTAMKIPKVVDLNSLQHFPDMLKKADLHKLQSEILTCLPSMPDLHRLRDEISSWHIKEYLYNCLPVRFSSSNHTDACVLLSVKDDLANIIAPLMIRPITRWPFFAFLGGAMFCLLASSICHLLSCHSARMAYIMLRLDYAGIAALISTSFYPPVYYSFMCDPFFCNLYLGFITVLGIATILFSLLPVFQNPEFRTIRASLFFGMGLSGAAPILHKLYLFWGQPEVFHTTAYEILMGVLYGIGALVYATRIPERWMPGKFDIAGHSHQLFHILVVAGAYAHYRAGLVYLRWRDLQGC

SEQ ID NO: 9198 - protein, 189 aa, Glycine max
  Clone ID: GLYMA-23APR03-C521_4.p
MDPAAMMNGGANPTSYHLSEIWQFPPPNAPDELGLRRPHFTHGFADFAPDPTRDAVPGRDPASIAQKKRRDASAEEEESAKGASTTNAVNEGGGVGDGKRVKTSESGKGEGETSSGKLAEQSGKPPSEPPKQDYIHVRARRGQATDSHSLAERARREKISERMKILQDIVPGCNKVIGKALVLDEIINY

SEQ ID NO: 9199 - protein, 246 aa, Glycine max
  Clone ID: GLYMA-23APR03-C52214_1.p
MVHAVSSTPSPVSSNNVVVVVADKKKAIEILQAKLLCASAFAPKTSPTSLRPISLSHRLTPTPPLKTRRGFLNDDDFAYSLCPSPLSVCFPHETSTLQNHVRGGDTKYDGRMHSYPYKKNGPYTCPKCGHVFETSQRFAAHVSSSHYKYETKSERKKRLMAKIRKRNLRIEWVSGGLTVVPDDAPPTSAFAYSARNNNNVAPPPPVRVVKVEGQSGMELQLAPPPGWEKLTAGGGAVKIKLEPVAS

SEQ ID NO: 9200 - protein, 581 aa, Glycine max
  Clone ID: GLYMA-23APR03-C5225_2.p
IYHLIKLVGPIPSKINKLSKLQFLYLTNNKLNATIPNSIFELPNLSGLSLASTDLSGHLDFHLFSKIKYLGILDLSDNSLLSINFDSTVDYILPNLQSLNLSSCNINSFPKFLAPLQNLLQLDLSHNNIRGSIPQWFQEKLLHSWNYTTSYIDLSFNKLQGDLPIPPNGIHYFLVSNNELTGNIPSAMCNASSLKILNLAHNNLTGPIPSAMCNASSLYILNLAQNNLTGHIPQCLGTFPSLWALDLQKNNLYGNIPANFSKGNALETIKLNGNQLDGQLPRCLAHCTNLEVLDLADNNIEDTFPHWLESLQELQVLSLRSNKFHGVITCFGAKHPFPRLRIFDLSNNNFSGPLPASYIKNFQGMVSVNDNQTGLKYMGNQYSYNDSVVVVMKGQYMKLERILTIFTTIDLSNNMFEGELLKVLGELHSLKGLNLSHNAITGTIPRSFGNLRNLEWLDLSWNQLKGEIPLALINLNFLAVLNLSQNQFEGIIPKGGQFNTFGNDSYGGNPMLCGFPLSKSCYKDEDWPPHSTYQHEESGFGWKAVAMGYACGLVFGMLLGYNVFMTGKPQWLGRLVEGVLN

SEQ ID NO: 9201 - protein, 286 aa, Glycine max
  Clone ID: GLYMA-23APR03-C5267_10.p
MSDHLVLFVDRLVRPVPMVQPLAQQPPEPATPVDEAAAGPSGSSPAAEEDGDDGGEDAPLLHLAECRICQEEDSVSGLETPCSCSGSLKYAHRKCVQRWCNEKGDITCEICHKSYEPGYTAPPPRPQPEETTLDIGGGWTISGTPLDLRDPRLLAIAEAERQFLEAEYDGYAASHASGAAFCRSVALILMALLLLRHALSVTDSDAEDDPSTFFSLFLLRAAGFLLPCYIMAWAISILQRRRQRQEAAALAATQVAFVLQSGQRRGLQFAIAPGPPTMNTHQQEQV

SEQ ID NO: 9202 - protein, 286 aa, Glycine max
  Clone ID: GLYMA-23APR03-C5267_11.p
MSDHLVVFVDRLARPVPVDPVAQPPSEPSPPPAPVNADASGSSGTAPVEDCDGEGGGEEEPLIQMAECRICQEEDGVSNLETPCACSGSLKYAHRKCVQHWCDEKGDITCEICHQPYQPGYTAPPPRPNPEETTIDIGGGWTISGTPLDLRDPRLLAIAEAERQFLDAEYDEYAASNASGAAFCRSAALILMALLLLRHALSVSDGDNSDDDPSSFFSLFLLRAAGFLLPCYIMAWAISILQRRRQRQEAAALAATQVAFVLQSGQRRGLQFAIAPGPPTLHQEQV

SEQ ID NO: 9203 - protein, 423 aa, Glycine max
  Clone ID: GLYMA-23APR03-C527_2.p
MDRLNGSANLMIVSDLDFTMVDHDDPENLALLRFNALWEAYYRHNSLLVFSTGRSPTIYGELRKQKPLLTPDITIMSVGTEITYGESMVPDDGWKQYLDHKWNRDIVMEETAKFPELTLQSETEQRPHKVSFYLEKGKAPNVTQTLSKRLENRGLDVKIIYSNGIALDVLPQAAGKGQALAFLLEKLKADEQGPINTLVCGDSGNDAELFTVPEVNGVLVSNAQEELLQWYAENARGNPRIIHATERCAAAIVQAIGNFSLGPNVSPRDIGDLMSNRKVHSPSHEVVMFYIFYERWRRGEVENPEQYIQKLKSVFHSTGNFVHPSGIDQPMHQTIDTLAKAFGDKTGKDFRVWVDCISLAEVSLGSWLVKFDKWELSGNESRGCSTKALMNAKVDVPDEYTWMHLHHTWLDDVGGQDDVSWLL

SEQ ID NO: 9204 - protein, 88 aa, Glycine max
  Clone ID: GLYMA-23APR03-C5288_6.p
MAEGARTAHAPAPHPIQPKPDDKTPNPVKETPPPPEKPEPGDCCGSGCVRDVYYDELEDTISYTNKTIPAPKLLHSLHHRMGGSVMGR

SEQ ID NO: 9205 - protein, 132 aa, Glycine max
  Clone ID: GLYMA-23APR03-C52967_2.p
MDSPKRQAQKFLVTVTAVVAVVAKRASRLQRKLAAREEWRIELLRSPKKLLSNISSKTLPFRKKKRGEEDWGKGGVWQKAILMGDKCEPLDFSGVIYYDSNGKQVNEMPLRSPRASPVPPGYYFIHHRDRHL

SEQ ID NO: 9206 - protein, 150 aa, Glycine max
  unsure (1)..(150): unsure at all Xaa locations
  Clone ID: GLYMA-23APR03-C5307_10.p
SPSPPPPYIYNSPPPPSPSPPPPYVYKSPPPPSPFPPPPYVYKSPPPPSPSPPPPYVYKSPPPPSPSPPTPYVYKSPPPPSPSPPPSYIYKSPPPPSPSPPSPYVYKSPPPPSPSPPPLYYYKSPPXPSPSPPPPPYHPYLYNSPPPPVY

SEQ ID NO: 9207 - protein, 228 aa, Glycine max
  Clone ID: GLYMA-23APR03-C5307_12.p
MTVGSYDPPRRGHLGPQMAIALLIVLISFNVGSVAGDAYIYSSPPPPPYEYKSPPPPSPSPPPPYEHKDPHYQYKSPPPPSPSPPPPYYYKSPPPPSPSPPPPYYYKSPPPPSPSPPPPYYYKSPPPPSPSPPPPYYYKSPPPPDPSPPPPYYYKSPPPPSPSPPPPYYYKSPPPPSPVSHPPYYYKSPPPPTSSPPPPYHYVSPPPPTKSPPPPVYIYASPPPPIYK

SEQ ID NO: 9208 - protein, 218 aa, Glycine max
  unsure (1)..(218): unsure at all Xaa locations
  Clone ID: GLYMA-23APR03-C5307_15.p
MTVGSYDPPRRGHLGPQMAIALLIVLISFNVGSVAGDAYIYSSPPPPPYEYKSPPPPSPSPPPPYEHKDPHYHYKSPPPPSXSPPPPYYYKSPPPPSPSPPPPYYYKSPPPPXPSPPPHYYYKSPPPPDPSPPPPYYYRSPPPPSPSPPPPYYYKSPPPPSPSPPPPYYYKSPPPPSPVSHPPYYYKSPPPSTPSPPPPYQYVSPPPPTKSPPPPIYK

SEQ ID NO: 9209 - protein, 320 aa, Glycine max
  Clone ID: GLYMA-23APR03-C5313_1.p
MASFSLFFFFLFTTLLLSFSSANARLTLDFYNDTCPQFSQIIRDTVTSKQIASPTTAAATLRLFLHDCLLPNGCDASILLSSTAFSKAERDADINLSLPGDAFDLVVRAKTAFELACPNTVSCADILSAATRDLLTMLGGPFFPVFLGRRDGRTSLASAVPDHLPTPAMPISQITQIFTHRGFSIEEFVALSGAHTVGFSHCSQFVTNLSNSSYNPRYAQGLQKACADYKTNPTLSVFNDIMTPNKFDNAYFQNLPKGLGVLKSDHGLYSDPTTRPFVETFAKDQNRFFQVFARAMQKLSLLNVQTGRKGEIRRRCDQIN

SEQ ID NO: 9210 - protein, 223 aa, Glycine max
  Clone ID: GLYMA-23APR03-C5319_2.p
MATTISCDFSSVESIQHYLLELEHDFNTLMNASNHEICYSPTYNSFPSSTTFRLEGVHDAEGSLACKREHPKVEREFHAPPAWKRYRGVRRRPWGKFAAEIRDPKKNGARIWLGTYETEEEAGLAYDRAAFKMRGSKAKLNFPHLIGSHAPLKPIRVLTKTLKQNLLESDLSYSSAPQTQESKKRKNLTDLLNRLAKNRKQVEVFEMSLHASNDVNVDQWWSN

SEQ ID NO: 9211 - protein, 256 aa, Glycine max
  Clone ID: GLYMA-23APR03-C53244_1.p
MSDPASKPSGNGAAATNGNPGPVKSQLYNPNRQVYRPQSHYHRRGQRSHRNLCCCCCFWTILTLLAVALLAAIVGAALYVLYRPHRPEFSVTNLRIAKMNLTTSADSPSHLTTLFNLTLIAKNPNNHLVFFYDPFSVTVLSNSVPVGNGSVTAFTSDKNNQTSLRAVLSGSQDLDTDSLTSLRSGLKMKRGFPVEIQMDTKVKMKMDWLKSKKVGIRVTCDGIRGTVPSGKTPAVASVVDSECKVDLRIKIWKFSF

SEQ ID NO: 9212 - protein, 370 aa, Glycine max
  Clone ID: GLYMA-23APR03-C533138_1.p
APPPVVAALVVIVILVTVYICLMRVKRFMRQTSEVASSMPSPTVEIGRVNNAHVNAFSPHYTHNTRQLTILEVEQATRNFSHSNIIGEGGFGFVYKGLLQDGSIVAIKRRLFVLTQDFVLKVKQIAHIHHNHLVKLIGYYEDSYQQLLVYEYLPNGNVGSHLYDSEGLPIGRLDLWRRISIASGASKGVEHLHSLVPPLIHTNFRTSNVLLDENYTAKVSDYGFCNSKTQVDNVGSSSNVDCFLDPELSFPQNYTEKSDVYSFGVFLLELICGCEAQNKSMSNPDENIVFQAKNSVDLDKFVDITLGEQEKHGARRVMKLALLCVDVTSRRPSMAQIVHELEQIQREIAPMYSQFNEEIGAVTLGSELFQ

SEQ ID NO: 9213 - protein, 309 aa, Glycine max
  Clone ID: GLYMA-23APR03-C533552_1.p
MSLIAEAPNFLKLYSDGSVKRFDPEIVPASLESTKGYKSKDVIIDSSKPITGRIFLPDYPTSSKKLPLLVYFHGGGFCIGSTTWLGYHNFLGDFSVTSQSIILSVDYRLAPEHRLPIAYEDCYTSLEWLGDQVSCEPLLQQIDLTRVFLSGDSAGGNIAHHVAVKAIQNNECPLKIKGLMLIHPYFGSEKRTKNEMADESIKDVAMNDMFWRLSIPEGLNRDYFGCNFEKTDLSTSVWSKFPAIGVYVAGKDFLKERGVRYAEFLKKKGVKEVELVEAKEETHVFHVYYPESCATRLLQNQMSLFMEKY

SEQ ID NO: 9214 - protein, 374 aa, Glycine max
  unsure (1)..(374): unsure at all Xaa locations
  Clone ID: GLYMA-23APR03-C534572_1.p
MEGNSGRGVRGTKKIAILPWELIIEILLRLPVKSLVRFKCVCKSWLCLLSDPHFATSHFEQPSTRTHRLIFIVAPSSPQIRSIDFPLXDDSAWAALNLNFLRPNTYHNVQILGSCRGFLLLNGCQSLWAWNPSTGVYKKLSSSPIGSNLMRSVFYTFLYGFGYDSSTDDYLVVKASYSPISRYNATTRFEFLSLRANAWTDIEAAHLSYMNSSQGIGAGLFLNGAIHWLVFCCDVSLDVVVAFDLTERSFSEIPLPVDFLEEDDDFDSCELGLGVLGELLSISAVGRNHSVQVWVMKEYKVHSSWTKTIVVSSENILLFPLCSTKGGDIVGTYGGTGLAKCNDKGQVQEHRSYSNHPYPSQVAVYIESLLSLPM

SEQ ID NO: 9215 - protein, 201 aa, Glycine max
  Clone ID: GLYMA-23APR03-C535291_1.p
RVSYVGPPPLARCAAASDIVPSSPRATDNPPALRCLVYQDLLSGDELLSDSFTYKELENGVLWEVEGKWVTQGPVDVDIGANPSAEGGEDESVDDTAVKVVDIVDTFRLQEQPPFDKKSFVSYIKKYIKNLTAVLEPEKADEFKKGVEGATKFLLSKLKDLQFFVGESMKDDASVVFAYYKDGATNPTFLYFSHGLKEIKC

SEQ ID NO: 9216 - protein, 485 aa, Glycine max
  Clone ID: GLYMA-23APR03-C535461_1.p
MALGNNSHQLLSKIATNDKHGENSPYFDGWKAYDSNPFHPTKNPQGVIQMGLAENQLCFDMIQEWIRNNPKASICTAEGVNQFKYIANFQDYHGLPEFRNAVANFMSKVRGGRVRFDPDRILMSGGATGANELIMFCLADAGDAFLVPSPYYPAFVRDLCWRTRAQLIPVECHSSNNFKITREALEESYRKAKEGNINVKGLIITNPSNPLGTTIDKETLKSIVGFINEKNIHLVCDEIYAATVFRAPSFVSVSEVMQDMEHCKKDLIHIIYSLSKDLGLPGFRVGIVYSYNDEVVNSGRKMSSFGLVSSQTQHFLAALLSDDEFVERFLAESARRLAARHSHFTKGLEKVNITCLPSNAGLFFWMNLKGLLKEKTFEGEMMLWRVIINEVKLNVSPGSAFNCPEPGWYRVCFANMDDETVDVALMRIRAFVGKETGKPPKELKRWKSNLRLSFSNSRRFDENLMSPHMMSPHSPMPHSPLVRAT

SEQ ID NO: 9217 - protein, 435 aa, Glycine max
  Clone ID: GLYMA-23APR03-C535904_1.p
MKYRVSHKFPVLPRHTRPFNHTRYFTSFAKKFQTPQPRASINAGGSGNSQGNSFVVPGATVATILMLGVLHARRLYEDKKTEQMKEKGIEIEFQPDAKATFLRLLPLRSISRCWGYLTSMEIPVWLRPHIYKAWARAFHSNLEEAALPLDKYASLRDFFVRTLKEGSRPIDVDPQCLVSPVDGTVLRFGELKGAGAMIEQIKGFSYSVFSLLGASPFLPTTDVQEEHSESITTTVKSKKSWWRVSLASPKVWNPTSSRPKKGLFYCVVYLKPGDYHRIHSPADWNILARRHFSGRLYPLNERATRTIRNLYIENERVILEGLWQEGFMALAAIGATNIGSIELFIEPELHTNRPRKKFLHSEPPEERIYGCEGVGRMLKKGDELGAFNMGSTVVLVFQAPISKLPEGDSSQEFRFCVGRGDRIRVGEALGRWHSS

SEQ ID NO: 9218 - protein, 378 aa, Glycine max
  Clone ID: GLYMA-23APR03-C536101_1.p
MAATETITAEPHEAEEQQHQQHHVYVEAEPLSYKTVVLRVSIHCQGCKRKVQKILQAVHGVHTIDIDLRQHKVVVTGNVNSETLIWKLTKAGKHAELWPQLKADSKKKKQPKPESSQGINQTDKQAVNVVAQGTNANVSKPGEGCATGKAGVQIQEPKPEVIRQTVVLPPAGPVTEKVSIAVQVPNDNEATGNENITGGTGGGGAGKKKKKKASVKGSTNNNANEGAGAATVTVEHAKANDGSGPSSGNQSHGQGHVHVHGPWLPFSSPANESPPRHHNIYRQYPPHYYAPPPPPPPPSTTPAVHTVMSYHTAHPSSSYGTAYYTSPQPYSYAHVVRPGNEMEPPPPYTYERESYASSQPSDSFELFSDENPNACSVM

SEQ ID NO: 9219 - protein, 383 aa, Glycine max
  Clone ID: GLYMA-23APR03-C53643_1.p
MEGKIALKKLLEVQEKAYVNDTDAINWTEEPSIKNTLGSSLLSLSLNNLEPPQNHEQQNLNQLGLLQIELEEVKKENQNLRSMLNEISEHYAALQNQLLLAMQQKKLSSSPRNNEDMQKDSQQNNMEKPALPSCRQFLNTGKINNRVILQEAKIVEEQAFEASCKKARVSVRARSESSLMGDGCQWRKYGQKISKGNPCPRAYYRCNMGTACPVRKQVQRCAEDESVVITTYEGNHNHSLPPAARSMACTTSAALKMFLSGSTTSSHGSTYSYSNSDLFSPLCTSTYYPSAAPSCPTITLDLTQTSKNNMKFPSAISSNHLQPFPLSLHGQPQQSEGILPSEKNLALVDVVSAAITNDPSLKAALEAAVSSIIGDSQKSLPTL

SEQ ID NO: 9220 - protein, 76 aa, Glycine max
  Clone ID: GLYMA-23APR03-C536518_1.p
MSCNCGSSCGCGSSCKCGKKYPDLEETSTAAQATVVLGVAPEKKAAPEFVEAAAESGEAAHACGCGSSCKCDPCNC

SEQ ID NO: 9221 - protein, 124 aa, Glycine max
  Clone ID: GLYMA-23APR03-C536572_1.p
MASIFKLLFLILFLGLVFQGVAANCPIEGRFSISQSQTPDWAHGMPQWKVKVTNKCACAQSQVKLNCSGFQTNFVENPSILNISGNVCLLKNGLPIGIGETVEFLYAWLPKFPFQPISSIGDCN

SEQ ID NO: 9222 - protein, 78 aa, Glycine max
  Clone ID: GLYMA-23APR03-C536691_1.p
LQPGAVYVSQNLNFKFPVYIGDQIIGEVQATNLRENKNRYLAKFKTRCFKNGDLLVIDGEAVALLPTLTVEQIQHEKC

SEQ ID NO: 9223 - protein, 491 aa, Glycine max
  Clone ID: GLYMA-23APR03-C536885_1.p
MGIGNDTERLRTIWTPEMDRFFINLMLEQVAQGRKFEDHLFSKRAWKHMSLKFNAKFNFQYEKDVLKNRHKTLRNLYRGIKNLLAQPGFSWDEKRNMVIADNHVWDEYLTVDANVRSYRVKSIPYFEDLCTVYGHVMEGKGDTAPEESSNSGEYGAITPFLSKDVCEDDDELLCDVRTDEDCGISTVENATDDCEQRAKKTASSSGTRTRTYWQPPMDRYFINLMLAHLHKGNQFDGVFSKQAWVEMISSFNKKFGFEYSLEILKNRHKTLRRQYNLIKSLLQLHGFDWDETRQMVIADDCFWQDYIKVHPDARQYMTRPLPYYKDLCAIFDPNFDEKESLLQDKLQNAVDFQTECPQTSKTGQSPITPNSNEEQFSSVNELANICQKQKRQLEKGSNFTSPKKSRNDEQGMAVALCEMAAVVSTVSAKKIDTSISIENVIEAVQALPDMDDELVLDACDFLEDERKAKTFLALDAKLRKKWLIRKLRIQM

SEQ ID NO: 9224 - protein, 460 aa, Glycine max
  Clone ID: GLYMA-23APR03-C536941_1.p
MSSVTYKGCYTVRPMEPTKCERVPLSEWDQIGTITHVPTIYFYRPTSQDKDNVNTVASTLKDALSRALVPFYPLVGRLHWINKGRLELDCNAMGVHFIEAESSLTLENLGDFSPSSEYNNLVPNVDYTLPIHELPVVLIQLTNFKCGGFSISLNTSHAVADGPSALHFLCEWARLSRGELLQTAPLFDRTVFRAGEPPLMPLTECRVHKDQFIHPPLLLGQTNNTEERKKKTTVVILKLTKTQVETLKKTANESNSGHARCYTRYESVTGHVWRTACKARGHKEDQPTALGVCVDSRSRMEPPLPKGYFGNATLDTVATSLAGDLVSKPLGYACSRIREAIERVTDEYVRTGIEFLKNQEDLSRFQDLYAIGSEKGPFYGNPNLGVVSWLTLPIYGVDFGWGKEVYMGPGTHDFDGDSLLLPGPDGEGSVLLALCLQVPHMDTFKKHFYQDINVSESCQD

SEQ ID NO: 9225 - protein, 191 aa, Glycine max
  Clone ID: GLYMA-23APR03-C537209_1.p
MSHIAVERNRRRQMNEHLKVLRSLTPCFYIKRGDQASIIGGVIEFIKELHQVLQALESQKRRKSLSPSPGPSPRTLQPMFHQLDSPSMIGTNSFKELGASCNSPVADVEVKISGSYVILKVICHRIPGQVAKIITVLESLSFEVLHLNISSMEETVLYQFVVKIELGCQLSLEELAMEVQQSFCLDAIIAL

SEQ ID NO: 9226 - protein, 186 aa, Glycine max
  Clone ID: GLYMA-23APR03-C53765_1.p
MRSYGLTVPGSDHRFCVPTVSQVFFRPNRPINRIAFPKATLKNDGFVVDLSFYDLLGIPESGSVTEIKNAYKQLARKYHPDVSPPGRVEEYTKRFIQVQEAYETLSDPSRRAMYDKDMAKGINFAFNARRRYNYHDQVVEQKSEWKARWKSQLSELKRKSNGKDAGGNMSWAARMRQQRDELSNES

SEQ ID NO: 9227 - protein, 102 aa, Glycine max
  Clone ID: GLYMA-23APR03-C537685_1.p
QQILFLFFSIFNLSFSIFFNHISIVRFEHPQACQVTTANNTISRFQSQTHAICTCALNDMAVILICCVSASDVQYLIPSAEIHVILIAAMSDGRMVCSAKKP

SEQ ID NO: 9228 - protein, 142 aa, Glycine max
  unsure (1)..(142): unsure at all Xaa locations
  Clone ID: GLYMA-23APR03-C5382_4.p
MATRGKLEVDIDLKSNADKYWQTLRNSTEIFPKAFPHDYKSIEVLEGDGKSPGSIRHISYGEGSPLVKSSFEKIEAVDEEKKVVSYTIIDGELLQHYKTFKGDISVTPIGDGCEVKWSAAYEKVSHDISDPTLXKDFAVKNS

SEQ ID NO: 9229 - protein, 354 aa, Glycine max
  unsure (1)..(354): unsure at all Xaa locations
  Clone ID: GLYMA-23APR03-C538416_1.p
LLARSIQYKNATFKSRQISRASSMASSLPLLLLLLPFGLFSFGRALPREAIFDASDVLSDSGYVSMALTLEIVAETLLEQSPSATVFAPSDSAFKKSGQPSLDLLRFHLAPLPLPPASLRLLTAGSRIRTMLPGQTLTVTTSSSDGVTSFNNIKLTGSPIYDDGILLVYGIDTFFDPNFQFNIQGPSDKSDSSCSAKNHTATASDSFDQAIQTLKTGGYSAVASFLGMQLSGVADQSGITVFAPADDMVMNRIGDFGEYPSFFRRHVVPCRLXWNDLVDFGDGSELPTFLEGFAINITRSDGVLILNGVRVFFPDVFFNDRVVVHGVSDVLAAQDNALRIDVDDEEILFDPSEF

SEQ ID NO: 9230 - protein, 284 aa, Glycine max
  Clone ID: GLYMA-23APR03-C538520_1.p
MEYYKIQLVVIVSLMIVLPNTQGWGEDGHAIICRIAQSRLSDSAANAVKNLLPEYAQNDLGNVCSWADRVRFYLHWSAPLHFADTPDNLCNYQYDRDCKDQDGVKGRCVVGAIKNYTDQLLDYGKNTQNNLTQALMFLSHFMGDVHQPLHVGFTSDRGANSINVHWYTRKQNLHHVWDVNIIETAEERFYDSNIDEFTNAIQENITKTWSDQVLGWETCDSKETACPDIYASEGVQAACQWAYKGAPEGSVLEDDYFLSRLPVVSLRLAQGGVRLAATLNRIFG

SEQ ID NO: 9231 - protein, 180 aa, Glycine max
  Clone ID: GLYMA-23APR03-C53989_3.p
MAFRKALAQGLLNITKVSSQSLTNCRISSSSVIGKVSPRAAEPVDPGENGRFRSPQLAGRNLLDKLRTMGVAHNRIRLDGLTPPQIKMVDTVTIEDARKLLKVAQVEMLKAKLRQTRKSCITFSEFIAICAEHCSDQDQAVEIAKMLDDSAAVIVLGDVVFLRPEQEIETMLFRTFEVVN

SEQ ID NO: 9232 - protein, 307 aa, Glycine max
  Clone ID: GLYMA-23APR03-C540543_1.p
MESHLLVGPISAARYGCAANSSHFHSAASSTWANSPRRRSPLVMASSSSAAVNGGQNYYAVLGVARTATTVQIKRAYRLLARKYHPDVSKDPHAAELFKSIHHAYEVLSNEATRVQYDQELQFGHKPYREKWSYSTEFEDQARFYRWDRMRKKMDRERYWENYNVNEDYYTSETDEEEDEVVDLDEERGSFVEVLRSAFMSLFLLQTLGSRFSLTFSSLMALFDKKLDTGYKMGYVIAWILGGRGGILLTLCLSFASWVCGKTSSSVVALVVVALWVGSYLARYAPLPQGALLALLYMSIKLQSDLI

SEQ ID NO: 9233 - protein, 106 aa, Glycine max
  Clone ID: GLYMA-23APR03-C540738_1.p
MELGSYSDQSKSTFSLVDEDHTFANSVRFTLNQDPRVTFCGYSIPHPSDNRVNIRVQTTGDPAREVLKDGCQDLMLMCQHVRSTFDNAMTDFKRTQTNTEQEMDTK

SEQ ID NO: 9234 - protein, 215 aa, Glycine max
  Clone ID: GLYMA-23APR03-C54078_1.p
MDSISPKPQENNNNNNNNIPKPMTRSEPANSYPTTFVQADTTSFKQVVQMLTGSSETAKQAAAAAAAASSSSSSSKPANPIPPMKSIPNKKQQPHFSKLYERRTNSLNLRNSLHINPLTSFFSNHTNSPRKADILSPSILDFPALVLSPVTPLIPDPFDRSNAAIDSEAEVKAIKEKGFFLHPSPRDKAQPLLLPLFPTTSPRASSGPSSSAPPS

SEQ ID NO: 9235 - protein, 306 aa, Glycine max
  Clone ID: GLYMA-23APR03-C54102_1.p
SHVGPPPPDDISFGKESVPVICVVDQELTHSLHMNGCNGQNISSSMPWETITYVTKPMLDQSLSLDSESLQLGCACSYTSCCPETCDHVYLFGNDYDDAKDIFGKPMRGRFPYDENGRIILEEGYLVYECNHMCRCNKSCPNRVLQNGVRVKLEVFKTEKKGWAVRAGEAILRGTILCAYIAEAWGGLAAPVRRLGVRAAPCCYLYDIDARVNDMGRLAREQAQYVIDATKFGNVSRFINHSCSPNLVNHQVLVESMDCERAHIGFYASRDIALGEELTYDYQYELMPGEGSPCLCESLKCRGRLY

SEQ ID NO: 9236 - protein, 122 aa, Glycine max
  Clone ID: GLYMA-23APR03-C541226_1.p
MAGIGKGVEFEDLLPVIAGKLGGEGLIKELCKGFRLLMDKEKGVITLESLRSNSAMMGLQDLKEEELVSMMREGDLDGDGALSEMEFCVLMFRLSPQLMKDSWFWLQQALQHELINNNVSSV

SEQ ID NO: 9237 - protein, 106 aa, Glycine max
  Clone ID: GLYMA-23APR03-C541227_1.p
MGHANASNSTTMALAPSASLKSFTSPIPYLFGGLALMLALIGLALLILACSYSKNYSLDGNEDKAKRATGMEVDSEPKIVVIMAGDSNPTYMAKPVPSTHHTEEAD

SEQ ID NO: 9238 - protein, 224 aa, Glycine max
  Clone ID: GLYMA-23APR03-C541345_1.p
MWNPRDQYHHQDQDQDESWEVRAFAEDTSNIMGTTWPPRSYSCTFCRKEFRSAQALGGHMNVHRRDRARLHQASVPHNNPSFSPTPSFLNISHQEPFVANGGLCLLYPFPSPNNNAPFSSLGHNNNACGDSPSTAFSVSSSHSLQYPPMRVPSCSASTSFDFSVAQPAPPAVGRNNNGFSSSYSGKVEQEPPTNDSSTHHGHGRHHHDEELDLELRLGNKSTST

SEQ ID NO: 9239 - protein, 502 aa, Glycine max
  Clone ID: GLYMA-23APR03-C5437_2.p
MASSLLSPSFTSFPRIKKDVSLSAFTSQRCFKALPRRIIRCAVAAPQRQPSTTGSVRTAMTMTEKILARASEKVQLTPGDNVWVNVDILMTHDVCGPGSIGIFKREFGDDAKVWDREKLVIIPDHYIFTSDERANRNVDILRDFCHEQNIKYFYDIKDLSNFKVNPDYKGVCHVALAQEGHCRPGEVLLGTDSHTCTAGAFGQFATGIGNTDAGFVLGTGKLLLKVPPTLRFVMDGEMPDYLLSKDLILQIIGEITVAGATYKSMEFVGTTVESLTMEERMTLCNMVVEAGGKNGVVPADSTTFKYLEGKTSLPYEPVYSDDQARFLAEYRFDVSKLEPVVAKPHSPDNRALARECKDVKIDRVYIGSCTGGKTEDFMAAAKVFLASGKQVKVPTFLVPATQKVWMDLYSLPVPGSGGKTCSQIFEEAGCDTPASPSCGACLGGPKDTYARMNEPKVCVSTTNRNFPGRMGHKEGQIYLASPYTAAASALTGYVTDPKEFLQ

SEQ ID NO: 9240 - protein, 157 aa, Glycine max
  unsure (1)..(157): unsure at all Xaa locations
  Clone ID: GLYMA-23APR03-C544_2.p
MQPTSGGGGLARFRSAPASWLESVLLKEEEEEEDPLSFTQLLSTIDDAPSHSQHQLYGAALSNKDKTPEIFMLEDSVPCRVRAKRGCATHPRSIAERVRRTRISDRIRKLQELVPNMDXQTNTADMLDEAVAYVKFLQKQIEELSEHQRRCKCVVQE

SEQ ID NO: 9241 - protein, 333 aa, Glycine max
  Clone ID: GLYMA-23APR03-C54585_1.p
MALPHSIILPFSSIISPCCLPKHKPTNFTLPFKLNGDSCRSIRIPSRVQALKSDGGKWKKRGQEASSDTDDDDDDDDAPQRFNKNDPYLMSPEERLEWRRNIRQVLDRKPDVEEELDPLEKKKKLEKLLEDYPLVVDEDDPDWPEDADGWGFSLGQFFDKITIKNKKKDDDDDDDNDDVDRPEIMWQDDNYIRPIKDIKTAEWEETVFKDISPLIILVHNRYKRPKENEKIRDELEKAVHIIWNCRLPSPRCVAIDAVVETELVAALQVSIFPEIIFTKAGKILFRDKAIRSAEEWSKVMAYFYYGAAKPSCLNSLTYSQENIPSIVTDNPVS

SEQ ID NO: 9242 - protein, 324 aa, Glycine max
  unsure (1)..(324): unsure at all Xaa locations
  Clone ID: GLYMA-23APR03-C547_8.p
VYGDDTLISVHEYVKPYFSGSKLKSFLAGHNITITDGIDKTSATLQFRKLADCDFLKRNFKQMSNVLWVAPEDKASLWSQLHYVSCNNLEMQEAYLVNLVNVLRELYLHSPEEARQXRRKALSRIEWLQKADVPTIAQIEEFHSMQRMMNAPDSNDNIDLLLSIDLLGLQGAGKAFPNKIVFNDKLVLANTQEFFDGNFPVDSWLPIFVNCLYPVSQLPSEAVVVNVTCGSGRGGLPTTAWISSAVNNRSSDINKRIRTALGKGKKIVFLTRVDPFPVALLAVLFGVKNEILSSNATNPMLTRLLENCKNLKYLVDECPFAFVN

SEQ ID NO: 9243 - protein, 107 aa, Glycine max
  Clone ID: GLYMA-23APR03-C54811_1.p
MTIHTDPSATYRCKNCQNPVAFRAELLSKNYLAKTGRAFMFSHARNIVLGPKQERSLMTGVYTIAGIFCSNCGEELGWKYLQAYEARQKFKEGKFIIETAKIAKDYY

SEQ ID NO: 9244 - protein, 109 aa, Glycine max
  Clone ID: GLYMA-23APR03-C54846_2.p
MAWLQLQRIITNTKGGANLISPLPRFFSKCSPYVLKVGIPEFLNGIGKGVESHVPKLESEIGDFQKLLVIRTLKLKKLGIPCKHRKLILKYTHKYRLGLWRPRAEFITA

SEQ ID NO: 9245 - protein, 71 aa, Glycine max
  Clone ID: GLYMA-23APR03-C55040_2.p
MGKLVEILDQGVRIAARFHSNCPQTGRKYYHPPSLSDNHGHHYHAGATTTSAGGVKEAVAARSIDIILYSV

SEQ ID NO: 9246 - protein, 213 aa, Glycine max
  unsure (1)..(213): unsure at all Xaa locations
  Clone ID: GLYMA-23APR03-C556228_1.p
MWKGSERIFKTNVLLLVKSIDLSSNHFSGEIPQEIENLFGLVSLNLSRNNLIGKIPSKVGKLTSLESLDLSRNQLAGSIPPSLTQIYGLGVLDLSHNHLTGKIPASTQLQSFNASSYEDNLDLCGQPLEKFCIDGRPTQKPNVEVQDDEFSLFNREFYMSMTFGFVISFWMVFGSILFKLSXRQFYFKFLNNLSDNIYVKVAIFANKISKVHG

SEQ ID NO: 9247 - protein, 92 aa, Glycine max
  Clone ID: GLYMA-23APR03-C556570_1.p
SCSSARIRGMIADQQRKQSLIFDHTLRMDVFLCKKEIGKLRHRIRPLANQSQNQSKEAANNSNSQKRRSAGDYYLRHRLVTAQGRSLGQADS

SEQ ID NO: 9248 - protein, 100 aa, Glycine max
  Clone ID: GLYMA-23APR03-C55708_1.p
SSLDSVVYRRLSLCWRIVHLSYLYKVMVVLLRDIFVLRSAQCIHISRIAIYRGVNLGLFHILGEGLGCRNGNGNEFPILYVSCSKHKNIQRYSEYQDLYI

SEQ ID NO: 9249 - protein, 79 aa, Glycine max
  Clone ID: GLYMA-23APR03-C55792_2.p
TASAFRYGSLYSQLELFPQKAGDDSSSVKKIISACDVEALKKCLEENKGDYVKCHSQIEAFKSSCSLKKPNPSLDSASR

SEQ ID NO: 9250 - protein, 100 aa, Glycine max
  Clone ID: GLYMA-23APR03-C56011_2.p
METVQSWVSKHKLASIGALWASGIGATLVAYSCKKSPMKPSLRLIHARMHAQALTLAVLSGAAVYHFYEKRDVQPKPVADYTIPAPNVTQMVEYELQCPF

SEQ ID NO: 9251 - protein, 171 aa, Glycine max
  unsure (1)..(171): unsure at all Xaa locations
  Clone ID: GLYMA-23APR03-C5661_2.p
MIDLYISNLPNNNNNNNMNNIESYPPVLRHLDQQQPPPNPDPDYKDPTQEDPDTIPIIDLSCLDHDTNKLEEACKDWGLFRLVNHGVPLTLLNELQEMAKELFSLSFEVKEGACSGCPVTYFWGTPCPNXSGRTLTTRSPQNINWVEGFDVALSQLPHFSVPQLPTLESIR

SEQ ID NO: 9252 - protein, 294 aa, Glycine max
  unsure (1)..(294): unsure at all Xaa locations
  Clone ID: GLYMA-23APR03-C571_2.p
MGTVSNIGFPSVFRVPLDSQQALSKQMKNKSSCDFMVPSNHNYSVRLSPICCNKLSESGIEENPTTTSTGERPSKNKDRMEEYNIAMKKMMRNPYEYHHDLGMNYTLITDNLIVGSQPQKPEDIDHLKKEEGVAYILNLQQDKDVEYWGVDLQSIIRRCRELEISHTRRPAKDFDPDSLRNGLPKAVSSLDWAFSEXKGRVYVHCTAGLGRAPAAAIAYLFWFCDMNLNKAYDMLTSKRPCGPNKRAIRGATYDLAKNDPWKEPFENLPEYAFEDIADWERNLIQDRVRSLRGT

SEQ ID NO: 9253 - protein, 128 aa, Glycine max
  unsure (1)..(128): unsure at all Xaa locations
  Clone ID: GLYMA-23APR03-C57262_1.p
QLRRPPPLFYFLFAYIFVSACFLSDETKAVGSIIESILQCALDFRSCITVGSWDSGSDPEDLLGKLSKINISXVLSIKQKFDRSLKELHICYIKGPKHGNFGLSRFWDYLNYNEYYSNVSNEMGYYAV

SEQ ID NO: 9254 - protein, 254 aa, Glycine max
  Clone ID: GLYMA-23APR03-C57289_1.p
KLISCFIALHRFHQLPEFDQGKRSCRRRLAGHNERRRKPPPSSLLTSRYARLSSSAFDHSGRGGNFLMELASYPKLSLRNSLPTPRSSELAPGNQTSTLSWHGNSETSSDLFLQGSVGGTSFAGPGHPPGESYTGVTTSSCALSLLSNQTWGSRNPAPSLGLNNMVNFHGTPMTQPAASSHGASIHQLPNTPWCFKGIDSGNCSPEGVPDLGLGQISQPLSSQLHGELDLSQQGRRHYMDLEQSRAYESAHWSL

SEQ ID NO: 9255 - protein, 362 aa, Glycine max
  Clone ID: GLYMA-23APR03-C573_22.p
MQKTSGNIIGHFLGGLYYYLRRCMFAILSVGPVPSHIAFIMDGNRRYAKKRNMEEGDGHKAGFTALMSILRYCYELGVKYVTVYAFSIDNFKRKPNEVQSLMELMREKIEELLLQESLINEYGVRLHFIGDLQLLTEPVRASVEKAMRVTAHNNQRVLLICVAYTSRHEIVHAVQECCKEKWNEVQASKEAKLTNGAFARIDQGLKGNGFDLLFQDSSKDYQNVTKACSSVPKGVQGAGEKDGMLEHTVEKHSENNSEAEITLCNELFEMTEERKYKQGDVPLIKLVDIEKHMYMAVAPDPDILIRTSGEARLSNFLLWQTSTCPLYAPTALWPEIGLRHLVWAVLNFQRHHFYLEKKKKQF

SEQ ID NO: 9256 - protein, 262 aa, Glycine max
  Clone ID: GLYMA-23APR03-C57760_1.p
MIMAVLGKVKEAGLPLMKLVKLRGMPILQQLHLEERLLRTSSDNWCLINDGTSSPAIVMGLSGKLSELVEAKPVLQDRISIIRRFTGGGTVVVDQNTIFVTLICNKDAVSNVQPFPRSIMSWSGLLYSEVFEGLAGFHLRENDYVFDDRKFGGNAQSITKHRWIHHTSFLWDYEVKNMSYLKLPAKAPEYRLTRSHMDFVCRMKEYVPRSEFIEKTIKAIGGQFSVKSISLESIDIPSVSEYVHTTRLLTEQEIQEACTIQT

SEQ ID NO: 9257 - protein, 97 aa, Glycine max
  Clone ID: GLYMA-23APR03-C57793_4.p
FFSFSELGFWSFVAVVVHLRATGDAPILKQSKFKIAGTDKFAKVIDFLRRQLHRETLFVYINSAFSPNPDELVIDLFNNFGFDGKLVVNYACSMAWG

SEQ ID NO: 9258 - protein, 286 aa, Glycine max
  Clone ID: GLYMA-23APR03-C5795_1.p
MLRLGYNRSAKRCKEKWENINKYFKKVKARNEQRRDDGKASPNCKQQQVVHERSTAAAKNAAVIAFLQQLSGHHQNSTATQAAANFPPQSPPQKVTKVQPPPQQAPQPQAPLVLSNSDNMEIQKMNNGHSVVTATVTATATPTPTTTFVAAATAITTTPSSLSSLSSSRWPKTEVHALIRLRTSLETKYQENGPKAPLWEDISAGMLRLGYNRSAKRCKEKWENINKYFKKVKESNKQRREDSKTCPYFNELEAIYKEWGKTQNPFGTSWHHMKPHEMMEEFVEQP

SEQ ID NO: 9259 - protein, 178 aa, Glycine max
  Clone ID: GLYMA-23APR03-C5842_1.p
CSPACCGRVEDKILKVGEELWRETLPLHGGSCFYQLQGLKPHTWYEVKISYPASVCIIMSLPLRLRTSAVALDNSWRVRNTEKLIFKTNSNQDEFLLVLVTVEPEGFPAKLHVAERQFIIFNIVCDELLLGIPHKAWWVVALALLCLGIAFIVPSFLPLHLLPKNQVLRTDDYVSKIS

SEQ ID NO: 9260 - protein, 379 aa, Glycine max
  unsure (1)..(379): unsure at all Xaa locations
  Clone ID: GLYMA-23APR03-C5867_2.p
MLFDRLAFCCSKHTSSSQRKYPTVIEELCHQFSLANLKKSTNNFDENGVIGYGRFGKVYKGCLQHNDGSDYSVTLKRLGVKDSRGLEQFKNEIELLCQLRHPNCVSLIGFCNHKKEKILVYEYMSNGSLHQHLRGGLLSWKKRLEICIEAAHGLHYLHTGAKRTIIHRNINPSNILLDNNMKSKLTDFRLSIQGPRYGSKPKPIKVYVIEGKILFYEALIFNMLNDVVFVVVXILILSLIGSLGYMPMEYIVDGTITDKFDVFSFGMVLLEVVCGRNCLIIPTETEVLEKPVEENIDQNIKGKIAPECWQVFIDIIIRCLKYEPDERPTMGEVEVQLEHALSMQEQADITNTNSDYTLFSTTTIHLGLELESNPEESDT

SEQ ID NO: 9261 - protein, 87 aa, Glycine max
  unsure (1)..(87): unsure at all Xaa locations
  Clone ID: GLYMA-23APR03-C5888_3.p
SVFSLFYLLCSCXMYPDLSYXESTXXETLVMGVXPVKAQFESAEMGVPXENDGCKCGANCXCNPCTCKGVGLKLQAMALRNNDKNYM

SEQ ID NO: 9262 - protein, 160 aa, Glycine max
  Clone ID: GLYMA-23APR03-C58994_1.p
MSELLFDDIFKVEKVDPDGKKYDKVSRIVARSEKCDMNMLLDVNTEIYPMGEKERFLMALSPSLVLNTKDGSVSIQDKFEYIMHGRLYNITKPQLEKKKKKEKRSESQPEENEECSKPQLEVEVYASFGGLQLMLKGHASHCVKFAVDQKLFLLIRKVES

SEQ ID NO: 9263 - protein, 315 aa, Glycine max
  Clone ID: GLYMA-23APR03-C59005_1.p
MWWLGRKGPSGFSASSTAEEVTQGIDGSDLTAIVTGATSGIGVETARALALRGVHVVMGIRNMTAGGEIKETILRYNPIAKIDMMELDLSSMESVRTFASQFNSRGLPLNILVNNAGIMATPFKLSKDKIELQFATNHIGHFLLTNLLLETMKRTAIEQRKEGRVVNVSSRRHKLSYPEGIRFDKINDKSGYNSLSAYGQSKLANVLHTNELARRLKQEEGTNITANSVSPGPIATNLFRYHSLMEVFVGILGKYAMKNIQQGAATTCYVALHPQVKGLTGCYFADSNLAEASSQASDPEVARKLWEYSSDLVKF

SEQ ID NO: 9264 - protein, 145 aa, Glycine max
  Clone ID: GLYMA-23APR03-C59038_4.p
MGWKAAEKLIRHWKILRGDNVMITRGKDKGETGILKRVIRSQNRVIVESKNLVKKHIKQGQGHEGGIFTVEAPLHASNVQVLDPVTGEPCKVGVKYLEDGTKVRVSRGIGTSGSIVPRPEILKIRTTPRPAVLKYLTSLIMLFHV

SEQ ID NO: 9265 - protein, 189 aa, Glycine max
  Clone ID: GLYMA-23APR03-C590_2.p
MEKEAVGLEITTELRLGLPGGELPDKNEKIKKRVFSEIQAHDDDENSSSEQDRKIQTKNQVVGWPPVCSYRKKNTVNETKMYVKVSMDGAPFLRKIDLAMHKGYSELVLALEKFFGCYGIREALKDAENAEHVPIYEDKDGDWMLVGDVPWEMFIESCKRLRIMKRSDAKGFDLQPKGSLKGFIEGVTK

SEQ ID NO: 9266 - protein, 475 aa, Glycine max
  unsure (1)..(475): unsure at all Xaa locations
  Clone ID: GLYMA-23APR03-C5915_1.p
MGRCWLVGVIIVVGCASFLGTVGVVEGYPAEDLVVKLPGQPKVGFKQFAGYVDVDAKHGRSLFDYFVEAEQDPHKKPLTLWLNGGPGCSSIGGGAFTELGPFYPKGDGRGLRRNSMSWNKASNLLFVESPAGVGWSYSNTTSDYNSGDASTANDMYLFMLKWYEKFPSYITRELFXLTGESYAGHYIPQLTNVLLDHNARSTGSKFNIKGVAIGNPLLRLDRDAPAIYEYFWSHGMISDEIGLAIMNDCDFDDYVYASPHNVSQLCNNAIYEANLIVGDYINNYDVILDVCYTSITEQELRLKRMATRISVSVDVCMTLERRFYFNLPEVQKALHANRTNLPYSWSMCSHVLNYRDTDGNINILPILKRIVQNHIPVWVFSGDQDSVVPLLGSRTLIRELAHELQFKITVPYGAWFHKGQVGGWVTEYGNLLTFATVRGAAHMVPYAQPSRALHLFSSFVRGRRLPNTTRPSIDE

SEQ ID NO: 9267 - protein, 170 aa, Glycine max
  Clone ID: GLYMA-23APR03-C5999_2.p
MADDSAKGIENASLNSTRLENPQIEPIRLPSVEEIRGQDIWNNCAVRSVVSGVMGGGLGIFMGLFLGALDNPLMQEEMTGRQQLIYQAKQMGRRSWSSAKAFAVMGFIFSAAECVVEKARAKHDITNTVVAGCATGGAISAKGGPKAACAGCAGFAAFSVVIEKFLERHQ

SEQ ID NO: 9268 - protein, 372 aa, Glycine max
  Clone ID: GLYMA-23APR03-C60161_1.p
MANAKFGSSFSCSAASLSSSPFQRTRTAQLNLSQGLFVNQLTGAQLQMYTKDKSCQLKFIHGMPNLKGRLQKQHYALFVVSEDQSQYCELETTALVLENSNTVAEDISPASNSYFHLSGSDGKPGLLSFYNRPYRRDSKILLPNSERSQNSILWFLGPAVLVASFIFPSLYLRKVLSIIFEDSLLTDFLILFFTEAIFYCGVGVFLYLLDHVRRPLLVDIAANNSDTLPPQLGQRVSSVATLVLSLVIPMVTMGLVWPWTGPAASATLAPYLVGIVVQFAFEQYARYRKSPSWSAIPLIFQVYRLHQLNRAAQLVTALSFTVRGAEMTSHNMAINSSLGTLLNVLQFLGVICIWSLSSFLMRFIPYASTTKQ

SEQ ID NO: 9269 - protein, 423 aa, Glycine max
  Clone ID: GLYMA-23APR03-C601_2.p
MASSSSDPGKSAETSEAAALAVANDQLLLYRGLKKAKKERGCTAKERISKMPPCAAGKRSSIYRGVTRHRWTGRYEAHLWDKSTWNQNQNKKGKQVYLGAYDDEEAAARAYDLAALKYWGPGTLINFPVTDYARDLEEMQNVSREEYLASLRRKSSGFSRGLAKYRGLSSRWDPTYGRMSGSDYFNSMHYGAGDDSAAESEYVSGFCLDRKIDLTSHIKWWGSNKSRHSDAGTRLSEEKKLGSAGDVCSELKQLEQKVQPMEPYQMPQLGRLHNEKKHRSSSLSALSILSQSAAYKSLQEKASKRQENSTDNDENENKNTINKLDHGKAVEKPSNHDGGNDRLNIAMGMSGTMSLQRNAYPLTPFLSAPLLTAYNTVDPLVDPVLWTSLVPMLPAGLSRTAEVTKTETSLETSSTYTMFQPEE

SEQ ID NO: 9270 - protein, 118 aa, Glycine max
  Clone ID: GLYMA-23APR03-C6060_11.p
MEKKRKIVQYRERLDRTLASPDLANDEMLKKLVGSQLPPSSEPEVEGFRDKLVETKTAEVSHFLDMLRSASSDDSGRSYTSHTDWKLKQDGDEFRVMYREGPEGTPKKCVLQQLTLYV

SEQ ID NO: 9271 - protein, 226 aa, Glycine max
  Clone ID: GLYMA-23APR03-C6068_1.p
MMGSKNDVKLLSFLLSPVGHRVEWALKLKGVEFEYVEEDIFNKSNLLLELNPVHKKVPVLVHHQKPIAESLIIVEYIDQTWKQHPLLPQHPYQRALARFWGTVADKLVKTSYVAMCSSGDEQEKSVKEAKEVMDKIEEEIIKGKKFFGGDNIGYLDLAFGWIPYWLPIWEEVGSMQIVDPLKHCAISAWNTNFLSHPIIKDCLPPRDKMLVYSHRRKNEFSSTLRR

SEQ ID NO: 9272 - protein, 449 aa, Glycine max
  Clone ID: GLYMA-23APR03-C6079_15.p
MRECISIHIGQAGIQVGNACWELYCLEHGIGPDGQMPSDKTVGGGDDAFNTFFSETGAGKHVPRAVFVDLEPTVIDEVRTGTYRQLFHPEQLISGKEDAANNFARGHYTIGKEIVDLCLDRIRKLADNCTGLQGFLVFNAVGGGTGSGLGSLLLERLSVDYGKKSKLGFTVYPSPQVSTSVVEPYNSVLSTHSLLEHTDVAVLLDNEAIYDICRRSLDIERPTYTNLNRLVSQVISSLTASLRFDGALNVDVTEFQTNLVPYPRIHFMLSSYAPVISAEKAYHEQLSVAEITNSAFEPSSMMAKCDPRHGKYMACCLMYRGDVVPKDVNAAVATIKTKRTIQFVDWCPTGFKCGINYQPPTVVPGGDLAKVQRAVCMISNSTSVAEVFGRIDHKFDLMYAKRAFVHWYVGEGMEEGEFSEAREDLAALEKDYEEVGAESGEGQDEDEDY

SEQ ID NO: 9273 - protein, 160 aa, Glycine max
  unsure (1)..(160): unsure at all Xaa locations
  Clone ID: GLYMA-23APR03-C6084_3.p
MDCKKRVRDDSDESILESPEAKRLRDDLLEFFDDXDDAASTQDLDSVMKSLQEEISGVTSDYGESQAQIGYLLEASDDDLGLPPAGNSSAPQEKNVEAELVRVASDSSGIGELWEFEDQIPRYDSFDLGMGFGYECDATEYAAFGELFDHSDVYYDSWRQ

SEQ ID NO: 9274 - protein, 494 aa, Glycine max
  Clone ID: GLYMA-23APR03-C6110_1.p
MFNMLQTHHLQFLAILFLYTLTCSETATTSIPQELHIGFSVTPESWTTPFQAVLSDHSGNFSLGFLRVNQNQLALAVLHVASSEPFWVANPSHAPSWSDNTRLFFNGSLVLSDPETLVLWSTATNGDRVVLLNSSNLQVHHNGIPLWESFHFPKNTLVQDQNFTSNMTLLSSNGIYSMRLGNDFMGLYENHVQLYWKRTPLGAKAEVKEGQGPIYARVNPEGYLGMYQTTDEKPTDVQKFNTFQQTSSFLFVRLEPDGNLKGYYWDGSTWQLNYQAITEACDLPRSCGSYGLCTPGGSGCSCLENRTRFEPDGCFKDVGGESSGDLCSSEGIGGSKSSYWVLRRTGVEAPHKELVRHLTTSSWADCEGLCQNNCSCWGALYSNATGFCYMLDYPIQTMVGTGDGSKVGYFKVKKEERGKNRVWIRVGVVVTVLVGVGVIIIGTGFCVTRWRKRRGVKEEEWGSPGPYKNLGSASFRFIEMSNAHDARGDACAQS

SEQ ID NO: 9275 - protein, 274 aa, Glycine max
  Clone ID: GLYMA-23APR03-C6112_2.p
MLASEDILSFKSYQNRANLFVKEYLLADSLIPYTSVISGMLACKMVYELTQHIGSNYFKIYSNFSKIQRIEWNNRAISTIHAIFITSMSLYMVFCSNLFSDYQSTELITERSSSLSTFALGVSVGYFIADLGTILWFFPALGGYEYVIHHLFSLVAVAYAMLTGEGQLYTFMVLISETTTPGINLRWYLDVAGMKKSKAYLINGVVIFISWLVARILLFIYMFYHVYLHFDEVEQMHTFGQILVIVVPLVLSVMNLVWFAKIIKGLRKTLAKRQ

SEQ ID NO: 9276 - protein, 139 aa, Glycine max
  Clone ID: GLYMA-23APR03-C6126_48.p
MAFLYGAQRLLRHTPLVHSHYASIRLSSTLTSPKLFVSGLSRLTKDENLKEAFSSFGQLVEAKVITDRASGRSKGFAFVTYTTIEEAERAREGMNAKFLDGWVIFVDPAKPREPRPPQQSQSQPSEIGFTVNKTVGWCG

SEQ ID NO: 9277 - protein, 212 aa, Glycine max
  Clone ID: GLYMA-23APR03-C6126_59.p
YKSPPPPSPSPPPPYYYKSPPPPSPSPPPPYYYHSPPPPKEHVHPPYYYHSPPPPSPSPPPPYYYKSPPPPSPSPPPPYYYHSPPPPSPSPPPPYYYHSPPPPSPSPPSPYYYKSPPPPSPSPPPPYYYKSPPPPSPTSHPPYYYKSPPPPTSYPPPPYHYVSPPPPSPSPPPPYHYTSPPPPSPAPAPKYIYKSPPPPVYIYASPPPPIYK

SEQ ID NO: 9278 - protein, 113 aa, Glycine max
  Clone ID: GLYMA-23APR03-C6148_2.p
IVYIQCPLYHLLYKKKKSGRSRVTQLGDMSDVAMIIFEFAFKLVQFGEIQEKVVLKFSQEEFLTAWSTKVRTATPLLADGCPYLYALARDSSVSTFPFDGVIGVKATTMNNMC

SEQ ID NO: 9279 - protein, 314 aa, Glycine max
  Clone ID: GLYMA-23APR03-C61644_1.p
MATLIAPSNHSPVEDAESLRKAVKGWGADGKAIIAILGHRNATQRTLIREAYQNLFQEDLIKRLESELSGDFERAMYRWILEPAEREALLANIAIKSADKNYQVIVEISCVLSPEELFAVRRAYHNKYKRCLEEDVAANTSGHLRQLLVGLVSSFRYGGSEINAKLAQSEADALHEALKNKNKSNDEIIRILTTRSKTQLVATFNRYRDDHGIAITKKLSDEGSDEFHKAANLAISCINDHKKYYEKVLRNAMEHLGTAEDALTRVIVTRAEKDLKEIKEVYYKRNSVHLEHAVAKETSGDYKKFLLSLMGKEE

SEQ ID NO: 9280 - protein, 144 aa, Glycine max
  Clone ID: GLYMA-23APR03-C618140_1.p
MAEENAPVEVAAPVAAPTPVLGEPMDLMTALQLVMKKSSAHDGLVKGLREAAKAIEKHAAQICVLAEDCDQPDYVKLVKALCAEHNVHLVTVPSAKTLGEWAGLCKIDSEGKARKVVGCSCVVVKDYGEDSEGLHIVQEYVKSH

SEQ ID NO: 9281 - protein, 154 aa, Glycine max
  Clone ID: GLYMA-23APR03-C6192_4.p
MQIFVKTLTGKTITLEVESSDTIDNVKAKIQDKEGIPPDQQRLIFAGKQLEDGRTLADYNIQKESTLHLVLSRGGGTMIKVKTLTGKEIEIDIDPVDCIGWFNERVEEKEGIPPVQQRLIYAGKQLADDKTAKEYNIEGGSVLHLVLALRGGTY

SEQ ID NO: 9282 - protein, 282 aa, Glycine max
  unsure (1)..(282): unsure at all Xaa locations
  Clone ID: GLYMA-23APR03-C62190_2.p
MTLTNAFLAPSFAVHGGRVSDPRSIPLFSLPSDAFFRSPTSLSRDKNFLKASAYDLNAVGSASLQSGDNPDSVPMPIVLIDQESDSEATIVQLSFGDRLGALLDTMKALKDLGLDVSKGTVSTEGLVKQTKFFITQSDTGRKVEDPDMLERIRLTIINNLLKYHPECSELLAIPEVFGTRAPQKKLDDDIXTRIQVKEGTPKRSLLSLETADSPGLLVEIIKVIADVNIDVESAEIDTEGLVAKDTFHVSYGGAALNSSMAQVLVNCLRYYLRTPETDIDSY

SEQ ID NO: 9283 - protein, 199 aa, Glycine max
  Clone ID: GLYMA-23APR03-C62404_1.p
MDDGGGPSISVVYFDGHTEATVGEVTVDSSFNFKKFVSFLSQKIGISPHKLSVYLATFGTDRRIPISGKVNFAAVARDNAAASSFFFVERTKRPRSRKNKSRSKGNSRNNSNAPRENVVLLRRNDTVAGHVLGRAEYEKWVRDLQMERERYWLSMGMRMLCEECLTGTDGGFHWCVYDAVTVGFRSPAGPVARPGKGSG

SEQ ID NO: 9284 - protein, 315 aa, Glycine max
  Clone ID: GLYMA-23APR03-C6240_1.p
MAAGCISFTATRDRCFRFSFSNAGLKSVTTDLGDGTIMHCWAPKAHKDSKLNLLLIHGFGANAMWQWNDFLSPLTRRFNVYVPDLLFFGDSHTTRPDRSEAFQAQCVAALLQAHGLQRTSVVGISYGGFVAYSLAAQFPERVEKVVLCCAGVCLEDKDLDEGMFQVKTVDEAADILLPQTPEKLRQLVQLAFAKPVKTMPTCFLNDYINVMCTDNRQERKELIETLHKDRKLSNLPKITQPTLIIWGEKDLVFPMELAHRLQRHLGENAQLVVIKNAGHALNVEKPKEMYKNLKSFLIDPATPTPTAQKNHSNGS

SEQ ID NO: 9285 - protein, 182 aa, Glycine max
  Clone ID: GLYMA-23APR03-C62945_2.p
SPKRRVHFNIYTSDHTWKRARTSSLPAQAPVCQVYGCNMDLSSSKDYHKRHKVCDAHSKTAKVIVNGIEQRFCQQCSRFHLLAEFDDGKRSCRRRLAGHNERRRKPQFDYVTGKQHKILQSYQGTKYLGSSLQNKPQFPFQDIFQSSILFPGKHAQFSQSGRVKLEEDSIYGSQLAAPVTLD

SEQ ID NO: 9286 - protein, 302 aa, Glycine max
  Clone ID: GLYMA-23APR03-C63256_1.p
MPSSSTMPLSPDPPFLCADEAAIAGLLDAEPHHMPEKDYLRRCRDRSVDVTARLDAVNWILKVHAYYEFSPVTAFLSVNYFDRFLSRCSLPQQSGGWAFQLLSVACLSLAAKMEESHVPFLLDLQLFEPKFVFEPKTIQRMELWVMSNLKWRLRSVTPFDYLHYFISKLPSSSSSQSLNHFFSTSSNLILSTTRVINFLGFAPSTVAAAAVLCSANGQLPLSFHDRVNDEMVRCCHQLMEEYVVDTCPASVKARITEPAPPSSPVGVLDAATCGSCDTPSDRNFAGPPNKRLRSSASDAPQR

SEQ ID NO: 9287 - protein, 344 aa, Glycine max
  Clone ID: GLYMA-23APR03-C63260_1.p
MAATFPQQLLVKPIHFFKIITAHNVHEGKLMIPNKFVKKYGKRLQNTLFLKTPNGAEWKMILKKRDGKIWFQKGWKEFAEYHSLAHGHLLVFRWDVTSHFQVHIFDLSALEIEYPTEIIKGKTASNRKGNESPGDEHLECHRSGQKRKVNSVEFLQQCQMRSRKCVKVENTMILPRQALHHTATKCKGKSKAMDNQVTALDRASSFKSCNPFFLTVMHRTHISSHGSLNLPMKFCRSHLDLHKKRRLISLQVLSGRIWPAKYQIHKQKTAIRFKLSWNAFVKDNNLKVGDVCIFELVHGTKLTFLVHIFRETDSSNCSTSQESGQMRAACQSQRKELKTITATK

SEQ ID NO: 9288 - protein, 282 aa, Glycine max
  Clone ID: GLYMA-23APR03-C63265_1.p
MGGGGAMRTVAKFATAGIRGVPSVRRASSQTAAASEVSPLQAAAWDDVDDWEVADGGEGTPRVVLGGVPSFQEATSATTELKHAIDKIYLSSNSSECDGCSLSGHVSVMSPSHSELENKSRVTEAILNPSESNRALQAFQLLSECPEAQSVVASIACDPNIWNAIVQNPALQDFFQSQQTADFEVEETHDQRLGNLPYSDSVYAFIDSLNVLQNVKFTVSEMLSRVPNYLQNMFGFLSGQTSSAVIDARGNTKANFIDPITMGGTFMGLAVLVVMVIMLKRA

SEQ ID NO: 9289 - protein, 76 aa, Glycine max
  Clone ID: GLYMA-23APR03-C63286_1.p
LPHTVHSTLVEQQVCHDPSPYLYIVDMPNAEKKTHLYWGSILTYIILLNINNRALRQRKSCKLLIKDSINNRLLQG

SEQ ID NO: 9290 - protein, 160 aa, Glycine max
  Clone ID: GLYMA-23APR03-C6328_2.p
DTIFCPYDILKIFFSSLLFCVYLLLPISNFASEFSFCLQEPPRRRGAETSSDLSECAKKGIAVKPRRGDALLFFSLHTNATPDTSSLHAGCPVIEGEKWSATKWIHVDSFDKTVGAGGDCSDHHVSCERWASLGECTKNPEYMIGSSDVPGYCRKSCKSC

SEQ ID NO: 9291 - protein, 299 aa, Glycine max
  Clone ID: GLYMA-23APR03-C6342_2.p
MASPTHFDDDFDFGDGFGGRHSGNKRSSPDYDDEDYDNDPFAPKKSKTKAEEASGVTTGMILSLRESLQNCKETLATYQNELEAAKSEIQSWHSTLKNEPSKSAGITPEPKMLINYLQTLKFSEESLREQLEKAKKKEAAFIVTFAKREQEIAELKSAVRDLKVQLKPPSMQSRRLLLDPAVHEEFTRLKNLVEEKDKKVKELQDNIAAVSFTPQSKMGKMLMAKCRTLQEENEEIGNQASEGKMHELGMKLALQKSQNSQLRSQFEGLQKHMEGLTNDVERSNEMVFTSFSFSIFFVI

SEQ ID NO: 9292 - protein, 336 aa, Glycine max
  Clone ID: GLYMA-23APR03-C63448_1.p
MLMPPSSFTLLLTLLLLFLTYEAESGETPPPTPPPPFRPGIAVLVCVLTTIISLTSLLLLYIKHCNGGIPDGGGGNSAPWTVAPFSGRKNSGIDRSVVESLPVFRFGALRGQKEGLDCAVCLNKFEAAEVLRLLPKCKHAFHVECVDTWLDAHSTCPLCRYRVDPEDILLVEDAKPFRQSHQQQRNKEEERVRLNLDLEKQEIVESRRRHSSVGVGEGETTEEQQQSRRWTTSFRRSLDSISATSRKKNESVGVGCFVRPRKDGMLLTQETERASVERRLEHRIIVSPGQGPGPGPGPGPCGLEQRWSDLQASDLLYLTSEMIMMRDSWNGRGSGV

SEQ ID NO: 9293 - protein, 138 aa, Glycine max
  unsure (1)..(138): unsure at all Xaa locations
  Clone ID: GLYMA-23APR03-C63592_2.p
SCKLDCVWQCKCLALQFLHVLICSKREVKRFVDLTADETSDLWLTAQKVGKQLESYHKASXLTLAIQDGPQAGQMVPHVHIHLIPRKSGDFEKNDEIYDAIDEKEKELKQKLDLDKERKDRSLEDMSQEADEYRKLFL

SEQ ID NO: 9294 - protein, 144 aa, Glycine max
  Clone ID: GLYMA-23APR03-C635_3.p
SFCLFCFLRQYDRDSFGEDPESESSNEDPSGASLVTELTSQMARSQFLQELSTKPPGLTQEALDCLHQEVFSSNASEIGLDSRVLQDCSICLESFTDGDELIRLPCGHKFHSVCLDPWIRCCGDCPYCRRCIVVNTHSSLNEDE

SEQ ID NO: 9295 - protein, 113 aa, Glycine max
  Clone ID: GLYMA-23APR03-C63604_1.p
QEDINERPRQGESKLDRSLAGSCVIIRAKASTDQIIYYSLFKKEKLLIVLCFLDQKIPVQIRNSFGHGYDNLICNLMQVSFSLDFPFVFSSELVQTQARCLHIHCGLLCSCKT

SEQ ID NO: 9296 - protein, 192 aa, Glycine max
  Clone ID: GLYMA-23APR03-C63604_2.p
MEQTIWGHLPVLVRANSKESIEYILQALWRTRKTGLGTTDRCIIQEMLQLQNESDLDPLLVCLRMLIRRCVYENTSKEDIPKLFPSEVLPELQKLLTLLLHKFQREWQEDVMKDQNIVPRLKAMTWNMANLDKESADPAAVINLKLQNDGQFHSGEQDVKFKLATDSIDMMLKAMHCIRDQFSTVDEALNGH

SEQ ID NO: 9297 - protein, 601 aa, Glycine max
  unsure (1)..(601): unsure at all Xaa locations
  Clone ID: GLYMA-23APR03-C6371_1.p
HSLCYISTSSGSVSNRKDGPRFKDLGGMKEVLEELKMEVIVPLFHPQLPRQLGVRPMAGILLHGPPGCGKTKLAHAIAHETGLPFYQISATEVVSGVSGASEENIRELFAKAYRSAPAIVFIDEIDAIASKRENLQRXMEKRIVTQLMTCMDQSNRLLQPADDVESSGDDHHPGYVLVIGATNRPDAVDPALRRPGRFDREIIIGNPDESAREEILSVLTCDLRLEGLFDLRKIARATSGFVGADLAALVDKAGNLAMKRIIDERKRELSQDLTSEHAEDWWREPWSVEEINKLAIKMSDFEEAANKVQPSLRREGFSSIPNVKWDDVGGLDLLRKEFERYIVRRIKYPEDYEELGVDLETGFLLYGPPGCGKTLIAKAVANEAGATFIHIKGPELLNKYVGESELAVRTMFSRARTCAPCILFFDEIDALTTKRGKEGGWVVERLLNQLLVELDGAEQRKGVFVIGATNRPEVMDRAVLRPGRFGKLLYVPLPSPDERVLILKALARKKAVDASVDLSAIAKMEACENLSGADLAALMNEAAMAALEERLTSIETTCDTLTIKRTIKRHHFEVALSKVSPSVSDRQKQYYQHLSEGFKAA

SEQ ID NO: 9298 - protein, 198 aa, Glycine max
  Clone ID: GLYMA-23APR03-C641_17.p
MQNQQPSGIINPKYCAPYNVDLAIVRKVLALTDSFTVTDVNGQIVFSLKASLMTLHDHRVLLDAAGEPVVTLRRKLMSAHDRWQIFRGESTEPKDLIFSVKRSSFFQLKTKLDVFLANNTKEEVCDFKVKGSWFERSCVVYAGESLNIVAQMHKKHTVQSIVFGKDNFMVTVYPNIDYAFIVALILILDEIHKDMKNQ

SEQ ID NO: 9299 - protein, 198 aa, Glycine max
  unsure (1)..(198): unsure at all Xaa locations
  Clone ID: GLYMA-23APR03-C641_28.p
MQNQRPSGIINPKYCAPYNVDLAIVRKVLTLSDSFTVTDVNGKIVFNLKGSLMTLHDHRVLLDAAGEPIVTLRRKIMSAHDQWQVFRGESTELKDLIFSVKKSSVFQLKTKLDVFLANNTKEEVCDFKVKGSWFERSCVVYAGESLTIAAQMHKKHXVQSIALGKDNFIVTVYPNIXYAFIVALIXILDEINQXKKKD

SEQ ID NO: 9300 - protein, 399 aa, Glycine max
  Clone ID: GLYMA-23APR03-C64954_3.p
MVPNFLIARLAVSLTHHRSTHIQLGSLLQHKRNAFLLLFNSFTSGTSSDSESDGNHQKGGTFTVSYLINSCGVSPTLARKLSNKVNLKTPHGPNAVLDLLNNYGFDKIQVAKLVEKHPLVLLADAENTLLPKLKFLRSIGVSNTDMPKILIANHSLKRSLKKFFIPRYEILRRVLGDDQEVVRAITSSRFGINYGDAMNLVPNIEVLRQSGVPQASISFMMIHCGTVAYWKHSRFVEAVNTAKEIGFNPLRTNFIVAIEMLLISSKAVWESRFKVYERWGWNREMALQAFRKFPNVMRLSEEAFSKKMNFLVNDMGWPSEEIAEYPQVVAYNLEKRIIPRFSVIKILKSKGLLENNVSFSSIICITEEKFLENFVISLQKDLPVLPDLYRGKIKPSDVM

SEQ ID NO: 9301 - protein, 449 aa, Glycine max
  unsure (1)..(449): unsure at all Xaa locations
  Clone ID: GLYMA-23APR03-C6497_1.p
MAGNCLPPVKLTGSGRPVLEPNEIECFFLSGVDLLSEDDPSFPHLKSGLLILTTHRLLWLPDSAASXAAPPGAIPLAAVSHIFSPKMSLRKVFASPRVRFQVSLSPEGRVSAAGSRSVVATAVVRGKGDCDAFLAKFTENCRARAWQEAESGSSSGSNSAVMAATATSSSSGGIYSSDGTVRMVGVSGILRKEQEMWESTDRSLQEAFQDLNALMSKAKEMVMLAEKMRLKLLSGSNSQTNATNDEEMGSKEEMQDWLLSVGIISPVTKESAGALYHQQLSRQLADFVKVPLEKAGGIINLIDIYCLFNRARGTELISPDDLLQACSLWEKFDVQVVLRKFDSGVMVIQTKSHSDEEVFNKVKMLVLKPDALRAGISASDAARTLGVAPAMAKEHLLSAESKGLLCRDISPDGFRFYINLFVEIDRDYMYLVKDQGIYASWVQANDTHA

SEQ ID NO: 9302 - protein, 442 aa, Glycine max
  unsure (1)..(442): unsure at all Xaa locations
  Clone ID: GLYMA-23APR03-C652_2.p
MVGGRNGEGAGEQAPPPSTAARHGTTLRPRVSTESVFSCRYGGLGPMTLLSSFFGDGDECKSFSELLGGAMVDPTAPSPMPTTPFTLPHGFIDSPSPQGQFGMTHQQMLAQITSQAVPAHFNVQIHSEHPFSISAXSATSLTQFPTGSSTRVKESLHYSHSEQKLQSSSVNADKPNDDGYNWRKYGQKHVKGRDFSRSYYKCTHPNCPVKKKLERSLEGHVTAIIYKGEHNHQRPHPNKITKETQTSNINSVSKMDLESSQATGEHGSGTSDSEEVGDHESEEDEKNDEPDAKRRNTEVRLQDPASLHRTVAETRIIVQTTSEVDLLDDGYRWRKYGQKVVKGNPYPRSYYKCATQGCNVRKHVERASMDPKAVLTTYEGKHNHDVPVAKTNSHTLANNSASQLKAQNIAIPDDKHSFSSRGVRGNEQRPLGSLRLKEEQIT

SEQ ID NO: 9303 - protein, 284 aa, Glycine max
  Clone ID: GLYMA-23APR03-C6575_1.p
MAGRKHAPSSFTRLDDARLAHSSSSSAAVVRALEERVEARHREIQALLSDNQRLAGIHVALKQDLAATQEELRRLSATAAEVKAERDAEVREIYEKSLKVDAEVRAVAAMSSELDRVRADVQELVAERKELAAQLHAVESELAKARAEAQFVPAIKADIEAMRHEIQRGRNAIEFEKKTHASNLEHRRTMDNNMIIMDREVEKLRAELANAEKRARAAMAADAKTNPGYPANYDNPEMGYGGITCPPDSYSMHQLQAVVDTHSPHEAGASLHYPNDLQHTQVPR

SEQ ID NO: 9304 - protein, 249 aa, Glycine max
  Clone ID: GLYMA-23APR03-C66166_2.p
MRARHSDSDSKRCHSRFDSDPNKRYRRDEYGKEDRERVSSSTDVQNEALFAKHNKPNDPIQLPTSLSYFQHNEQGGTGQVGRSSGQRKERGRWKDTKKRFNINEREEKNHGREQRNEKSQAKLDDNTFQRRDGFTGRSRKRASFREKKIVADSGDANVAAVKSGQKEERNSNPQHLDRPEKHFADDKGEARRGRRYGGNDSYKGRDKFNGRRGYRPEKWKHDLYQEVNKDPIPQNEDDQIAKLEALLAS

SEQ ID NO: 9305 - protein, 137 aa, Glycine max
  Clone ID: GLYMA-23APR03-C6616_17.p
MKMGGGCKCLVSLVLALVLMRSLAEAQSGSSTTCAQELIPCVNFLNGTTTPPSSCCDPLKQTVENQLDCLCNIFFSPGLLQSFNVSVDQALALSRRCGVTNGITSCTNGSAPAPGSGPPPGKTPLNIPKFNQASFMQ

SEQ ID NO: 9306 - protein, 123 aa, Glycine max
  Clone ID: GLYMA-23APR03-C66329_1.p
MRPINSVSPSSPMRASGVNIWKSPIPYLFGGLAVMLAIISMALVILVCSYRKRDSQSSSEVNEDVKSQAMANNLETNSEPEVLVIMAGDHNPTYLAKPITSSIFCTCGAQPSEPNPSSTSTPE

SEQ ID NO: 9307 - protein, 279 aa, Glycine max
  Clone ID: GLYMA-23APR03-C6692_1.p
MNGGAEASVNHRRRHQAASANGVKIANGAMAKPSSTLCYDASFMKWTVADAVHVATHHWMPCLFALGLLFFMAVEYTLLMVPPSSPPFDLGFIATRSLHALLESSPNLNTLFAGLNTVFVGMQTSYILWTWLIEGRPRATISALFMFTCRGILGYSTQLPLPQGFLGSGVDFPVGNVSFFLFFSGHVAGSVIASLDMRRMQRWELAWTFDVLNVLQAVRLLGTRGHYTIDLAVGVGAGILFDSLAGKYEDSKRNAALSTTHRAQFDCVNNVDIAKKINK

SEQ ID NO: 9308 - protein, 258 aa, Glycine max
  Clone ID: GLYMA-23APR03-C66938_1.p
MSGKASVSKELHAKHTKILEGLVKLPDNRECADCRTKAPRWASVNLGIFICMQCSGIHRSLGVHISKVRSTTLDTWLPDQVSFMQLIGNAESNKHWEAELPPNFDRNGYGVEKFIRSKYVEKRWASKGGLQPASKSAEIIFNSNESPAARAKSATQRNRRLSLEESILVKHVAQIRPPVTRYHEGSSDFQKNSPPPPLRKPSASFDFDYTRGKNNGIVDHFDLFSIHDDKQDFSTTPPSWTTFDCKMTILEKAYEVYV

SEQ ID NO: 9309 - protein, 134 aa, Glycine max
  Clone ID: GLYMA-23APR03-C67217_1.p
MIMGSKNCMDRKHYVLVHGACHGAWCWYKLKPRLESAGHKVTVLDLAASGTNMKKIEDVDTFSEYSAPLLQLMATIPSNEKLVLVGHSLGGLNIALAMEKFPEKVAVGVFVTAIIPDTEHKPSYVLEKMLHRTT

SEQ ID NO: 9310 - protein, 359 aa, Glycine max
  Clone ID: GLYMA-23APR03-C67344_1.p
MMSASAGARNRSPFTQTQWQELEQQALVFKYMVTGTPIPPDLIYSIKRSLDTSISSRLFPHHPIGWGCFEMGFGRKVDPEPGRCRRTDGKKWRCSKEAYPDSKYCERHMHRGRNRSRKPVEVSSATSTATNTSQTIPSSYTRNLSLTNNSNPNITPPPPPSSFPFSHLPSSMPIDQSQPFSQSYQNSSLNPFFYSQSTSSRPPDADFPPQDATTHHLFMDSAGSYSHDEKNYRHVHGIREDVDERAFFPEASGSARSYTDSYQQLSMSSYKSYSNSNFQNINNDATTNPRQQEQQLQQQQHCFVLGTDFKSTRPSKEKEAETTTGQRPLHRFFGEWPPKNTTTDSWLDLASNSRIQTDE

SEQ ID NO: 9311 - protein, 74 aa, Glycine max
  Clone ID: GLYMA-23APR03-C67408_1.p
MALCMQRDSASNKQQLMDCGKYVRYTPEQVEALERVYIECPKPSSSRRQQIIRECPLLANIETKQIKVWFQNRR

SEQ ID NO: 9312 - protein, 48 aa, Glycine max
  Clone ID: GLYMA-23APR03-C67511_3.p
VHFKGYPSNILLPFEAEDSVKWSFINSLKEVNYVISSLCVHVFMMVLV

SEQ ID NO: 9313 - protein, 414 aa, Glycine max
  Clone ID: GLYMA-23APR03-C6779_1.p
MGSSEMDKTTKEKESKTPPPPTSQEQSSTTGTGTINPGLPASHAYAPIPPHGFLASSPRAHPYMCGAQKIMTPYGTPPHPYVAMYPPGGIYAHPSMPPGSYPFNPFAMPSPNGIAEASGNTPGSMEADGKPSEVKEKLPIKRSKGSLGSLNMITGKNNEHGKTLGTSANGIHSKSGESASEGEGTSEGSDANSQNDSQLKSGGRQDSFEDEPSQNGSSAYTPQNGGLNIPHTVVNQTMSIIPISAGGAPGAVPGPTTNLNIGMDYWGTPGSSNIPGLGRKVPSTAVAGGMVTVGSRDSAQSQLWLQDERELKRQRRKQSNRESARRSRLRKQAECDELAQRAEALKEENASLRSEVNRIRSDYEQLLSENAALKERLGELPPNDDHHHRSGRNDQHVGNDTQQSGQTEAVQGGH

SEQ ID NO: 9314 - protein, 171 aa, Glycine max
  Clone ID: GLYMA-23APR03-C6781_1.p
MADGPASPGGGSHESGEHSPRSNVREQDRYLPIANISRIMKKALPANGKIAKDAKETVQECVSEFISFITSEASDKCQREKRKTINGDDLLWAMATLGFEDYIDPLKIYLTRYREMEGDTKGSAKGGDSSAKRDVQPSPNAQLAHQGSFSQNVTYPNSQGRHMMVPMQGPE

SEQ ID NO: 9315 - protein, 89 aa, Glycine max
  unsure (1)..(89): unsure at all Xaa locations
  Clone ID: GLYMA-23APR03-C6805_5.p
AHALPQKQXYNSITLRSRRLSLLVXIFTLSLSLRKMKVVAAYLLAVLGGNNTPSADDIKEILGSGYGFQSLRLIGVVYSAFFSPEHILN

SEQ ID NO: 9316 - protein, 384 aa, Glycine max
  Clone ID: GLYMA-23APR03-C6814_43.p
MKKMKTHSRYQDNLDSDSKSKRSCFCGIVPAVSLLCVVLLFSTLFFAQRYNEKLLRWKMNIKKLKNDNCKNQCRTGGSHALPEGIISNTSDLEMRHLWDLPMTKTIENKENASTNLFAMAVGIKQKDLVNKLVKKFLSSNFVVMLFHYDGIVDEWNDFEWNNHVIHVAVANQSKWWFAKRFLHPDIVAEYGYIFLWDEDLGVEHFHPDRYVSIIKSEGLEISQPALDSNKSEVHHQITARGRRSNVHRRIYKTGGSGKRCDESSTAPPCTGWVEMMAFVFSRAAWRCVWYMIQNDLIHAWGLDMQLGYCAQGDRTKNVGVVDAEYIVHYGHPTLGGLDVNEVSSRTKDHRVDVRRLSYRELQVFRKRWQKAVEEDEFLTISICY

SEQ ID NO: 9317 - protein, 386 aa, Glycine max
  unsure (1)..(386): unsure at all Xaa locations
  Clone ID: GLYMA-23APR03-C68248_1.p
MSAFTISNNAAAATWPIPQFNTCHFPHSPSIVLHHSLLNTRAFRIHCVPQEPLPPLQQPKHDQLSPGGGGGHGDADGDGGGGGGGGGGDGGEGGGDEEFGPLLKFEAVMRESEARGVKLPPDMVEAARITGIREMFLLRYMELQGSSWPVSFLIQHCAMLRNRMLADPSFLFKVGTEIVIDSCCATLAEVQKRGKNFWAEFELYAADLLVGVVVDIALVGLLAPYARIGKPSLSKGLLGQIQHACAALPSSVFEAERPGCKFSVMQRVSTYFYKGALYGSVGFGCGIIGQGIANMIMNAKRSFKKSEXDIPVPPLLQSAALWGFFLAVSSNXRYQIINGLESLVEASPVAKRVPLVAMAFTVGVRFGNNIYGGMQFVDWAKWSGVQ

SEQ ID NO: 9318 - protein, 185 aa, Glycine max
  unsure (1)..(185): unsure at all Xaa locations
  Clone ID: GLYMA-23APR03-C6859_1.p
MPELTEIFAVGLKGWQWLKQEEGEEKTGSTVSSKELHEAGNXFCLPRDRIPEWFDQQSRGPSISFXFRNKFPDMVLCLIVAPIQDKFFRPMVFINGNQCSPYSCHFRTGMHHAYLCDLQEIKSRNSPYEMPFENGWNHVNVTCPRCIDTYIHPVKMGIHIFKQEYAMEDVRFTDPFIARENQTMI

SEQ ID NO: 9319 - protein, 545 aa, Glycine max
  Clone ID: GLYMA-23APR03-C6884_1.p
MLLNYRPLHFVFLLTFFLSASCLLSHQASGTENEGKNVVGLSRLYVFAAAPFESSPFPLAAERTRRKDPLDGFNKYIYGWNITSSDYWASVAYTAAPLFSIAAVWFLGFGLCLVIIGVCYFCHKREPYGYSPTCYALSLILLILFTFTALIGCAVLYIGQGSFHHSMTHTLQYVVHQADSTVDKLRNVSDYLAQAKQVGVDRVFLPTNVQTDIDQAETDINNSASTLADKTKENSDNIQDLLDSARLALIIIAAVMLVLTFLGFLFSIFGIQLLVYILVIAGWVLVTGTLILCGLFLVLHNATADSCIAVNEWIQYPTAHTAMDDILPCVDNATAQETLSRSKEVTSELVNLVNQVITNVSNLNFAPNFTPLYYNQSGPLMPLLCNPFHPDMTDRQCDAGEVTLSNATQVYGNFVCQVSPSEICMTQGRLTPTFYNQISAGINVGNALYDYAPSLIELQDCTFVRETLSDISRDHCPGLQRYSRWIYIGLVMVSFAVMFSLIFWIVYGRERRHRLYRKESKDFTPTHAPAPAPGQALALAQIPEG

SEQ ID NO: 9320 - protein, 346 aa, Glycine max
  Clone ID: GLYMA-23APR03-C69374_1.p
MDNNTISDLIQFNDLIPKLPSELGLECLTRLPHSAHRVALRVCSQWHCLLQSDAFYSHRKKTGHTRKVTCLVQAREDQPLQEKNNASVASVYGISVFDPESMTWDRVDPVPDYPSGLPLFCQLASCDGKLVLMGGWDPASYEPLTAVFVYDFRTSEWRRGKDMPEKRSFFAIGAGVGRVYVAGGHDENKNALSTAWAYDPRSDEWAGLDPMGRERDECEGVVIGDEFWVVSGYSTERQGMFDGSAEVLDIGSGGWREENGFWEEGQCPRSCVGVGKDGRLVNWRGWDPGLRVGVCGVAVGSRVVLSGSDYEGAPHGFYLVDNRKLTKINVPEGFSGFVQSGCCVEI

SEQ ID NO: 9321 - protein, 107 aa, Glycine max
  Clone ID: GLYMA-23APR03-C6941_4.p
MARGASQSQSTASHATTRPGVMAPRGTAAATAGMRRRRLGGGTSSASVSGGSGAGGSNMLRFYTDDAPGLKISPTVVLVMSLCFIGFVTALHVFGKLYRYRSSGATV

SEQ ID NO: 9322 - protein, 78 aa, Glycine max
  Clone ID: GLYMA-23APR03-C6956_13.p
MGKAKEAAVVAGALAFAWLAIELALKPFLTKARASIDKSDPARDPDDDALPKTTADDVPEASADDVPVAADTKTTDDA

SEQ ID NO: 9323 - protein, 140 aa, Glycine max
  Clone ID: GLYMA-23APR03-C6956_14.p
MGKAKEAAVVAGALAFAWLAIELALKPFLAKARASIDNSDPPRDPDDDALPKTTTDDVPDAADSKPAGDVPPAADTITTDAVKWSLIHVILNFVISQNYCPNEIILLASCASVKYVYCVVGKCSCWFDLVLGLKKISSVS

SEQ ID NO: 9324 - protein, 277 aa, Glycine max
  unsure (1)..(277): unsure at all Xaa locations
  Clone ID: GLYMA-23APR03-C6958_8.p
MVKGPGLYSDIGKRARDLLFKDYQNDHKFTITTYTSTGVEITSTGVRKGEIYLADVSTKVKNKNITTDVKVDTNSNLRTIITVDEPAPGLKTIFSFNFPDQKSGKVELQYQHEYAGISTSIGLTANPVVNFSGVVGNNLVAVGTDLSFDTTSGNFTKYNAGLNITHADLIASLTLNDKGDXTLTASYYHIVNPLTNSAVGAELSHSFSGNENILTFGTQHALDPLTLLKARVNNYGRASALIQHDWTPRTRFSLVGEVDTGAIEKSAKVGLAVALKP

SEQ ID NO: 9325 - protein, 235 aa, Glycine max
  Clone ID: GLYMA-23APR03-C696_2.p
TPTFHNPNPSQTENPTLSVAQDTLIPSTSSTSTPAPAPPQNPSSCSLNSQNNNHINNNIPVEKNSILNKGSSSNEKDDVGRRWPKDEVLALINLRCTSVNNNNNNEEKEGNNKVPLWERISQGMSELRYKRSAKRCKEKWENINKYFRKTKDITKKRSLDSRTCPYFHQLSSLYNQGKLVLQSESHLNNTPPDQNPEQVKPDQTTQAHESSSQVGSGSGFSVQQQQVPSLDFDQF

SEQ ID NO: 9326 - protein, 257 aa, Glycine max
  Clone ID: GLYMA-23APR03-C700_2.p
NPNIKYCSLTKKKNRMAELPSSEASSSSASSRKHSSSEAHLPAPDQKRPKQARDSSSKHPVYRGVRMRAWGKWVSEIREPRKKNRIWLGTFATAEMAARAHDVAALAIKGNSAILNFPELAASLPRPDSNSPRDVQAAAAKAAAMEVNDVPTTPSSSSSSASLSLSQSSSWSSLAVSSSSGDGPSTPEELGEIVELPSLGTSFEIPDPSGELVYLDPWPYSQAWSHGIYDESEGYFIGDSETESMILCGFEGSLWQH

SEQ ID NO: 9327 - protein, 349 aa, Glycine max
  Clone ID: GLYMA-23APR03-C70223_1.p
TTFQLANESSSLLSLSPKFILPEDERPQLSEVTSLDSIPIIDLSDHSYDGNNHSSSLVVQKISQACEEYGFFQIVNHGIPEQVCNKMMTAITDIFNLPPEQTGQLYTTDHTKNTKLYNYYLNVEGGEKVKMWSECFSHYWYPIEDIIHLLPQEIGTQYGEAFSEYAREIGSLVRRLLGLLSIGLGIEEDFLLKIFGDQPRLRAQANFYPPCPDPELTLGLPVHTDFNALTIVLQSQVSGLQVIKDGKRIALPFIPNAFVINLGDQIQVLSNGRFKSVHHRAVTNKLSPRVSMAMFYGPNVDTTIGPIQDLIDEEHPPRYRNYRFSEFLEEFFKQEGTRRMVKEVFELPC

SEQ ID NO: 9328 - protein, 152 aa, Glycine max
  Clone ID: GLYMA-23APR03-C7024_5.p
MGSIFSPLTSILLLLILLWGGEARDPFACDPKNTATKNLPFCKAWLATGARVKDLIGRLTLQEKVNLLVNNAAAVPRLGIKGYEWWSEALHGVSNVGPGTKFGGQFPAATSFPQVITTAASFNASLWEAIGRVSFFLLFLKCLLVKNFLKIY

SEQ ID NO: 9329 - protein, 301 aa, Glycine max
  Clone ID: GLYMA-23APR03-C70902_1.p
MEPPRLTTENRIFITFSLCFSLYTSMEPPPSYSYSPFPFSLERHTQIQMHDPILFFLFFASLSSLLFLSFSLFKRFSTKKEHHHHTQKVPSLLGEEQRPKKKRKKPKKKRTQGDDAANSGSGSDSGLRLESTCQYPFTSSSSVMQRKIKQQYDELVRCNHLKKLTLPQVVQFANSLVDARNELQHKADVIQRKFVITKALLCKADRSSFDRLHQQIYKLELEQKRLEEDVFVYNSLQQQLKLSPAYQKMLELGACMEKEKSSELGENRDDDFAEITFEELLAQEKKDSFWQKNGKSRLSSS

SEQ ID NO: 9330 - protein, 326 aa, Glycine max
  Clone ID: GLYMA-23APR03-C7096_15.p
MDQALVDDIINRLLEVRGRPGKQVQLSESEIRQLCAASREIFLQQPNLLELEAPIKICGDVHGQYSDLLRLFEYGGLPPEANYLFLGDYVDRGKQSLETICLLLAYKIKYPENFFLLRGNHECASINRIYGFYDECKRRFNVRLWKTFTECFNCLPVAALIDEKILCMHGGLSPDLLNLDQIRNLQRPTDVPDTGLLCDLLWSDPSKEVQGWGMNDRGVSYTFGADKVSEFLQKHDLDLICRAHQVVEDGYEFFANRQLVTIFSAPNYCGEFDNAGAMMSVDETLMCSFQILKPADKKVKLNFGSTTTTKPGNSPAGVKSFLGTKV

SEQ ID NO: 9331 - protein, 249 aa, Glycine max
  Clone ID: GLYMA-23APR03-C7112_2.p
MSSPSPFGDDDKPTLSSDWRSFRAKLVAGEQLTRHVEEVNDLDTVVDHPPLITIGDKWAHVIHEPENGCLLIATEKLDGVHIFERTVILLLSTGPLGPSGIILNRPSLMSIKETRSTALDVEGTFSNSPLFFGGPLEEGIFLLSPKEGNGGDGVGKSGVFEEVMKGLYYGAKESVGCAAEMVKRNAIGLGDFRFFDGYCGWEKEQLRDEIRAGYWTVAACSPSVVGLGSVGSIGLWDEVLGLMSRRKVM

SEQ ID NO: 9332 - protein, 346 aa, Glycine max
  Clone ID: GLYMA-23APR03-C7174_1.p
MDLPVIDLSPSLSGEWDPLLCAEVSRSLRETGALLVKDPRCTVEDNDRFIDMMERYFSKPRDFKHRHERPHLHYQVGVTPEKVEVPRSLVDEEMQEKLKAMPKENQPNTPVGPDLKWRYFWRIGPRPSNTRFQELNAEPVIPEGFPEWKETMDSWGYKMIAAIEVVAEMAAIGFGLPKDAFTSLMKLGPHLLAPTGSDLQKYGQEGTIFAGYHYDLNFLTIHGRSRFPGLNIWLRNGQKVEVKVPIGCLLIQTGKQIEWLTGGDCIAGMHEVVATKRTLDAISLAQEQNRSLWRVSSTLFAHIASDAVLKPLGHFAESPLASKYPPMCAGEYVEQELSVINLKGKK

SEQ ID NO: 9333 - protein, 72 aa, Glycine max
  Clone ID: GLYMA-23APR03-C72081_1.p
LPTYPIPNINYATFDSFTVLTPQKFPEGTIISSLSAWFSAKTNPKFCLSIVWHTGTTQDQALINDNSLVRAQ

SEQ ID NO: 9334 - protein, 308 aa, Glycine max
  Clone ID: GLYMA-23APR03-C720_5.p
MASASEFDPALALSHKFPDTTYSYTERDAALYALGVGVCLSDAVDGDELKYVYHENGQGSIKVLPTFATLLVLRSGASGYNLPGLEYDPRLLLHGQQYIELYKPLPSSCHIHNIVSLAGLHDKGKAAILEIETKSYEKESGDLLCMNRTTVFLRGAGGFSKSSKPFSYTNYPMNQNPAVKIPESKPFSVFEDRTQPSQALLYRLSGDYNPLHSDPMVAKVAGFSQPILHGLCTLGFAVRAIIKCICRGDPDLIKSVAGRFLLHVYPGETLVTEMWLEGSRVIYRTKVKERKRTVLSGYVGLRGLTSSL

SEQ ID NO: 9335 - protein, 414 aa, Glycine max
  unsure (1)..(414): unsure at all Xaa locations
  Clone ID: GLYMA-23APR03-C7237_2.p
MTKPNTFFHNLIKPFKFSSSKEGQTEENEIQNLAAQEQKIFPYETLVAATNKFHILNKLGEGGFGPVYKGKLNDGREIAVKKLSHRSNQGKTQFVNEAKLLARVQHRNVVNLFGYCTHGFEKLLVYEYVRRESLDKLLFKSHKKEQLDWKRRFDIINGVARGLLYLHEDSHNCIIHRDIKASNILLDENWVPKIADFGLARLFPEDQTHVNTRVAGTNGYLAXPEYLMHGHLTLKADVFSYGVLVLELVSGQRNSSFDMDVSAQNLVDWAYRLYKKGRALEIVDPTLASSVVAEQAEMCIQLGLLCTQGNQDLRPSMGRVMVILSKKPPCHMEEPTRPGIAGSRYRRRVSRGRRPSATTSGEVDDDSSVNSQTFDSSSNYGTNTTTSATTPTTRSSNTTAEVVDRRGKRPMQGG

SEQ ID NO: 9336 - protein, 100 aa, Glycine max
  unsure (1)..(100): unsure at all Xaa locations
  Clone ID: GLYMA-23APR03-C7245_25.p
SESDSNTKLPFSAWAFLSTILFGNIVIFYADSIAEDRLHMVFSSPRHLAAAGACMELXFRKQFLKPKRIHEATSLEHNRKDSIRNSDLSNGEFDDEQSQS

SEQ ID NO: 9337 - protein, 197 aa, Glycine max
  Clone ID: GLYMA-23APR03-C72617_2.p
KHQFKLQSSTLFSFYEGERLTNLLQSIRRGIQSARHLDGSSLPEKIWLKQQFSIGVNDVTRVLERMKPCTELESSTELISLRSNHTASSVKLQAVLVASDCNPRWLTKHLLSLASSRNVPLVFVRDTKQGSLRLGELVQLKTAIAIGIKVKGSTINKIIQQVIQGDRFELSPEGQNSARIFDASNFQDPDKMLSNVI

SEQ ID NO: 9338 - protein, 615 aa, Glycine max
  Clone ID: GLYMA-23APR03-C7273_31.p
MQTPKTRNGSSDVPQKVSPRAVRQLKPTTLDIDSASSLSQATKSSKERSPKVTDRRSPRSPVIERKRPSKISELESQISQLQNDLKKVRDQFILSESCKKQAQQEAEESKEQLLALSAKPEESQKQVLDLCATGEARVLELQKIVEERDMACRSELEASKKQLSVESASLASAANEIQLLKAQLELVANCESVQSQHAESADMELLNLKQNLSETLSLVDALKNQVRDCKESEAQAQALVNETTVQLEAAKGTVEFLRADVARAVDGYNSVALELDQSKARVNSLEALVSKIEKDPINNKCIPSENVADDHKSEHQPEILKEGEDPNQLEAEVVFLKSEVEQLRSAIETAETKYQEEQIRSMVQIRNAYELVEQIKSESGKRECELEAELKKKKADIEELKANLMDKETELQGIVEENDNLNLKLEESMSSKNEHKLKREIKRLSECVAELKADMMDKETTLQSISEENEMLKSEINNSGKAREEVAAEVEGAKAAEHEALMKLGIVMEEADKSNKKAARVAEQLEAAQAANLEMEAELRRLKVQSDQWRKAAEAAAAMISTGNNNGRLTERTVSLDNNNYMCSPYAEDMDDDFQRKKNGNMLKKIGVLWKKPQK

SEQ ID NO: 9339 - protein, 259 aa, Glycine max
  Clone ID: GLYMA-23APR03-C73269_1.p
MFLFHPVKAKSMMISSSLLHSRSSFKFNPWLKLNHPSHAAIGLRLRLKPYPTNFTCKAVFSDDAPFAAAIGACMFTSLLLPVSTSSEDDDADSAVTTTDARLAVMGILSFIPYFNWLTWVFAWLDTGKRRYAVYALVYLAPYLRSNLSLSPEESWLPIASILFCIVHIQLEASIRNGDIQGFQLFRNVADQLSSNNRKKDHLNLHQEMSEEGIKKEKKNLPHAQEQSRDIGGWEDSQRPLQPRQHLNEDLDDDKERNKH

SEQ ID NO: 9340 - protein, 124 aa, Glycine max
  Clone ID: GLYMA-23APR03-C73803_5.p
CSGTIIELAKLKKVCWLEVRGKFDIRKLLPGILYQVSFLIMLEDSSEGWEVPINVRLVLPGGKRQQHKVNLNEKLRENWMEILVGEFVASEKDGGEMDISMYEYEGGMWKSGLVIQGVVIHPKS

SEQ ID NO: 9341 - protein, 169 aa, Glycine max
  Clone ID: GLYMA-23APR03-C73803_6.p
LSLFVTQKYWVEKKSNGNCFMLYARALSITWAENPNYWKWVQHKEESGSMIELAKLKMVCWLEVNGKFGTGMLSPGILYQVSFIVMLKDSAQGWELPINVRLVLPGGKKQQHKENLMEKSRESWIEILVGEFVASEKDVGEMEISMYEHEGGMWKTGLVIEGVAIKPKN

SEQ ID NO: 9342 - protein, 227 aa, Glycine max
  unsure (1)..(227): unsure at all Xaa locations
  Clone ID: GLYMA-23APR03-C7389_2.p
GGFIKALMEIMGIDCLTRHNIASHLQKYRSHRKHLLAREAEAARWSQREAIVGRGKREGSPWXHREVNPWLTPTMGFPPMTTMHHFRPLHVWGHMSMEQWPKQNSPPLSWPPPAAPPQEPSFWHQLAPNALIPGTACFPQLLTPTRFGSPPVPGIPPHAMYKADHDIGLPGPLFDFYPSKECIDAAIGDVLSKPWLPLPIGLKAPALDSVMSELQRQGIPNIPPSSA

SEQ ID NO: 9343 - protein, 219 aa, Glycine max
  Clone ID: GLYMA-23APR03-C7395_2.p
MGNALKTPCFQLNTNSSSSSKSVKLIFWEGTSRSLKGKHIAGEIMFEFPEMMVCHADSFFIGQPIPVLSIDDKLMPGQTYFVLPIDLFACNNLTVASISALGSCPNKSPIKFGACPFQYLKGSDGRVAIKVMPEFITRLISGGDHNKNNGVGATPGSPSSFLCSTPELQKHYEQLVKSKDQVWSPKLETISEYKIRFSPCRFIGLEWKEKEKPVEMFTM

SEQ ID NO: 9344 - protein, 283 aa, Glycine max
  Clone ID: GLYMA-23APR03-C7422_2.p
MASLSLSSPPSLSSAHHNASTRLILRTPNSLKLRTPPHSLPAIRAITLTQDDLKRLAADKAVESVKSGMVLGLGTGSTAAFVVLAGEGDGAECTEYVKEYMTGKGYAVDLEMVSKEAEEFARSVPLGGDGKDAWIFDIDETLLSNLPYYAAHGYGLEVFDHEKFNNWVEKGVAPAIEPSLKLYEDVLNLGFKVILLTGRSERHRSVTVDNLINAGFKEWDQLILRNSDDQGKRAVLYKSEKRSEMEKDGYRILGNSGDQWSDLLGSSVSVRSFKLPNPMYYIP

SEQ ID NO: 9345 - protein, 478 aa, Glycine max
  Clone ID: GLYMA-23APR03-C7454_1.p
MGWLSRIFKGSDHNKLSEGHYYKEDAGYYLPSTSGVTNDAWNQNQNQNENEDIDRAIALSLVEESRRANNNVNDYRSQLEEDEQLARAIEQSLNLESPPRYGNENMYQPPIQYFPLGSRICAGCYTEIGFGRYLNCLNAFWHPECFRCRACNLPISDYEFSTSGNYPYHKSCYKESYHPKCDVCKHFIPTNPAGLIEYRAHPFWIQKYCPTHEHDGTPRCCSCERMESQEAGYIALKDGRKLCLECLDSSIMDTNECQPLHADIQRFYDSLNMKLDQQIPLLLVERQALNEAREGEKNGHYHMPETRGLCLSEELSTFSRRPRLGTAMDMRAQPYRPTTRCDVTAILVLYGLPRLLTGSILAHEMMHAWLRLKGYRTLSQDVEEGICQVLAHMWLESELSSASGSNFVSASSSSASHTSRKGKRPQFERKLGEFFKHQIESDISPVYGDGFRAGQKAVRKYGLQRTLHHIRMTGTFPY

SEQ ID NO: 9346 - protein, 217 aa, Glycine max
  Clone ID: GLYMA-23APR03-C7483_2.p
MNIFKKKTSPKEALRTSKREMAVATRGIEREITSLQMEEKKLVAEIKREAKTGNEAATRILARQLVRLRQQITNLQGSRAQIRGVATHTQALYASTSISTGMKGATKAMVAMNKQMAPAKQVKVIKEFQKQSAQLDMTIEMMSESIDETLDKDEAEEETEELTNQVLDEIGVDIASQLSSAPKGRIASINTENVAPRPAESQDVEDLEKRLASLRRI

SEQ ID NO: 9347 - protein, 367 aa, Glycine max
  Clone ID: GLYMA-23APR03-C74_3.p
MDSLSSINGDFGFDGGTDRRFAFSRQASFQQPHTPIDIPAHGHYDHHHYWSPRDDKPSAASLQISSLSSFVFSVFRSVRSGHSYMKRLFLMISLNVAYSTAELLTGLFTGRVGLVSDAVHLTFGCGLLTFSLFVMAASRKKADREYTYGYKRLEVLSAFTNALFLLFMSFSLAVEALHAFIQDESEHKHYLIVSAVTNLFVNLVGVWFFRNYARINLTYRNAEDMNNHSVFLHVVADSIRSAGLILASWLLSIGVQNAEVLCLGLVSVAVFMLVLPLFRATGGILLQMAPPSIPTTALNKCLRQISAREDVMEVSQARFWELLPGHVFGSLIVQVKKGTNDRPILEFVHGLFHDLGVQDLTVQTDDA

SEQ ID NO: 9348 - protein, 202 aa, Glycine max
  Clone ID: GLYMA-23APR03-C7503_2.p
CSRWLQRNASHKPFLLAMHSHIERILWSEDQISRRVSELAAEISADFGGQSPAPVVVGVATGAFLFLADLVRKIDLSIAVDFVRVESYGFGTVSNGAPTISFDLKVDVNARHVIVVEDIVDTGHTLSKVIGHLKSKGVSSVSVCTFLDKPARRKVHFQLLGEGKYYRGFECPDYFVVGYGLDFAELYRNLPYIGVLKPELYK

SEQ ID NO: 9349 - protein, 203 aa, Glycine max
  unsure (1)..(203): unsure at all Xaa locations
  Clone ID: GLYMA-23APR03-C75330_1.p
MKSSDTSPQHDDYLLHKSISVDGYTYTNTDKEITAKGTGKSSNFTHRIHNHVKMGPNLSEILKGKLSLGARIIQEGGRGNIFKSVFGMQEKEQLXKASQCYLYTTAGPIAGILFVSTAKVAFYSERPITFSSVTGELVRAPYKVLIPIGRIKEVNESQNVSKAEQKYIEIVTEDDFEFWFVGFLRYDKAVKHINKAISMAYKF

SEQ ID NO: 9350 - protein, 288 aa, Glycine max
  Clone ID: GLYMA-23APR03-C7550_3.p
MRVAREEAMGGGKRNTVETFFLATLILWFASLCFQILLNKRWELLSVIAGSIFYQTSNCLIRFFSPHKDKDALFVNTSVSLLHSLLTSSSVIFILFRELLSNGPSGMSDHSQLVEDAWSWAFEALSFSCGYFAYDQWDMLHYRLYNGWIPSILVHHLVLLICFTLALYRNVTINYLILTLICELHSIFLHLRKVRRMAGIRDAKSILVKLEWFLNWVTFFVARSVPHVLITAKLIKDAYKFEKGMELPLALLGMAGMNLLNIGLGIDLLKAFKRERKSQQGNLHHHRE

SEQ ID NO: 9351 - protein, 382 aa, Glycine max
  Clone ID: GLYMA-23APR03-C7550_5.p
MATPKIHLLVSSFLLCGTFLSLFHCTLSLLNPEDGVGILVQADDDVSMAQSNRDSRKRCDISVGKWVYDDSYPLYDSSCPYLSSAVTCQRNGRPDSDYEKWKWKPSGCTMPRFDALRFLGRMRRKRIMLVGDSIMRNQWESLVCLVQGVIPTGRKRVTYNGPGMAFHAMDFETSIEFFWAPLLVELKKGSENKRILHLDLIEENARYWRGVDILVFDSAHWWTHPDQTSSWDYYLEGNNLTRNMNPMVAYQKGLSTWARWVDQNLNPRRTEVIFRSMSPRHNRENGWKCYNQKQPLPFSSHLHVPEPLAVLQGVLKRMRFPVYLQDITTMTALRRDGHPSVYRRVISQDEKQKPGKGHSSDCSHWCLPGVPDIWNEMLSALL

SEQ ID NO: 9352 - protein, 263 aa, Glycine max
  Clone ID: GLYMA-23APR03-C75515_1.p
MVQVQSITLKHLSLPTHTFVPPKFNIPLNRNLSFTPKFTFSTSLSVRCYHPNLVQPKPFPPLPQRPPVAELPQQRVYVGYSVYTRKGVLTVTPRPPEFESKSSGAFKVSKEGYVVLQFAPSVGADEPIYDWNQKQIFSLSVSEMGTLITLGARDSWEFSHETVKLKSNETEVRKVLKVEPLLDATGHLFSLSVQKKPVNMEGIQKNISLPVTRAELAVLRVLFNYIMPYLLGWNAFGNSIKPEVYSQVNNTKSRYGADNEWNR

SEQ ID NO: 9353 - protein, 80 aa, Glycine max
  Clone ID: GLYMA-23APR03-C76005_1.p
MELADRAVGFLLSFISLSIFTYYTFWVIILPFVDDDHFVHKYFLPQEYAILIPVSAGVALLCLLCIFIGFVMLKSKKKKA

SEQ ID NO: 9354 - protein, 80 aa, Glycine max
  Clone ID: GLYMA-23APR03-C76005_2.p
MELADRAVGFLLSFISLSIFTYYTFWVIILPFVDDDHFVHKYFLPQEYAILIPVSAGVALLSLLCIFIGFVMLKSKKKKA

SEQ ID NO: 9355 - protein, 204 aa, Glycine max
  unsure (1)..(204): unsure at all Xaa locations
  Clone ID: GLYMA-23APR03-C7627_42.p
MAGSEPVSAEGESMAVDAAPRKPRILLAASGSVAAVKFANLCHCFSEWADVRAVSSSGSLHFIDRASMPKDVILYTDEDEWSSWKKLGDSVLHIELRKWADIMVIAPLSANTLGKVNTXCIVRAWDYSKPFFVAPAMNTLMWNNPFTERHFISIDELGISLIPPVTKRLACGDYGNGAMAEPSTIYSTVRLFYESKAQQGNGDI

SEQ ID NO: 9356 - protein, 137 aa, Glycine max
  unsure (1)..(137): unsure at all Xaa locations
  Clone ID: GLYMA-23APR03-C7627_44.p
MICSFLFTPMTKKNSKKTTSQLQENXXAEEERPSSTPKKAVNEIDEIFAGKKRKXSEMVNTGKPDEVTKKTDKTKKKKKNMKRKTYGSDDGKFVDRPSRPRKKTEDGLTIYTEEELGISNADAGNTPLCPFDCSCCF

SEQ ID NO: 9357 - protein, 281 aa, Glycine max
  unsure (1)..(281): unsure at all Xaa locations
  Clone ID: GLYMA-23APR03-C7669_2.p
MSNLYNQISLPSPQRANSPNINMRGNFDVDSQYLTQLREERQKLGPFMQVLPLCTRLLNQEILRVTGKNELLQNQGFSDFDRMRFINLSHMASPNSTPNFTGWNSLSHEXGVQGLNMDWQTSPVVPSSPIVKKILRLDIPKDSYPNFNFVGRLLGPRGNSLKRVEATTGCRVFIRGKGSIKDLDKEEMLRGRPGYEHLNDPLHILIEAELPASVVDVRLMQAQEIIQELLKPVDESQDLYKRQQLRELAMLNSNFREESPQLSGSVSPFTSNEIKRAKTDQ

SEQ ID NO: 9358 - protein, 414 aa, Glycine max
  Clone ID: GLYMA-23APR03-C7750_1.p
MDMCNVVHALKPVMLMVLVQVANAWVNVLYKLALNDGMNLSVIVAYRYVFATAFIAPLAFILERKTRTKMTWRILFQAFLCGLIGGVLPQNLNMEAIALTSVTFTTAISNLIPAITFIISLSFGLERLNLKTKGGKAKIIGTITGISGAMILTFIKGPEVKMLSFHVNLFNHQNGHVVHSHASSGLMTIFGALASVASNVSYAMWLIIQAKMSERYPCPYSSTALMSLMGALLSISFAFCVERDLSQWRLDWNVRLLTVAYAGIVVSGVMVAVISWCVRTRGPLFVSVFSPLMLVVVAFAGSTILDEKLYLGSFIGSMLIICGLYAVLWGKSKEMKKNQSVPPESIHKSDTVEIMVKSRVEDKSNNKSNTLVNSVNATADNKDSWENRCENNVTHIHCCKEREEEVTSQNGSRT

SEQ ID NO: 9359 - protein, 263 aa, Glycine max
  Clone ID: GLYMA-23APR03-C7756_14.p
MAAASSMALSSPSLAGKAVKLGPSAPEVGRVSMRKTVTKQASSGSPWYGPDRVKYLGPFSGEPPSYLTGEFPGDYGWDTAGLSADPETFARNRELEVIHSRWAMLGALGCVFPELLSRNGVKFGEAVWFKAGSQIFSEGGLDYLGNPSLVHAQSILAIWATQVILMGAVEGYRIAGGPLGEVTDPIYPGGSFDPLGLADDPEAFAELKVKELKNGRLAMFSMFGFFVQAIVTGKGPLENLADHLADPVNNNAWAYATNFVPGK

SEQ ID NO: 9360 - protein, 1019 aa, Glycine max
  Clone ID: GLYMA-23APR03-C7765_1.p
MEIYLSENFGDVKPKNSSEEALQRWRKACWLVKNHKRRFRFTANLSKRFEAEAIRRSNQEKFRVAVLVSQAAIQFIHGLNLSSEYTVPEEVKAAGFEICADELGSIVEGRDSKKLKSHGGVDAITNKLNTSVDDGISTSEHLVNQRKEIYGVNKFAESPARGFWVYVWESLQDTTLMILAVCALVSLVVGIIMEGWPKGAQDGIGIVASILLVVFVTATSDYRQSLQFKDLDKEKKKITVQVTRNSCRQKLSMYDLLPGDIVHLNIGDQVPADGLFVSGFSVLINESSLTGESEPVNVSELNPFLLSGTKVQDGSCKMLVTTVGMRTQWGKLMATLSEGGDDETPLQVKLNGVATIIGKIGLFFAVVTFSVLVQGLFSRKLREGSQWMWSGDDAMQIVEFFAIAVTIVVVAVPEGLPLAVTLSLAFAMKKMMNDKALVRHLAACETMGSATTICSDKTGTLTTNHMTVVKAYICGKIKEVNGSKVYSDFSSDIHDSALAILLESIFNNTGGEVVKNKDEKIEILGSPTETALLEFGLSLGGDFLKERQRSKLVKVEPFNSIKKRMGVVLQLPDGGFRAHCKGASEIILASCDKVVDSSGEVVALNEDSINHLNNMIETFAGEALRTLCLAYLDIHDEFSVGTAIPTRGYTCIGIVGIKDPVRPGVRESVAICRSAGIAVRMVTGDNINTAKAIARECGILTDGIAIEGPEFREKSEEELLDIIPKIQVMARSSPMDKHTLVKHLRTTFQEVVSVTGDGTNDAPALHEADIGLAMGIAGTEVAKESADVIILDDNFSTIVTVAKWGRSVYVNIQKFVQFQLTVNVVALIVNFSSACLTGNAPLTAVQLLWVNMIMDTLGALALATEPPNEELMKRPPVGRKGNFISNVMWRNILGQSIYQFVVIWFLQTRGKVTFHLDGPDSDLILNTLIFNAFVFCQVFNEISSRDMERINVFEGILKNYVFVAVLTSTVVFQIIIVEFLGTFANTSPLSLKQWFGSVLFGVLGMPIAAALKMIPVGSV

SEQ ID NO: 9361 - protein, 352 aa, Glycine max
  Clone ID: GLYMA-23APR03-C7767_1.p
MGSMRLLVVALLCAFAMHAGFSVSYAQLTPTFYRETCPNLFPIVFGVIFDASFTDPRIGASLMRLHFHDCFVQGCDGSVLLNNTDTIESEQDALPNINSIRGLDVVNDIKTAVENSCPDTVSCADILAIAAEIASVLGGGPGWPVPLGRRDSLTANRTLANQNLPAPFFNLTQLKASFAVQGLNTLDLVTLSGGHTFGRARCSTFINRLYNFSNTGNPDPTLNTTYLEVLRARCPQNATGDNLTNLDLSTPDQFDNRYYSNLLQLNGLLQSDQELFSTPGADTIPIVNSFSSNQNTFFSNFRVSMIKMGNIGVLTGDEGEIRLQCNFVNGDSFGLASVASKDAKQKLVAQSK

SEQ ID NO: 9362 - protein, 235 aa, Glycine max
  Clone ID: GLYMA-23APR03-C7769_2.p
MAKNELRLLGAWFSPYALRVQIALNLKGLDYEVVEETLNPKSDLLLKSNPVHKKIPVLLHGDKVICESAIIVEYIDEVWSNNALSILPQNAYDRANARFWVSYIDDKWYTSIRNTILAEAADQDDEAKKPHFVRMEEALERMEEVFNKCSEGRAYFGGDTIGIIDIAFGSLWGWVRVIEEMNGRKVFDEAKNPALAKWADKFSADPAVKGVLPETQKLIEFAKIRKQKWAAAAAK

SEQ ID NO: 9363 - protein, 229 aa, Glycine max
  Clone ID: GLYMA-23APR03-C7778_4.p
MMGSGDVKLLSFWVSPFGKRVEWALKLKGIEYEYIEEDIFNKSNLLLQLNPVHKKVPVLVHAHKPIAESFIILEYIDETWKQYPLLPCHPHQRALARFWATSVEQKLGKAGWVAMSTSGEEQEKAVKEAIEMMEKIEEEIKGKKFFGGDNIGYLDIALGWIAYLVPVWEEVGSMQIIDPLKFPATTEWITNFLSHPLIKDSLPPRDKMLVYYHNRKNNLPSVFRNLVKD

SEQ ID NO: 9364 - protein, 316 aa, Glycine max
  Clone ID: GLYMA-23APR03-C7786_7.p
RLKLFFSFRFSQIFGSLLFLRIKTLIPSISFFNLEKPISLSALSSQRLSPFNCSIHRGIFATEEMSPASKSKSKDKKAVKEAQKSSAKSSGSGNAVAGVPASAYNPLLGTFHTLETSPTSTSQVNSNGRFRNIDETDEHPAGSVVAGVEYDSVSNNGSWSGESEDHKDKAASNPPARLEAVPGADNDKREKIRQKNEKKHQRQKERRAQELHDRCTGYIMSRKLEALAQQLVAMGFSHERATVALILNEGRVEESVAWLFEGGEEADNHKETNIGGGNLKIDISEELARIADLEIRYNCSKQEECLRNLCSVLINL

SEQ ID NO: 9365 - protein, 285 aa, Glycine max
  Clone ID: GLYMA-23APR03-C7787_3.p
MKVPAVVDGRFKLFERHRFCAMAEERQVIGVHTGDAWKGNSRMQKTPKNCTGRGKTFDMRNDRERTTGCGGGSGSGKDKIDSLSRLLTRILRHMAYELNLNMRSDGYVKVNDLLKLNLKTFANIPLRSHTIDHIREAVRKDNKQRFSLLEENGELLIRANQGHTVKVVETESLLKPILSAEEFPVCVHGTYRKNLESILGSGLKRMKRLHVHFSCGLPTDGEVISGMRQDVNVLIFLDVRKALEESMKLYISDNKVILTEGFDGVVPPKYFERIESWPSRQPISF

SEQ ID NO: 9366 - protein, 219 aa, Glycine max
  Clone ID: GLYMA-23APR03-C7789_2.p
MASASVGKELTLYSYWRSSCSHRVRIALNLKGLKYEYKPVNLLKGEQSRPEFLQLNPVGCVPVLVDDHVVLYDSFAIIMYLEDKYPHNPLLPHDIYKRAINFQAASVVSSTIQPLHNLSLLNYIGEKVGPDEKLPWAQSIIRRGFKALEKLLKDHTGRYATGDEVFLADIFLAPQLHAAFKRFNIHMNEFPILARLHETYNEIPAFQEALPENQPDAVH

SEQ ID NO: 9367 - protein, 115 aa, Glycine max
  Clone ID: GLYMA-23APR03-C78066_1.p
MLYCSKKKMELIGTSSDAVPHQNHSSRGSSNAGNKNLTEKEVYVNHAELAWHQMRTEWVGDQSKKLRRSPKGSTLSVTRTYEEVLASREPFKRPILLSEMVSFLVEIWLEDDLYD

SEQ ID NO: 9368 - protein, 262 aa, Glycine max
  Clone ID: GLYMA-23APR03-C7814_17.p
MVMMKHIPLFSLPLLIVLFSHSTTTLAQSPAAAPTAPATPSTAAAPAPVPSAPPTDIIRILKKAGGFTTLIRLLQATQVSNQINSQLLTTSGGLTLFAPNDNAFSSLKPGFLNSLNDQQKNELIQFHLLPTYVSVSNFDTLSNPVRTQAGENPDRLALNITSSGGNQVNMTTGVVNVTLGGTVYTDHQLAVYQVDKVLLPRDFFEAKPPVPAPAPEKAKGSKKKSADSTATTADDAESDAISVKQRHVMWVAVLALFIAAFT

SEQ ID NO: 9369 - protein, 756 aa, Glycine max
  unsure (1)..(756): unsure at all Xaa locations
  Clone ID: GLYMA-23APR03-C7870_4.p
QQGRTRSTSNFFFFCATTTITITTTALCCHLHFRHRFSSPKPLPAKGITVMVRAQTSHPLDPLTAAEISVAVATVRAAGATPEVRDGMRFIEVDLVEPEKQVVALADAYFFPPFQPSLLPRTKGGPVIPTKLPPRKARLVVYNKKSNETSTWIVELREVHATTRGGHHRGKVISSTVVPDVQPPMDAVEYAECEAVVKDFPPFREANEGRGGIEEMDLVMVCXDPWCAGYHSEADAPSRRLAKPLIFCRTESDCPMENGYARPVEGIHVLVDMQNMVVLEFEDRKLVPLPPADPLRNYTSGETRGGVDRSDVKPLQIIQPEGPSFRVNGHFIEWQKWNFRIGFTPREGLVIHSVAYIDGSRGXRXVAHRLSFVEMXVXYGDPNDPHYRKNAFXAGEDGXGKNXHSXKKGXDCLGYIKXYFDAXFTNFYGGXETIXNCVCLXXEDHGIXWKHQDWRTXXAEVRRSRXLXXSFICTVANYEYGFXWHFYQDGKIXAEXKLTGILSLXXXQPGETRKYGTXXAPGLXAPVHQXFXVARMDMAVXXKPGEXFNQVVEXVNVKXXXPGXNNVXNNXFYAEXKLLKSXMXAMXDCDPLSXXPWXIVXNXRTXNRTGHLTGYKLVPGSNCLPLAGSEAKFLRRAAFLKHNLWVTPYARDEMHPGGEFPNQNPRVGEGLATWVKQNRSLEEADIVLWYVFGVTHIPXLEXWPVMPVERIGFMLMPHGFFNCSPAVDVPPNQSDLDDKENGLPAKPIQNGLIAKL

SEQ ID NO: 9370 - protein, 239 aa, Glycine max
  Clone ID: GLYMA-23APR03-C7875_2.p
VYAKAKECSDILSAEDFAILLAKHFVSFYKKVTGAIVNIVEKPWERVIVDGQPHEHGFKLGSEKHTTEAIVQKSGSLQLTSGIEGLSVLKTTQSGFVNFIRDKYTALPDTRERILATEVTALWRYSYESQYSLPQKPLYFTEKYQEVKKVLADTFFGPPNGGVYSPSVQNTLYLMAKATLNRFPDIAYVSLKMPNLHFLPVNISNKDGPIVKFEDDVYLPTDEPHGSIQASLSRLWSKL

SEQ ID NO: 9371 - protein, 345 aa, Glycine max
  Clone ID: GLYMA-23APR03-C7877_1.p
MLATLKSEESSGQLQLVEREDIDDDEDLFEAIDKLIAQGINAGDVKKLQDAGIYTCNGLMMHTKKNLTGIKGLSEAKVDKICEAAEKLVNFGYITGSDALLKRKSVIRITTGSQALDELLGGGVETSAITEAFGEFRSGKTQLAHTLCVSTQLPTNMRGGNGKVAYIDTEGTFRPDRIVPIAERFGMDPGAVLDNIIYARAYTYEHQYNLLLGLAAKMSEEPFRLLIVDSVIALFRVDFSGRGELADRQQKLAQMLSRLIKIAEEFNVAVYMTNQVISDPGGGVFVTDPKKPAGGHVLAHAATVRLMFRKGKGEQRICKVFDAPNLPEAEAVFQITAGGIADAKD

SEQ ID NO: 9372 - protein, 392 aa, Glycine max
  unsure (1)..(392): unsure at all Xaa locations
  Clone ID: GLYMA-23APR03-C790_2.p
MMEEAQGSSSSLPPFLTKIYEMVDDPSTNSIVSWSATNRSFIVWNPPEFSRDLLPKYFKXNNFSSFIRQLNTYGFRKIDPEQWEFANDDFVRGQPHLLKNIHRRKPVHSHSLQNIQGQGVSSLTESERQSFKDEIEKLKHEKEQLLRELEMHEQEWKMYEVQLQHSNDRLEKLEKKQENLVSSVSQVLQKPGIALNLLLLTENMDRKRRLPRSGLFSDDASIEDHMETSQVLPRENADGASIFSSSTERLDLLESSMTFWENITHDVGDVFVQSHLNLDFDASTSCADSPAISCVQLEVEDQPKSPGINMNSEPSVVAVPDLDASKEQPVGKAPVTTGVNDIFWERFLTENPGSSEMQEAQSERKDSDGRSNAKFWWNIRNVNNPPEQMGHS

SEQ ID NO: 9373 - protein, 109 aa, Glycine max
  Clone ID: GLYMA-23APR03-C7929_1.p
MGLKNNMVVLKVCFLVLFLVGVTNARMELNLFKSDHSSSDDESSKPCCDLCMCTASMPPQCHCADIRLNSCHSACDRCACTRSMPGQCRCLDTTDFCYKPCKSSDEDDD

SEQ ID NO: 9374 - protein, 133 aa, Glycine max
  Clone ID: GLYMA-23APR03-C7963_5.p
FVEVKNIFAGCITTKELGTVMRSLGQNPTEAELQDMINEVDADGNGTIDFPEFLNLMARKMKDTDSEEELKEAFRVFDKDQNGFISAAELRHVMTNLGEKLTDEEVDEMIREADVDGDGQINYEEFVKVMMAK

SEQ ID NO: 9375 - protein, 199 aa, Glycine max
  unsure (1)..(199): unsure at all Xaa locations
  Clone ID: GLYMA-23APR03-C79835_1.p
MKMTLVILVLMVALSTKALLGAAGPAPEQVMDTAGKIVRARSTSSIVPASPDLAGLDMASTGADCPLDVLAVDCYQGPPLIFTPVIFNKGVIRVSTDLNIYFPVATSCPQNTVWXLKDYDYSTSQWVVTTGGDFGNPGSQTVANWFKIEKYEDAYKLVYCPSVCNDCSYPCSDIGIYQDEYGKRLALSSEPYKVKFQRA

SEQ ID NO: 9376 - protein, 187 aa, Glycine max
  Clone ID: GLYMA-23APR03-C8011_1.p
MASCFPNASPFLVMLAMCLLISTSEAEKYVVGGSEKSWKFPLSKPDSLSHWANSHRFKIGDTLIFKYEKRTESVHEGNETDYEGCNTVGKYHIVFNGGNTKVMLTKPGFRHFISGNQSHCQMGLKLAVLVISSNKTKKNLLSPSPSPSPPPSSLLSPSPSPLPNNQGVTSSSGAGFIGVMMWLMLLL

SEQ ID NO: 9377 - protein, 83 aa, Glycine max
  Clone ID: GLYMA-23APR03-C8046_8.p
STCIMSRIKIKNNCLLKAATEVRSQQLPSLETFCARSSVKIYVQCRMQMSRTARMTGSCARRCYRWRGASASTNVRASSVLSF

SEQ ID NO: 9378 - protein, 95 aa, Glycine max
  Clone ID: GLYMA-23APR03-C8061_6.p
MGSDSEAEKSVQKEKEKKKMLALAPIAKPLAGKKLCKRTLKLDLAGAGATKRPTCCVLVQTKPAKGEIEQGEQEKLKSDYDQVVAEVTELTTSLF

SEQ ID NO: 9379 - protein, 118 aa, Glycine max
  unsure (1)..(118): unsure at all Xaa locations
  Clone ID: GLYMA-23APR03-C80733_1.p
ILFGVLFCVVMRCQDFIITQTRAKSLYKYYLGLFVHFIFTFLIIIFCWLDFKFCNFTYVYIRKKLRLCSSTPESVWSYLFRGKEEECLSIFLVYVNMRIFGFQFVAIRLYFXILNYKY

SEQ ID NO: 9380 - protein, 207 aa, Glycine max
  Clone ID: GLYMA-23APR03-C8081_2.p
MGNALGGKKTTKVMKIDGETFKLKTPIKVCDVLKNHPGLVLLESEAVKHYGIRAKPLEAHKELMPKRFYFLVELPKEATVAPRRVRSGINMSAKDRLESLVLARRSASDLTIMKPACRVSPAENGGLRLKMRLPKAEVERLMRGCETEAEAAEKIMGLCMVNGGNGNGEVKHWKGVRARAGESTKAREKRVSFMPIIEGGSPIAVAS

SEQ ID NO: 9381 - protein, 485 aa, Glycine max
  Clone ID: GLYMA-23APR03-C8086_1.p
MAHQWVLNAPEPPSMLRQVVDNVKETLLPHPNPNTFSYLRNQPFSKRAFALLQNLFPILASLQNYNAQKLKCDLMAGLTLAIFAIPQCMGNATLARLSPEYGLYTGIVPPLIYAMLASSREIVIGPGSVDSLLLSSMIQTLKVPIHDSSTYIQLVFTVTFFAGIFQVAFGLFRFGFLVEHLSQATIVGFLAAAAVGIGLQQLKGLFGIDNFNNKTDLFSVVKSLWTSFKNQSAWHPYNLIIGFSFLCFILFTRFLGKRNKKLMWLSHVAPLLSVIGSSAIAYKINFNELQVKDYKVAVLGPIKGGSLNPSSLHQLTFDSQVVGHLIRIGLTIAIISLTGSIAVGRSFASLKGHSIDPNREVVSLGIMNIVGSLTSCYIASGSLSRTAVNYNAGSETMVSIIVMALTVLMSLKFLTGLLYFTPKAILAAIILSAVPGLIDLNKAREIWKVDKMDFLACTGAFLGVLFASVEIGLAILRGLFPQMQR

SEQ ID NO: 9382 - protein, 102 aa, Glycine max
  Clone ID: GLYMA-23APR03-C8087_3.p
MLLLILLERSTLASLDQKLAMAKHCSHEGVMAGAKAAVVATIATAIPTLASVRTIPWARANLNPTAQALIISTVAGAAYFIVADKTVLATARKNSFNPPTNA

SEQ ID NO: 9383 - protein, 226 aa, Glycine max
  Clone ID: GLYMA-23APR03-C8109_8.p
MSFQDIEAGRPFGSRRGLMNGKQDPTQAVAAGIFQINTAVSTFQRLVNTLGTPKDTLDLREKLHKTRLHIGQLVKDTSAKLKQASDIDHHAEVNASKKIADAKLAKDFQAVLKEFQKAQRLAAERETAYTPFVPQAVLPSSYTASEVDVGSDKSPEQRALLVESRRQEVLFLDNEIAFNEAIIEEREQGIQEIQQNVPIKTSTRGDGFWKGCCAGLCCCCALDCCL

SEQ ID NO: 9384 - protein, 216 aa, Glycine max
  unsure (1)..(216): unsure at all Xaa locations
  Clone ID: GLYMA-23APR03-C811785_1.p
METSFLPTARPLPAFQTLAAAPRCPRPLRRSTIRAAISRGRKEDTVAVVREQLEGCYLLAGIRYEGLTVKQFQGIRDALPESCHLLVAKNTLVGKAIEGTPWEALKPCMKGMNAWLFVHTEEVPVALKPYRAFQKEERVEETNDFVGAVFEGKFYGPGDFKALETMPSRAEVYATLLGALQGPATSLVATLQAPAXDVVAVLSAYVRKLEEEAGAA

SEQ ID NO: 9385 - protein, 89 aa, Glycine max
  unsure (1)..(89): unsure at all Xaa locations
  Clone ID: GLYMA-23APR03-C813461_1.p
GIWLCLASLDKDLLFHGLISKTKISWXCYFFFSTKIFXHSGXYRPXXTXEKXYSXHXFKXKCKIEXFMTKIPGXMNLKRKHXXXXGLKN

SEQ ID NO: 9386 - protein, 97 aa, Glycine max
  Clone ID: GLYMA-23APR03-C813626_1.p
TLGFHILQSSPIRFKFTDSVKDFQQNQNFMGSNDSFGDRIFKTRSHLADVTNRPAKRPFSLVSGDGGDLQFTKLISLRGRKFSKREKPNAIRSTGSP

SEQ ID NO: 9387 - protein, 108 aa, Glycine max
  unsure (1)..(108): unsure at all Xaa locations
  Clone ID: GLYMA-23APR03-C81559_2.p
MEAYKRWVRQNKEFVHSMESLANGLTXLLPERFSESEIGPEAVTTILGIITALNEHIIDTAPKQNITGSVEPYSFPYPLCLSALKDLETLVEVVAQQYYVFKQKKVLN

SEQ ID NO: 9388 - protein, 523 aa, Glycine max
  Clone ID: GLYMA-23APR03-C8169_1.p
MTSHIDDNLWIIALTSKCTQENLAWVLLIMGSLWLTMTFYYWSHPGGPAWGKYYTYSPPLSIIPGPKGFPLIGSMGLMTSLAHHRIAAAAATCRAKRLMAFSLGDTRVIVTCHPDVAKEILNSSVFADRPVKESAYSLMFNRAIGFASYGVYWRSLRRIASNHLFCPRQIKASELQRSQIAAQMVHILNNKRHRSLRVRQVLKKASLSNMMCSVFGQEYKLHDPNSGMEDLGILVDQGYDLLGLFNWADHLPFLAHFDAQNIRFRCSNLVPMVNRFVGTIIAEHRASKTETNRDFVDVLLSLPEPDQLSDSDMIAVLWEMIFRGTDTVAVLIEWILARMALHPHVQSKVQEELDAVVGKARAVAEDDVAVMTYLPAVVKEVLRLHPPGPLLSWARLSINDTTIDGYHVPAGTTAMVNTWAICRDPHVWKDPLEFMPERFVTAGGDAEFSILGSDPRLAPFGSGRRACPGKTLGWATVNFWVASLLHEFEWVPSDEKGVDLTEVLKLSSEMANPLTVKVRPRRG

SEQ ID NO: 9389 - protein, 525 aa, Glycine max
  Clone ID: GLYMA-23APR03-C8176_2.p
MELVLHFLNTTTIGVVSLIFLLCLFLYGPLKKVHGSSKEAPTVGGAWPIFGHLPLLIGSKSPHKALGALAEKHGPLFTIKLGAKKALVVSDWEMARECFTTNDVAVSARPKLLVAELMCYNNAMLLVAPYGPYWRELRKIIVTEILSSSRVEQLQDVRVSEVQNSIVELYDVWRSQKNESDYASVELKQWFAQPIFNMVLRMVVGKRFLSATATDEKAEKCVKAVDEFMRLAGVFTVGDAIPYLRWLDFGGYEKAMKETAKELDVMISEWLEEHRQKRALGEGVDGAQDFMNVMLSSLDGKTIDGIDADTLIKSTVLTIIQAGTEASISTIIWAMCLILKNPLILENKAELDIQVGKDRCICESDISNLVYLQAVVKETLRLYAPGPLSSPREFAEDCTLGGYHVKKGTRLITNIWKIHTDPNVWSDPFEFKPDRFLTTHKDIDVKGHHFQLLPFGSGRRVCPGISFGLQTVHLALASFLHSFEILNPSTEPLDMTEAFGVTNTKATPLEVLVKPCLSPSCYKSM

SEQ ID NO: 9390 - protein, 88 aa, Glycine max
  Clone ID: GLYMA-23APR03-C81775_1.p
VTSEVDESREKREKVKASKEVEVAAVVVVLSALEVFDFPLASDALHHYILLIHTIIVHFSVVIVAVEYVSHTFVSPTVVTMIPLAMAT

SEQ ID NO: 9391 - protein, 137 aa, Glycine max
  unsure (1)..(137): unsure at all Xaa locations
  Clone ID: GLYMA-23APR03-C8197_12.p
MADSKAGLXKPVFTKVDQLRPGTSGHTLTVKVVNAKMVMQKGRSDGPQSRQMRIAECLVGDETGMIIFTARNDQVDMMKEAATVILRNAKIDMFKGSMRFAVDKWGRVEVTEPASFTVKEDNNLSLIEYELVNVVVE

SEQ ID NO: 9392 - protein, 105 aa, Glycine max
  Clone ID: GLYMA-23APR03-C8197_16.p
MVNVPKTKKTYCKSKECRKHTLHKVTQYKKGKDSIAAQGKRRYDRKQSGYGGQTKPVFHKKAKTTKKIVLRLQCQGCKHVSQHAIKRCKHFEIGGDKKGKGTSLF

SEQ ID NO: 9393 - protein, 310 aa, Glycine max
  unsure (1)..(310): unsure at all Xaa locations
  Clone ID: GLYMA-23APR03-C8198_13.p
MAKKEEKEIVKELLPLIRVYKDGSVERLPXDPQTGVSSKDIVIADNPYVSARIFLPKSHHTNNKLPIFLYFHGGAFCVESAFSFFVHRYLNILASEANIIAISVDFRLLPHHPIPAAYQDGWTTLQWIASHANNTNNTNPEPWLLNHADFTKVYVGGETSGANIAHNLLLRAGNESLPGDLKILGGLLCCPFFWGSKPIGSEAVEGHEQSLAMKVWNFACPDAPGGIDNPCVPGAPSLATLACSKLLVTITGKDEFRDRDILYHHTVKKSGWLGELQLFDAGDEEHAFQLFKPETHLAKAMIKRLASFLV

SEQ ID NO: 9394 - protein, 523 aa, Glycine max
  Clone ID: GLYMA-23APR03-C8245_2.p
MEFVLNYLNATAIGVLSLILFCMFLYNPFKIALGKQDAPTVAGAWPILGHLPLLSGSETPHRVLGALADKYGPIFTIKIGVKKALVISNWEIAKECFTTNDIVVSSRPKLVAIELMCYNQAMFGFAPYGPYWRQLRKIVNLEILSNRRVEQLQHVHVSEVQSSIKELFNVWSSKKNESGYALVELNQWFSHLTFNTVLRVVVGKRLFGATTMNDEEAQRCLKAVEEFMRLLGVFTVADAIPFLRWFDFGGHERAMKETAKDLDKIFGEWLEEHKRKRAFGENVDGIQDFMDVMLSLFDGKTIDGIHADTIIKSTLLSVISGGTETNTTTLTWAICLILRNPIVLENIKAELNFQVGKERCISESDVAKLAYLQAVVKETFRLYPAGPLSAPREFIGDCTLGGYNVKKGTRLITNLWKIHTDPSVWSNSLEFKPERFLTTHKDIDVRGHHFELLPFGGGRRVCPGISFSLQLVHFTLANLFHSFEFLNPSNEPIDMTETLGLTNTKATPLEILIKPRLSPSCYV

SEQ ID NO: 9395 - protein, 558 aa, Glycine max
  Clone ID: GLYMA-23APR03-C8262_2.p
EAEVAEVQAWWNSERFRLTKRPYTARDVVSLRGNLRQTYASNEMAKKLWRLLKNHQANGTASRTFGALDPVQVTQMAKHLDTIYVSGWQCSATHTTSNEPGPDLADYPYDTVPNKVEHLFFAQQYHDRKQKEERMRMSREERARTPYVDYLRPIIADGDTGFGGTTATVKLCKLFVERGAAGIHIEDQSSVTKKCGHMAGKVLVAISEHINRLVAARLQFDVMGVETVLVARTDAEAANLIQSNIDTRDHQFILGVTNPNLKGKSLATLMQQGMAAGKNGAELQALEDEWLSKAQLKTLSEAVVEAIERQNNIGEEEKRRKLNEWMHHSSYERCLSNEEGREIAEKLGVRNLFWDWDLPRTREGFYRFKGSVTASVVRGCAFSPHADVIWMETASPNVVECTEFSEGVRSKHPQMMLGYNLSPSFNWDASGMSDEQMKDFIPKIAKLGYVWQFITVGGLHSNALITSTFARDFANRGMLAYVERIQREERNNGVDTLAHQKWAGANYYDRYLKTVQGGVASTAAMGKGVTEEQFKESWTRSGAVNIDRGSIVVAKARM

SEQ ID NO: 9396 - protein, 453 aa, Glycine max
  Clone ID: GLYMA-23APR03-C8270_1.p
CQWKSTESGSDGASQQDFVQEKEYVLQSSVREGQLRSIFTQDLKILSWEFCARCPDERRRRRYDRPNINQLVQVAKKCQSTIAESGSDGGSQQDIQTNSNMLLTAGGQLAKILEMQSLNELGFSKRYVRCLQISEVVNSMKDLIDICADHKIGAIESLKNYPRLATASKVQMQKMQEMEQLANVQGLPTDRNTLNKLMALNPGLNNHINNPHNMVNRGALSGSAQAALALNNYQNLLMRQNSMNSSPGSLQREGSSFNNSNQSPSSALQGAGPALIPGPMQNSSVSGFPSPRLPPQQQQHHLQQPSLSANALLQQNHSQGSQGNQALQQQMIHQLLQEMSNNNGGVQPQSLGGPSANMAKNAMGFGGHNPSLSGGSANVTGNNGPMSRNNSFKTTSNSDSSAAGGNNGLNQRTSEMPQNLHLQDVVQDIGNEFTDNPFLNSDLDDNMGFGWKA

SEQ ID NO: 9397 - protein, 299 aa, Glycine max
  Clone ID: GLYMA-23APR03-C8272_1.p
LSKSKSLFDFADKYRGSYSGSCPFYCSYSGYQDELLWAASWLYKASGESKYLSYSIGNQGWSQAVSEFSWDNKYVGAQTLLTEEFYGGKKDLAKFKSDVESFICSVMPASSSLQIKTTPGGLLFTRDSSNLQYATSSTMVLFIFSKILNRNHIDRIHCGSALFTPSQIRAFAKTQVDYILGSNPMKMSYMVGFGSKYPKQLHHRGSSIPSINVHPTKVGCNDGLSVYYNSANPNPNTHVGAIVGGPDSNDRFSDARSDYSHSEPTTYMNAAFVASVSALLGKTTDRNQIQDSAVSPYRC

SEQ ID NO: 9398 - protein, 293 aa, Glycine max
  unsure (1)..(293): unsure at all Xaa locations
  Clone ID: GLYMA-23APR03-C8283_2.p
KINILLPGQQQLLVSEVANASKGPVILVIMSGGGMDVSFAKSNDKITSILWIGYPGEAGGAAIADVIFGSYNPSKSFTASLVXKKFQSYNDTSLTLMDNXPNAGGRLPMTWYPQSYVNKVPMTNMNMRADPATGYPGRTYRFYKGETVFSFGDGISFSSIEHKIVKAPQLVSVPLAEDHECRSSECMSLDVADEHCQNLAFDIHLGVKNMGKMSSSHVVLLFFTPPDVHNAPQKHLLGFEKVHLPGKSEAQVRFKVDICKDLSVVDELGNRKVPLGQHLLHVGNLKHQLSVSV

SEQ ID NO: 9399 - protein, 314 aa, Glycine max
  Clone ID: GLYMA-23APR03-C8409_7.p
EFQPQCVTNTLQIPTYFYYTSGASTLAVFLYQTIFHENYTKSLKDLNMHVEIPGLPKIHTDDMPETVQDRAKEVYQVFIDIATCMRDSDGVIVNTCEAMEERVVEAFSEGLMEGTTPKVFCIGPVIASASCRRDDNECLSWLDSQPSHSVLFLSFGSMGRFSRTQLGEIAIGLEKSEQRFLWVVRSEFENGDSVEPPSLDELLPEGFLERTKEKGMVVRDWAPQAAILSHDSVGGFVTHCGWNSVLEAVCEAVPMVAWPLYAEQKMNKVILVEEMKVGLAVKQNKDGLVSSTELRDRVMELMDSDRGKELDRGF

SEQ ID NO: 9400 - protein, 331 aa, Glycine max
  Clone ID: GLYMA-23APR03-C8410_2.p
MQMERSKGRVCVTGGTGFIGSWIIKRLLQDGYSVNTTMRPHPGHKKDVSFLTSLPGASQRLQILSADLSNPESFSASIEGCIGVFHVATPVDFELKEPEEVVTKRSIDGALGILKACLGSKTVKRVVYTSSASAVTSSGIEEQVMDESSWSDVDSLRASKPFGWSYAVSKTLTEKAVLEFGEQNGLDVVTLIPTFVFGPFICPNLPGSVQASLSFAFGEKSAFGFMLQTPMVHVDDVARAHIFLLELPNPKGRYNCSQCLVTFERISELVSAKYPEFQLGTMDLSKQVEGIKLPDLSSKKLVDAGFVYKYGLEEMLDDAIQCCKRKGLPVR

SEQ ID NO: 9401 - protein, 624 aa, Glycine max
  unsure (1)..(624): unsure at all Xaa locations
  Clone ID: GLYMA-23APR03-C8442_1.p
KLKAIVDEWKHVIFGSPQLYLVVEYCNFEHRVVFQESGAYFYFPSPRKSNYYIVVVFDAEVGXRNPSEHKQLKLARSLTRGVIDRDLKPSSNERKSIQRILKYPPTRTLSGDERQLLWKFRFSLMSEKRALTKFLRCVEWSDVQEAKQALELMGKWEMIDVCDALELLSPVFESEEVRAYAVSVLERADDEELQCYLLQLVQALRFERSDKSRLSHFLVQRALRNIELASFLRWYVAVELYDPAYAKRFYCTYEILEENMMKIAAGVNGEEDGFKQWQSLVRQTELTAQLCSITREVRNVRGNTQKKIEKLRQLLSGLLSELTYFDEPIRSPLAPGVLIAGIVPSESSIFKSALHPLRLSFRTANGGTCKIIFKKGDDLRQDQLVVQMVSLMDRLLKLENLDLHLTPYKVLATGQDEGMLEFIPSRSLAQILSENRSIISYLQKFHPDDHGPFGITATCLETFIKSCAGYSVITYILGIGDRHLDNLLLRNDGGLFHVDFGFILGRDPKPFPPPMKLCKEMVEAMGGAESQYYTRFKSYCCEAYNILRKSSNLILNLFYLMAGSNIPDIASDPEKGILKLQEKFRLDLDDEASIHFFQDLINESVSALFPQMVETIHRWAQYWR

SEQ ID NO: 9402 - protein, 812 aa, Glycine max
  Clone ID: GLYMA-23APR03-C8442_3.p
MTGNEFRFFLSCDISVPVTFRVERLEGNLPLPKSPDLENNAPTDNRTTELFVECALYIDGAPFGLPMRTRLESLGPSYCWNELITLTTKYRDLTAQSQLTFTVWDLSHGEGLIGGATILLFNNKKQLKTGKQKLRLWAGKEADGTFPTSTPGKVPRHERGELERLEKLVNKYERGQIQRVDWLDRLTFKTMERIKERESLKNGSSHMYLVVDFCSFEHRVVFQESGANFLFPSPIASTNDIVVVWDPEVGKINPSEHKQLKLARSLTRGVIDRDLKPSSNERKSIQRILKYPPTRTLSGDERQLLWKFRFSLMSEKRALTKFLRCVEWSDVQEAKQALELMGKWEMIDVCDALELLSPVFESEEVRAYAVSVLERADDEELQCYLLQLVQALRFERSAKSRLSHFLIQCALRNIELASFLRWYVAVELYDPAYAKRFYCTYEILEENMMKIAAGVNGEEDGFKQWQSLVRQTELTAQLCSITREVSNVRGNTQKKIEKLRQLLSGLLSELTYFDEPIRSPLAPGVLITGIVPSESSIFKSALHPLRLTFRAANGGTCKIIFKKGDDIRQDQLVVQMVSLMDRLLKLENLDLHLTPYKVLATGQDEGMLEFIPSRSLAQILSENRSIISYLQKFHPDDHGPFGITATCLETFIKSCAGYSVITYILGIGDRHLDNLLLRNDGGLFHVDFGFILGRDPKPFPPPMKLCKEMVEAMGGAESQYYTRFKSYCCEAYHILRKSSNLILNLFYLMAGSNIPDIASDPEKGILKLQEKFRLDLDDEASIHFFQDLINESVSALFPQMVETIHRWAQYWR

SEQ ID NO: 9403 - protein, 123 aa, Glycine max
  Clone ID: GLYMA-23APR03-C8448_4.p
MSDTETTLEQPSTPPQPDPSAAVSFSIWPPTQRTRDAVVNRLIETLSAPSVLSKRYGTLSSDESSSAARQIEDEAFSAASSSDGIETLQVYSKEISKRMLDTVKARAAPIPSAEEGVAASVSD

SEQ ID NO: 9404 - protein, 238 aa, Glycine max
  unsure (1)..(238): unsure at all Xaa locations
  Clone ID: GLYMA-23APR03-C8453_6.p
VKSNRTEYDRGVNTFSPEGRLFQVEYAIEAIKLGSTAIGLKTKEGVVLAVEKRITSXPLLEPSSVEKIMEIDEHIGCAMSGLIADARTLVEHARVETQNHRFSYGEPMTVESTTQALCDLALRFGEGDEESMSRPFGVSLLIAGHDENGPSLYYTDPSGTFWQCNGKAIGSGSEGADSSLQEQYNKDLTLQEAETIALSILKQVMEEKVTPNNVDIAKVAPTYHLYTPSEVEAVISRL

SEQ ID NO: 9405 - protein, 81 aa, Glycine max
  unsure (1)..(81): unsure at all Xaa locations
  Clone ID: GLYMA-23APR03-C8461_10.p
MTKRTKKAGIVGKYGTRYGASLRKQIKKMEVSQHSKFFCEFCGKYAVKRKAVGIWGCKDCXTASAVTVRSTIRRLREQTES

SEQ ID NO: 9406 - protein, 315 aa, Glycine max
  Clone ID: GLYMA-23APR03-C85138_1.p
MELVQFLVLQYMQTKPPPMSLLPPPKPHRSSGNSPGDSIPDWISESINGGSLRRVDLNSGTNGWASPPGSVFSLRSESYFQNRQKCPAGDYLLSPAGMDWLKSAAKLDHVLSRADNRVMHALRRCQTLGRSLKSFVFAVNLQIPGAKEHHSAVFYFATEEPDPVRTGSLLNRFVHGDDAFRNQRFKLVNRIAKGPWIVKKAVGSHSACLLGKALNCAYYKGSNYLEIDVDIGSSAIANAILHLALGCVTTVTIDMGFVVEAQAEDELPERLIGAIRVCQMEMASATVVEALHVPRGVGWAKVNHHKSADELALDD

SEQ ID NO: 9407 - protein, 234 aa, Glycine max
  unsure (1)..(234): unsure at all Xaa locations
  Clone ID: GLYMA-23APR03-C85512_1.p
MTFLVAAIFSTSTQSSEDDIPTREGDADSQESYVERKHQFPGMELVIREFSFHQLNANLLWPGTLAFAEXSGTGALAIFLRKSYNLDISTSDYDDQEIEKNIAHNCRANEIPIVPHIKHTWGDKFPNSDPDWDLIIASDILLXYANLIQTISFLLNCYKPQERRAVSPTGNDENDGDVVLPRPAFLMSWRRRIGKEDELLFFNGCEKAGLKVKHIGSRVYCINSIENEISETKG

SEQ ID NO: 9408 - protein, 123 aa, Glycine max
  Clone ID: GLYMA-23APR03-C85666_1.p
MSFFWFSNMVRMHLSWPVLTYAATWITLLTLMVAAASMSPQVAFVSAITPSSKFSQKCSSGGSIRMPLDVPGDILCFPAHMFVRSKVDLIVPPVFAAVIVAASACVVRAVGLWEHDQTPSDAN

SEQ ID NO: 9409 - protein, 146 aa, Glycine max
  Clone ID: GLYMA-23APR03-C8578_1.p
MGALDFLSDYFSISTQKKKRKPMQTVEIKVKMDCDGCERRVRNSVSNMSGVKQVEVNRKQSRVTVTGYVDRNKVLKKVQSTGKRAEFWPYIQYNLVAYPYVAQAYDKKAPSGYVKNTEQALPNPNAPDEKLTSLFSDDNPNACSIM

SEQ ID NO: 9410 - protein, 404 aa, Glycine max
  Clone ID: GLYMA-23APR03-C86177_1.p
MDIIVDPNSSGGGGKEKCPSGDCFRRLLCGFWEQYRQSHGLPAPLITQKLLHSIMSPAWLLLLTQSLLVAVTTSEAKNNVPAVIVFGDSSVDSGNNNVIATVLKSNFKPYGRDFEGGRPTGRFCNGRVPPDFIAEAFGIKRTVPAYLDPAYTIQDFATGVCFASAGTGYDNATSAVLNVIPLWKEIEYYKEYQAKLRTHLGVEKANKIISEALYLMSLGTNDFLENYYVFPTRRLHFTVSQYQDFLLRIAENFVRELYALGVRKLSITGLVPVGCLPLERATNILGDHGCNQEYNDVALSFNRKLENVITKLNRELPRLKALSANAYSIVNDIITKPSTYGFEVVEKACCSTGTFEMSYLCSDKNPLTCTDAEKYVFWDAFHPTEKTNRIVSSYLIPKLLETFR

SEQ ID NO: 9411 - protein, 435 aa, Glycine max
  unsure (1)..(435): unsure at all Xaa locations
  Clone ID: GLYMA-23APR03-C86208_1.p
MCQRLSLAQLKSQPRCSFSQFLLIIAISKTFTNRTPKSNILRIFTLLSSHEESFFFLHLFLSIDQRTNQARIMDCICNYPTEEPDEDNNDGNFRLFTYRELNSATRGFHPSEKIGEGGFGTVYKGQLRDGTLVAVKVLSIELDSLRGEREFVAELNTLXNIKHHNLVNLXGCCVEGAHRYIVYDYMENNSLRYTFLGSEQKRMEFSWETRRDVSIGVARGLAFLHEEHQPHIVHRDIKSSNVLLDPNFTPKVSDFGLAKLLRDEKSHVTTHVAGTLGYLAPDYASSGHLTRKSDVYSFGVLLLEIVSGQRVVDAYQNGERFIVXKAWAAYEANDLLRMVDPVLNNNYPAEEVKRFLMVGLRCVQEMARLRPRMSEVLDMLTNNVDMGEFSVSKPGLVTDLRSARIRSQMNPSEESSVTAATFADSSGWSTANLAR

SEQ ID NO: 9412 - protein, 472 aa, Glycine max
  Clone ID: GLYMA-23APR03-C86256_1.p
MGTPPTSPPYSDGHLEAMPKKTRQSTRRRKLTLRTLDQPRSTVNVDPATGKGSGPQKQKFHNYLGVVAREKIPIVYRNWKEVPESLKDLVWDDILAKFDIPEASNAKKKVMSMVATRWRQFKSSPTTKFVYADTDGEQKEDPSVKYGMNQQAWDEFAASRKTPTWQEIRKKTQQIQKNNDCPHVLSRGSYDLLEKNLIDKKRKKRQEEAMLTENTPLLKDPTCPIERHVKWKMARTKRYGQMTSQAAQEISDRIDSLQEQTPQDSFVPHDRDDILNTAIGQSEHLGRFRPDMTITLKQLDEIIRSLKEEWWNVIEEKNKRILEKLKQELKDAIKIEISQMRSQHSPLIGVDILALSARVSTKGSNAETAVNPLGKEHDGHVIPTMGLYVQRENCTHLVALGKIYEGGSSIHNVAYGADVVRVSVEKVLDGNAQVPFPTSEIQYVRQALQTFITWPTNLVKLVSQEVYGGVEL

SEQ ID NO: 9413 - protein, 144 aa, Glycine max
  unsure (1)..(144): unsure at all Xaa locations
  Clone ID: GLYMA-23APR03-C8629_2.p
MADAIFGYPFRRFIWGHSPIFREWSGSIALLDWLESPTXHILKVNVPGFSKEDIKVQIEDGNILHIKGDGGREEPQAKEKDTVWHVAERSTGKGGFSREIELPENVKVDQIKAQVENGVLSIVVPKDATPKTPKVRNINITSRL

SEQ ID NO: 9414 - protein, 258 aa, Glycine max
  unsure (1)..(258): unsure at all Xaa locations
  Clone ID: GLYMA-23APR03-C869_2.p
MDVDILKTSTSDNISMDMMMTMMQMEKFPEFCEPFYNNNNNTSTAPLYPENELLINSTTTLPVFSNVINNPNVITPPPSSSNFIQQQPITPHLEPNXRRGISMAAMREMIFRIAVMQPVHIDPESIKPPKRRNVKISKDPQSVAARHRRERISERIRILQRLVPGGTKMDTASMLDEAIHYVKFLKKQVQTLEQAGANTSPHSNTNSPNNHVVGAAGFPLGMSSNYSNNSSVNYSSLLMKGGCQPCQMFGSTSKQLLS

SEQ ID NO: 9415 - protein, 438 aa, Glycine max
  Clone ID: GLYMA-23APR03-C87326_1.p
ATTANNRAPNSPLSLSLSLRFLFLLHRNQKPNKTKKKKKNPNPPLMASSLLQPSSSSSLFAGTLRTLDFVDHSRARISAPYTVKCDMSESSNFVNGKPIIPVLNERTLPKFMESAREAKAVSRNSNRLKLFSGTANPTLSQEIARYMGLELGKISIKRFADGEIYVQLQESVRGCNVYLIQPTCPPANENLMELKIMIDACRRASAKNITAVIPYFGYARADRKTQGRESIAAKLVANLITKAGADRVLACDLHSGQSMGYFDIPVDHVHCQPVILDYLASKTISSSDLVVVSPDVGGVARARAFAKKLSDAPLAIVDKRRHGHNVAEVMNLIGDVKGKVAVMVDDMIDTAGTIAKGAALLHEEGAREVYACCTHAVFSPPAIERLSGGLFHEVIITNTIPVAEKNYFPQLTILTVANLLGETIWRVHDDSSVSSIFQ

SEQ ID NO: 9416 - protein, 311 aa, Glycine max
  Clone ID: GLYMA-23APR03-C8735_2.p
MAPYISRDRASIFVLLASLVLPFILLDYSSSVLFASAKSPKSKDADLLEFALNLEYLEAEFFLFGALGHGLDVVAPNLTGGGPLPIGAKKVELDDLTNDVILQFAFQEVGHLRAIKSKVTGFPRPLLDLSSKSFAKLMDNAFGKPLVPPFDPYANSLNFIIASYVIPYVGLTGYVGANRLLESATSRELVAGLLGVESGQDAILRELLYERKEQLVPPYGVAVEEFTNRISILRSKLGNRGLKDEGIVVPFGLGAEGKVRGNILAGDVNSLAYSRTPEEILRIVYGSGDEHVCGGFYPIGASGQIAQSYLN

SEQ ID NO: 9417 - protein, 129 aa, Glycine max
  Clone ID: GLYMA-23APR03-C8841_2.p
KRKPPPNPTKATATNKQAKTTTTTNKKQQTQKKPTKQKAPPSWIMEELEEEDDDLVSEFTDLPNKFHRTLLPDLERISTTSKAYITKANNEMTKGFKPYVGKKYAPTLATIISCAFILIQVPKEPIQCV

SEQ ID NO: 9418 - protein, 244 aa, Glycine max
  unsure (1)..(244): unsure at all Xaa locations
  Clone ID: GLYMA-23APR03-C884_3.p
QVASKYTFLNICLVSENVNFHFLFFVIIWCRDCGKQVYLGGFDTAHAAARAYDRAAIKFRGVDADINFNLSDYEDDLKQMQNLSKEEFVHILRRQSTGFSRGSSKYRGVTLHKCGRWEARMGQFLGKKXRTYFYISTYVRCVLVIEIAMLSCRYIYLGLFDSEVEAARAYDKAAIKCNGREAVTNFEPSTYEGELKSAAINEGGSQNLDLNLGIATPGPPKENWGQLQFPSFPYNTHGGRSSMV

SEQ ID NO: 9419 - protein, 178 aa, Glycine max
  Clone ID: GLYMA-23APR03-C8863_1.p
MASSMISSPAVTTVNRAGAGMVAPFTGLKSMAGFPTRKTNNDITSIASNGGRVQCMQVWPPVGKKKFETLSYLPDLDDAQLAKEVEYLLRKGWIPCLEFELEHGFVYREHNRSPGYYDGRYWTMWKLPMFGCTDASQVLKELQEAKTAYPNGFIRIIGFDNVRQVQCISFIAYKPPGF

SEQ ID NO: 9420 - protein, 329 aa, Glycine max
  Clone ID: GLYMA-23APR03-C8934_1.p
MASTPFSTFCHFHKPTLLFLASDGFRLGGAPAIAFGKVRKNRKMGIFPVCRAGSAVVFRDLDADDFRHPLDQQNTLLLRAIPGLNELGKALLGTVSEQVMLLENIGTSVLVSKNQLPDLYHLMVEAAEILNVDAPDLYVRQSPVPNAYTLAISGKRPFVVIHTSLVELLTKAELQAVLAHELGHLKCDHGVWLTYANILTLGAYSVPGIGGMIAQTLEEQLFRWLRAAELTCDRAALLVAQDPKVVISVLMKLAGGCPSMADQLNVDAFLEQARSYEKAASSPIGWYIRNAQTRQLSHPLPVLRASEIDEWSRTPAYKSLLKRGIQIKS

SEQ ID NO: 9421 - protein, 176 aa, Glycine max
  Clone ID: GLYMA-23APR03-C8943_2.p
MRNSIRCCISCILPCGALDVIRIVHSNGRVEEISGTIKASDVMKAHPKHVLKKPSSPSTQDGVVPKIVVVPPDAELQRGKIYFLMPLPSPPSEKNNHLQRSSSSGKKKRKEHHSDNRNINNNNAISVANLLVSNERYLTEILSEKVSTQRDRRRGRVAVWRPHLESISESPSPDYM

SEQ ID NO: 9422 - protein, 252 aa, Glycine max
  Clone ID: GLYMA-23APR03-C89572_1.p
MVSLEPIEGNLRSSDPPSSPRISFSAEFLDENNFISISPNAEYERDQEKERERARNAAEFEFLSNNTSSNNTVLTADELFFEGKLLPFWQMQHLEKLSKINLKTKEGEEEELEEEVIVVSNNNKEDSNSNSNSRVNWFVDDDPSPRPPKCTVLWKELLRLKKQRASSLSPSSSSSSSSSSASSLGDVAAKEGKEGSRSSNKEQHVKRVKKGLERARSATIRIRPMINVPICTQVKSSALPPLFPLKKGKLER

SEQ ID NO: 9423 - protein, 158 aa, Glycine max
  Clone ID: GLYMA-23APR03-C90055_1.p
KHNTDPFICKLQMQKGKADSVSILSSLPEDVALKIASLLQVRDLCALGCCSRFWRELCFSDCIWESLVRNRWPLLSSFHFPSSSTHSPNFKKWRKLYLERQVELGLRARSVVKFLEACSRSDSLEVGDYLKAVDTLIGTMFGFENVQRFLFDPLIECE

SEQ ID NO: 9424 - protein, 188 aa, Glycine max
  Clone ID: GLYMA-23APR03-C9025_12.p
STSHQSSRAAPAVVHGQEQGLSDPVQLMRMFAERAQKQHTSSNHSLVDTPPVTLSGPSGQRNDSGNASAAAAHAWMSVGAGGFKQGPNNSSSPKNHISADSLYNSTRELHQHISRIRGEFPSGGMPFQPFQAGAVSQFPNRPMVFPQLASADQSRFQMQPPWGGLSPHSQSRQKQETLPPDLNIDFES

SEQ ID NO: 9425 - protein, 185 aa, Glycine max
  Clone ID: GLYMA-23APR03-C9025_3.p
MHNSSYDCFFCRYGNASVWKIFTDLFDFFPLTALVESEIFCLHGGLSPSIETLDNIRNFDRVQEVPHEGPMCDLLWSDPDDRCGWGISPRGAGYTFGQDISEQFNHTNKLKLIARAHQLVMDGFNWAHEQKVVTIFSAPNYCYRCGNMASILEVDDSMGHTFIQFDPAPRRGEPDVTRRTPDYFL

SEQ ID NO: 9426 - protein, 377 aa, Glycine max
  unsure (1)..(377): unsure at all Xaa locations
  Clone ID: GLYMA-23APR03-C9025_5.p
MMRLSKNILTMSFAPRDSHKXQIQLALERGIPAFVAMLGTRRLPFPAFGFDLVHCSRCLIPFTAYNASYFIEVDRLLRPGGYLVISGPPVQWPKQDKEWSDLQAVARALCYELIAVDGNTVIWKKPVGESCLPNENEFGLELCDDSDYPSQAWYFKLKKCVSRTSVKGDYAIGIIPKWPERLTAIPPRSTLLKNGVDVYEADTKRWARRVAHYKNSLKIKLGTRFVRNVMDMNALFGGFAAALKSDPVWVINVVPALKPPTLDVIFDRGLIGVYHDCCEPFSTYPRSYDLIHVASIESLIKDPASGQNRCTLVDLMVEIDRMLRPEETVVVRDAPEVIDRVARIASAVRWKPTVYDKEPESHGREKILVATKTLWKL

SEQ ID NO: 9427 - protein, 202 aa, Glycine max
  Clone ID: GLYMA-23APR03-C90307_1.p
TSIYFLLWDFTFTARMSSSLAEKSTFSRTCTLLRQYLKEKGSFGDLTLGIALPCTNGSPDTSCHSATTMQSVYSRHLEIPTFINPRSTEKEAKAAQLTIFYDGQVVVFDDFPADKVQEMMSLALATKGISQSQNSSAYAQTHNQQGNNHPSSIPNIIPQAPSTPIVNDMPIARKASLHRFLEKRKDRIAAIAISNKQSYLCS

SEQ ID NO: 9428 - protein, 95 aa, Glycine max
  Clone ID: GLYMA-23APR03-C9053_4.p
MYIFKSLSMNLSFHFGSFLNIFLLSPDQIGLSPEEVISKIMANPEVAMAFQNPRVQAAIMDCSQNPMNITKYQNDKEVMDVFNKISELFPGVGSP

SEQ ID NO: 9429 - protein, 106 aa, Glycine max
  Clone ID: GLYMA-23APR03-C9064_2.p
IIRYSFFGFKETFGFTPSWLLWLRYSSFLVLYPTGISSEVGLIYIALPFIKASGKYCIRMPNKWNSSFDYFYAAIVAMGIYVPGSPHLYTYMLAQRKKALSKSKRE

SEQ ID NO: 9430 - protein, 323 aa, Glycine max
  unsure (1)..(323): unsure at all Xaa locations
  Clone ID: GLYMA-23APR03-C910_2.p
PPVKLHQGCLGHALSKIERPFVCAVDDCQASYRRKDHLTRHLLQHEGKIFKCPVENCNSEFSLQSNMKRHTEEIHDDSSTTTSSDKSHKQHMCPEIGCGKVFRYASQLQKHEDSHVNLESVDMVCLEPGCLKHXTNVQCLXXHVKSSHQYMTCDICGTKQLKKNIKRHLRSHEAEGSSSETFQCEFKGCSCTFSRKSNLDKHKKAVHFNVKPFACGFPDCGMRFAYKHVRDNHEKTAKHVFTLVSSFPFLFPLCKRLSXSDIVIVTRLCIDFGXGDFEEADEEFRSRPRGGRKRTCPTVEVLIRKRVTPPSQLEHWLFMQDSE

SEQ ID NO: 9431 - protein, 274 aa, Glycine max
  Clone ID: GLYMA-23APR03-C9111_3.p
MSATVTLTLNLCRSSIVASCPHYSHKPNPNFNAFFSFSLSLSLSHHRRIVIYKKPFPSRRTWLYGYMNRDRDYELENGLALFGSDEELATQIPTQAQSLVEGSGSIRIAEFKPVPDVDYLQELLAIQQQGPRAIGFFGTRNMGFMHQELIEILSYAMVITKNHIYTSGASGTNAAVIRGALRAEKPELLTVILPQSLSKQPPESQELLSKVKNVIEKPHNDHLPLIEASRLCNMDIISHVQQVICFAFHDSRLLMETCQEAKNLRKIVTLFYLD

SEQ ID NO: 9432 - protein, 317 aa, Glycine max
  Clone ID: GLYMA-23APR03-C9140_1.p
MQVPLIDIDRINDLQVGLNSLQNPSFPIPSQITTSLAYNFCKWGAVILALVATFGSIINRVTIFIIRFRAKAPSLPSLTLNDDNFYTSSSSDDDDDDDNDDDLTYSSSEPEDEPSASSSFIRLDDYFRLRGTDNNNNNNLDDEFQTQNGTHKRCRSIGDIFSLSELANSKSVVKLWDTIGFGLGLDFDDYDGYYVGNAAVPTSSTASPSVVVSAGEGACGNLALEIWDTRLRRRKPTVVAEWGPTVGKTLRVESGGVQKVYVRDDGRYGVTVGDMRKVSTPLESVTESDADTWWDADAIVVSDESFGEQQSMLQQPT

SEQ ID NO: 9433 - protein, 281 aa, Glycine max
  Clone ID: GLYMA-23APR03-C91621_1.p
MWRPWGKSTVRIHSASSSPSSTFSCSSFKDIQTLCLDEPPQQNQHHQQLPSPSPTRKPSVFHRVRLANSLLRTWSTHLHPQPQPPKLPEPPESEPDVVVSKPEPQQPAIYYFPGAEQRVVVYYTSLRVVRPTFEACKSVLSILRGFLVQIDERDVSMDSGFTAELNRIMGRPVPGPGPSLPRVFIAGRYVGGAEEVRQLNEVGELKKILMDLPAVDPTTECHVCAGHRFVLCDECNGSRKVYAEKTGFKTCNACNENGLVKCPSCFPSSTSLPKFNNEIQN

SEQ ID NO: 9434 - protein, 309 aa, Glycine max
  Clone ID: GLYMA-23APR03-C92123_1.p
MSPFFSHHPLSPQRFFIFLLILAFRGVRVSATTFTFVNKCDHTVWPGILGKPDIGTTGFELKRGSTRTFDGPPGWSGRFWGRTGCQFDQSGQGTCATGDCGSGQVTCNGAGATPPATLAEFTLGEGAPDYYDVSLVDGYNLPMMVDASGGSGACAATGCGADLNRRCPAELRVDGGDACQSACRAFGKPEFCCSGAFNSPAACAPSMYSQIFKAACPKSYSYAFDDATSTFTCTAADYTVTFCPFSSPSLKSLMESGPGSSVEQAAVATTSWIANLATGDSTRSRSQPFSASNSAFFVAVTLILSYLVS

SEQ ID NO: 9435 - protein, 189 aa, Glycine max
  Clone ID: GLYMA-23APR03-C9216_5.p
MSNLSFLQFHSSNSLGHSSFQPNSPNPNNNIKSSKQTSNVGCNIQPKSEEMKWVFDKFDTNKDGKITLEEYKAAVRTMGWGIEGTETDESFQVMDSDGDGFIDFKEFMDMFNVEERVKETEIKSAFQVFDLNGDGKISAEELSQVLKSLGESCSLSACKKMVMGVDRNGDGFIDLNEFMRMMMSCKKLT

SEQ ID NO: 9436 - protein, 85 aa, Glycine max
  Clone ID: GLYMA-23APR03-C92400_1.p
MTQKANLFKGKAKKKSIPPNRHGKVPVTRKGKRFVKPSKVTKDMDTDREVSKFINHCNEIKAATLATKDGGQLGIIKPPQEPASK

SEQ ID NO: 9437 - protein, 135 aa, Glycine max
  unsure (1)..(135): unsure at all Xaa locations
  Clone ID: GLYMA-23APR03-C9253_2.p
HTYTSISQVLWRQSKNVVREGKRESEEIWRELKTLVSSNDLHSLNLMQHTILGRLQDSNAVLSHFNDFSQHCFAEISGDIARNTRVLRSVKSDLDYIFQKLRSMKXKIMATYPDAFPEDSSSEVIDRRPDLEMSK

SEQ ID NO: 9438 - protein, 165 aa, Glycine max
  unsure (1)..(165): unsure at all Xaa locations
  Clone ID: GLYMA-23APR03-C9253_9.p
IIFRAQVVGWPPXRSFRKNIVNNVQRSNNNDGEKAATSSSNNVNMGAAFVKVSMDGAPYLRKVDLNMYKSHQELLDALAKMFSSFTIDKCSSQGMKDFMNEGKLIDLLNGSDYVPTCEDKDGDWMLVGDVPWEILVESCKRLRIMKGSAAIGLAPRAVQKCKNRS

SEQ ID NO: 9439 - protein, 309 aa, Glycine max
  Clone ID: GLYMA-23APR03-C9261_2.p
MAEKHNIKNPAVKRILQEVKEMQSNPSDDYMSLPLEENIFEWQFAIRGPRDTEFEGGIYHGRIQLPSEYPFKPPSFMLLTPSGRFETQTKICLSISNHHPEHWQPSWSVRTALVALIAFMPTNPNGALGSLNYKKEDRCALATKSQEAPPKFGTPERQRLIDEIHEYMLSKSSPLPQLAPSQASEEQSKTEEAKAQVNLENPEALPVGAEIPDQAGDRIVEEQELPVNANPNPAGVEASMESSSSVSSNQLLQKSDARVQNLKPDTRVQKPDDRLFTLAAIGLAIAIVVLLLKKFIKSTEYGAVFMDES

SEQ ID NO: 9440 - protein, 195 aa, Glycine max
  Clone ID: GLYMA-23APR03-C93130_1.p
PTLPNVPHSHRRLRHPRRRHSHWNHHQTTTTTTTSLVTPRPWREFLDLSALSCPYSYDDAMIRVRRNLSHFRFNYAAVTLLIVFLSLLWHPVSMIVFLLVLVAWYYLYFSRDGLLVVFNQTLDDRTVLCVLGLLTVVALVSTHVGLNVLLSLIVAVVLVGLHAAFRVTEDLFLDEESSLLSVVGTQPLRTNYTPI

SEQ ID NO: 9441 - protein, 130 aa, Glycine max
  Clone ID: GLYMA-23APR03-C93269_1.p
MASLRSGASSLLTRLSKSLLLHSKNPNPHSQLLLPSLSRLPGAISPQNDAEFPHKQGFLYPCGLPSLRFFLPQGDAPSSDDPMLLFPKRTYQPSVIRRKRNHGFFARKATKGGRRVIARRLAKGRFRITA

SEQ ID NO: 9442 - protein, 131 aa, Glycine max
  Clone ID: GLYMA-23APR03-C93269_2.p
MASLRSGASSLLNRLSKSLLLHSNKNPNPQSQLLLPSLSRLPGAISPQNDAEFPHTQGFLYPCGLPSLRFFLPHGEAPSSDDPMLLFPKRTYQPSVIRRKRNHGFFARKATKGGRRVIARRLAKGRFRITA

SEQ ID NO: 9443 - protein, 145 aa, Glycine max
  Clone ID: GLYMA-23APR03-C93316_1.p
MYRTSMSMPLMVVLGMTLVICLANGQATPPCAKHLSPCLDVMNSTKPPDTCCNPIKETQSTCFCQLVSTPGMLEGIGTTIAQALKLANLCGVNFTLTTCKASTSAPPPSLVQPPATLGGDEGGASRAAFTGLSFALFLCACVLFN

SEQ ID NO: 9444 - protein, 369 aa, Glycine max
  Clone ID: GLYMA-23APR03-C93475_1.p
MATPNNNNNNPNIINNNNIATAKPGTLGVGVGAVPTPPKSQRGHNKPKCKQCGNVARSRCPYECCKSCCSRNQNPCHIHVLKANSTFPDKAPSSGASPLDQQSLDPPQSTAGRVASLRQLSNSFAQFNNLHLSLRSKKPLTRKDAAAINEWRFAKIKEYKERNVEVENEAFDRYMQNVDLLEEVLAVKSLDENVPSALESNPTTMESNEAMIPGLKLQLRSNSMRSDGLRMRIQQIVDEGLKKLKKSAVDGDINESIDDESNKASERGKGIERLSAISDLMEKINKARTEEDLKPCLEMKTQLFNLDEGASVKDLQDNEMHENETVVTDVVPAEGLDYSLPKFVTITEIDLEVLHTIDKHFSTQDIEQL

SEQ ID NO: 9445 - protein, 315 aa, Glycine max
  Clone ID: GLYMA-23APR03-C93588_1.p
MKEHDNDVITNAVSGSGFRRTRSQAEPDWSVTESLILVNEVAAVEADCSVALSLYQQWNIIAENCAALDVPRSLPQCRRKWRALLAAYDGARGARGAMPPPGFDRELFEAIERVVRAREERGMVDPGSDDEDGNEARDATVEIGSKRKRQRSKSRCQVQKPKKFHEQRPDDSHEEGPEDDNSEDEYLKDFLESRPKLKGTAERPPKHLVMPPKSPGRVELNENHHIERPKPIGTERITISREENEETLTLKLQELAVEIGAIASESAADYKGGGSQNLEDSQYDFTRGQGDKLIASLGNFFNTLKRLRDTPQECN

SEQ ID NO: 9446 - protein, 106 aa, Glycine max
  Clone ID: GLYMA-23APR03-C9364_4.p
MTTTFATVAGLGGASLSSTSSRLTSDYSVIGFGLIGWLAPSSVPAINGKSLTGLFFESIGAELAHFPTPPALTSSFWLWLVTWHLGLFICLTFGQIGFKGRTEEYF

SEQ ID NO: 9447 - protein, 221 aa, Glycine max
  Clone ID: GLYMA-23APR03-C93930_1.p
MGSKARWRQSWAPQPLTPLMEGPGPEMQEEGTKKESSWEVIREWFRTQKISPGGSFSQSSSFYGTIHAKTQDLRLLLGVLGCPLAPIPSAHDPTLSIHIKDTPFETSTAKYIIQQYLAATGCLKQQKDTKNMYATGMVKMICCETEISSGKNVKCLGTRSSDNGCFVLWQMLPGMWSLELVVGDHKVVAGSNGKTVWRHTPWLGTHAAKGPQRPLRRIIQV

SEQ ID NO: 9448 - protein, 371 aa, Glycine max
  Clone ID: GLYMA-23APR03-C94503_1.p
MATRRVRCMQCGRPLLVPIEVAYSIPLMCYGCQASRPNYHFANNVTPPFVNYHPAPGYAHRIRRNQFNYPRPLPLTPPPTPLNPPSSYGNKRAVLVGISYCNQINNLKGSVNDAQSMKYFLINKMGFPSDSIRVLTDDPEEKNPMRIPTKYNMRMAMRWLVEGCRSGDSLVFHFSGHGSQEEDTNMDEVDGYDEAICPVDYEHEGKILDDEINATIVRPLPRGAKLHALVDTCFSGTILDLPFMCRMNRKGYYGWEDQRNPRAGYKGTRGGLAVCISACDDDGNAADTSALSGEESSGALTFSFIQAMQNESNLTYGHLLNSMRSTIRGAKEKAFGQNDQDFTMNTRQQYTHEPQLSSSEKFDIYSKSIEM

SEQ ID NO: 9449 - protein, 543 aa, Glycine max
  Clone ID: GLYMA-23APR03-C94832_1.p
MVSPISHLVTLILLLSVSLAASASLEENFVQCLSFYSDKAAPFYASIYTPQNASFNKILESSAQNLRYLVPSAPKPELIFTPLTDSHVQVAVTCSKKLGIHLRIRSGGHDYEGLSYVSEVESPFIIVDLSKLRAVDVDIEDNTAWIQAGATIGEVYYKIYEKSSVHGFPAGLCTSLGVGGHITGGAYRPMMRKYGLGADNVVDARIVDANGQILDREAMGEDLFWAIRGGGGASFGILLWWKIKLVPVPETVTVFTVTRSLEQDATKILHRWQEVAPYIDEDLFIRVIIQPATVGNKTERTITTSYNAQFLGGADRLLQVMKESFPELGLTKKDCLETSWIKSVLYIAGYPNDTPPEVLLQGKSTFKNYFKAKSDFVRDPIPETGLEGLWQRLLEEDSPLMIWNPYGGMMSKFSESDIPFPHRNGTLYKIQYLTLWQDGDKNASKHEDWIRKLYNYMTPYVSKFPREAYVNYRDLDLGMNKKNSTSYIQATAWGNMYFKDNFNRLVKIKTKVDPDNVFRHEQSIPPLPVSSMRLKDKKCKTWE

SEQ ID NO: 9450 - protein, 223 aa, Glycine max
  Clone ID: GLYMA-23APR03-C94989_1.p
MNIGFIYIPMANTTFIQKSTCLAMETLCQASKVDHDRPITKFRLNSKVKYNCFSLPEQNLGLRFQKDATKKMSMVVYASIPPGNLPSADSFPGSWKAWMIGTVVAALLSFTTNKWGPLLLLKEKIETTIEQAERVADIVEEVAERVDKIAEGAAKNLPEGKLQDVAEFVENVAENVDKLAEEAGDLLEKVEDKQEEVVSFFESTVRQQKSNDGTTATDSKDKK

SEQ ID NO: 9451 - protein, 92 aa, Glycine max
  Clone ID: GLYMA-23APR03-C95103_1.p
MPLGLILGIGRAFRRKRPSSLDILSSKRAPRGYYKGKNCKPTGFHTRKGGYVVMQEKLPNYVVPDLTDFKLKPYVSQCPIEANTSEASQTAK

SEQ ID NO: 9452 - protein, 398 aa, Glycine max
  Clone ID: GLYMA-23APR03-C95248_1.p
MEPSREQRKKLVRHRPKEGIKNTMNTESTVLDEANSDKQPRREKRKRKRKKLVCPIPKEGIKNTMNNESTALDETNSDKQPRREKRKKLVCHIPKEGIKDTMNTESTVLDETNSDKQPRREKRKRKKLVRRIPKEGIKNTMNTESSVLDETNSDKQVSRSNELRKLYRQKTLQISTVRPSIVCLKKKLIILDLNGLLVDIVSPPPKYRKPDAMVGKKAMFKRPFYLEFLNFCFEKFEVAVWSSRTKKNINNVINRLMGNMKERLLFCWDLSYCTKTSFKTLENKQKPLVFKDLRKIWEKHDSNLPWEKGYFNQSNTLLLDDSPYKPYNSVFPRTFRFQNESDNSLAVGGDLRQYLDGLANAENMVKYVEQHPFGQEAINERSQSWNFYLKVIDSLSTC

SEQ ID NO: 9453 - protein, 166 aa, Glycine max
  Clone ID: GLYMA-23APR03-C9638_2.p
MAFVTTAEVCDANPQLILSGELRALQPVFQIYGRRQVFSGPIVTLKVFEDNVLVREFLEEKGNGRVLVVDGGASLRCAILGGNPVVQAQNNGWAGIVVNGCIRDVDEINGCDIGVRALASHPMKANKKGMGEKHVPVNIAGTRISDGDWLYADTDGILISRTELSV

SEQ ID NO: 9454 - protein, 287 aa, Glycine max
  Clone ID: GLYMA-23APR03-C9683_2.p
MVRLTADLIWKSPHFFNTIKERELDLRGNKIAVIENLGATEDQFDTIDLSDNEIVKLENVPYLNRLGTMLINNNRITRINPNIGEFLPNLHTLVLTNNRIVNLVEIDPLASLPKLHFLSLLDNNITKKPNYRLYVINNLKSLRVLDFKKVKNKERLEAKNLFASKEVIEEIQRTPAKTFSTGETPNVSEAIEEQQTPKVVAPTPEQIIAIKAAIVNSQTLEEVARLEKALKSGQLPADLKSLSDNIMLDNVDEKHEDMIHDDRSQADGKSNDTQEQRNTDSASMEQD

SEQ ID NO: 9455 - protein, 224 aa, Glycine max
  unsure (1)..(224): unsure at all Xaa locations
  Clone ID: GLYMA-23APR03-C9714_3.p
MENNQVQGAQAQSGPYPGGAGGSAGAGAGAGAGAAPFQHLLQQQQQQLQMFWSYQRQEIEHVNDFKNHQLPLARIKKIMKADEDVRMISAEAPILFAKACELFILELTIRSWLHADENKRRTPQKNDIXAAITRTDIFDFLVDIVPRDETKDPPALVGATASGVPYYYPPNGQPAGMMIGRPAVDPATGVYVQPPSQAWQSVWQSAAEDTPYGTGAQGNLDGQS

SEQ ID NO: 9456 - protein, 296 aa, Glycine max
  unsure (1)..(296): unsure at all Xaa locations
  Clone ID: GLYMA-23APR03-C976_2.p
MSDSAYRVQTTPRLAQWRIENLASCTYRKSDPFKIGNWNWVLFVKLFPEISNLTRDNPPIASFIVRVVSSVGGRQAITHPEIKDKVLKNNEDFVWAIEVPLTGKFIIDVQFLDLKTASPNGGEPCSIWAEGFTQQRSNAKAIESLGRMLTEGIHTDITINASDGSIGAHRAVLAARSPVFRSMFSHNLQEKELSTINISDMSLESCQAFLYYLYGIIKHEEFLTHRLALLQAADKYDISDLRDVCHESLLEDIDTKNVLERLQNASLYQLXNFLRNADRDLISEVFHEVLDAWKGF

SEQ ID NO: 9457 - protein, 164 aa, Glycine max
  Clone ID: GLYMA-23APR03-C982_1.p
MCSISEKAKRKRQSAFRGVRKRSWGRYVSEIRLPGQKTRIWLGSFGSPEMAARAYDSAAFFLKGTSATLNFPDLVHSLPRPLSSSRRDIQSAAAEAALHSPPPKEEQESIFTSTTTSSFHDVMEAPLMSPLRVDSTFGDFSWDQLFDFNDDILIVGSTSATLVP

SEQ ID NO: 9458 - protein, 259 aa, Glycine max
  unsure (1)..(259): unsure at all Xaa locations
  Clone ID: GLYMA-23APR03-C98581_1.p
LGFFSTWFFFGFPVAIXLPLLFWCIVCFLYVPKDSSRALSSLSFDIPGWGACFHGLVGDGSVSVRIASPLXFMVITDYSQXQELILLYDASSLPWNLVLLLGAGFALADGVQSSGLADVLSRALDFLEDTPYWAIAPAVSLMSSIITEFITSNDATATATLLIPLLYNIAKTMHVHPLLLMVPGAVATAFLLPTSTPSNVVGFATGHIEILDMLKIGVPLKVAGIAVLSIFMPTLGAIVFGTDDYIQWMPNINSPWLRN

SEQ ID NO: 9459 - protein, 168 aa, Glycine max
  Clone ID: GLYMA-23APR03-C986_4.p
MTDEDKPKAFSGHHHHPPPPQPQPFPAAQYGTFQGVANYPPPPQPHPAIGFPHPVPPPGAADSSAPPPPYYPGYQAVPGYAVAEGRPVRERHLGGGACYNCGESGHLARDCSGGGGGDRYGGGGGGGRYGGGGGGRYGGGGGGGGGGGSCYSCGESGHFARDCPSSAR

SEQ ID NO: 9460 - protein, 277 aa, Glycine max
  Clone ID: GLYMA-23APR03-C9870_1.p
MDDEDVNESLRETNQFDEEFLRDILQQPEEGGEDLKNSSIMSSLFPTTYILSFDKSAAELLPTETDHRDYSSSQLPSSSNSRANHGTNKKPRSASESLDHIMSERNRRQELTSKFIALAATIPGLKKMDKAHVLREAINYVKQLQERIEELEEDIRKNGVESAITIIRSHLCIDDDSNTDEECYGPNEALPEVEARVLGKEVLIKIYCGKQKGILLKIMSQLERLHLYISTSNVLPFGNTLDITITAQMGDKYNLVVNDLVKELRQVAMMKSCDVQQ

SEQ ID NO: 9461 - protein, 433 aa, Glycine max
  unsure (1)..(433): unsure at all Xaa locations
  Clone ID: GLYMA-23APR03-C9914_1.p
MATTTTSSFAFLKSHTHTKTLFTRRSYKAIKAQSQTDVREEQVVVVGAGIAGLATALSLHRLGVRSLVLEQAQSLRTGGTSLTLFKNGWRVLDAIGVANDLRTQFLEIQGCTXMVVKSVDGRELRAFNFKQEDPSQEVRAVERRVLLETLASQLPRDTIQYSSQLQRIEATPNGDTLLELVDGSKLLAKIVIGCDGIRSPIAKWMGFPEPKYVGHCAFRGLASYSDGQPFGPRVNYIYGRGLRAGFVPVSPTKVYWFICFNSPSAGPKITDSLELKKQAKELVKNWPSELLNIVDSTPDDTVIKTPLVDRWLWPAISPSASAGRVVVVGDAWHPMTPNLGQGACCALEDSVVLAKKLARAINSEDPSVEEAFRSYGAERWPRVFPLTIRANLVGSVLQWENPLVCSVRNNIVIPKLVRLGPLLEHTNFTCEGL

SEQ ID NO: 9462 - protein, 457 aa, Glycine max
  Clone ID: GLYMA-23APR03-C9955_1.p
MDPRALSPPSVVPRRARRSSFSPLICSVCLKHRPKMCSSTLSSYSFLTISSTFFKSQFCPPPFPSRVVACHVGSNSNVQKHVATDLKFVLHDALHDSGINTTHAREAREHFCSQIRRFTDIEKGTSICINRCVDLGRTALYIAAEDDSLVSHSSVPLPVDDFITRLDDLSMDYCPHYSPKYDSSPEKFLESIERFLYIHKGFRRANANVLEPRALYLHSVLTHRSGSAAMLSLIYSEVLKMLRLWSLLHFDAEIFFPRDALTLPTGYHKQKSKESDQAHIMTSGNLLVEILNDLKHAFWPFQHDHTKTLFLRAATAANCVDRSDFVGESGSQIALAKAAQHRLDRGVWTSVRFGDMRRSLSACERLILLKNDANELRDYSILLYHCGLYEQSLEYLTKYRDLKNSSTQELSSSNSLSSLEEDAVDNLMMRLNLVLMEQGWSRPSYAKNFLGNNSEPW

SEQ ID NO: 9463 - protein, 330 aa, Glycine max
  unsure (1)..(330): unsure at all Xaa locations
  Clone ID: GLYMA-23APR03-C996_44.p
PLPNLRRLDLSGSKNLIKMPYIGDALYLESLDLEGCIQLEEIGLSIVLSPKLTSLNLRNCKSLIKLPQFGEDLILEKLLLGGCQKLRHIDPSIGLLKKLRRLNLKNCKNLVSLPNSILGLNSLVWLDLSGCSKLYNTELLNELRDAEQLKKIDIDGAPIHFQSTSSYSRQHQKSVSCLMPSSPIFPCMSKLDLSFCNLVEIPDAIGIMSCLXQRLDLSGNNFATLPNLKKLSKLVCLKLQHCKQLKSLPELPSRIGFVTKALYYVPRKAGLYIFNCPELVDRERCTDMGFFMDDAIVSGLHVPPLLLSSLSLSFFYRNQEITYRCLCSTR

SEQ ID NO: 9464 - protein, 462 aa, Glycine max
  unsure (1)..(462): unsure at all Xaa locations
  Clone ID: GLYMA-23APR03-C996_51.p
PLPNLRRLDLFGSKNLIKMPYIEDALYLESLNLEGCIQLEEIGLSIVLSPKLTSLNLRNCKSLIKLPRFGEDLILGKLXLEGCRKLRHIDPSIGLLKKLRELNLKNCKNLVSLPNSILGLNSLQYLNLSGCSKVYNTELLYELRDAEQLKKIDKDGAPIHFQSTSSDSRQHKKSVSCLMPSSPIFQCMRELDLSFCNLVEIPDAIGIMSCLERLDLSGNNFATLPNLKKLSKLVCLKLQHCKQLKSLPELPSRIEIPTPAGYFGNKAGLYIFNCPKLVDRERCTNMAFSWMMQLCSQVRLFSLWYYHFGGVTPGSEIPRWFNNEHEGNCVSLDASPVMHDRNWIGVAFCAIFVVPHETLLAMGFSNSKGPRHLFGDIRVDFYGDVDLELVLDKSDHMCLFFLKRHDIIADFHLKHRYLGRWVSRYDGVLKESYAEVKKYGYRWVYKGDIEQRKRKFGEIEEK

SEQ ID NO: 9465 - protein, 296 aa, Glycine max
  Clone ID: GLYMA-23APR03-C9971_1.p
MSFSHHRRSQSEMHFRISDDFDLEVDLSPSHHFQYPAPLLQDSGSIPQSPQPETARSAHQRSNSADASYSSLVDGIEAKKALSPDKLAELWTADPKRAKRILANRQSAARSKERKACYVLQLERKFQSLQTEATALCARLSLFQRDTTGLTTENTELKLRLQAMEQQANLCDALNEALKKEVDGLKIATGEIVMHNAHGLGLHPLTYSQAPFFSHQSQHGQSELQAMQMPQLHSLSSNVPTSDEPLFDLDIPYDLSEMLSSESIGQFQGLDIGDGVLHNLMPDCPSISVNNINNAF

SEQ ID NO: 9466 - protein, 274 aa, Glycine max
  unsure (1)..(274): unsure at all Xaa locations
  Clone ID: GLYMA-23APR03-C9985_3.p
FAADTLGFKTYAPAYLSPHASGKNLLIGANFASAASGYDENAATLNHAIPLSQQLSYFKEYQGKLAKVAGSKKAASIIKDALYVLXLEAVTLCKIIMSILGXNKVYTPDQYSSYLIGSFSSFVKDLYGLGARRLGVTSLPPLGCLPAARTIFGFHENGCVSRINTDAQGFNKKLNSAAASLQKQLPGLKIAIFDIYKPLYDLVQSPSKSGFVEANRGCCGTGTVETTSLLCNSKSPGTCSNATQYVFWDSVHPSQAANQVLADALILQGISLVT

SEQ ID NO: 9467 - protein, 276 aa, Glycine max
  Clone ID: GLYMA-23APR03-C99894_2.p
MAAKEENRIFVGGLSWDVTERQLEHAFARYGKILECQIMMERDTGRPRGFGFITFADRRGMEDAIKEMHGREIGDRIISVNKAQPKMGGDDADQGYRGGYSSGGRGSYGAGDRVGQDDCFKCGRPGHWARDCPLAGGGRGRGGSSFPSRPRFGAAGGHGDRLGGERDRYVDDRYDGGRYGDRDRFDNRDYKYGSRDRYAGDRYPTSGDRFASDRYGAGSDYPQNGYGKERGYDRYSGPRGGADRYGSGMGGRDEGRSYRGRPGPYDPPKQGFSFIT

SEQ ID NO: 9468 - protein, 141 aa, Glycine max
  Clone ID: GLYMA-23APR03-C99986_1.p
IHVRYNIRVQVYDGTGNACFKLPYKDVKILLKISCKDIVLHIEGPYAQELPALLYDLNGLDLLFLVDTRIEGSATSSSNVSDHDGYSVSEICHEKEILRMLQRGEHYFQFDEGQAKRALCLSVKENKLKVTKQHHAPGCID

SEQ ID NO: 9469 - protein, 161 aa, Triticum aestivum
  Clone ID: TRIAE-23APR03-C10009_2.p
MGKFRKLGRHAAHRVSMLRTMVSQLVKHERIETTVAKAKEVRRKADQMVQLGKDGTLDAARRASAFVRGDDVVHKLFTELAYRYKDRAGGYTRLLRTRIRIGDAAPMAYIEFVDRENELREAKPATPPPPQRAPLDPWTKSHASQQWAGPKVSQNSKTEGL

SEQ ID NO: 9470 - protein, 115 aa, Triticum aestivum
  unsure (1)..(115): unsure at all Xaa locations
  Clone ID: TRIAE-23APR03-C10021_2.p
MPKADGDATLLIQSLNKAYAATPTNLKIIDLYVVFAVVTALVQVGYMGIVGSLPFNSFLSGVLSCIGTAVLAACLRIQVNKDNKEFKDLPPERAFAXDFVLCNLVLHLVIINFLG

SEQ ID NO: 9471 - protein, 166 aa, Triticum aestivum
  Clone ID: TRIAE-23APR03-C10078_5.p
MAGGADADGERRIGVAMDYSASSKRALEWAVRNLLRRGDTVVVLHVQRHGGEDAKHAVWAKSGSPLIPLSEYREPEVMKNYGVTCDAEVLDMLDTAARQLELKVVAKVYWGDAREKLCDAVEEQRIDTIVMGSRGLGTIQRILLGSVTNYVLSNASCPVTVVKGDR

SEQ ID NO: 9472 - protein, 171 aa, Triticum aestivum
  Clone ID: TRIAE-23APR03-C1008_2.p
MATLSMVSGPVATSSLPLSTRRRASSVSLPAPKKGGIGHGGLRIECIRIGGVEIPNHKRVEYSLQYIHGIGRNRSRQILLDLSFDNKVTKDLSEEEVITLRKEVTKYMIEGDLKRFNRVAIERMKEIRCYKGIRHKLGLPVRGQRTKNNCRTLKGKRASVAKKKSASSSDE

SEQ ID NO: 9473 - protein, 488 aa, Triticum aestivum
  Clone ID: TRIAE-23APR03-C10135_1.p
MDGGQSVAKRHGAAAAAGAEEDPERHRALHEAADDHDGGDKKAPRRSSSRRVASLDVFRGLTVALMILVDGAGGQWPVVGHAPWHGCNLADFVMPCFLFIVGMAIPLSLKRIPDRSRAIRRVVIRTLKLLFWGILLQGGYSHAPDELTYGVDMKHIRWCGILQRIALAYLVVAVMEIATKDARVQDQSSSGFFSVFRLYLSQWIVACCILLIYLSLVYGIYVPDWEFTVRNVDSPNYGKVLTVTCGTRGNLSPPCNAVGYIDRKVLGINHLYQKPAWRRHRDCTDDSPHEGPFKRDAPAWCASPFEPEGLLSSFSAVLSTIIGVHYGHVLVHMKSHMDRLKQWVTMGIALLLLGIILHFSHAIPLNKQLYTLSYICVTAGAAGIVFSMLYFLVDVVSLRYVFAPLRWVGMNAMLVYVMAAAGIFEGFLNGWYYDGTNNTLVYWVRKHVFVRVWHSERVGILLYVLVSQILLWALLAGLLHRAGVYWKL

SEQ ID NO: 9474 - protein, 214 aa, Triticum aestivum
  Clone ID: TRIAE-23APR03-C10152_1.p
LSKYAIRGYGRTSSYNNNNRVNLPEDLALQHSLQVALRCKEEHDQRRDAGRVAADHDHNPVSVPEDLALQHPPLHHSMRDPAMNKRMCHALDHGDAGFLASSSNDGSGSLDPHGIALDINNGFTDGTNLSVVRKELASQQIELQKRRLQTQAQKLEVAKQRLKWERFKMKKDREIERMTSENEQMMLQQKRLELQLRHKELEVELELKGNANHA

SEQ ID NO: 9475 - protein, 212 aa, Triticum aestivum
  unsure (1)..(212): unsure at all Xaa locations
  Clone ID: TRIAE-23APR03-C10153_1.p
AWLPLALYYRAISIHDHSLACRYRSGGRGTLLAQGPGPSQIDERPLSWTLGWRIFCEACNIDTPQSAGRYNRRMAPHILPEQWRIGSEWFELNRELAVRVVADYKXYSIFRKHCRPSCYPDEHYIPTYLHLFHGSLNANRTITWVDWSRGGPHPARYGAGNINVDFIKAIRNNGTQCLYNSKHTSVCYLFARKFAPSALGPLMNLTSTVLDF

SEQ ID NO: 9476 - protein, 619 aa, Triticum aestivum
  unsure (1)..(619): unsure at all Xaa locations
  Clone ID: TRIAE-23APR03-C101572_1.p
MEWDSDSDGSGEEDEEEEEGEGVGPWGADGCRGGGGFSLAIEGVLGGACGLVVSDALEPDFPIIYVNRGFEDATGYHAEEVLGRNCRFLQCRGPFAQRRHPLVDAIVVTEIQRCLXEGTEFQGDLLNFRKDGSPFMTSLQLKPIYGDDETITHYMGIQFFNDCNVDLGPLPGSMAKEVVRSIWITPDNTLRPSPTGKGNFCSEYSHLFQLSDEVLCQKILSRLSPRDIASVNSVCKRLYHMTKNDHLWRMVCQNAWGNDATRALENVAGTKSLAWGRLARELTTLEAVTWKKLTIGGSVEPSRCNFSACAVGNRVVLFGGEGVNAQPMNDTFVLDLSASKPEWRHINVGLAPPGRWGHTLSCLNGSLLVLFGGCGGQGLLNDVFILDLDAKHPTWREIFGLTPPVPRSWHSSCTLDGSKLVVSGGCADSGVLLSDTHLLDVTMERPVWREIPAPWTPPSRLGHSLSVYDGRKILMFGGLAKSGPLRLRSGDVFTMDLSDAAPSWRCITGSGMPGACNPAGVGPPPRLDHVAVSLPGGRIMIFGGSVAGLHSASQLYLLDPTEEKPTWRILNVPGRPPRFAWGHSTCVMEGSKAIVLGGQTGEEXWTLTEIHELSAGQLL

SEQ ID NO: 9477 - protein, 311 aa, Triticum aestivum
  Clone ID: TRIAE-23APR03-C101981_1.p
MATILAGRRLLLLRRCAAGRRLLGTAAEASPRPGGEEAGGEAIYVRKPSSSSTRDETSVSMPMSFMTGSVVGKRFYRDATVRRADDGNGWTVMLDYRTLKTPAKRPLKLHSRTLAMAVAAEWEYQEQDGIRPFTMPLMKLACTALERVPLTRTKIITNLMQKFHQDLVFCRSPADDELTKGVYEKQKEKIDPILDWVKTEFGFKPVVYTSFLGGKQDERLVKAVETVLKDANDCELASIDAMAAAAHSLVIPLAIFRGRLGVDESIELIRLEEDHQVDRWGLVEGGHDVDIADLKVQMSSAVVFLQLSWLK

SEQ ID NO: 9478 - protein, 303 aa, Triticum aestivum
  Clone ID: TRIAE-23APR03-C102056_1.p
RPHLSSPPPPSSLRPPGPRLANDLMAKKGKAAAAASDSGASSPQGSVEGGGEKEGSFLLGQPTWEDAGGGRWRCAETGHELPEREKDAYARSRACRLALIDHGVAHKKPPLNAFKPHPEHKSKLICNITGDTINKSEEHIWKHVNGKRFLNKLEKLEEKMASGETGKVEGEQSNEVAKKSKSTKKKDKKKEKKEKKKAAVANPSLPREPEPEIDDSDDSEFWVPPVGSRWDDDDGKDRWESSPGKDDIAEDEGASDDEDDDEMADKDDEVSEELASSRTKRLSVEAVGPSSFATRKKKPRKDE

SEQ ID NO: 9479 - protein, 519 aa, Triticum aestivum
  unsure (1)..(519): unsure at all Xaa locations
  Clone ID: TRIAE-23APR03-C10237_1.p
RRRQHYPPFLQASDVATPGGLPCGCAAAAVLPLLALVVLSAGCGAAPQGAEVTGLPGYDGALPSKHYAGYVTVDEQHGRNLFYYAVESERDPAKDPVVLWLNGGPGCSSFDGFVYEHGPFNFESGRSVKSLPKLHLNPYSWSKVSTMIYLDSPAGVGLSYSKXSDYEKGDIKTAADSHTFLXEGVTCTLRVSATRFILAGELYAGVFVPTFSXEFLKGYKEEAKRTXTIKDYMVGKXATETVFVFXGSCALVPFAHGMGLISEEIYQQAFTTCDGNYWNAREGKCESALCGKXDSLISRTEHLSTFFEPCYHGEKHQRKQTRRIXKLPKSFKDLGTTNKPFPVRTRMLGRAWPLRAPVKAGRVPLWQEVASGVPCMSEEVATAXLEKDGVRSAIHAQSVSSIGPWLLCTDKIDFNHDAGSMISYHKNLTSQGYRAIIFSGDHDMCVPYTGSEAWTKSMGYGVVDSWRPWFTNDQVSGYTEGYEHGLTFATIKGAGHTVPEYKPQEALAFYSRWLNGSKL

SEQ ID NO: 9480 - protein, 285 aa, Triticum aestivum
  unsure (1)..(285): unsure at all Xaa locations
  Clone ID: TRIAE-23APR03-C1028_1.p
MRKKLDTRFPAPRIKKIMQADEDVGKIALAVPVLVSKALELFLQDLCDRTYNITVEKGVKTVSSSHLKQCIHSYDVYXFLKNVASKVPDLGXHLDSSVDDKLGKRRKHGEDESEEESKRTRNEAACHTSNGRGRGRGRGRGRRAGRGAEREIEHHELGCAQFSKPGHLKVEIGDVVLDTSETKEHTPLSNARASLRNIDLNLDLADYEEDTPQVQPSAPSAPVVTVAPQVQTSGPSVSQLKEEVETKDFLGWQMPEMNKMAMDPVQFALSSNHRLEEDEDYDNEE

SEQ ID NO: 9481 - protein, 409 aa, Triticum aestivum
  Clone ID: TRIAE-23APR03-C10298_1.p
NLPSPQRSASERHTWRWRRRRETWRCLTRRLWRCWGGGRIWRRVAVCGEWETFKENVRPLKRGRNVGLLNQALKAHPDPAQRAALLAKRRRMIEAIEEYQGQDPLQPWVDCIKWVQESFPAGGEFSGLVVIYEQCVRAFWHDERYKDDLRYLKVWLEYAGNCSDAEVIFRFLESNRIGEGHAVFYIRYALLMESKNKVKKVDEIFNLGIARKAKPVEKLETTYRAFLGRSTRKKEHEDDTASDDPPVRKFGSDLNRGETRGQHAENSHMLAKPRVKLQRIDVNTPISIYKENPLPSQGLERARSKDRAWNTLGTQADRNKENNMMPARWTSHKIPPKVAARQAVPPARVSSIEVFVDEECAEEPAPPRVPKSPKPSVLKLRQATSKNLKKESELLKENPLRNFPLSSLR

SEQ ID NO: 9482 - protein, 311 aa, Triticum aestivum
  unsure (1)..(311): unsure at all Xaa locations
  Clone ID: TRIAE-23APR03-C1029_1.p
MGVRCLLLLAVLLLAGDHGGEAQPLVPGVFTFGDSSVDIGNNDYLHTLIKADFPPYGRDFPNRVATGRFCNGKLATDITADTLGFTSYPPAYLSPQASGKNLLIGVNFASAGSGYYDHTALMYHAVPFSQQLEYFREYQSKLTAFAGSSQAKSIISGSLYIVSFGASDFVQNYYINPLLFKTQTVDQFSDRLVSIFVNSATQLYGMGARRIAVTTLPPLGCLPAAITLFGHGSTGCVSRLNSDSQRFNGKMSAAVSSLSKRYHDLKIAVFDIYTPLFSLVTSPGRSXGFTVAKRGWGGTVWAEFTVVPVST

SEQ ID NO: 9483 - protein, 159 aa, Triticum aestivum
  Clone ID: TRIAE-23APR03-C102_4.p
MAGMVFGLENPMMTALQHLLDIPDGETGAPGGEKQGPTRAYVRDARAMAATPADVKELPGAYAFVVDMPGLGSGDIQVQVEDERVLVISGERRREEKEDTKYLRMERRMGKLMRKFVLPENADMEKISAVCRDGVLTVTVEKLPPPEPKKPKTIQVQVA

SEQ ID NO: 9484 - protein, 224 aa, Triticum aestivum
  Clone ID: TRIAE-23APR03-C103154_1.p
MADLGSFGRRRQPTAAEVVGRLKDDGDFDALRRAIVRKVKDNEVLRNNIITEVKQSMLLSEDGSEKLKLKELSDAIFQDVGSKIMGQISDEVWSVIQSGETDIRGSVEAVFDRIMNPEQQQDTGPSPKKLKRNGKGEQVSPAKASAPVTVQVEDDDPEEPPGFGLSDLQRSNMVVKQEQPCDDGQNHTQVKPNGGELVGAGSLGDADDEDPDVPPGFDAPPGFG

SEQ ID NO: 9485 - protein, 245 aa, Triticum aestivum
  Clone ID: TRIAE-23APR03-C10342_1.p
PTHPESDGSGELRGGGGKGHADGDAALDLGARLRLADLLHLEHPLHDELVLALLVGVALGLALPGEVELGDAALVERDEGGARTGRGRGSAGAHAPPPPGSRSPASGCPPARRPSPPPPPSLTFFCLVRRGRRSAVRVRVRRGFWLGRRESCTGRGRGSAGAPPPSPPGSRSAAFEVPSCTPAAAAAASISHLLLSSPARSPMGCAGAGLVRRLVRAREWWGGRERLPIAMPTIWFRPKKEVFLH

SEQ ID NO: 9486 - protein, 330 aa, Triticum aestivum
  unsure (1)..(330): unsure at all Xaa locations
  Clone ID: TRIAE-23APR03-C103442_1.p
TAPHPPPSPPCLLRSPPDPFPSDPDPHPLPSAPTSSLLPPRAASSPPPPRRPAAPPARPPTAAAPRRPPPPAPASGLRPPPDGSAARRMRADATGGRMPVPPAGGVSKELAPRPRPGQPRLRPRPTRLSIAXAPAVPFLISTFYMDGPWAATATTGIFLAASLGSNCHNWHLPCXAITDWLDGYIARKMHLGTPFGAFLDPVADKLMVAATLVLLCTKPLETSLLTNGPWLLTVPSIAIIGREITMSAVREWAASQNTQVLEAVAVNNLGKWKTATQMTALTLLLASRDPSLHVQGALVPPGVALLYASAGLAIWSLVVYIRNIWRILLK

SEQ ID NO: 9487 - protein, 485 aa, Triticum aestivum
  unsure (1)..(485): unsure at all Xaa locations
  Clone ID: TRIAE-23APR03-C10352_1.p
LRRGASCFTAPLLLLKALTQTHPPLLRGAACRNGPPPPVLRGGSRRVLALPXSDAAVISGPRRXPDVPAAARTPPRXPWPLTAGLWARSMATFTRTKTHVNVGTIGHVDHGXTTRTAAITKVLAEAGXPEAVAFDEIDKAPEEKARGITISTAHVEYETAKRHYAHVDCPGHADYVKNMITGAAQMDGGILVVSAPDGPMPQTKEHILLARQVGVPSLVCFLNKVDAVEDEELLELVEMELRELLSFYKFPGDDIPIIRGSALSALNGTNEEIGKNAILKLMDAVDSYIPDPVRVLDKSFLMPIEGIFSIQGRGTVVTGRIEQGVIKTGEDVEVIGLTESGPVKTTVTGVEMFKKMMDHGEAGDNVGLLLRGLKRGDVERGQVVCKPGTVKTYKKFEAEIYVLTKDEGGRHTAFFSNYSPQFYFRTADICGKIELPPDVKMVMPGDNVTAIFELMLPVPLEPGLRFALREGGRTVGAGVVAKVMS

SEQ ID NO: 9488 - protein, 394 aa, Triticum aestivum
  Clone ID: TRIAE-23APR03-C103761_1.p
MAAAILRRLSPVASQRVPPRLLPPTLARGVSDSTEPLTVETSIPFTSHVVDPPSREVTTTPRELAAAFRDMALMRRAEIAADSLYKAKLIRGFCHLYDGQEAVAVGMEAAITRRDAIITAYRDHCLYLARGGGLVAAFAELMGRVDGCSRGKGGSMHFYKKDANFYGGHGIVGAQVPLGCGLAFAQRYRKEGTVTFDLYGDGAANQGQLFEALNMAALWKLPVILVCENNHYGMGTAEWKASKSPAYYKRGDYVPGLKVDGMDFLAVKQACKFAKEHVLEIGPIILEMDTYRYHGHSMSDPGSTYRTRDEIAGIRQERDPIERVRKLLLTHDLATAQELKDMEKEIRKEVDTAIAKAKESPMPDTSELFKNVYVNDCGLESFGVDRKVVRTVLP

SEQ ID NO: 9489 - protein, 218 aa, Triticum aestivum
  Clone ID: TRIAE-23APR03-C103787_1.p
MSMLGLRGLPAKMPKPPTRPLKTVAKEKKTKATNNWMTILGLPPKKASANDQVPPNEQQQTQHKTSEDTKKLAANALAAVRDAATAASGRGKVEITEVRDFAGKDIEIKKLVDADSKEAVEKASAAGASPSAVDNILEQIRKKQKLSVLDKTKKDWGEYKAEKGVEEELGAYKKSSNQYLDRQSFLKRADYREYELERDARLSLMAKRKSESMQDDDV

SEQ ID NO: 9490 - protein, 190 aa, Triticum aestivum
  Clone ID: TRIAE-23APR03-C103877_1.p
MESPMAARRLLQEAAGLSTPGARIIADDRDIVIILASLLCALITVLGIGLVARWCACGGAEARARAAANRGVKKSVLRAIPTVAYVSADAGKGKGKEAEEAAAAPECAICLAEFEDGEAMRVLPQCGHAFHAACVDKWLRGHSSCPSCRRILAVQLPAAQRCQRCGARPDPAVATWKPPAQYGEMPPFLP

SEQ ID NO: 9491 - protein, 272 aa, Triticum aestivum
  Clone ID: TRIAE-23APR03-C10403_1.p
MHSSSPSSAAVAYSSSSPSHLSPVDGFLCVKEGVDEMIKHVANEPSLGLYFVQQHAQASMPILLDVKGKVTEKTREITLHTEDIEDSICAVRSMAEFGLPIADDMIKDINKSLKIMSKTQPKKGLTQNPIWGFQSDKSSEAWNDLDATNGGSSKNYLSSMLNTAKQKASSLRWPQTDFAMNDGVSEKSVSSTAQESSQAGGHGASTPSDAERDEVSISSRLLENKNAGTMNQGLSASDISHTAESYNKFKEEQELKLQEWLRESKEADDNRG

SEQ ID NO: 9492 - protein, 401 aa, Triticum aestivum
  unsure (1)..(401): unsure at all Xaa locations
  Clone ID: TRIAE-23APR03-C10452_1.p
QQKHHVPDQFHHEDSNKGRVDDVNDTNRTTTPIIAIIEINTPIISHTFRDIELKIANFVDSWGDGVLVMVFGLVQTKATKEKXYFFLTFLLQPEEXGYVLLNDYFHFVDQEQVQPAQVRAHEALETNMESKTVQTIAEYIHEKSRTMQAVPVTSEENDAVDSYTYSEPPLQVHFLPSRMEWRWHQRSRHNLRLCSAHVEEPVGEPVKKTYASILRTAKAPPPFPFAQSAPVNKPHPTTEANQATLGTSSVAADKPKSDFYAEGHDEEESRSVDVGNVPRHVPAADLENEFKKFGQLIPDGVAIRSRKETGGYYAFVEFEELSGVHNALRASPLEINGRQIYVEERKPNSGIRGGRRGGGRGRFGGSGRGYARGDEYSGSRGKSNGYQRVPHHERGILGARN

SEQ ID NO: 9493 - protein, 242 aa, Triticum aestivum
  Clone ID: TRIAE-23APR03-C10468_1.p
MLTKGRRVAGRGEDMSAHYAFGPHEDDAIIKHRLLTRTTTTRGEPPLKKLQKKFMSFATEVEKDADNTSDCERLYKAFLQEINTFELPLLKSKAVVDANLREKESFNELQVEIQRQILQAQTDIEDLKKQLEQSKIERQHKEECEAIRKLISSQPPRSETEKLIANLEKEIANLEAESAACTRTLELRKKQFALLLHVVEELQISIEDEQRNIADELRAATEEPKLSIEEGSGGASDAMAVD

SEQ ID NO: 9494 - protein, 559 aa, Triticum aestivum
  unsure (1)..(559): unsure at all Xaa locations
  Clone ID: TRIAE-23APR03-C1046_19.p
MLVLFETPAGFALFKVLDEGKLSSVEDLWKDFASSDKARKVVELKAFNKFENTSDALSAATLLIDSKPSKGLRKFLQKHCDGETLAVADSKLGNAIKEKLQIDCLHNSAVMELMRGLRNQLTELMSGLAEHDLGPMSLGLSHSLSRYKLKFSPEKVDTMIIQAIGLLDDLDKELNTYAMRVREWYGWHFPELTKIVADNIHYAKAVKMMGNRVNAVNLDFSEILPEEVEAELKEAAVISMGTEVNDLDLSNIRELCDQVLALSEYRAQLYDYLKSRMNTIAPNLTALVGELVGARLISHGGSLMNLAKQPGSTIQILGAEKALFRALKTKHATPKYGLIYHASLIGQAAPKHKGKISRSLAAKSALAIRYDALADGDDNSMGLESRIKLETRLRVLEGKELGRSAGSTKGKPKIEAYEKDRKGGGALITPAKTYNSAADLVLGQTTEETPKKSEVASKKRXXQDEEPTAEAAEQDGEQEKEKSKKKKKKSKDIEETPAAVTDASEKKKKKKSKEAEDTPAANTDGEKKKKKKKSDAEDAPMEVDVSAKKEKKKKKKADE

SEQ ID NO: 9495 - protein, 345 aa, Triticum aestivum
  unsure (1)..(345): unsure at all Xaa locations
  Clone ID: TRIAE-23APR03-C1046_21.p
MALSDLSRDSLLPSFLYSPRSFAAAASPRFPSSPSPYQAPASPAAAPAAGLVGSGGVGXRQALLDPRAHLVKCNMQIDPAKYKSISSGFGVLLKEQGARGFFRGWVPTLLGYSAQGACKFGFYEFFKKTYSDMAGPENAVKYKTLIYLAGSASAEVIADIALCPFEAVKVRVQTQPGFARGLSDGLPKFIKAEGAAGLYKGIVPLWGRQIPYTMMKFASFETIVELIYKHAVPVPKAECSKSSQLGISFAGGYIAGVFCAIVSHPADNLVSFLNNAKGATVGDAVKKIGMLGLFTRGLPLRIVMIGTLTGAQWGIYDAFKVMVGLPTTGGAPPVAPVEEAAKAIA

SEQ ID NO: 9496 - protein, 479 aa, Triticum aestivum
  Clone ID: TRIAE-23APR03-C104969_1.p
MESTRAELAAPTERLAPRPHVVLLASPGAGHLIPLAELARRLVDDHGFAATLVTFTDLSTAEALSGVPACVATAALPAVPLDDLPAGTSMETVLFELVHRSLPNLRAILRSVGAPLAALVPDFFCSAALPLAAELGVPGYVFVPSNLTTIALMRATVELHDGVPPGEYRDLPELLCLPGGVSLRRTDLPRSFQSSNEPVYAHLLEEGRRYRGADGILVNTFYELEPATVEEFKQAAGRGAFPPVFPVGPFVRPSTSSDEAAGASACIEWLDRQPTGSVVYVSFGSGGSLTVEQTAELAAGLEASGHRFLWVVRMPNLDGNDGHDHEDKQNPLAWLPAGFLERTADKGLTVAAWAPQVRVLSHPATAVFVSHCGWNSALESASAGVPIVAWPLYAEQRMNAVVLEGSVGVALRPRARERGEIAAVVKELMEGADKGRAVRRQAGDLQQAAARAWSPEGSSRRALEQVAATWKKVTLAEVK

SEQ ID NO: 9497 - protein, 492 aa, Triticum aestivum
  Clone ID: TRIAE-23APR03-C104_17.p
MDPYKYRPSSSFNAPMWSTNSGAPVWNNDNSLTVGSRGPILLEDYHLVEKIADFDRERIPERVVHARGATAKGFFEVTHDVSHLTCADFLRAPGVQTPVIVRFSTVIHERGSPETLRDPRGFAIKFYTREGNWDLVGNNFPVFFIRDGMKFPDMVHALKPNPKTHIQENWRILDFFSHHPESLHMFTFLFDDIGVPADYRHMDGSGVNTYTLVNRAGKAHYVKFHWKPTCGVKSLLEEEAVTVGGTNHSHATKDLTDSIAAGNYPEWTFYIQTIDPDYEERFDFDPLDVTKTWPEDVVPLQPVGRLVLNRNIDNFFSENEQLAFCPGIIVPGVYYSDDKLLQTRIFSYSDTQRHRLGPNYLLLPANAPKCSHHNNHYDGLMNFMHRDEEVDYFPSRFDPAKHAPRYPIPSRTLNGRREKMVIEKENNFKQPGERYRSMDPARQERFINRWIDALSDPRLTHEIKAIWLSYWSQADKSLGQKLASRLSSKPSM

SEQ ID NO: 9498 - protein, 410 aa, Triticum aestivum
  Clone ID: TRIAE-23APR03-C105304_1.p
MELGLASSRGPAGPSLAVAGRRPRPSLSPPLPCPLSLQIQTRGYSMPTLHHKAHTTVGCQASVAAKYMETPDIVDLDWENLGFGLVDTDFMYMAKCGTDGNFSSGEIVPFGPIALSPSAGVLNYGQGLFEGLKAYRKTDGSVLLFRPEENAIRMKNGSDRMCMPAPTVEQFVDAVKQTVLANKRWVPPTGKGSLYIRPLLIGSGAILGLAPAPEYTFLIYVSPVGNYFKEGLAPINLIIEDNFHRAAPGGTGGVKTIGNYASVLKAQRTAKDKGYSDVLYLDAVHNKYLEEVSSCNIFVVKGNAISTPAIEGTILPGITRKSIIEVAESKGYKVEERHVSVDELLDADEVFCTGTAVVVSPVGSITYKGKRVEYDGNQGVGVVSQQLYTSLTSLQMGHTEDRMGWTMQLN

SEQ ID NO: 9499 - protein, 207 aa, Triticum aestivum
  Clone ID: TRIAE-23APR03-C105396_1.p
MERAGAAPGVPAAGEGAAAAAAAPTPVAGAGVVKGRSCKGCLFYSSVLRSKGRGPVCVGVTRGIPQVPDRMVGEIELGAIQEGRNLSNFKYACAGYSIYLDDKDTSTVKGEKHAELPICVGVELLTDRAPTKQAPAHVTKQAPGHMKKEATQAHGHKPALTQADFITKFQRNAGLVASGVVRNMNKIGTYVKDTVDDILYPYRKRPK

SEQ ID NO: 9500 - protein, 200 aa, Triticum aestivum
  unsure (1)..(200): unsure at all Xaa locations
  Clone ID: TRIAE-23APR03-C10550_1.p
YSYLLAPHFSPIPLPFRPSPGSDRAALLRQARHRRSRAGGQPASLGSRSKGSKRRRDRRRGGLFMTSLARATGTLYSGNLCASNLANSHHTYSKMFRCKHGHANHFNDDVNVVAGEIVDEGMKAAGLHTVRDIIFLACGAIVGWKFVAAFDETHEVKGGQVHDGELNDQLGRIRXPDAIHLWAEHDARITSSEDVDQGAV

SEQ ID NO: 9501 - protein, 222 aa, Triticum aestivum
  Clone ID: TRIAE-23APR03-C1055_1.p
MSCPARTLSSRSLKHLSLRSCRSNSNCWVHVSTPGLVSLVLFRFGGTTPFLENMALLETARLDLSDDFDVCFDYDSDENSVPFNKDDSGDSVLLGALSGAKHLELVSAFQNFVFRRDLRQCPTFSKLKTLLLNEDWSEAPDLDALACVLKHSPVLEKLTLQLFTNKGPKQEMKMKGSYSSAERSAAISEHLKIVEVQCNVVNQGVFKVLKFLCAFNIRFNFE

SEQ ID NO: 9502 - protein, 458 aa, Triticum aestivum
  Clone ID: TRIAE-23APR03-C105643_1.p
MAEDAGDRDQQQQQQPAAAAGAGAGHEDGGGRDESSVKLFVGQVPKLMTEAELAAMFRDVAVVDEVTVIRDKATKASRGCCFLICPSREEADKAVNAYHNKRTLPGAPSPLQVKYADGELERLEHKLFIGMLPKNVTDTEMTDLFSQYGNIKDLQILRGSQQTSKAGCAFLKYETKEQAVAAIEALNGKHKIEGSSVPLVVKWADTEKERQARKAQKAQFPQSNMSNANAMQQSSLFGALQMGYVPPYNGFGYQPQGTYGLMQYPLSPMQNQAGFPNMVQPVNQGSSIRGVNSELSPNSLPRSFNSMQLGSPYPAGPGMQYPGSYAGGGINSRPYMNSHNSVNKVPNANATSPTSSSTSSNTGPQLEGPPGANLFIYHIPQEFGDQDLANAFQSFGRVLSAKVFVDKTTGASKCFGFVSYDSPAPAQAAISMMNGFQLGGKKLKVQLKRDNSKHNKLY

SEQ ID NO: 9503 - protein, 117 aa, Triticum aestivum
  unsure (1)..(117): unsure at all Xaa locations
  Clone ID: TRIAE-23APR03-C1057_6.p
MRSLLVLSLVVVAAACLAAPRGAHGAGECGRTPADEMALKLAPCASAGQDPNSAPSSGCCTAVRTIGKQSPKCLCAVMLSDTAKSAGIKPEAAISIPKRCNLVDRPVXYKCGAYTLP

SEQ ID NO: 9504 - protein, 140 aa, Triticum aestivum
  Clone ID: TRIAE-23APR03-C1059_1.p
SLQEARAKAKKPKPGANGQHLMPPHPRSHEPCKPGNQNRPNPNQTPEPKPRHRTPEPRTQAQDPCQKPKHQALTPKPKPGPKPGANAGNPEPKPEPEPKPESKPKPSSLSANHRQLTIRWDTYIRQLMEETPYEATLCYF

SEQ ID NO: 9505 - protein, 534 aa, Triticum aestivum
  Clone ID: TRIAE-23APR03-C105_1.p
MADDDEYPPARTLPETPSWAVALVFAVMIIVSVLLEHALHKLGHWFHKRHKNALAEALEKIKAELMLVGFISLLLAVTQDPISGICIPEKAASIMRPCKLPPGSVKSKYKDYYCAKQGKVSLMSTGSLHQLHIFIFVLAVFHVTYSVIIMALSRLKMRTWKKWETETASLEYQFANDPARFRFTHQTSFVKRHLGLSSTPGVRWVVAFFRQFFRSVTKVDYLTLRAGFINAHLSHNSKFDFHKYIKRSMEDDFKVVVGISLPLWCVAILTLFLDIDGIGTLTWISFIPLVILLCVGTKLEMIIMEMALEIQDRASVIKGAPVVEPSNKFFWFHRPDWVLFFIHLTLFQNAFQMAHFVWTVATPGLKKCFHMHIGLSIMKVVLGLALQFLCSYITFPLYALVTQMGSNMKRSIFDEQTAKALTNWRNTAKEKKKVRDTDMLMAQMIGDATPSRGASPMPSRGSSPVHLLHKGMGRSDDPQSTPTSPRAMEEARDMYPVVVAHPVHRLNPADRRRSVSSSALDVDIPSADFSFSQG

SEQ ID NO: 9506 - protein, 201 aa, Triticum aestivum
  unsure (1)..(201): unsure at all Xaa locations
  Clone ID: TRIAE-23APR03-C10606_1.p
MPPAPAAGPAASSCCYYSLLGIRKNASSTDIRAAXRRLAMKWHPDRWASDPGATGEAKRRFQRIQEAYSVLSDKGKRAMYDAGLFDPLDDDDQDFSDFMQEMLVMMDSVKNEKPDTLEDLQKMLDDIVNGDGGSRATAGAGGSGGGGGWLRWSRSTGGQPQNSCRPLPAAFAKVMDAPVLVTCTHRCACRREIRARREQPA

SEQ ID NO: 9507 - protein, 309 aa, Triticum aestivum
  unsure (1)..(309): unsure at all Xaa locations
  Clone ID: TRIAE-23APR03-C1060_1.p
MGRRFPLSTGARRPSSGRSASPPETGVPASSVSAAVKASXRHIGCAPVYRTKTERRCALKNLSGDGTTTRQAVXITSXLRSNSALPEGVPAALGGTLQHLQTGSVTIWLVHWSTGRPGGASYTXQNVVPAPVRATWEAMDGLYDSRLGRAPRVRNXYCKYKKEQLVVARVPPAANQVECHPVWQQAKLRDLCASKGIHFSAYSPLGSPGTFKSYSVLEHPVVVSTAEKLGKTPAQVALRWGIQAGHSVLPKSTHEERIRANFDVFDWSIPSDLFAGFSEIEQTRLIRGKFWTHPEGVFKSEEEIWDGEI

SEQ ID NO: 9508 - protein, 499 aa, Triticum aestivum
  unsure (1)..(499): unsure at all Xaa locations
  Clone ID: TRIAE-23APR03-C106336_1.p
MHRRPPLRSSAPQTHRQGGNPPSTLYTDPMDMESSVAVVAVPFPMQGHLNQLLHLSLQLASEPRGLNLDLHYAAPAAHVRQARARVHGWDESALRSVHFHELDIPAFAAPPPDPDAXRPFPTHIMPMFEAYVAGAAAPLAALLRDLSASRRRVVVLHDVLNAFAGVEAERLPNGNGESFGLYCGAVSYMVGMVDAGHRLLRDCGLEYAPMDRYVSREFMECAKRQSSLARSVSRGGGMVANTCRALEGEFVDAFAETLAAVGQRIFAVGPLNPLLEPGQIDAKQGRHECLDWLDKQPAASVLYVSFGSTSSFRGSQVAELAAALKGSKQRFIWVLRDADRGSVSTDDADSRRHARLASEFAEQTRGTGXVITGWAPQLEILAHPATAAFMSHCGWNSTVESMSHGKPILAWPMHSDQPWDAQFVEKYLGAGLLVRPWEKHGEVTPAAIIQQAIETVMVGEEGLAMRRRAMALGEAVRACAAAGGSSRKDLQDFVAHLTR

SEQ ID NO: 9509 - protein, 330 aa, Triticum aestivum
  unsure (1)..(330): unsure at all Xaa locations
  Clone ID: TRIAE-23APR03-C106551_1.p
MSRSMSLNMRSASRRDLPPPQKTIERFEKMVEGGSYYEAQQMYKSTSARYITCQRYSEGLDILQSGATIQLKHGQITCGAELAVLFVDTLVKGQCPYNEETXFDRVRKXYTAFPRINMPHFLXDDYDDDGQKLSEAISAAQVRSXSCSSFLRAALRWSXLSLGHQETDLLICIVMLGEYIYSESPETDMTKVSSHFVRGNDPKKFASMLVNFMGKCYPGEDDTAIARSVLMYLSLGNLRDANLLMDGMKEQLKSADMELPKTALIEFIKYLLQTLERDAYPLFRTLRQKYRTSTDRDSVFEELLDEIAAKFYGVRQQNPLEGLFGEMFKV

SEQ ID NO: 9510 - protein, 245 aa, Triticum aestivum
  unsure (1)..(245): unsure at all Xaa locations
  Clone ID: TRIAE-23APR03-C10658_1.p
LLDNTAVPARLLYLQEHYEFAIYKVQVDKPVQLATFTECVRSGQDVFRLGRDESLNLSITHGMVAYKIPSWYERCHYMYLSCDPSSPSLLRDDGGPIIDLEGKFNCMPRLHLGMTFTSIKHLDPSCIERMTRNHNIESGLIVEQVSKGSHAEKIGIRXRGDVIESFNGKYISTTIELEQMLIDICWDHFDQRKELYAEKDVSVKIFDAIKQRRRTRNLTAIVSDLGEDIVEGTYPIMRKEAMPVS

SEQ ID NO: 9511 - protein, 634 aa, Triticum aestivum
  unsure (1)..(634): unsure at all Xaa locations
  Clone ID: TRIAE-23APR03-C1065_1.p
MASRGWRRPLASLPALALAFLLLAVAAAAAESPDRTAPSRPPLVLPLTLSYPNASRVASSRSRRGLAEGGHPSARMRLHDDLLTNGYYTTRLXYIGTPPQEFALIVDSASTVTYVPCASCEQCGNHHDLGFXLDISSTYSPVKCNVDGFGNRDVNQCARESREVGLIHHNGQVSQVLMSFGXNSGPKPLACLFWWSHLWLLVDXMFHLHNGKLAFRRGLSCWLKSWSEMPVRCDLXILCYGGMDIGGGAMVPGAVPVPPDMVYTHSNAVRSPYYNIELKEIHVAGKPLRVDPRIFDGKHGTVLDSGTTYAYLPEQAFVAFKDAVTSKVHPLKKIRGPDPNYKDICFAGAGRNVSQLSEVFPKVDMVFGNGQKLSLSPENYLFRHSKVEGAYCLGVFQNGKDPTTLLGGIVVRNTLVTYDRHNEKIGFWKTNCSELWERLQSGGAPSPAPSSDPGSQADLSPAPAPSGLPEYDVGLIAVYMSINVTYPNLKPHLHELAELLAKELEIDSSQVRLMNVTGQGNSTLIRWDIFPAGSSNSMSNATAMGIIYRLTQHHVQLPEHLGSYQLLEWNVQQPVSRRSWLQEHVVSILVGVLLVVFLSLSAFLGLYLWRKKFRGQAAYRPVGSVGPEQELQPL

SEQ ID NO: 9512 - protein, 330 aa, Triticum aestivum
  unsure (1)..(330): unsure at all Xaa locations
  Clone ID: TRIAE-23APR03-C10667_1.p
MGTLLARVAVVALAAAAAAVVVDGQMSPAFYDATCPALQSVVRRGMAQAVQKEARMGASILRLFFHDCFVNVRFGXGCDASXLLDDTANFTGEKNAGPNANSLRGYEVIDAIKAQVEASCKATVSCADIVALAARDAVSLLGGPSWTVQLGRRDGLSASQNAANANLPPSDARLPDLLARFSDKGLDARALTVLSGAHTVGWALCTTFRTHIYNDTGNEAVDADFATQIRAKACPSAGGDGNLAPLELRAPAAFDNGYFQDLVARRVLLRSDQELYGSGVGDGSTDALVRAYAANATLFAVDFAAAMVRMGNLALTGKNGEVRLNCRRVN

SEQ ID NO: 9513 - protein, 183 aa, Triticum aestivum
  Clone ID: TRIAE-23APR03-C107203_1.p
MASLALRPIMPAAAAAASTTTPLNRARRGSSTLLRRRQPVTCMAESSGGGNSTVELAAGAAGLASCATVAWSLYTLKATGCGLPPGPGGSLGAADGVSYLVVGASRLVLTGGVSYLVVAGLVGWSLTTKVRTGSGLPAGPYGLLGAAEGVAYLTVVAIAAVFGLQFFQQGSLPGPLPSEQCFG

SEQ ID NO: 9514 - protein, 376 aa, Triticum aestivum
  Clone ID: TRIAE-23APR03-C10739_2.p
MADEDVQPIVCDNGTGMVKAGFAGDDAPRAVFPSIVGRPRHTGVMVGMGQKDAYVGDEAQAKRGILTLKYPIEHGIVNNWDDMEKIWHHTFYNELRVAPEDHPVLLTEAPLNPKANREKMTQIMFETFSCPAMYVAIQAVLSLYASGRTTGIVLDSGDGVSHTVPIYEGYTLPHAILRLDLAGRDLTDNLMKILTERGYSLTTTAEREIVRDIKEKLAYVALDYEQELETARSSSSVEKSYEMPDGQVITIGSERFRCPEVLFQPSHVGMEVPGIHEATYNSIMKCDVDIRKDLYGNVVLSGGSTMFPGIADRMSKEITALAPSSMKVKVIAPPERKYSVWIGGSILASLSTFQQMWISKAEYDESGPGIVHMKCF

SEQ ID NO: 9515 - protein, 195 aa, Triticum aestivum
  Clone ID: TRIAE-23APR03-C10743_1.p
MANGGSPKSGDIPPYPEMILAAIEALGDKNGSSKSAISSYIEEKYEGLPSAHASLLTANLASMKEAGKLAFAKNNYLKADAPSATPAKRGRGRPPKDPNAPPKPKAAPKDPNTPKRGRGRPPKAKDPMADAVKEAVAKATTGMPRGRGRPPGPSSAKKAKVATEAASAPTARWRCEGLRAGCLPVCVVSLWLRRW

SEQ ID NO: 9516 - protein, 384 aa, Triticum aestivum
  unsure (1)..(384): unsure at all Xaa locations
  Clone ID: TRIAE-23APR03-C10747_1.p
MAAAASSPSPPAVITCRAAVAWGPGQALVMEDVEVAPPGPLEIRVKVVSTSICRSDVTQWQSTAQPDLFPRIFGHEASGVVESVGEGVTEFQVGDHALTVFIGECMSCKHCVSGKSNMCQTLGLERKGVMHSDQTTRFSIGGKPVYHYCAVSSFSEYAVVHSGCAVKVSPTMPMDRICLLSCGASAGLGAAWNVADVSKGSSVVIFGLGTVGLSVAQGAKLRGASKIIGVDTNPAKQEKGKAFGVTDFINPAELNEPLQQVVKRLTDGGADYSFECVGDTGGLCLXGWRPKSDIPLLVXSTQTRKSKLMALSHMICHSVTSTKRSLFGGWRPKCDIPXYVEKYANKEIQVDGLVTHDMPFSDINKALELMLQNRCLRCVIHMPK

SEQ ID NO: 9517 - protein, 398 aa, Triticum aestivum
  unsure (1)..(398): unsure at all Xaa locations
  Clone ID: TRIAE-23APR03-C1075_1.p
KRHTPSLTSPTHASFTVPHEPHFTHKNWRAAHQQSRPPWPPRPRCGAPRPPPSPSSPATGSRALPAASCPAAGRPPCGRPSTRRCARSVAVAVRLALLYGPHKYGEEPAASVRPSHRGRAAVPGRPPARPPPATPPPPSRRLRATPLDRHPCGRPLEAALRQAVAVAAGXLRLYFHDCFPQGCDASILLNNTAARETALGPNLTIQPRAMQLIESIRARAHAVCGPVVSCADITLLATRRPSSSSPGGPWFNVPQGNLDSLAPAAQAKVFDLPGRDTARVATLRECLGTRGLGDVADLVGLSGAHTIGGXQCRSLADRSQRADDTSPRQLAGHGQLQHPPRRQHLRRAHPGRCSPTRHYKALGFNQGXVFTSDMALVXDHRARAIVRRFAGSKDAFFG

SEQ ID NO: 9518 - protein, 177 aa, Triticum aestivum
  unsure (1)..(177): unsure at all Xaa locations
  Clone ID: TRIAE-23APR03-C108154_1.p
MPITNPPRTCPNTTGETPLADALTHQIEAQRKLPXQLEVREXKLQMTHRGAKGKYLQXILEKAQKNLSYEAGGDATLETTRSQXTDFNLALSGFMDDATQACQQNGGELAKAVSDDGLRAGNXWRFQLYHGGEDVKCATDEDLLLLDLNIKGGYDHRLSAHGMRRGAVDLAVGQHRR

SEQ ID NO: 9519 - protein, 193 aa, Triticum aestivum
  Clone ID: TRIAE-23APR03-C108235_1.p
KTKGQRVSKEVAARDGYNVIKDVQAHRRPTFISTLARLHRTKQNTCNKEMACTTHVDLTRLGIRKAVHETGEEHYEDHEGGRGARLTSQLIHRSMKWLARFLAEALPFEVVELALAPREALGVADVFAVVVPPARSAVPVALRLAVPVPVPRLRHPHRPHLCGDEEKKDQEDGRNHTARGRRHLLCLRRMSTL

SEQ ID NO: 9520 - protein, 378 aa, Triticum aestivum
  unsure (1)..(378): unsure at all Xaa locations
  Clone ID: TRIAE-23APR03-C108249_1.p
HERGNGSGAALLQQQPPAIAPPRPRRLRVAHAAAAALAVPDFRSEVIAPPAGWVIWASGLWAEAAPRRWSRARRWWRRRWSSRGSSSILPSSWDFSRRDGVADGGNGRKRPRETVAPPARLFSLQAPQGSPGHKVIHLAQLHRRPAATGLRLDFDEGGSEHVACTSSTSSLLPGELAAQCGRHNNEIDRLLQEHAERLRLALADTRRRQNRSLLGAAEALAXRRVREVEAETFKAARRGVELEERLARLRAEAASWQAKAMSDQSTAAALHAQLQQEAATAQARSGKAAEEAEGAADDAESGFIDPDRVVEVVAPPPARPCRACRLRPATTVLLPCRHLCVCAACDPGASASQAGTAAAAACPACRCPITGTVQVFFA

SEQ ID NO: 9521 - protein, 199 aa, Triticum aestivum
  Clone ID: TRIAE-23APR03-C10839_1.p
MASALSSLRYGDSLSVVAISGATAVLCEAISWLLIYRTATYNSLRASIERHSRKLDSMKSISSGAGGAAPSSQPASSRAKKMDRVESSLKDASRELSLAKLKSGAVVAAVLFVVFGLLNSLFEGRAVAKLPFAPVPLVQRMSHRGLPGNDPTDCAMVFLYFLCSMSIRTNLQKLLGFTPPRAAAGAGGGLFAMPDPKAN

SEQ ID NO: 9522 - protein, 303 aa, Triticum aestivum
  unsure (1)..(303): unsure at all Xaa locations
  Clone ID: TRIAE-23APR03-C108406_1.p
LPSGGGGDEDEGDVGDDASVNRREALVXLAQLGWKLESLQADCFCWERSGRPPGGIVRRFPGLGKSPMFRXLLQFPGFTERLLADXLLPAQVAMECGVGIFTKTAAEYERRRENFVKELDFVIADVVMAIVADFMLVWLPAPTVSLQPALSVNAGAIAKFFHNCPDNAFQVALAGRSYTFLQRFGAIMRNGAKLFAVGTSASLIGTGVTNAIIKARKTVNKDDAGEVEDIPIVSTSIAYGVYMAVSSNLRYQVLAGVIEQRMLEPLLHRHKLALSALCFAVRTGNTFLGSLLWVDYAKFIGIQ

SEQ ID NO: 9523 - protein, 224 aa, Triticum aestivum
  unsure (1)..(224): unsure at all Xaa locations
  Clone ID: TRIAE-23APR03-C108743_1.p
MEFKAAAFTAAVLAVLLCSPASAQKSPPAPSPVSVSIPPSLAPAPAPAPRYVDLAALLDVAGPFHTFLGYLQKTKVIETFQAQANKTDEGITIFVPKDSAFAALKKSTFSNLXPRRPAQMGSISVQSMWSKPKISSXVYATKPIAVYSINNVVLPMQLFSKDPPLAPAPAPAPESGASDIAPSPGGGKAGAGNGKADSTSAGHVGVANCLGLLAAAAGGLMLLW

SEQ ID NO: 9524 - protein, 316 aa, Triticum aestivum
  unsure (1)..(316): unsure at all Xaa locations
  Clone ID: TRIAE-23APR03-C108946_1.p
MRDLHLPLNQTQRVRLEAALHELQTXAPAAASAAAVTVADNIPVNHEDNILKGHGTTDQDGEVVATLCGVVERVNKLVYVRTLRARYKPEVGDIIVGRVIEIAPKRWRLEINFSQDAVLMLSSMNLPDGIQRRRTAVDELNMRSIFEENDVVCAEVRGFQHDGSLHLQARSQKYGKLQRGQLLTVPAYLVKRRKLHFHHLEQYDVDLILGCNGFIWVGEHVVVREIADLKEDEQKLSAEAETFTPIETRRHICRLANAARLLSALGFTLTVELIIQTAEASVSSNVEINDMLGAEFYVQTAEGEAKRRGDLLGKKR

SEQ ID NO: 9525 - protein, 180 aa, Triticum aestivum
  Clone ID: TRIAE-23APR03-C109071_1.p
MKALAGDSNASAPLLQEAKISIPASSTGGAAEAALLGKGRYKVWALAAIALLALWSMSAASVSLRWSAGDLAAVISGDLDAPLRDDLDSLEMEEREKLVGRMWDMYTRTSDEVRLPRFWQEAFEAAYEELAGDDMQVRDTAISEIARMSAHRLELEQPVNANEEEGKVSIRNNDHGRAKQ

SEQ ID NO: 9526 - protein, 377 aa, Triticum aestivum
  unsure (1)..(377): unsure at all Xaa locations
  Clone ID: TRIAE-23APR03-C109168_2.p
PTQIPIQRPSAAENTPLSPTRSLPPLVSPPPWTDPSSAPTPVSLPRHLKRRPRPPTIHVRPRHPLRLPPGAPPAGVHRRLLARPRPFRRPRPRPRQSAARAARADEPVPRHPAGALRQGGGGDAATAPSGSRGRLDADLGPGGGRRSAPPCSGVRVWLGTYPTAEAAARAYDRAARRIRGXKAKLKLPQRDPAEDARLHPATVTPAAAPARAPIAAQSASTPAMYAGSTQASDYLRYQMLLQGRGAAAANQGNLLSFYGGGGGGGGAMSSSYGGGVMSSSYGGGGGGGGTMSGFLGSYYSFPSSSYSVATVPSSSSASSAPGHHYSSPHDPQQHQQQQGDAAAEWSWESALAPDPGTTTAASWSDSSQQPYHPPHTQ

SEQ ID NO: 9527 - protein, 142 aa, Triticum aestivum
  Clone ID: TRIAE-23APR03-C1095_10.p
MATKAAVIATLLALNLLFFTLADDCGCKLPSPPPPGGGGGGGGGGGGGKGGGGGTGGCPIDALKLGACANVLGGLINLRPVTTPKQTCCSLLQGLADLDAAVCLCTALKANILGIHLNVPIDLSLLVNYCGKNVPSGFQCPR

SEQ ID NO: 9528 - protein, 309 aa, Triticum aestivum
  Clone ID: TRIAE-23APR03-C1096_1.p
MEQPPSSPPPPAAATATAAPTPAPAPSSAPIILSDSPPAAAAGEPALTAAQKALRSKPARAPEDPDKKNKKLKDVEISFPIVYGTISFWLGKKASEYNSHKWTVYIRSATNEDLSVIVKRVVFQLHPSFTNPTRVVEQPPFELSESGWGEFEIAITLYFHSDVCEKRLDLFHQLKLYPEEDAGPQSTKKPVVVETYDEVVFPEPTEAFFLRVQNHPAATVPRLPPGITLSSPGPMELMPHDKKRFDTKDHSLSQWFSNFSEADELLKLAAARQQVQAHIAKLRRQLSMIEGMPQQSRVISGPGQQFGHG

SEQ ID NO: 9529 - protein, 344 aa, Triticum aestivum
  Clone ID: TRIAE-23APR03-C109880_1.p
MASRLGVVLALAAVVLLAAAGAAAGQSTPRPPNAQGPKPKPKPMKVKCTENRKENPYCFNRNMDCPANCPQSCYPDCNTCKPVCVCNTPGACGDPRFIGGDGNAFYFHGRRDADFCVVSDRDLHINAHFIGKSGHSGMSRDFTWIQAIAVLFDGHRLYLGARKTGTWDDAVEHLDITLDGEPVYLPADLIEGAKWTSSRVPELSVTRTKAANGVLVTVAGKFSVRANAVPITEEESRVHRYGVTADDCLAHLELAFKFDALTDDVHGVVGQTYRSDYVNHFDVRASMPTMGGDATFTTSSLFAADCSVARYGVSRGNDGAAVLSELAGVTCASGMDGKGVVCKK

SEQ ID NO: 9530 - protein, 479 aa, Triticum aestivum
  unsure (1)..(479): unsure at all Xaa locations
  Clone ID: TRIAE-23APR03-C1099_1.p
MAPAAARVLLLVLALAAASSLAGRADALRSLGVGDGAEAAAQGDYAVDLNATSFDAFLTASREQFAVVEFFAHWCPACRNYKPHYEKVAKLFNGPDAAHPGRILMARVDCASKVNVDLCSRFSXVDHYPFLLWGPPPKFANTKWDRKQVISEKKLIDDGRTTERLLTCSHXKPKNLRMKVDCKNENENIIPINASYTXIGCSTALALQISNRHSMTKAVTHQALIXYIRILLAHHPSKMCPRXSAELLINFDDHWPSNLSLSSQDSSKLLESVAADNHKICCXGNLAISGKEVVEVNLIQGRGAVVDACGCSRGLSVLRHGLTLPTGAAESQSTFTSICDFIHNFFICEECRKHFYDMCSSVSVPFKSARDLSLWLWSTHNKVNERLMKEEKDMGTGDPSFPKAIWPPKALCPSCYRSSSRTSDGALQVDWNEDEVFPFLVNYYGKTLVSSYKETYMESLQGRTQVGAALADDASSSYD

SEQ ID NO: 9531 - protein, 790 aa, Triticum aestivum
  unsure (1)..(790): unsure at all Xaa locations
  Clone ID: TRIAE-23APR03-C109_1.p
MTMMAMPEAPCLCARPSLAARARRPGSGPAPRLRRWRPNATAGKGVGEVCAAVVEAATKVEDEGEEDEPVAEDRYALGGACRVLAGMPAPLGATALAGGVNFAVYSGGATAAALCLFTPEDLKADRVTEEVPLDPLMNRTGNVWHVFIEGELHNMLYGYRFDGTFAPHCGHYLDVSNVVVDPYAKAVISRGEYGVPARGNNCWPQMAGMIPLPYSTFDWEGDLPLRYPQKDLVIYEMHLRGFTKHDSSNVEHPGTFIGAVSKLDYLKELGVNCIELMPCHEFNELEYSTSSSKMNFWGYSTINFFSPMTRYTSGGIKNCGRDAINEFKTFVREAHKRGIEVILDVVFNHTAEGNENGPILSFRGVDNTTYYMLAPKGEFYNYSGCGNTFNCNHPVVRQFIVDCLRYWVTEMHVDGFRFDLASIMTRGSSLWDPVNVYGAPIEGDMITTGTPLVTPPLIDMISNDPILGGVKLIAEAWDAGGLYQVGQFPHWNVWSEWNGKYRDIVRQFIKGTDGFAGGFAECLCGSPHLYQAGGRKPWHSINFVCAHDGFALVEEGTXHKKYNLLNGGKPGPDDILNHDLHYRDLTIYPILSFKRFRLRQMRNFFVCLIVSQGVLLVYIGDNNGHTNGGNNNIYCHDSYVNYFRWDKKEQYSELHQFCCLMTKFRKECEGLGLEDFPTAKRLQWHGHQPGKPDWSENSRFVAFSMKDERQGEIYVAFNTSHLPAVVELPERAGRRWEPVVDTGKPAPYDFLTDDLPDRALTIHQFSHFLYSNLYPMLSYSSVILVLRPDV

SEQ ID NO: 9532 - protein, 285 aa, Triticum aestivum
  Clone ID: TRIAE-23APR03-C110022_1.p
ASGQELARALALSFLSLSLSPPADQLRACVRTYVTTMSSSGARGVRREYGRTYVVRPKGRHLATIVWLHGIGDNGNSWSQVLGNLPLDNVKWICPTAPTRPVAAFGGFPCTAWFDVEETSVDGPDDVQGLDASAAHIANLLSSEPSDVRLGMGGFSMGAATALHSAACYGHGRFSNGVAYPITLSAIIGLSGWLPCSRTLRTKIESSQTAFRRAAALPIMLGHGRGDEVVTYRNGERSSEFLRNSGFSYLNFKAYNGLGHHTIPEEMDDVFKWLKARLGLDRSCG

SEQ ID NO: 9533 - protein, 297 aa, Triticum aestivum
  Clone ID: TRIAE-23APR03-C11020_1.p
MKGGGAIRSGGGGGGGLMRTRLRLPVVLLSCSLFFLAGFLGSLLFTQDPQGEEDVERPLRRERLMEAVWPEMAYGESGEPTPSLIPYQILSWQPRALYFPQFATAEQCENVVKTAKARLRPSTLALRKGESEETTKGIRTSSGTFLSAEEDPTGALAEIETKIAKATMMPRSHGEPFNVLLYEIGQKYASHYDAFDPAQYGPQKSQRVASFLLYLTDVEEGGETMFPYENGDNMNIGYDYEQCIGLKVKPRKGDGLLFYSLMLNGTIDPTSLHGSCPVVKGEKWVATKWIRDRGSTS

SEQ ID NO: 9534 - protein, 137 aa, Triticum aestivum
  unsure (1)..(137): unsure at all Xaa locations
  Clone ID: TRIAE-23APR03-C11034_2.p
MAQLICGGCRTLLMYTRNADTVRCSCCSTVNLVRPVNNIAHVNCGRCXNLMYPHGAPSVKCAICDYXXNITNTGINTMPPAPCPRPTSNESAYNASSASVPTPQPQNVTVVVENPMTVDEKGKLVSNVVVGITPGKN

SEQ ID NO: 9535 - protein, 128 aa, Triticum aestivum
  Clone ID: TRIAE-23APR03-C11043_1.p
MAHESCDLNKDEAEILKPSSSTPSPPSPTTPPPPTAQIPEPQPPQKHADAVSMAMAAAPLSPVLFVNRCNVCRKRVGLTGFRCRCEKLFCPRHRHSESHDCSFDYKTAGRKEIARANPLIRAAKIIRI

SEQ ID NO: 9536 - protein, 92 aa, Triticum aestivum
  Clone ID: TRIAE-23APR03-C11066_1.p
MRPQVLLAALAVIAVLAAALPLAHSQGATLCCDNCGSCTRSIPPQCTCMDTSPTGCNPACKTCSRSTVGGRNSFQCKDRVANFCKTRCTNAA

SEQ ID NO: 9537 - protein, 151 aa, Triticum aestivum
  Clone ID: TRIAE-23APR03-C110771_2.p
MSGDEVAKAKAAAAAGGGVGEYGTFHGPPSYPPPRPPVGYPQPAPPPGLHGQREPNSRHRGGYQAGNAQDHEAGARGHRPDRLPCCGIGMGWFLFIIGFFLGAIPWYVGAFLLWCSRVDYREKPGYVACTIAAVLATIAVIIGATAGAHVY

SEQ ID NO: 9538 - protein, 161 aa, Triticum aestivum
  unsure (1)..(161): unsure at all Xaa locations
  Clone ID: TRIAE-23APR03-C11079_1.p
MAPAGPARMGKDGKGKEAKGKGKQAAGSSDDAGGAKGGKGNGPRGGQGQATDLGHLSPSSKARARCCARSEGKINEAYKKLQEGWLDNGDKVPPAEFAKVAQEFSECPSGKKGGDLGWFPRGKMAGPFQEVAFNTPXVGATSAPFKSTHGYHFILCEGRKN

SEQ ID NO: 9539 - protein, 436 aa, Triticum aestivum
  Clone ID: TRIAE-23APR03-C1108_1.p
MDPGVGYTLPPRGLYHSAVSPPPRRFPTGMSLIPRAAPAASMAFAGRDPAVISLLKMLPLLVLLTFSSAAAPPAAASPSAVHNNNWAVLVCTSRFWFNYRHMANTLSLYRTVKRLGIPDERIILMLADDMACNPRNNYPAQVFNNENHQLNLYGDNVEVDYRGYEVTVENFLRVLTGRHESAVPRSKRLLSDEGSHILLYMTGHGGDEFLKFQDNEELQSHDLADAVKQMKEKHRFKELLIMVDTCQAATLFSQLQSPGVLAIGSSMKGENSYSHHLDSDIGVSVVDRFTFHTLAFFEKLNMYSNASLNSLFNSYDPSMLLSTAYYRMDLYKRALNEVPVTNFFGSVMKTIHTDSAYTGFLAAHDAELPLSAGNNILDHVMSQNEASARRSNIEEMNEAQLMSHGWTEVLLEQLEDKNSDVVVMYGLGTMGILLAI

SEQ ID NO: 9540 - protein, 221 aa, Triticum aestivum
  unsure (1)..(221): unsure at all Xaa locations
  Clone ID: TRIAE-23APR03-C11096_1.p
MAASPATSSAAARASTFPRLSKATLRAPRARRRLRSPCPTCACPGALVADARASWLPVVAAATERQPRLMGSLTNTXGLRFGVVVARFNEIVTNLLLQGALEAFERYSVKAENITVVSVPGSFEIPVAAQKLGKSGKYDAILCIGAVIRGDTTHYDAVANSAASGVLNAGLSAGVPCVFGVLTCDDMDQALNRAGGKAGNKGAETAITAIEMASLFRHHLA

SEQ ID NO: 9541 - protein, 219 aa, Triticum aestivum
  Clone ID: TRIAE-23APR03-C110985_1.p
MGAARPPELWVSKAEPATSFGVGPESQSLTPTPLGHQNFTKMPRSTSRLLLLALAASHLLLAGAGAGCGPSGTLRPSRGHSCEDCCKAGQAYPTYTCSPPVSSSTRAVMTLNDFDAGGDGGDPSECDGAFHHNSERVVALSTGWYSGGSRCGKSIRIRANGRSVLAKVVDECDTNGCDREHAFQPPCRNNVVDASQAVWDALGITGEEVGEYNVTWSDA

SEQ ID NO: 9542 - protein, 321 aa, Triticum aestivum
  Clone ID: TRIAE-23APR03-C1113_1.p
MFYFCSTAAAGDDVARAAIPAPSYRVGVTQTEWLQYSSLGAGSHFTLGKHPEGHIREREVEDLFYKYGRIVEIDLKVPPRPPGFAFVEFEDPRDAEDAIHGRDGYNFDGNRLRVELAHGGRANSSSLPNSYGGGGRRGGVSRHTEYRVLVTGLPSSASCQDLKDHMRKAGDVCFSEVYREGGGTIGIVDYTNYDDMKYAIRKLDDTEFKNAFSRAPIRVKEYAGKSSRSYSRSRSRSRSGSYSRSPSPKKKPSRRSASRSRSRSVSSHSRSPSKGRSPSRSPAKSQSPVAASPVVNGEAASPKRDPSKSPSRSRSPDAKSE

SEQ ID NO: 9543 - protein, 269 aa, Triticum aestivum
  unsure (1)..(269): unsure at all Xaa locations
  Clone ID: TRIAE-23APR03-C11158_1.p
CGSFDYKTPPSGLERPFSTSWHIPRPYTTSSYTSASFQAKRDASDARRRLSSAEFAHTWARPAADSPRNGERETRRRARPTRADPRPTRRPLGTHFVLNRRPLPHLRXDFKRPFEPYGKIANIRIRKNFAFVQYEAQEDASVAVNXTDKSTILDRXVTVEYAFRDDDNERDDRHGSPRRGGDRYGSPRRGGDRYGSPRRGGDRYGSPKRADQGRRPYVRSPSPRYRSPDYDRRPRNSGYDRRDGAPYGRSRSPVYDHYERGRSPGYGRY

SEQ ID NO: 9544 - protein, 288 aa, Triticum aestivum
  Clone ID: TRIAE-23APR03-C11167_1.p
RARKQQQYEPTLEKSPYTRTTAGADLPCPTSAYLKCLLFLLLFGASPPCSAGYCPAADPAAPMPPPAAPTPPPAEPLPNSPDSTSPTEEAEADAGGTPSRAGPVGTVSWGTGTLVGVFTGLLYGGAKEANANVSKDAEVMLKMGSTTDKREQYRLMRDAMEKRFIRVAKGSLVGGARLGMFTATFFGIQNLLIENRGVHDVFNIVGAGSATAAAFGLILPGSPMWRARNVLVGSALGAGICFPLGWVQLKLAEKANLEIENSKSPSDLQGNQSRVGAAIDRLENSLRK

SEQ ID NO: 9545 - protein, 227 aa, Triticum aestivum
  Clone ID: TRIAE-23APR03-C11206_2.p
MICDSSGSCEIDKIQDTFNQWKQAPENTGEYVHLTRELLTTCESVQWQVDELEKAISVAERDPAYYGLNEVEIGKRRNWTSTARNQVVSIRRNVEAGKHKTAFGRSVNPSELGRSKQHISQDNDDFIASESDQQMLLMKRQDDELDALSASVQRIGGVGLTIHEELVGQEKLLGELSLDMETTSNRLDFVQKRVAMVLKKASLKGQIMMIAFLVVLFIILFVLVFLT

SEQ ID NO: 9546 - protein, 342 aa, Triticum aestivum
  unsure (1)..(342): unsure at all Xaa locations
  Clone ID: TRIAE-23APR03-C1124_1.p
MSRAPAAAMLGSLAGWLSRAADPPAHRLGGAPAAPPGAPAPVPIPYGPRMAFCESAAPKERARIPXRHPMRGPLPPRRERPAARLLGGSGRGGVHRAGYGRPVSAARVTLRPWHPPLVDGQELAARLDCRGPKFYVXGISLGCHAVWGALKYIPERIAGAAMMAPVVNYWWPGFPADLAAEVYNKQEVGDQWALRVSHYAPGILHWWMPEVRLPTSTVVAGTTPLPNKRDAEIRAKLKADGTFQQKMELATQQGIHESYYRDMMVMFGKWEFDPMSLPKPACPVHIWQGDEDGLVPVVLQRHIASRLSWVNYHELPATGHFLSPVPGLGDTVLQTLFGNAKQ

SEQ ID NO: 9547 - protein, 137 aa, Triticum aestivum
  Clone ID: TRIAE-23APR03-C11253_2.p
MAELSWLTALGFVFLTFNSGMAVYRSNGDAGSVIFVAVSYLDLVALFACLRLYERLDRHSPRRERIKAAVWALTTLLTVMFTYKVAEVMPLAVKLLVWAMAAATTCGGFYVFFVHDDKPYQQLQDASAAAERGDVAN

SEQ ID NO: 9548 - protein, 112 aa, Triticum aestivum
  unsure (1)..(112): unsure at all Xaa locations
  Clone ID: TRIAE-23APR03-C11254_1.p
SGRSEFIQGTDEQTIPDVRLTKSPDGTNGMAIFXFDQPSMFDASAELGDITGFSRIDEEGLLQSAAVSAKCVNGKPARVEAKYVMRTAGDWDRFMMFMERYSQANGLQFVKN

SEQ ID NO: 9549 - protein, 178 aa, Triticum aestivum
  Clone ID: TRIAE-23APR03-C11254_2.p
MEALAVASPAAARPQPRRRRLAAGSSCQGRTSQLHTSFSGITVQRRPQKPLPHRRSSTVVAMATTSRPSIQFIQGTDEQTIPDVRLTKSRDGSNGVAIFTFEQPSVFDSSAELGDITGFYMIDEEGTLSSVDVSAKFVNGKPAAVEAKYVMRTPRDWDRFMRFMERYSQANGLQFLKK

SEQ ID NO: 9550 - protein, 529 aa, Triticum aestivum
  unsure (1)..(529): unsure at all Xaa locations
  Clone ID: TRIAE-23APR03-C11262_1.p
MSPSGEVVASVSSALAVLLVLLACVELGDAAAAVGVYRLIQYDLAGAPLGSRAAALNHHAAAFPLPAGADLSRSALVAPLLDLPLAFLREYLAEKKHLGGLLILLPRNISAKNVXEIKDDQGEPKYVLAELEKLLMHEESPFPVHLASHNDNLDLNTRIYEKLSNLHQIXTCNFQNYPLFSSQCERHQILQGENIFFCTQGILTVICCLLFVFFISGYCEVEGLSAXNHRGSVLLCYVWIDSTTLHPQVRTLALGATKWLRSFDQRVRESIDYAICLNSVGSWSNDLWMHVSKPPENPYIKQIFEDFSDVSKEMGISVGIKHKKINVSNSRVAWEHEQFSRFRVTALTLSELSTPPEFLESTGGLYDTRESVDVESVMRTVKLVSEILARQIYGLRGRNIDVFADNSSLAISPHYIRSWLDLFSRTPRVAPFLQKNDPFIVALKKELSEHTTDVHVQNDVLDGMFTFYDATKSTLNVYQVASVTFDLLFLLVLGSYLIVLFSFLVITTRGLDDLINIFRRPPSRKVKGA

SEQ ID NO: 9551 - protein, 352 aa, Triticum aestivum
  unsure (1)..(352): unsure at all Xaa locations
  Clone ID: TRIAE-23APR03-C11266_1.p
MAAAAAGQPSSADSRRYVVGYALAPKKQNSFIKPSLISRAAARGVDLVPVDHARPLADQGPFDLVIHKLYGHDWRAQLQAFSARYPSVPVIDPPHAIDRLHNRISMLQVAXLDVPLTDAASASADGEGHRHTFGIPSQVVVYDAAALADSGLLAALRFPLIAKPLVADGSAKSHKMSLVYHREGLRKLRPPLVLQEFVNHGGVIFKVYVVGGHVTCVKRRSLPDVSKEILEDAAAEGTISFSQVSNLPNQRTAEEYYEDMRLEDAVMPPTDFVNEIAGGLRRALGLQLFNFDMIRDVRAGNRYLVIDINYFPGYAKMPGYEIVLTDFFWDMVHKDDVALKEEEQQSNHAVVK

SEQ ID NO: 9552 - protein, 486 aa, Triticum aestivum
  Clone ID: TRIAE-23APR03-C113898_1.p
MSPASARALTVDSLNPKVLALADHLGGAVARRAERMQKELETNPGLYPFNEIIYCNLSNPHYLGQQPIKFFREVLALCDYPHLLNCSVTSSIFSSDAITRAREILDLIPGRAMGGYSHCQGTEGLRNAIAAGIATRDAFPCNAEDIFLTDGAAAPVHMVMHLLIRDEKDGILCPIPSHFLYTSSMALCGATLVPYYLDESGGWAVSISNLKKQLDGARSEGITVRGLVVVNPGNPTGQVLVKENQCEIVEFCRNENLVLLADEVYQENVYTDEKKFISFKKIARSMGFGEEDISLISFHSVSNGYYGECGRRGGYMEVTGFNSEVRKQVYKVASLSSCSNLAGQVLVSLVMNPPKVGDESYTSYREERDRIMLSLSRCAEAMVQAFNSLEGLTCSKAEGAMFVFPSVRLPKRAIAAAEAMNAKPDVFYALRLLENTGIVVLPGSVFGQVPGAWHFRCTILQQEEKVQLIIYRFKAFHKAFMEEFRD

SEQ ID NO: 9553 - protein, 186 aa, Triticum aestivum
  Clone ID: TRIAE-23APR03-C114084_1.p
MSKKNKPEKSIKLLKDAEQTVTSDYITGDSLDELLSKLIRSVESAKASRGGLPEKIWMKQQFSVGVKDVTMVLQRMPAAAASRSGCSTEAPTSTARRRAPLVPLQAVIIAADCNPKWLTKHIPTLASTRQVPVLCLKDNKGSSLRLGQVANVRTALAIGIKAKDSIINKTVDEVLKDYYKPVADEQ

SEQ ID NO: 9554 - protein, 146 aa, Triticum aestivum
  Clone ID: TRIAE-23APR03-C114832_1.p
MLSAAASAIPRLRWAAAPPGHASPSTRWSLLRRRPLSSSPNAAPTVGPGPLEPPDLPRLANSARISLSPQEAEEFAPKIQQVVDWFGQLQAVDLESMEPSLRADTAAGSSLREDKAEPFANRDAIIEALPSYDDPYIKVTNALTKE

SEQ ID NO: 9555 - protein, 528 aa, Triticum aestivum
  Clone ID: TRIAE-23APR03-C11531_1.p
MPAATPATPPLPFPPHRPPPPPPPVQQPPPRPAPPRPARPARDAAGPPPAAANKRRRPAEEDIREEAARHRGPANGFSAWYEPFPPGPAGAPHTHEPYSLGDILYPSSSGVLLHVGYDTPARARGPWCGCRDLFDARVSSPAWPSGSGVWSKKEFVLPGIDPDHIVSLFEGNSNLFWAERLGRDHLAGMKDLWVKHCGISHTGSFKDLGMTVLVSQVNRLRRAPLSRPIAGVGCASTGDTSAALSAYCAAAGIPAIVFLPANRISLEQLIQPIANGATVLSLDTDFDGCMRLIREVTAELPIYLANSLNSLRLEGQKTAAIEILQQFDWEVPDWVIVPGGNLGNIYAFYKGFEMCRVLGLVDRLPRLVCAQAANANPLYRYYKSGWTQFQPQVAEPTFASAIQIGDPVSVDRAVVALKATNGIVAEATEEELMNAMSLADRTGMFACPHTGVALAALFKLREEGTIGANDRTVVVSTAHGLKFSQSKIDYHDQKIEDMACKYANPPVSVKADFGAVMDVLKKRLKGKL

SEQ ID NO: 9556 - protein, 322 aa, Triticum aestivum
  unsure (1)..(322): unsure at all Xaa locations
  Clone ID: TRIAE-23APR03-C1158_1.p
MAARAPYFAPEEGARGIRPGESPAAALRRILATPGAHQAPCCFDALGARLVERAGFPICFMGGFCVSAARLGLPDVGLISYGEMVDQGRLITEAVSVPVIGDGDNGYGNSMNIKRTVKGYINAGLAGIMLXAPKACGHTGHKERNLVISREEAVMHIAAAIDARKESASDIVIVARTDSRQAVSLDEXALWRVQAFADAGADVLFIDALASIEEMKAFCAVAPGVPKMANMLEGGGKTPILTPAELKEIGFSLVVYPLSLIGVAMRAMEDALLAIKGGGVPPPASLPSFQEIKDTLGFNRYYQEDKQYTVPQAEPSMPTGNP

SEQ ID NO: 9557 - protein, 221 aa, Triticum aestivum
  Clone ID: TRIAE-23APR03-C115926_1.p
MAEKGVKVFGMWASPMAIRVEWALRLKGVGYEYVDEDLASKSDALLRHNPVTKKVPVLVHDGKPIAESTIIVEYIDEAWKDGYPIMPADPYDRAQARFWARFADDKCNAAIFPVFTATGEAQREVVREAQRCLKTLEKALEGKKFFGGDAVGYLDVVVGWYAYWLPIIEEVSGADVVTDEELPLMKAWFGRFLAVDVVKETLPPRDKLLALNKARREQLSA

SEQ ID NO: 9558 - protein, 134 aa, Triticum aestivum
  Clone ID: TRIAE-23APR03-C115984_1.p
MTVVDAETRFHVLAVDDSVIDRKLIEMLLRTSSYQVTTVDSGSKALEVLGLRDEGDDSSSSSSPPSSSAPDHHQEVGVNLIITDYCMPGMTGYDLLRRVKGSSSLKDIPVVIMSSENVPARISRYHVTVLSTLL

SEQ ID NO: 9559 - protein, 345 aa, Triticum aestivum
  Clone ID: TRIAE-23APR03-C115_31.p
MTVGGEATATAMGHGQTVCVTGAGGYIGSWIVKLLLEKGYAVRGTVRNPDDAKNAHLRGLAGAAERLVLCKADLLDGDALRAAIAGCHGVFHTASPVTDDPEEMVEPAVRGTRYVIDAAAESGTVRRVVLTSSIGAVAMDPSRGPDAVVDESCWSDLEFCKKTKNWYCYGKTVAEREAWEAAAARGVDLVVVNPVLVQGPALQPAVNASLTHVLKYLDGSAKTYANAVQAYVHVRDTAAAHVLVFESPAAAGRYLCVADGAVLHREDVVTILRKFFPEYPIPSRCSDEVNPSKQPYKMSNKRLRELGLEFTPVAQCLYDTVVSFQEKGVLPAPPASAKPAMKETN

SEQ ID NO: 9560 - protein, 265 aa, Triticum aestivum
  Clone ID: TRIAE-23APR03-C11609_1.p
MASITLLSLAPAATFLHLPASTASSSPHFAAIPRSLAGRRALLLRARAPRRVTVVCSAAAAAEASEAEPVEKFRLDNLSPQKGARRKPKRKGRGISAGQGASCGFGMRGQKSRSGPGVRRGFEGGQMPLYRRLPKLRGIAGGMHIGLPKYVPFNLRDIVQGGFKDGDEISLESLKSRGLINPSGRERKLPLKILGDGDLSVKLNIKAGAFSSAAKEKLKAAGCTLTVLPKRKKWLPAAYVKNQARAEEYFSKKKGGAVESDEATT

SEQ ID NO: 9561 - protein, 439 aa, Triticum aestivum
  unsure (1)..(439): unsure at all Xaa locations
  Clone ID: TRIAE-23APR03-C11633_2.p
MAGEEEMQVVESCFVTPVADAPSRAIRLSPFDLMLASRGYTPLVHFYRPPETVGDDFFDVTRLKTALGKALVPFYPLAGRLRAGGDGRLEIDCNGKGMLFLVAQSRLTMDDFSDFKPSSKQRRLFVPHVSDSDGLLWATQVTFLKCGGVVLGSAIHHAGMDGSVVFHFLRTXSAFSRDGDRAMVNLPCHDRSRLSARDPPVVHPYALSIFSPKINLPPQPGLVVNEVVALTLAKDQLSTLKHISGGDGVSTFSALSAHLWQCMCLARQLPPDATTQLMFSANIRRIMRPPLPDGYFGNAIINLSVGDKARAIASRELSYIARRIRDTHRRLNDELVHSAIDYLELAKRDDERPTTGNLPVTDIRVVSWLGMPSYDADFSWGRPLAMFRAEPNRGGFVHLIDSAQGDGSVRIIMSIEAAILSELKRLLYAKFDTMLYSKF

SEQ ID NO: 9562 - protein, 403 aa, Triticum aestivum
  unsure (1)..(403): unsure at all Xaa locations
  Clone ID: TRIAE-23APR03-C11653_2.p
MAETLAGLRLAASAVPHPRSSRRPCAAAPAHQRLAQLRRGRLCARAAVTGAPEVDEDEAMSIDNLCSFFDLNVGKWNGIFYQFDAHGRVQQEISTRLSASTYGEGDLISLMQSLYIKQATSGITFADEEDPEPEWAEYKIKETNMFTVDKYQQCXIGFFPEQKAFALRYQTAGMLETVLRAGVLGEDDTGEESPRNLKIPSRKPSIVCENCIYSLDGNGRVRAFHIMDPNGVLDTLIVFHENQGSIVPLTHSSTDDPENPSNDRINALLGRWEGHSVTKRSGVYGATLDEADTVVLLEMDNNGQLVQDNISTKTGTSTTTTIHWTGVANSNLLQFDGGYEITLLPGGMYMGYPSDISKCIEQLDPFNLEFCWMESPGKRQRLVRTFDSAGLAVSSTYFLETKV

SEQ ID NO: 9563 - protein, 417 aa, Triticum aestivum
  Clone ID: TRIAE-23APR03-C117114_1.p
MVWELIEVAGNLTPLPHSTVDVVAAKIESKVANTVIRQLNQVCPLENLRHVKRVRRRIQCEKSELSIILCLSTESESGKNGFPEAVQKVVKAYQLSPFIAKVASYPAMSKEEWEEQCKLWPTSYHPLHDTGGSSGFKEDELPSIFDCMRTAIQLSEVGNTAIIVDPSSMQIISKATDQTHQHDAFQKRNRCVNVEADGGRSLAETAGANDGRLLLSSSHVRNGLNMEVSCMDPWGWTKQRSSEQKTLSSEGGFLWHPLRHAAIVAIENAAERDRMMFHTSTSPTTELNLNGDMDNCSDNEPAKRPKIVTKDKEQAEHQECGSDLSGTNRPYLCTGFDIYLVWEPCTMCAMALVHQRFKRVFYAFPNPITGALGSVYRLHGEKSLNHHYSVCRVKMPEPDLNVSSDYPEKGCSDFVPS

SEQ ID NO: 9564 - protein, 149 aa, Triticum aestivum
  unsure (1)..(149): unsure at all Xaa locations
  Clone ID: TRIAE-23APR03-C11714_1.p
ELSDEQVASMREPLSPLPTLHGRRPAIRPPRQLGRSSMRSLGGNPTQAXQLRDITAQEKLTAPFDFKRFLELMRAHLRPEPFDRPLRDAFRVLDKDASGTVSVADLRHVLTSIGEKLEPHEFDEWIREVDVAADGTIRYDDFIRRIVAK

SEQ ID NO: 9565 - protein, 179 aa, Triticum aestivum
  Clone ID: TRIAE-23APR03-C11716_1.p
MFSAVRSRALGRWRPPPHLLPRLLSSAGASSARPAELIELSEVEKVLHDVRAGDVRVFPVGEGGLHGGACADYMVVATGRSDWHVRNIAQAILYKIKQKQKGSNRILMPSVEGQQAGKWVVIDSGSIIIHALEERAREYYDLESIWTKAVSPNISVQELETSLVKTRRRDLSQKPMKSI

SEQ ID NO: 9566 - protein, 337 aa, Triticum aestivum
  Clone ID: TRIAE-23APR03-C117257_1.p
MASRAAAAVVLALALVCAAHSAAAAGNLSPDFYKKACPQLDQIVAFHVAETFRRDVGVAPGLIRILFHDCFTQGCDASVLLNATDGEQKVGPNLTLRRVALDLIERIRSAVHTACKDNKVSCADITVLATREAVFKAGGPRFDVELGRRDALAPAPAQINKLPGPSFPVPLLIQSFKGRGLDVADLVALSGAHTFGVAHCSLFQDRFKPGFGNPPIDPKFATMLKDKCANDFDRKKTQSLDVRTPDAFDNQFYMDLVAKQGLFRSDQGLIEDPATKALAAQFSLDQRAFFEQFAKSMTKMTNMDVLTGKQGEIRNDCAVPNKRVTAHGDEEGHAADM

SEQ ID NO: 9567 - protein, 197 aa, Triticum aestivum
  Clone ID: TRIAE-23APR03-C117401_1.p
MKLEVSPRQRTQEAEQNEGPEVWKHPKQLCASLGYGEEEEVPRLVPPLDDGVFRSGFPDAANFRFLASLNLRSVVYLCPEPYPEQNARFLGRSGIKLHHFGIQGRKELFVGIPEEMIREALKVILDVRNHPVLIHCKRGKHRTGCVVGCLRKLQKWRLSSVLDEYLHFAAAKARKTDQRFMELFDTSSLVHLLASQC

SEQ ID NO: 9568 - protein, 222 aa, Triticum aestivum
  Clone ID: TRIAE-23APR03-C117621_1.p
MAGMLGVGATRSRLLRSPLPLFTRRAPLHLAPHPDPISRRLLFLPSRTLTAAATTMAATNGTAAADPVQEQPKAAAAPSPAPLLLKVKKLSANAVLPSRGSALAAGYDLSSAVEAVVPARGKALVATDLSVAVPQGTYARIAPRSGLAWKHSIDVGAGVVDADYRGPVGVVLFNHSDADFAVKPGDRVAQLVVERIATPDVAEVDDLDATVRGEGGFGSTGV

SEQ ID NO: 9569 - protein, 537 aa, Triticum aestivum
  unsure (1)..(537): unsure at all Xaa locations
  Clone ID: TRIAE-23APR03-C11781_1.p
MWMWRGSMPLLLLAAAAAVAEPASTLEGPSRPVTVPLREDRGHAVDLPDTDPRVQRRVTGWAPEQIAVALSAAPTSAWVSWITGDFQMGGAVKPLDPGTVGSVVRYGLAADSLVREATGDALVYSQLYPFEGLQNYTSGIIHHVRLQGLEPGTKYYYQCGDPSIPGAMSAVHAFRTMPAVGPRSYPGRIAVVGDLGLTYNTTSTVEHMASNQPDLVLLLGDVSYANLYLTNGTGTDCYSCSFAKSTPIHETYQPRWDYWGRYMEAVTSGTPMMVVEGNHEMEQQIGNKTFAAYSARFAFPSTESESFSPFYYSFDAGGIHFIMLAAYADYSKSGEQYRWLEKDLAKVDRSVTPWLVAGWHAPWYSTYKAHYREAECMRVAMEELLYSYGLDIVFTGHVHAYERSNRVFNYTLDPCGAVHISVGDGGNREKMATTHADDPGXCPEPLSTPDDFIGGFCAFXFTSGPAAGRFCWDRQPDYSAYRDSRFGXACAEVRKETHGLWTWHRNQDVEQGRVRDARDDVRDAERCLHNSSIAAYF

SEQ ID NO: 9570 - protein, 531 aa, Triticum aestivum
  unsure (1)..(531): unsure at all Xaa locations
  Clone ID: TRIAE-23APR03-C11784_1.p
MAAAARHRKEEEDEMLLDDGDIEESPRDSFRDSDDDDDEAEEARGEDGDGVGSFESHQWPQSYRETTDTYTIAASPIFGYLGPSTSKYSIDGGRSGLASDLRLPFISDKLESVKSLRRHLLGSVRDEKLSFQYTGEIYVGQGCSVTQTVFNGINVLAGVGLLSAPFTIHEAGWAGLAVLSVFAIICCYTGVLLKHCFESKDGIATYPDIGEAAFGRIGRLIISIILYTELYSYCVEFIILEGDNMTSIFPDVNINLFGIHVDSKHFFGVLTALVVLPTVWLRDLRVLSYLSAGGVIATLVVFISVALVGTTEGVGFHQTGEAVKWSGMPFAIGIYGFCYSGHSVFPNIYQSMSDRTKFPKALFICFXVCTAIYGSFAIIGYLMFGDKTLSQITLNLPKESFASKVALWTTVINPFTKFALLLNPLARSLEELRPEGFLNETIVSIILRTSLVASTVVIAFLLPFFGLVMALIGSLLSILVAVIMPALCFLKIAQNKATRPQVIASVAIIVVGVISAALGTYSSVASIIGYY

SEQ ID NO: 9571 - protein, 354 aa, Triticum aestivum
  Clone ID: TRIAE-23APR03-C117924_1.p
TTSRSPTRRRASPAAPLGGPGGQRARPPPPPPAPTRWLPPPRPHPPAPARRAPPSPSQAGPPPLPRAPRRSPPHRRRRPSSRAPSPARTRPVWITCCTNIIGSICSGRGPHLGPVETRRQGFPSSSLAPTSCRVGVHPCNSIAATHATTVTDLSNVNAMGSPVVAPGDILAVPLSACASTFPNFASDYGLLVANGTYALTAGNCVECSCGPGDLNLYCTPASLGTSCSSMQCSNSSLMLGNVTTQPTSGGCGVSSCNYAGFVNGSITTSLSSGLQPTCPGPHQVPPLMEPSTAAIHDSYLAPSPSPGPGEAGGAVPGSSDPGASSHSLAGSLSPSVHKLHQMILILSLVFYLHM

SEQ ID NO: 9572 - protein, 307 aa, Triticum aestivum
  Clone ID: TRIAE-23APR03-C117_1.p
MAQDDPVVSAQWLQQHLGQPDIKILDASWYMPHESRDAWQEYQVAHIPGALYFDIDGISDRTTHLPHMLPLEEAFAAAVSALGISNHDKVIVYDGKGFYSAPRVWWMFRILGHDKVWVLDGGFPQWQASGFNIGSSCPDDAVLKSKAANIAVETAYNGELANAATFQTEFRHQLLWTLEKVKHNVAAKAHQVVDARVKGRFDGVMPEPREGVRSGHIPGTKCVPFPEMSDGAQTLLPADELSKKFEQAGISLDGPIVLTCASGVTACILALGLYRIGKHDVPVYDGSWTEWEALPDNDYPIVTSTGS

SEQ ID NO: 9573 - protein, 405 aa, Triticum aestivum
  Clone ID: TRIAE-23APR03-C11815_1.p
MAFAAQAARLAASALVAGVVAAVVAMPVPAAGGVCFDRIFSFGDSLTDTGNFLLSVPDDFPDPARSLPYGQTFFGRPSGRYSDGRNLLDFFAEAFGMPFVPPYLGGGDFLNGANFAVGGATALNNSFFRELGVEPTWTPHSLVEQMQWFKRLLPSIASTESEHSVIMSKSLFLVGEVGGNDYNHLMVRGKSLAELRELVPQVVGAISLAITELINLGAKKFVVPGNFPIGCVPLYLAILPSEEKDYYNEETGCIKWLNEFTEYHNRLLQEELEKLRNLHPDVSVIYADYYGATLNIYRAPLQFGFTVPLNSCCGSDAPHNCSLSVLCGNPGSFVCPDPSKYVSWDGLHFTEATYKVIIQGVLGSYAVPPLSEICRDGEYKVSQLHQCTDSNPTNTVTYDAMSSFI

SEQ ID NO: 9574 - protein, 347 aa, Triticum aestivum
  Clone ID: TRIAE-23APR03-C11817_1.p
MEPAEKKPPAVSDLGAWGMNVVSSVGLIMANKQLMSSAGYAFSFATTLTGFHFTVTALVGWISKATGYSASKHVPLWELVWFSLVANASITGMNLSLMLNSVGFYQISKLSMIPVVCLMEWVLNSKHYTTKVISAVVVVAAGVGICTVTDVEVNAKGFICACVAVFCTSLQQITIGSFQKKYNIGSFELLSKTAPIQAVSLIILGPFVDYYLNGRWLLNYSFSTGATFFILLSCSLAVFCNMSQYLCIGRFSATSFQVLGHMKTVCVLILGWVLFDSALTIKNILGMLLAIMGMVVYSWAMESEKKATSAIPRNKSDMLDGEDVPLKSRTSGIPLSSDDLEEGPMKS

SEQ ID NO: 9575 - protein, 487 aa, Triticum aestivum
  Clone ID: TRIAE-23APR03-C11834_1.p
MGKDGGGGDGLEVPLLKRTYYHGNCPGCRLEKRNETRRGVPYTEFACMWLVTVCSTLPIQSLFPFLYFMIRDLHIAKQVEDIGFYAGFVGASYMLGRALTSTVWGIVADKHGRKPVLVVTLIAVITLNTLFGLSSSYWMALTTRGLLGLLSGMLGPIKAYATEVCRKEHSHLALSLISSSRAIGLIVGPAIGGYLAQPADKYPGMFSQESIFGRFPYFLPCLCISILAVAALISCIWLPETLHKHNEATYSNNSIEAMEESLSGSNAEESSGGYWSLFTNWPLMSAITVYCLFSLQDVAYAEVFSLWAVSDRKYGGLSFTSTDVGSVLALSGLFLLIYQILIYPSVAKAIEPITLVRATAILTLPLLASYPFMTTLSGFNLQLVVNCASSLKNSFQVTTITVCNILMNDAVSQDLRASANGLSVTLMSIFKAVAPAVAGVIFSWAQRRQTASFLPGDHLVFFMLNAATVIGLMCTFGPHFARGSTKH

SEQ ID NO: 9576 - protein, 414 aa, Triticum aestivum
  Clone ID: TRIAE-23APR03-C11839_1.p
MAVPGGGAAAALALTLLLLLCSCVSGAAHASSALRHAVPRGDGGGGLCGQLLLPLGYPCTEHTVETNDGFLLSLQHIPHGKNGVADNTGPPVFLQHGLFQGGDTWFINSVEQSLGYILADNGFDVWIGNVRGTRWSKASATFTVHDKLFWDWSWQELAEYDLLAMLSYVYTVRQSKILYVGHSQGTIMGLAAFTLPEITKMISAAALLCPISYLDHVSASFVLRAVGMHLDQMLLTMGFHQLNFRSDMGVQIVDSICDDGHVDCNDLLSSITGENCCFNGSRIDHYLEYEPHPSSTKNLHHLFQMIRKGTFARYDYGLWGNLRRYGKLSPPPLDLSSIPESLGMWMGYGGLDALADVTDVARTVKELRSTPELLYISGYGHIDFVMSVKAKDDVYVDLMRFLRLRANGSLHSSY

SEQ ID NO: 9577 - protein, 199 aa, Triticum aestivum
  Clone ID: TRIAE-23APR03-C11905_1.p
MSPATSSAVGTLSGGLLPHAAHRRRPFPTARLLPPRWSRLQVNAARHRRLATPARAQSAPSPGYLPDSEFYKIEAILRPWRVSHVSSGLLEMGIRGVTVSDVRGYGAQGGSTERYEGSEFSEDTFIAKVKMEIVVCKEQVEPVIDKIIEKARTGEIGDGKIFLIPVADVVRVRTGERGVHAERMIGGLSDKLPPVITIS

SEQ ID NO: 9578 - protein, 128 aa, Triticum aestivum
  Clone ID: TRIAE-23APR03-C119144_2.p
VRLFLTSRPAFLTLSEYRGVREAPSAEARQGRPRSRGGYSATSDCLRRRTSCHAASLTTRWSSPARPPPPPPRIWTRTCPAPSARPPSLTSATTYWLVISAYGSGRRVADSLCDSAMFSDWIARARLP

SEQ ID NO: 9579 - protein, 267 aa, Triticum aestivum
  Clone ID: TRIAE-23APR03-C119372_1.p
MASSRRALILLAVVLAAVPAALSQKTTAPAPEAAPETPEAPAAGTTPKAAAAPNVTAVLEKAGQYTKFIRLMASTQQDTQLNAQANDSDTGFTVFAPTDSAFNSLKPGTLNSLSQQDQVTLVQAHIVPTFYSMESFETASNPVRTQASGTDGPCTVNVTATSNSAVNVSTGIVHTTVGAALRATRPLAVYSVDKVLLPMDLFGPKPPASAPPAHGKKPSSAKGAAKAPSGDDEDEEEAPPAGAAAAVGAGWRSLVAVVAAATAACLL

SEQ ID NO: 9580 - protein, 386 aa, Triticum aestivum
  Clone ID: TRIAE-23APR03-C119584_1.p
MDGLLSKLRSLDAYPKVNEDFYSRTLSGGAITLASSFIMLLLFVSELRLYLHAVTETTLRVDTSRGEKLRINFDITFPALQCSIISVDVMDISGQEHLDVKHDVFKQRIDAHGNVIATKQDAVGGMKVEKPLQHHGGRLEHNETYCGSCYGAQESPEQCCNSCEDVREAYRKKGWGVSNPDSIDQCKSEGFLQTIKDEEGEGCNIYGILEINKVAGNFHFAPGKSFQQSNVHVHDLLPFQKDSFNLSHKINKLSFGEPFPGVINPLDGAQWIQHSSYGMAQYFVKVVPTVYSHLNEQIILSNQFSVTEHYRSGDSGRVQALPGVFFFYDLSPIKVTFTERHVSFLHFLTNVCAIVGGVFTVSGIIDSFVYHGQRAITKKRELGKFT

SEQ ID NO: 9581 - protein, 468 aa, Triticum aestivum
  unsure (1)..(468): unsure at all Xaa locations
  Clone ID: TRIAE-23APR03-C119740_1.p
SWRTNTRPSPSSSSVLGLSSSLASGQVLFQGFNWESWKHNGGWYNFLMGKVDDIAAAGVTHVWLPPALAVRLQRKGTSPGRLYDPGXATKYGNQXQLKSLHRGAPTDKGVKAIADIVINHRTAERQRIGPGAIYWXIFEGGTRGPRLVACPNVGGPEGLPDRGPRRICSDHFXVCDGTGDHRTGWASTSAPDMRSPRTSASRSSGSXRRHLPSRLTLGWRRLAPRPAAREYSACVARTXVQTTRPGFLGPETWSXVSYDGAGQAPPSNPGRRNVRDLVNXWAKAVGRPCQGVRTSGTKRAILLCSAAARAEXLWRMRRQGGPNAPLGMIGLLPEKGXVRSVDNHDTGSXQKKWPFPADKVMMGYAYILTHPGVPCIFYDHVFDWNLKQEINALAAVRNRNGINAGSKLRILAAESDMYVATVDEKVIVKLGPRFDAGSVIPSDFHVVAHGNNYCVWEKSGLRVPAGRR

SEQ ID NO: 9582 - protein, 478 aa, Triticum aestivum
  Clone ID: TRIAE-23APR03-C11985_1.p
MAAFILFLCLLVPLVLACAVRARKGAAGRASSGGGGKKGGTSLPLPPGSMGWPYVGETTQLYSSKNPNVFFARKRNKYGPIFKTHILGCPCVMVSSPEAAKFVLVTQAHLFKPTFPASKERMLGPQAIFFQQGDYHAHLRRLVSRAFSPEAIRGSVPAIEAIALRSLGSWEDLQVNTFQEMKTYALNVALLSIFGEEEMQYIEELKQCYLTLEKGYNSMPVNLPGTLFHKAMKARKRLGAIVAHIISARRERERGSDLLGSFMDGREALTDDQIADNAIGVIFAARDTTASVLTWMVKFLGDNPAVLKAVTEEHAEIAREKALSGEPLSWADTRRMRMTGRVIQETMRVASILSFTFREAVEDVEYQGYLIPKGWKVLPLFRNIHHNPDHFPSPEKFDPSRFEVAPKPNTFMPFGNGTHSCPGNELAKLEMLVLCHHLATKYRWSTSKSESGVQFGPFALPINGLPMTFTRKDDKNKA

SEQ ID NO: 9583 - protein, 94 aa, Triticum aestivum
  Clone ID: TRIAE-23APR03-C11989_1.p
KSRIMDATNKATGHGGATGPAGNHGGAPAGAGAGGVQQLQATRDDRKTDGGLGRSGGPTGNHGGAPAVGAAAAGEKKGVVENIKEKLPGAGGQQ

SEQ ID NO: 9584 - protein, 442 aa, Triticum aestivum
  unsure (1)..(442): unsure at all Xaa locations
  Clone ID: TRIAE-23APR03-C119_1.p
MGASRMDSSCVVLSKHNRSQSRSIPPRPPSAAARHVEPNQSSRVIEASYLMLPPAAASIYKTSTSEGGGAHLSPPNVNSTSPSPGNNSGFHSSVTVLKRAFEIASSQTQVEQPLCLXCMRVLSDKMDKEIEDVNTDIKXAYDACLQRLEQESYNILSETDFLKGKEKIEEEEKKLKAAIEEAEKQYSEVSSEMKDLEPKSKQFEELEERYWHEFNSFQFQLTSHQEERDAVLAKIEVSQVHLELLKRTNVLNDAFYISHDGVIGTINNFRLGRLPNVQVEWDEINAAWGQAALLLHTMAQYFPKFQYRIKIHPMGSYPRVTDINNNTYELFGPVNLFWSTRFDKAMTWFLTCLQEFSEFAISLDKENNVPSDKSLKLPYKIDGDKVGSYTIFLSFNKLENWTKALKYMLCNLKWVLYWFIGNTSFAPPSASLYLAQSPNKKG

SEQ ID NO: 9585 - protein, 122 aa, Triticum aestivum
  unsure (1)..(122): unsure at all Xaa locations
  Clone ID: TRIAE-23APR03-C120547_1.p
MSTTLAALTMATPSSRPTFSDNMSTLPAYPLNSGDVIEWAVMDGEGQDLNQKERPCEESCCSYVGNFHELQKHTQQRHPNSRPXEDDPARGIDWEHFQQSSDIIDVWSPPHAHPPSSVLLGV

SEQ ID NO: 9586 - protein, 415 aa, Triticum aestivum
  unsure (1)..(415): unsure at all Xaa locations
  Clone ID: TRIAE-23APR03-C12066_1.p
MMAGRVLVAIAVLAAAAARVCCGRRPSRRRRQQGHQTXERISGSAGDVLDDDPVGRLKXVIIYDRPGKNTTMKLLKKDPRCLNHMFAAXEIFMRRRPLSSAVRTTNPEDADWFCTPVYPRCGLTPSGSPLPLRVSGHDGGRDAVDWSHLTTLELAKKVADNNHLQEPSMTXSPCLPYQGDETIEPGLLPLLQRATRVLTFGQENHVCLKEGSVTTPPLPPPPWSHLRLRPGATPRSLRVXAARASAWANFKSSPLLDISTDHPPTYYEDMQRSVFCLCPLGWAPWSPRLVEAVVFGCIPVIIALHGAPPLADAPPWAEAAREIGVLVPEEDVPRLDSILTSIPXTEDILRKQRLLANPSMKQAMLFPQPAQAGDAFHQILNGLARKLPHGEDVFLKPGQVRLNWTAGPVGDLKPW

SEQ ID NO: 9587 - protein, 546 aa, Triticum aestivum
  Clone ID: TRIAE-23APR03-C120_1.p
MGLDLGALALKYTGLAVSDHDSIVAINIFIALLCGCIVFGHLLEGNRWVNESTTALVLGLITGGVILICTKGVNSRILIFSEDIFFIYLLPPIIFNAGFQVKKKQFFRNFATIILFGAAGTLISFVIITFGAMGLFSKLDVGPLELGDYLAIGAIFSATDSVCTLQVLNQDEAPLLYSLVFGEGVVNDATSVVLFNAIQNIDINHFDVFVLLQFIGKFLYLFFTSTVLGVAAGLLSAYIIKKLCFARHSTDREVAIMILMAYLSYMLSMLLDLSGILTVFFCGIVMSHYTWHNVTESSRVTTKHTFATLSFIAEIFLFLYVGMDALDIDKWKLASSSPKKPIALSAVILGLVMVGRAAFVFPLSFLSNLSKKESHPKISFNQQVIIWWAGLMRGAVSIALAYNKFTTSGHTAVRVNAVMITSTIIVVLFSTMVFGLLTKPLINLLIPPRPGTAADISSQSFLDPLTASLLGSDFDVGQLTPQTNLQYLLTMPTRSVHRVWRKFDDKFMRPMFGGRGFVPFVPGSPIERSVHGPGLLGTVTEAEDRS

SEQ ID NO: 9588 - protein, 445 aa, Triticum aestivum
  unsure (1)..(445): unsure at all Xaa locations
  Clone ID: TRIAE-23APR03-C12127_1.p
MQRRLPALLRRAAGAGPARRWLSAASSLLFADTQEQFKERVHGFAQEHIAPHAAVIDASNYFPXEGNLWKLMGNFNLAGLTFARRSTERSGSVTCTPASQYRRAARGPRQPAMATASPQEYGAARGLGXMYHCIAMEEISRASXGSVGLSYGAHSNLCINQLVRHGSPAQKEKYLPKLISGEHIGALAMSEPNSGSDVVSMKCKAEKVDGGYVINGNKMWCTNGPSAQTLVVYAKTDITAGSKGITAFIIEKGMPGFSTAQKLDKLGMRGSDTCELVFENCFVPQENVLGEEGKGVYVMMSGLDLERLVLAGGPIGLMQACLDVVLPYVRQREQFGRPIGEFQFLQGKMADMYTSLQSSRSFVYSVARDCDNGKVDRKDCAGVILFAAERATQVALEAIQCLGGNGYINEYPTGRLLRDAKLFEIGAGTSEIRRMIIGRELFKED

SEQ ID NO: 9589 - protein, 360 aa, Triticum aestivum
  unsure (1)..(360): unsure at all Xaa locations
  Clone ID: TRIAE-23APR03-C1213_1.p
KSCGRSTLVDLEGALGQLSGKSALYCSDGSIARYLIARNWDVRKATKMLTKTLKWRSESKPDEIRWDEISSEAMTGKIYRSDXYDKKAQGLLVYLVYCMENAILNLPAGQDQMVWXIDFAGFSLPNVSLLVTKLTADVLQGHYPERLGVAILYNAPKFFESFWKMASPLLEPKTKNKVKFVYSDRPETDKIMEDLFNMDELECAFGGRSPVTFNINDYAARMREDDKKMPLFWSPENSALAAEPYRMKNHGSQQCDSGLKTEETASDVIGETEAASEKSGETDTASDKEDTEAASEEREETETSSGKRGENATESVKEELTETVSEKKEETETESSTVKSTSSQGEGIASAGKSGSSSDP

SEQ ID NO: 9590 - protein, 333 aa, Triticum aestivum
  unsure (1)..(333): unsure at all Xaa locations
  Clone ID: TRIAE-23APR03-C12143_1.p
RRPKLSADPRLPPGRPSGPVALPPVGAADRSAARFARGVLFRGLLVLLAAFALSHWRYHRSRSVPVSPXTLACPACDXGGFPDLDQLPRRPPPPRXGSGGTGGRGAMNPGCVLRGCSVSGFPALLXHDGSGDGLRPLPGDVSHLLMGSGFHRLLDQFSRLEAAAPRPPASKAAVESMPSVTVAGGGGAHCAVCQEAFEPGAAAREMPCKHVYHQDCILPWLSLRNSCPICRSELPAAAVPEAEADAGLTIWRLPRGGFAVGRFAGGPREQLPVVYTELDGGFSNGVGPRRVTWPEGEGQVDGGEGRIRRVFRNLFGCFGRGGRPESSSQSRSG

SEQ ID NO: 9591 - protein, 145 aa, Triticum aestivum
  Clone ID: TRIAE-23APR03-C121614_2.p
MAGRVALAAVLLCTAAAMAAAQSASNVRATYNFYNPEKINWDLNTASAYCATWDAGMSLAWRSKYGWTAFCGPAGPTGQASCGKCLQVTNTATGAQITARIVDQCSNGGLDLDYDTVFSKIDTNGVGMQQGHLTVNYQFVDCGDN

SEQ ID NO: 9592 - protein, 216 aa, Triticum aestivum
  Clone ID: TRIAE-23APR03-C12164_1.p
MATAGNAPRSRKRVEATVLKRARDGSAFTRCEACNKDVAIVLIDLHSCSLDSKIRLSLESQVVEKAVEIQEKKRKTPSAAAGGKGKKKSKADGDGAKKPKAKRPPTAFFLFMKDFRVEFKASHPDEKGVAAVGKAAGEKWKSMTEEEKKPYNDQAKELKAQFANGEGSAENNVGDEEKADADAEEVEDAEQEVDKPEDAPEDEEEEEEKNELDDDI

SEQ ID NO: 9593 - protein, 351 aa, Triticum aestivum
  Clone ID: TRIAE-23APR03-C12171_1.p
MRPMTSPLLLSPSPCRLLRRLFSRAPRRRNPTTPRPLAPHLGRRLPLRLPASMSSSSAGTPDSVVADADALARKVAAIRAAGPAKLQVIADFDGTLTRYWYDGSRGQSSHGLLRQGNEEFDSKREALFEHYHPIEINPDIPVLEKAKLMEEWWGKTHGLLIEGGLTQEAIKKSVADAAIAFRDGVVELFEFLEARDIPVLVFSAGLADIIEEVFRQKLHRSFKNIKIVSNRMVFNEEGCLVAFKGKTIHVLNKNEHSLDMAAPVHDSLGDPNGSIDDYSLVKKRTNVLLLGDHIGDLGMSDGLNYENRIAAGFLNTNIEKSLKDYSEAFDIVYLNDASMRGVVELVSDLCP

SEQ ID NO: 9594 - protein, 322 aa, Triticum aestivum
  Clone ID: TRIAE-23APR03-C12173_1.p
MEGGGEGKGRAAPATAAGGGFGGYESAGDRKWWPWLVPTVIVACVAVFVVEMWVNDCPRHGSALGGGCVAGFLRRFSFQPLRENPLLGPSSTTLGKMGALDWNKVVHQHQGWRLISCIWLHAGLIHLVVNMLSLLFIGIRLEQQFGFVRIGAIYLLSGFGGSVMSALFLRNNYISVGASGALFGLLGSMLSELLMNWTIYSNKVAAIITLLFIIAINVAIGILPHADNFAHIGGFLTGFLLGFVLLARPQFGWLERSELPHTNQPPKYKPYQYVLWVVALVLLLVGFTLSLVMLFKGKNGNDGCHWCHYLNCVPTSRWKCDT

SEQ ID NO: 9595 - protein, 436 aa, Triticum aestivum
  Clone ID: TRIAE-23APR03-C1218_1.p
MNSLQSFLAVAPVKPAAAAARLPSSRRARVSACLATPAPAPTAPAAAPSARRELSAASRAVMADEAKYIVGTYKRAQVVFVAGRGCKLYDIDGREYLDMAAGIAVNALGHGDPDVDAAAADQRGRLVHASNVGYTVPQVELAKRLVEASFADRAFFANSGTEANEAAIKFARKYQRVAHPNGDAPTEFMSFTNCFHGRTIGSLALTSKVQYREPFEPVMPGSTFVEYGNLEEAKKVIQSGKIAAVFVEPVQGEGGIHSATKEFLQGLRDACDEAGALLVFDEVQCGLGRTGYLWAHEVYGVVPDIMTLAKPLANGLPIGVALVTEKVAAAINYGDHGTTFGGGPFVCHAALATLDKIQKPGFLAEVTRKGEYFKQLLKAKLSGNPHVKEIRGAGLIVGIELDVPAGPLVDACLNAGVFLLTAAKGSVLTCMLVPIC

SEQ ID NO: 9596 - protein, 253 aa, Triticum aestivum
  unsure (1)..(253): unsure at all Xaa locations
  Clone ID: TRIAE-23APR03-C121_36.p
MGRGRIEIKRIENTTSRQVTFCKRRNGLLKKAYELSVLCDAEVALIVFSSRGRLYEVLQQQXSTATIDRYKKAHACGSTSGVPLIEVNAQQYYQQEAAKLRHQIQMLQSTNKHLVGDSVGNLSLKELKQLESRLEKGIAKIRARKNELLSSEINYMVKREIELQSDNIDLRTKIAEEEQQLQQVTIARPSAALELNPFTALDMKCFFPANLFEAAVQAHAQARTQAQAQASLQLNLRYQQLAPPGAGDVAHQF

SEQ ID NO: 9597 - protein, 255 aa, Triticum aestivum
  unsure (1)..(255): unsure at all Xaa locations
  Clone ID: TRIAE-23APR03-C121_38.p
MGRGRIEIKRIENTTSRQVTFCKRRNGLLKKAYELSVLCDAEVALIVFSSRGRLYEYSNNSVKATIDRYKKAHACGSTSGVPLIEVNAQQYYQQEAAKLRHQIQMLQSTNKHLVGDSVGNLSLKEXLKQLESRLEKGIAKIRARKNELLSSEINYMVKREIELQSDSIDLRTKIAEEEQRLQQVTIARPSVAPELNPFTALDMKCFFPANLFEAAVHAHAQAQAQAQAHAQASLQLNLGYQQLAPPGAGDVAHQF

SEQ ID NO: 9598 - protein, 500 aa, Triticum aestivum
  Clone ID: TRIAE-23APR03-C12271_1.p
MSTNGSSPRVRDTESSLEKVKRQLSTGYGRYLLQGPLVKRSETLRNWNERWIILDPSSGKMEYKLRRNETAVKGTILFDASSTITLSPVNFQGMPKYDGCCFYIGTPQKKDYFLCAETPGAAKAWVSTLHATQLVLQAHKEAVNSLAGNGSPSTLGTVATAVANANATALEAMKEIDAALKVSMRAALGLGTNNSNVGQLDDLTIMKETLRVKDEELQHLAKDIRARDATIQEIAEKLTETAEAAEAAASAAHTIDEQRRLLCSEIERLKKAMETQMEQSMLKLRQSEEKVISLSKENDQLLKERDAAFQEAYMWRTELGKAREQAVIQEAAIARAEEKVRVSEADAAVRIKEAAENLHAAEKEKEELLALIGVLQSQVQREQSSTKQVCEERSESCSGADNSPPLTKHVDASDDDVDKACVSDSRSVLVSSESTEVQLAVDGVDIRPIGDPEWGSFQQPEALIADVREVSPEAEGSSLDIPVVNPAPANDHMQGGATHP

SEQ ID NO: 9599 - protein, 314 aa, Triticum aestivum
  unsure (1)..(314): unsure at all Xaa locations
  Clone ID: TRIAE-23APR03-C12291_1.p
AAYSPSGARRPPSGGWKASSRGYTKLXKGLAVILLLVHLLVXLFPSAVNYLALIPXRTIPFAWNLITAGYVEQTIPGVIISIIGLLLFGKLLEPLWGTKELSKFVFIVNFSTSMCVFVTAIAVYYVTQQESYLYTPLSGFYGVLSGLLVGIKQLMPELELNLFVLKIKGKWIPSLIALISVVVSFFMKDLVSYLPVILFGIYMSWIYLRYFQKRLETGLKGDPSEEFSFSSFFPAILRPVLDPIATIFHRLLCGRSDRADRGQTLETSSLPGSDSTEANRRRERGQRALEQRLAEKLAAVKSTESTSLDASDKV

SEQ ID NO: 9600 - protein, 253 aa, Triticum aestivum
  Clone ID: TRIAE-23APR03-C1231_1.p
VKSSDSMKIILDEKNRCYTPMLNEKIKPVNNVKNGHKEGFYVGVEDPQSNRQFYGPNQWPPEEVLPKWREVMEQYHREAFRVALSVAKIIALALDLDVDFFDRPEMLGESIGTLRLSHYEGLHYEGQVSNPSKGVYGAGAHSDYGLITLLATDDVVGLQICKDRNAQPQVWEYVAPVKGGFIVNLGDMLERWSNSIFRSTLHRVVLDGQERYSIAFFVEPSHDCVVECLPTCKSETNPPKFPPITCSVYLSQR

SEQ ID NO: 9601 - protein, 480 aa, Triticum aestivum
  Clone ID: TRIAE-23APR03-C1235_24.p
MVKICCIGAGYVGGPTMAVIAIKCPAIEVVVVDISKPRIDAWNSDTLPIYEPGLDDVVKACRGKNLFFSTDVEKHVAEADIIFVSVNTPTKTRGLGAGKAADLTYWESAARMIADVSKSDKIVVEKSTVPVKTAEAIEKILTHNSKGINYQILSNPEFLAEGTAIEDLFKPDRVLIGGRETPGGQKAVQALKEVYAHWVPEANIITTNLWSAELSKLAANAFLAQRISSVNAMSALCEATGANVSEVSYAIGKDSRIGPKFLNASVGFGGSCFQKDILNLVYICECNGLPEVANYWKQVIKINDYQKSRFVNRVVSSMFNTVSGKKIAVLGFAFKKDTGDTRETPAIDVCKGLVGDKAQVSIYDPQVTEEQIQRDLAMNKFDWDHPMHLQPTSPTAVKQVSVVWDAYEACKGAHGVCILTEWDEFKKLDYQKIFDNMQKPAFVFDGRNVVDAEKLREMGFIVYSIGKPLDGWLKDMPAVA

SEQ ID NO: 9602 - protein, 322 aa, Triticum aestivum
  unsure (1)..(322): unsure at all Xaa locations
  Clone ID: TRIAE-23APR03-C123770_1.p
GIFFLPRNLGPPFFPRDWEVPNFXLVGGVGKQAFPERTLQDLPPNAFPPKWQTSWGEKKSLSARGSFPASTCDERLIDALPPEGHQCRVAFLSPQDCRTWKMACLVLLAGTGDHSFERRLRLGGPLLKDNIATMVLESPYYGQRRPSMQHGAKLQCVSDLLLLGKATIDDARSLLYWLQAEPGYGKMGICGLSMGGVHAAMAGSLLSTPIPTLPFLAPHSAVVPFCEGLYRHATAWEALREDAAALAKDATSLTEDAASGITIEQVXRQITDDGYIPRHSVMELQKAWPGSEVRWVTGGHVSSFLLHNDSFRKAIVDALDRL

SEQ ID NO: 9603 - protein, 541 aa, Triticum aestivum
  Clone ID: TRIAE-23APR03-C12380_1.p
MASLLRLPSLLVPAAARPAALLRHRGRCLHTSPARLFPAATTAGASSAAPVKMETRGGDREGQVTPRSTDFNAWYTDVIAAAELADYGPVRGTMVIRPYGYAIWEAIQDYLNVKFKETGHSNMYFPQFIPYSFIEKEASHVQGFSPELAVVTIGGGKELEEKLVVRPTSETIVNHMFTKWIQSYRDLPLMINQWANVTRWEMRTKPFIRTLEFLWQEGHTAHATLEEAEKEAMQMIDVYTKFAYEQAAIPVIPGRKSRVETFAGADRTYTIEAMMGDKKALQAGTSHNLGQNFSRAFETQFMDENGQLEHVWQTSWAISTRFVGGIIMTHGDDAGLMLPPRIAPIQVVIVPIWKKGDEKGVVMEAVASVQNTLKEAGIRVKVDDSELRTPGWKFNFYEMKGVPIRIELGPRDVKNRSVVLSRRDVPGKQGKEFGISMEPSILVDHIKGRLEEIQASLLQKAITFRDSNIVDVNSYGELKEVISEGKWARGPWSASDADELKVKEETSATIRCFPFDQPEGAKKCFMTGNPADEVAIFAKSY

SEQ ID NO: 9604 - protein, 325 aa, Triticum aestivum
  unsure (1)..(325): unsure at all Xaa locations
  Clone ID: TRIAE-23APR03-C12413_1.p
KKEQEKSPPPPPPLHSSPAPFAAPSTPPAARPRPRPVRSPPAGGGAPPSGACPEHKCGGLAPLSGAKASPRGRAAGALVRRHAGRPARPSSPLPPCLPLPELLLPAGLAGFVCANTDRGGLRAAYLXAIAALITRLLAPPVFPLAVTHGXGAYDVPGRAYXEYRLDGFSGWLRGYVAGDPGRWEGVXACLVASDTCKXLTMETAFFIAPEQFYQSDLSPLQSGCCKPPTACGYAYVSPTVWASPANPAADADCGAWSNDPRQLCYWCESCKAGMLGTLRDQWRRANVALVAATVALLVVYVIGCSAFKNAQTEDLFRRYKWSNNT

SEQ ID NO: 9605 - protein, 80 aa, Triticum aestivum
  Clone ID: TRIAE-23APR03-C1241_4.p
MAEKFAESANNVIIEEVNKGLNPGMIVLLVVATTLLLFFVGNYVLYLYAQKTLPPKKKKPVSKKKLKREKLKQGVSAPGE

SEQ ID NO: 9606 - protein, 441 aa, Triticum aestivum
  Clone ID: TRIAE-23APR03-C1242_1.p
MGMEYEPAPKKPAAGGRAALKLLLALLLVGLAMRLLADRCASRLLPPTTRTEEAAALAVTAPPAQEEAGGGDGVPVTPSGAGMSVLFHGAGSHDPSHGEWVHDSTGPTYTNATCRSNGRPQNCMSNGRWKPGYLYWKWKESGWFLARFESKTFLEDMRGKHWALVGDSILRNHVQSLLCLLSKVEDPTEVYHDKTYQSRRWHFPSHNFTLSLVWAPFLVKAEIFEDEKRFSSAEPRLTFNVLDATWVSQWATFDYVIISTGQWFFKKAVYLEQGAVIGCHFCQTKSLREVSIDYSFRRALREAFRFITTSAHRPVVFYRTWSPSHFEGGEWFSGGRCDRKAPFKPREAGDRALDNLMWRVERAEFAKAAADDGGERRRLRLLDTYEMSLQRPDAHAGPYRAYQPFAKGADAGKVQNDCLHWCLPGPIEAWNDIIMQMLGED

SEQ ID NO: 9607 - protein, 236 aa, Triticum aestivum
  Clone ID: TRIAE-23APR03-C124368_1.p
MADTGDELKLLGMWASPYVVRVQLALRLKGVSYEYVAEDIANKSELYLRCNPVPAGLLIDIHNGQAAARAQVIVQYIDEAFAGVGRPLLPADPYERAVARFWAAYVEDKLLAPWGKVFRVKTDEERAEWTRQTAAALGPLEDGLRECSKGKGFFGGDCVGYVDVLLGSMVPWVRATERLSGDKLVDAGKAPLLAAWMERISELDAAKAVFQDVDRVVEYAGGIQTRLSAAAAASTQ

SEQ ID NO: 9608 - protein, 525 aa, Triticum aestivum
  unsure (1)..(525): unsure at all Xaa locations
  Clone ID: TRIAE-23APR03-C12436_1.p
MGGGEGGAGGEPAAGAAPAAAAQATLHIRGTSGNKFAVRADLGATVGELKAVVAGSCDVPAPQQRLIYKGRILKDDQTLXASYGVEADHTIHMVRGAAPPTTSAALAAANRRTSTRSSAPMGMSMPRWSGFLRTLAGTARCGPFGLPVAVPIVRFDWLYTLPGPGQIERQRLLDSYVFXEWNEINHVSLLSILCSSHGCEIFRGNSDLAHVMNEPSLQCQTYEADRNPELMREMMRNTDRAMSNIESSPEGFNMLRRMYETVQEPFMNATTMAGEGYTSPNPFAALLGDQGSNQARDPTGDAPTTAPAPNTNPGAAQWGANAWAATRSTTSGCCWQGVPQAVGYELCGLHDSSILMDVLQNPAMMQMMQNIMSTPQTMNQSLNMNPNVRNMMESNTQMREMFQNPEFLRQLTSPETLQQLASFQQALTSQLGQQAAGQERTQAGTTPGNVNLNSLMSMFSGLGAGGGLGGVPNIPTVPPEERYATQLAQLQEMGFFDPQENIRALLATNGNVHAAVERLLGNFGQ

SEQ ID NO: 9609 - protein, 282 aa, Triticum aestivum
  Clone ID: TRIAE-23APR03-C12441_1.p
MACKAAIFVALSLLLSAVAANGCGSTYCQPPVVVPTPPVVVPPPYHGGGGHGHGHGHGGQCSINVLNLRVCANVLGGLLGLKIGVPARDQCCPLLQGLADLDAAVCLCTAVRANILGLHLNVPVDISLLLNHCGKTCPFWISFGHAPYAQVLCIGTCQFKAEGRRRSVIDQPMRSVAHGPRRHAAKTQCKRFPRGSYDRWQCTERCQSHQQDDEELMNHHGGHESSSCEQKCQQRHRHEYDRQQCVRDCKSGGGGGAGGRGREGDERQHDRGMVVEAILEEV

SEQ ID NO: 9610 - protein, 161 aa, Triticum aestivum
  Clone ID: TRIAE-23APR03-C1251_4.p
RLIWWLKLQKERERAEKKEKRRNDKKASHQGGGETKHSKRSHKKRKHEDTSIAGPESKTASKEQFEQLEKSGLSEEYGAPSFIQTIHGSPESSQDSSKRRKVVLPGPSQSKNGTVLRIKIKRDQESPSAMSDGSRVLQQPPVQQMATPLSLLSKQNASQPC

SEQ ID NO: 9611 - protein, 342 aa, Triticum aestivum
  Clone ID: TRIAE-23APR03-C125708_1.p
MPATAMELSSLPLVLLLCLMAGSSTAALPALPGMDRVRQQVDRANRHGPSIGLVMSYVAEDTALQASGYFRPWHVQPFIDLYGRRFHIGSIRGVNVIYALTGQRRLNAAVTVQTLVDVFTVSGIVHYGTAGSSNDSMSFGDVSVPKLVAYTGAWTWKKYKSLKEESTELNFGQFNVPNGGENLLGSLKYRNEELYSVGKPMEEVFWLPVDSAWFKIAEGLKVNLERCNDTFCLPKTPQVVHGLKGASADMFLDNAEYRKFLFREFAVSTIDEESAAVVMTTTSPGVPVIVFRGVSDLAGVEPTWSSTSLMNLASINALKVAVEFIATIGRQMSTPLAQSSKN

SEQ ID NO: 9612 - protein, 230 aa, Triticum aestivum
  Clone ID: TRIAE-23APR03-C125819_2.p
MAPPLLLLLLLLPLLAVAAEAVPPTPTARSNPAAAGGGAGAPPVPTPWPEQFHAVMFTNLTESGGRLQLIDLYYDWPRGRNLNLIRNQLSGDPTYDVEWTNGTSYIFDSASCRTIRFPVGVLPPDWLHGAVYLGRESTDGFDCHLWTKVDFVWYYEDVLTHRPVRWNFFNGMQQHVMSFEVGGVLEDSHWQAPSHCFADDATAAAATGTDAASSLLRLARTTAAAVTSAA

SEQ ID NO: 9613 - protein, 165 aa, Triticum aestivum
  Clone ID: TRIAE-23APR03-C12599_1.p
MAAGKRTIGLAMDYSPSSKAAMRWVVENLVKAGDRIILIHVLPKGADASHKGLWKSTGSPLIPLLEFMEMNVQARYGVNPDKEVLEILQAESKSKQVEILAKIYWGDAREKLCEAVDDLKVDSVVLGCRGLGPLKRALLGSVSNYVVNNATCPVTVVRGPNGSLA

SEQ ID NO: 9614 - protein, 405 aa, Triticum aestivum
  unsure (1)..(405): unsure at all Xaa locations
  Clone ID: TRIAE-23APR03-C1259_1.p
MAPSTSSASALLHLPGLPPRGPHRGGCRHHPRRPRHAGVRCSFACAPVETARIKVVGVGGGGNNAVNRMIGSALQGIEFYAINTDSQALVYSEAQHPLQIGEQLTRGLGTGGKPNSGAPAAEESXDVTADARRDCDLLCKSDGVGRTFGWQSTVLAGHFSIXLCKHSENLFRVLIRFAPSVCIAQSLDAVDLQGVSFGSLIVIPNDRLLXLADNVLRQGVQGISDIITIPGLVXGISDIITIPGLVNVDFADVKAVMKNSGTAMLGVGVSSSKNRAQEAAEQATLAPLIGSSIEAATGVVYNITGGXKDITLQEVNKVSQIVTSLAXDPRPTIIFGAVVDDRYNGEIHVTIIATGFPQSFQKSLLADPKGARILEAKVKAASLATAAAAQQPAAAVPTWSRRLFS

SEQ ID NO: 9615 - protein, 492 aa, Triticum aestivum
  Clone ID: TRIAE-23APR03-C125_47.p
MPASAWWVCGFLPLLAVAAAAADPAKGSWEPLIRLPTEKGAAPAPAPAAPAAEEGATKWAVLVAGSSGYGNYRHQADVCHAYQILRKGGLKEENIVVFMYDDIAKNDLNPRPGVIINHPKGEDVYAGVPKDYTGKQVTAENFFAVLLGNKTAVTGGSRKVINSKSKDHIFIYYADHGGPGVLGMPNRPYIYAGDFIKVLREKHASKSYSKMIIYVEACESGSIFEGLLPEDLNIYVTTASNAVENSWGAYCPGMKSSPPAEYDTCLGDIYSVSWMEDSETHNLKKETLKQQYEVVKTRTSKSMEFDKGSHVMEYGDKTFKDEKLFLYQGFDPANSNVANRLLLPDLEGAINQRDADVLFMWKRYEKLNGGSEEKQRVLREIKETVVHRKHLDSSIDFIGKLVFGFENGPSMIEAARSSGQPLVDDWDCLKRTVRVFESQCGSLTQYGMKHMRAFANMCNNGISEAEMREASISACGGYGSAKWSPLAVGHSA

SEQ ID NO: 9616 - protein, 327 aa, Triticum aestivum
  Clone ID: TRIAE-23APR03-C125_49.p
MAEHLASIFGTEKDRVNCPFYFKIGACRHGDRCSRLHNRPTTSPTIVLANMYQRPDMITPGVDAQGVAIAPEKMQEHFEDFYEDIYEELSKFGEVETLNVCDNLADHMIGNVYVQFREEEQAVAAHNALQGRFYSGRPIIVEYSPVTDFREATCRQFEENSCNRGGYCNFMHVKQIGRELRRKLYGGRSRRSHGRSRSPSPQHRRDNRDRGGDFRRDGRDEYRGGGGGGGGGYRGGDGGDGGGYRGGGGGGGYRGGDGGGYRGGGGGGYRGGGRGGGGGRHDRYDDGPRRRYGGSPPRRGRSPPARENSEERRAKIEQWNREREEKK

SEQ ID NO: 9617 - protein, 322 aa, Triticum aestivum
  Clone ID: TRIAE-23APR03-C125_54.p
MAEHLASIFGTEKDRVNCPFYFKIGACRHGDRCSRLHNRPTTSPTIVLANMYQRPDMITPGVDAQGVAIAPEKMQEHFEDFYEDIYEELSKFGEVETLNVCDNLADHMIGNVYVQFREEEQAVAAHNALQGRFYSGRPIIVEYSPVTDFREATCRQFEENSCNRGGYCNFMHVKQIGRELRRKLYGGRSRRSHGRSRSPSPQHRRDNRDRGGDFRRDGRDEYRGGGGGGGYRGGDGGDGGGYCGGGGGGYRGGDGGGYRGGGGGGYRGGGRGGGGRHDRYDDGPRRRYGGSPPRRGRSPPARENSEERRAKIEQWNREREEK

SEQ ID NO: 9618 - protein, 613 aa, Triticum aestivum
  unsure (1)..(613): unsure at all Xaa locations
  Clone ID: TRIAE-23APR03-C125_56.p
MRLLRLRLPLPALLPSPNPTTKSFFSLSSCWPGVTRTSPTSHHKQMSTTSSSAAAVAEGSAARRFWIAASSREAAFATYTPFLLSLAAGSLRLDSFRHYLAQDAHXXHAFARAYEMAEECADDDDDKATISALRKAIVRELNLHSSVLQEWGVDPTKEIPPSPATTKYTDFLLATAAGKXDGGKGSDKMATPFEKTKIAAYTVGAMTPCMRLYAYLGKELGVFLKQDENHPYKKWIDTYAATDFESNALQIEELLDKLSVSLTGEELEIIGKLYQQAMRLEVEFFSAQLLEEPVVAPLSRYRDPKDKLVIFSDFDLTCTVVDSSAILAEIAILSHQKASQSGSDNVLDRTKSADLRNSWNMLSNQYMEEHEQCIQKLLPPEEAKSVDYDQLYKGLEVLSEFERQANSRVIDSGVLRGMNLDDIRKAGERLILQDGCRNFFKKIGETREKVNLDIHILSYCWCAELIRSAFSSVGCLDGVNIHSNEFTFEGSVSTGHINRKIESPLDKVEKFKIIKSDLDSITPSLSVYIGDSVGDLLCLLEADVGIVVGSSTTLRRVGKQFGVSFVPLLPGLVEKQRRLWKQEASIFKARSGVLHTVSSWSEVQAFILGNDSS

SEQ ID NO: 9619 - protein, 319 aa, Triticum aestivum
  Clone ID: TRIAE-23APR03-C125_59.p
MKTFLILALLAIVATTATTAVRVPVPQLQPQNPSQQQPQEQVPLVQQQQFPGQQQQFPPQQPYPQPQPFPSQQPYLQLQPFPQPQPFPPQLPYPQPQSFPPQQPYPQQQPQYLQPQQPISQQQAQQQQQQQQQQQQQQQILQQILQQQLIPCRDVVLQQHNIAHASSQVLQQSTYQLLQQLCCQQLLQIPEQSRCQAIHNVAHAIIMHQQQQQQQEQKQQLQQQQQQQQQLQQQQQQQQQQPSSQVSFQQPQQQYPSSQVSFQPSQLNPQAQGSVQPQQLPQFAEIRNLALQTLPAMCNVYIPPHCSTTIAPFGISGTN

SEQ ID NO: 9620 - protein, 174 aa, Triticum aestivum
  unsure (1)..(174): unsure at all Xaa locations
  Clone ID: TRIAE-23APR03-C125_60.p
MDLLERSAATIKAEQGEAQRKEAERKEQEHKEQETQQPGLXGRPPLANGRSGMLPMSSPPANPGQLTIFYGGSVCVYDSVPPEKAQAIMLIAAAAAAASKSNGTTAVKPPAMSATNAIQAMLTRSLSLQSTSVANGQPQAVADPGSICKLQADLPIARRHSLQRFLEKRRDRLA

SEQ ID NO: 9621 - protein, 298 aa, Triticum aestivum
  Clone ID: TRIAE-23APR03-C125_65.p
MKTLLILTILAMAITIGTANMQVDPSSQVQWPQQQPVPQPHQPFSQQPQQTFPQPQQTFPHQPQQQFPQPQQPQQQFLQPQQPFPQQPQQPYPQQPQQPFPQTQQPQQLFPQSQQPQQQFSQPQQQFPQPQQPQQSFPQQQPPFIQPSLQQQVNPCKNFLLQQCKPVSLVSSLWSMIWPQSDCQVMRQQCCQQLAQIPQQLQCAAIHTIIHSIIMQQEQQEQQQGMHILLPLYQQQQVGQGTLVQGQGIIQPQQPAQLEAIRSLVLQTLPTMCNVYVPPECSIIKAPFSSVVAGIGGQ

SEQ ID NO: 9622 - protein, 203 aa, Triticum aestivum
  unsure (1)..(203): unsure at all Xaa locations
  Clone ID: TRIAE-23APR03-C125_69.p
MDLLERSAATIKAEQQGEAQRKEAERKEQEQEQQGQGLTGRHPLANGRSGMLPMSSPPANPGQLTIFYGGSVCVYDSVPPEKAQAIMLIAAAAAAASKSNGTAAVKPPAMSATNAIQAMLTRSLSLQSTSXVANGQPQAVADPGSICKLQADLPIARRHSLQRFLEKRXRDRVVSKAPYGAGKPSEGMGASSGMEAVAEGKAQ

SEQ ID NO: 9623 - protein, 327 aa, Triticum aestivum
  Clone ID: TRIAE-23APR03-C125_84.p
MKTLLILTILAMAITIGTANIQVDPSGQVQWLQQQLVPQLQQPLSQQPQQTFPQPQQTFPHQPQQQVPQPQQPQQPFLQPQQPFPQQPQQPFPQTQQPQQPFPQQPQQPFPQTQQPQQPFPQQPQQPFPQTQQPQQPFPQLQQPQQPFPQPQQQLPQPQQPQQSFPQQQRPFIQPSLQQQLNPCKNILLQQCKPASLVSSLWSIIWPQSDCQVMRQQCCQQLAQIPQQLQCAAIHSVVHSIIMQQQQQQQQQQGMHIFLPLSQQQQVGQGSLVQGQGIIQPQQPAQLEAIRSLVLQTLPSMCNVYVPPECSIMRAPFASIVAGIGGQ

SEQ ID NO: 9624 - protein, 229 aa, Triticum aestivum
  Clone ID: TRIAE-23APR03-C12619_1.p
RCPRRSARTEAAGVGGCRAPAGQGGLPIGFRFRPTDEELLLHYLRRKALSCPLPADIIPVADLARLHPSDLPGEADGERYFFHLPATGCWRKGGGAGRAGGSGVWRASGKERLVVAPRCGRPIGAKRTLVFCRPGGARTGWAMHEYRLLPAGLAAYATPKSLHAAKDWVVCRVFKKATPARHGTAGRRRGDADADMTPASPSPASSCVTESGMEEDDDETASNLARRED

SEQ ID NO: 9625 - protein, 413 aa, Triticum aestivum
  Clone ID: TRIAE-23APR03-C12627_1.p
NKSNLNQPRSRTNPPRTHTTSISSPLPQNPSCPQVSSSAMAAAENAGDVAAGESRKLFVGGIPSSAQETELRGHFARFGAVRSIVVMRDKESGHGRGFGFVEFEDEEAAAKALGDGERPKHFICGRLVDVKRARARPPRNLGEQPVHQHQHQHQLEQGPVQGHQDAGDSTEASSDSMSYASKKVFIGGLRDNITEEEFRAYFEAFGTVTDVVVIYDSLTSRSRGFGFVTFDSEEAVRKVMGQSFHDLKGTRVEAKIAIPKDAQYYRNGRGRGSRTFGGRGPVGFDGSTYQPYNNRHGFYNGYMPQPVPTHPYYHGLYFGMGGNPYANAYPNHAVMANVPNMVARRPVYSPYPPMYPGYGFAYRSGYAGAAPSVQYGVNGGRDYMNDQDSMDVQELDSTATIATKFEYMKLGSQ

SEQ ID NO: 9626 - protein, 360 aa, Triticum aestivum
  unsure (1)..(360): unsure at all Xaa locations
  Clone ID: TRIAE-23APR03-C1262_1.p
MGTAEAPCPCSGSRSWIPTRPKARRIPGRPAAFTGLSCGAARFPEDRERSHINRLNRPHHPGFDHPVLKILTIQKRAVYQASSIKSYGKNTLLSTPNPSSVDPAMLNENGHQHAIAYVERNKYYGDKISTNARRRCGRKRNPTVPSPISVVGGSFGQGVNSIEAGWQVSPKLYGDNNTILFTYWTSDAYQATGCYNLLCSGFIQTNNHXAIAAGSSVSPAPLWGQXDINILVWKDPKQGNWWLQFGNDYVLGYWPSFLFSYLADSASMIEWGGDGTTSAYSCGRTSTQXMGSGHFPEEGFGKSSYFKNIQVVDSSNNLKAPRGIGSFTEQSNCYDVQNGNNGDWGTYFYYGGPGKNPNCP

SEQ ID NO: 9627 - protein, 167 aa, Triticum aestivum
  unsure (1)..(167): unsure at all Xaa locations
  Clone ID: TRIAE-23APR03-C127024_1.p
MSLSATFRVAKIPRATLPPKSCKVTPSSVSASPASTSGDPPPKAVKKKKEAAPWCVYLIASAXVPRTYVGVTTDFPRRLRQHNGELKGGAKASSAGRPWNLACLVQGFTNRSEACEFESKWKNISKKMTRKRSEPGLNAVLQHREVALSRVKTFLDCNHLNINWHSS

SEQ ID NO: 9628 - protein, 170 aa, Triticum aestivum
  Clone ID: TRIAE-23APR03-C12728_1.p
SRHSANSSRSRGRSPACAPRPRSPPPPSRRAVATAPPPMASSAAGAGKSLIQTFRKFFKKPWEITGPCSSPEYRSAVPGALEYRQTCPATLREDSLRAVIPTSDSETVFDIKYYPRDCRRNRPPVRRTLLRKPDLERYMAAKQFDPAKDFPVPYVNSAVEYSEVGGGYTK

SEQ ID NO: 9629 - protein, 291 aa, Triticum aestivum
  unsure (1)..(291): unsure at all Xaa locations
  Clone ID: TRIAE-23APR03-C127384_1.p
MMGFDGGIGDQSEMWDWQSQEFDLQKDLLPVPSTSLWAEANHSEVDSWSLFDEQTPIKECTDIDLPFCDIGDIIIKDFDEGKETLQAKRRRMLQFCPDNSEIDCSLTDGLLENLQVDLDFSSDEHLLQCDGTEELPEQWLVDCSQDSENRSPPEEVKSPSAAVEVNISVLQNSLVELEEQPIMKVEKKPPQAKPTPLKAGRSVFRAXKLKVASVAYPFELIKPCGFRGDTTLRDINRKILAPPSYRIKHKIDEASAPYQEASAXSGXPVVXKTKIXXEGGKGSIXIXRTXG

SEQ ID NO: 9630 - protein, 195 aa, Triticum aestivum
  Clone ID: TRIAE-23APR03-C127540_1.p
TDFTRKILAMDAKNYHAWSHRQWVLQALGGWESELQYCNQLLEEDVFNNSAWNQRYLVVTRSPILGGLAAMRDSEVDYTVEAIMVNPQNESPWRYLRGLYKDDNNLLVADNRISDACLKVLNKDWTCVFALSFLLDLLRMGLQPSDELKGTIEAMENSDPETGHADIAVAVCSILQKCDPLRINYWSWYQTTLSS

SEQ ID NO: 9631 - protein, 344 aa, Triticum aestivum
  unsure (1)..(344): unsure at all Xaa locations
  Clone ID: TRIAE-23APR03-C127795_1.p
MDHGCDGALPLPPRSSFHPTDEEPAMYYLCRKCAGPPIAAPGIAQVGLYKIEPCRLPGEGRREEGRTPRRGPAARGRERTYRSATASNRTASPPVPAPPGPGTRTATGADKPVGSPRPVAIKKRPRSXAGLFPSSRRTWVQXSWQLADAFRFCCVMCNCNCDDAYELDDXVLCRIYNKKGVIERYDTADSDAADVKPAPAPAAKNPRPGQYHAGPAMKVELSDYGFYQQPSPPATEMLCFDRSGSADRDSNSNHSMPRLHTDSSSSERALSSPSPDFPSXHDYAESQHAAGLAGGWPGDDWGGVIDDDGFVIDGSLIFDPPSPGAFARDAAAFGDMLTYLQKPF

SEQ ID NO: 9632 - protein, 260 aa, Triticum aestivum
  Clone ID: TRIAE-23APR03-C12791_1.p
MGSLLLLSLLVISGVGVGGGVRLAGNGGYEDWRLGTATYIKESQGHPLNDGGGACGYGDLDIFRYGRYTAGLSGALFGRGSACGGCYELRCVNNILYCLRGSPTVVVTATDFCAPNFGLADDYGGWCNFPKEHLEMTEAAFLRVAKAKADIVQVQFRRVSCDRAGGIRFTITGGPNFLQVLITNVAADGEVDAVKVKGSKTGWIPMGRNWGQNWQCDADLRGQPLSFEVTGGKGRTITMYNVAPSDWMFAQTFAGKQFVE

SEQ ID NO: 9633 - protein, 432 aa, Triticum aestivum
  unsure (1)..(432): unsure at all Xaa locations
  Clone ID: TRIAE-23APR03-C12798_1.p
LTNKCPAERSLSEDYISRRKKLVDALPEKSLAMIASADQQMMTDVVPYSFRQXGDYLYITXENGLFMFMPXKHKEDVVWEGQTAGVEAAVDFFKADKAFPLSEMKKILPEMIEQSKVVYHNAKASTSSYRNFDAFRRASLNNKVKDLTHYTDELRWIKSKSEIKLMRESASIVSQSLLQTMLLSRTHREESQLAAKIEYECKMRGAQRMAFHPVVGGGVNGSVVHYSRNDKKIKSGDLVLMDVGCEYHGYLSDLTRTWPPCGRFSAAQEELYSLILETNKECIKLCKPGTSIREIHHHSVKMLISGFQELGIIRKGKSIQYNYLNPTSIGHSLGMDIHDSTSLTLDKPLEPGVVITIEPGIYIPQVPILNENAPDRFRGIGIRIEDEVLITENGHEVLTASVPKEIPHLTTLMNMGGGGSTTESHEARAACN

SEQ ID NO: 9634 - protein, 366 aa, Triticum aestivum
  Clone ID: TRIAE-23APR03-C127991_2.p
MDQRKALFRAKLREAKEKQEKRIDPSLVRYNEYDQPICRVCNVTLKSEALWPAHQVSRKHHEAKAAAAAKVTPAAAPRGNNVSHERPADPQKAKSSPMPANFFDNQGMKRQSDGTGSEGRSVRHQVANAQPATKEASANKPSIRMDQAPNKGSKGSTDVKGILPGNFFDYAEEDEDEVPTPAPAPKEPTRTSGNTTNPNTVQVKGVPDGFFDSSNTQPSETSASSQAANNLETAQVKALPEGFFDNKDADLRARGIQPPKVDINDAYKEFEKEIQEDLQEVDDRLEEEEIDAAAEREEYLTLEQEEYRQRVDMLKKQLTESKAARTAKANSKPIGMDTDSSASDSSSDDEDEGTDFAVDWRAQHMK

SEQ ID NO: 9635 - protein, 523 aa, Triticum aestivum
  unsure (1)..(523): unsure at all Xaa locations
  Clone ID: TRIAE-23APR03-C12853_1.p
MGNCCRSPAAAAREDVSSSHFPASAGKKKPHQARNGGGAGGGGGXGAGAGAGGEKKRLSVLGEERRDVSGGSDDKYALDRELGRGEXFGVTYLCMDRESKELLACKSISNASIXKHKAYQGWICKDGNRVNSQACSWRSCPGHVSPAAYSCNVTRTIGEGEQHAHXMMHQPPLPDESSFXFANKKENSPLKAIDLSLSIFFKPGEKFSEIGGSPYYMAPEPLKSSDAPQIDIWSAGVILYILLCGVPPFWAETEQGVAQAILRGNIDFKREPWPHVSDNAKDLVRQMLQPDPKIRLTAKQVLEHTWLQNAKKAPNVPLGDIVKSRLKQFSRMNRFKRRALRVIADHLSAEEVEDIKEMFKVMDTDNDGIVSYEELKSGIAKFGSHLAESEVQMLIEAVDTNGRGALDYGEFLAVSLHLQRMANDEHLRRAFLFFDKDGDGFIEPEELQEALAEDGAVDITEVVKDILQEVDTDKDGKISFEEFVAMMKTGTDWRKASRHYSRGRFNSLSIRLIKDGSVKMGNE

SEQ ID NO: 9636 - protein, 341 aa, Triticum aestivum
  unsure (1)..(341): unsure at all Xaa locations
  Clone ID: TRIAE-23APR03-C12861_1.p
MAHPPPRNWAMAPPYHYHGTSQQEQAAPAAEDESGAGSGGQEAESRSLRIRELFPWMDEDYLRSCFTRSPELVTAVITRNKETKQSEGFGYLTFSDHATADQILQSYNGQKMPNADRDFSLSWVQYAGPDDDCAIYVGGLGFDVTDFMLHHVFKNRYPSVKRAKVIWDFLARRSKGYGFVVFGDVNERTQAMTEMNGAYCSSRPMRIGPATFKSDFRTQGTYSDSNQNNSRLFVGQLDSCVTDEDLDKAFSPYGELXSRASAVEAMTILNGSQLGDNIITVNWARPAPKKQDQWNGVDHGHPQSSGPGYGCCPEDPNILGYTGHPGYAYHQQQQPQQTPVQ

SEQ ID NO: 9637 - protein, 342 aa, Triticum aestivum
  Clone ID: TRIAE-23APR03-C128702_1.p
MLASISRSLARRLPRLPLATAAATTAMSSSDTAGSVADRPISPDTTRIGWVGTGVMGQSMAGHLLAAGYALTVYNRTPSKAQGLVSSGARLVDSPRAAAAVADVIFLMVGFPSDVRSTSLDPSTGALAGLAPGGVLVDMTTSDPTLAAEIAAAAAGAGCAAVDAPVSGGDRGARNACLSIFAGGDAAVVARLAPLFKLMGNALYMGGPGAGQRAKLGNQIAIASTMVGLVEGMVYAHKAGLDVGKWLEAISTGAAGSKSLDLYGKRMLERDMAAGFYVRHFVKDLGICLSECQTMGLALPGLALAHQLYVSLLAHGEGGLGTQALILAVERLNNTCLDKKGE

SEQ ID NO: 9638 - protein, 430 aa, Triticum aestivum
  unsure (1)..(430): unsure at all Xaa locations
  Clone ID: TRIAE-23APR03-C12877_1.p
MMKDKMKDLMKKVTSSSAPSFKGPSHVLGSGPPPSASTSSSRPSNPNPNPNPRSVPKQQPPRPAGPSEFTPFTAVISSSSSRRPDANGGDTVACPNCGDAFSSEHAVSEHLDGCLASAGGARARAAAYLXGNPPPAAVEVVKKLLGNLLKEPGNDKYRRVRLGNPRIKEAVADREGGLELLEAVGFTIGDEGGELFAVMDETPAEARLSGIRQAVLLLERSHPSAPLPTLAGSESKESCRSGVDEQKEVNKIVDRQIRVFFNVPGSSVAEIDTPDSFYKLSGEEVRNEAKXRRERLEQSRLLIPKSYKEKQALAARQKYKQAVIRVQFPDGVILQGVFLPAEATGSLYEFVADALKQPGLEFDLICPAVPRSRVLPHSPNTGERARTLQDEGLVPSALLKFKPNETDSVVFTGLLDKLLEASEPFTAASS

SEQ ID NO: 9639 - protein, 293 aa, Triticum aestivum
  unsure (1)..(293): unsure at all Xaa locations
  Clone ID: TRIAE-23APR03-C12886_2.p
MKREGVRTRSQTKKQKASTSSQGNSLPDNPFEEEFGSLSDSGQGVWTELSKEVASNLAGTVVSIASFDDGNNKLFFACTGIITVNTPKTXTSFLTSLSLVRSIDDNSKIFHDMRIEVRLPDNKIESGWLQFYDLKHNVAVINIIPXLQVTCLDHQMQIKPQIKVVAVGRGYKSGKFMATSGIVIDKPSKLDCKELKISTCKITKAGIGGPXIDFDGNLIGMNFYGLEETPYVPVNIIVEVLKNFDAQGFVAVNDDHSLNRWPVPKPFWCYPTWHKLEEEVDLEEELKYQREQY

SEQ ID NO: 9640 - protein, 362 aa, Triticum aestivum
  unsure (1)..(362): unsure at all Xaa locations
  Clone ID: TRIAE-23APR03-C1290_1.p
MASSPLLVALVMVSACFLAVSGQKFNAIYSFGDSMSDTGNLCVNGPPAGLTLTQPPYGETFFGRATCRCSDGRLVVDFLAEKFGLPLLKPSKQGGADFKQGANMAIIGATAMGSSFFQSLGVGDKIWNNGPLDTQIQWFQNLLPSVCGSSCKTYLSRSXVISGVAGRERLQRAQPFAGYTPEQAAGQSPTIVDAIGAGAEKLIGLGAMYVVIPGVLPVGCFPIYLTLYQTSDAGDYDQYGCLKRFNALSARHNSLLQSKVTSLQGKYPYAKIMYADFYSHVFDMVKSPASYGFSTNLRACCGAGGGKYNYQNGARCGMSGASACGNPSSSLSWDGIHLTEAAYKKIADGWVNGPYCHPAILS

SEQ ID NO: 9641 - protein, 368 aa, Triticum aestivum
  unsure (1)..(368): unsure at all Xaa locations
  Clone ID: TRIAE-23APR03-C129125_1.p
MMGIQPNLLNQLVSLLLGASVAGVLIFFMSSDGIGAGPSTPGISSWVNGTMAVPVAPAQEANHTSASKVDGVASPLEASHNTSQAAEDELERLLRTVADEHKTVIMTSVNEAWAAEGSLLDLFLESFRAGERIAHFVDHLLVVALDAGALERCRAVHPHCYLLPPVAGGNKNLSDEKVFMSKDYLDLVWSKVRLQQRILELGYNFLFTDVDIMWFRDPFERMSVAAHXVRSDFYFGDPYSPVNAPNTGFLYVRSSALMVGVFEAWRAARLSFPGKHEQQVFNEIKFELVDKRGLRVQFLDTVHNAGFCNNTRDFNTLYTMHANCCVGLAAKLHDLGNLMKEWRVYRGMDDAQRRRGPVRWKVPGICIH

SEQ ID NO: 9642 - protein, 445 aa, Triticum aestivum
  unsure (1)..(445): unsure at all Xaa locations
  Clone ID: TRIAE-23APR03-C129230_1.p
MADAVKQPLLHHQQPYAYPSHAASASSPALPSVPHSGTATPTPGAGGAASASFAGGRRFPGGLDVPNLKKRGGGTRSWIRVEAATASVQTLEVDKATMMRRCELPARDLRLLDPLFVYPSTVLGRERAIVVNLEQIRCVITADEVLLLNSLDSYVFQYAAELQRRLLQRAEGDELPFEFRALELALEAACSFLDAQAAELEIEAYPLLDELTSKISTLNLERVRRLKSRLVALTRRVQKVRDEIEQLMDDDGDMAEMYLTEKKMRMESSSVFGDQSLATFNAAAAGTSVSAPVSPVSSPTESRKLEKTYSLCRGXHASVLGPEGAVAVHIEELEMLLEAYFVVIGSPLNKLTSLEEFIDATEDFITIHLDNGRNQLIQFELLLTTATFVVAIFGVVAGVFGMNFETDVFSIQNAFQWVLIITGVVGAFIFCFFVWFSKYKRLMPL

SEQ ID NO: 9643 - protein, 322 aa, Triticum aestivum
  Clone ID: TRIAE-23APR03-C12924_1.p
MKLAGLKSVDGAHEDSIWAAAWVPAADHRPTALLLTGSIDETVRAWQPDDLAAASPPAGGHALGVISLAAHPAGVIAAAVSIDSHVRVFDVDSGASVATLDAAPSEVWGVQFHPKGVALAAAGGGSGSVKLWDTEKWQPIASLPVPRPEGARADKTGSGKFVLSVAWSPDGKLLACGSMDGTIAVYDAVRMKFLHHLEGHHMPVRSMVFSPVDPHVLLTGCDDSHIHIYDAKEKGLIGAMSGHASWVLSIDVSPDGMAVATGSSDRTVRLWDINARASVQTMSNHSDQVWAVAFRPPGGEGVRAGRLASASDDKSISLYDYS

SEQ ID NO: 9644 - protein, 115 aa, Triticum aestivum
  Clone ID: TRIAE-23APR03-C12931_1.p
ARSQAWGRGSSPQPLVPTRNLKILLPRRQLGSERQAAPCHCRRFSNAADPPFGAHTHGLLQRHLDHCLPGAMCRQPSSTRLSPTSIRVDLLIGGGNPSLSVVCSSTPSLASEVPK

SEQ ID NO: 9645 - protein, 278 aa, Triticum aestivum
  Clone ID: TRIAE-23APR03-C12948_1.p
MASWSSSSTQRSSGATMPCSVVKLDDDLLHHEEETAEEIRRGPWTVEEDLTLVNYIADHGDDRWNSLARAAGLKRTGKSCRLRWLNYLRPDVKRGNFTADEQLLILDLHSRCRLRWPNFPRPLPGRADFAADDHRRTRVQKHAKQLNCDANSTKFKDAMKYLWMPRLADHHLQQASTVGDHLVPGLPTSYMESSGMVTSSSDSFASESYDGARCTNASVGEMIQGGDWVQEQNQGFWPESNQTFQPQDSELSGWVQGFSESESLAENFWSLEDIWKMQ

SEQ ID NO: 9646 - protein, 381 aa, Triticum aestivum
  unsure (1)..(381): unsure at all Xaa locations
  Clone ID: TRIAE-23APR03-C1296_1.p
MASSSSSPPARRSVFDAAYIRAEFDAAGISPTFIPTIWKYVLQNPRCSDLDGVPSLSAAAYALLRNKFRPTTSTLTAAAESKDRTTTKLLIRLQNGESVEAVIMRYDSRLGKYDGKTRPGGVRSTLCVSSQVGCKMGXSFCATGTMGFKSNLSSGEIVEQLVHATRYSQIRNIVFMGMGEPLNNYTALVEAIQVLTGFPFQISPKRVTVSTVGIIHSINKFNNDLPNINLAVSLHAPDQDIRCHIMPAARAFPLAKLMNALQSYQNASKQTIFIEYIMLDGVNDQEEHAHKLGKLLENFKAVVNLIPFNPIGSASTFKTSSDQSIKKFQKVLRGIYSIRTTVRQEMGQDIAGACGQLVVSLPDERSAGGATLLSDIEDLRI

SEQ ID NO: 9647 - protein, 326 aa, Triticum aestivum
  unsure (1)..(326): unsure at all Xaa locations
  Clone ID: TRIAE-23APR03-C129787_1.p
MSSCECLVVEKVSEDHAGGGEATGARRGGGRAPRSEAMFPIYVMGSSRARAVLLDPSAAGDPIWEAVKAEARSEAEKEPILSSFLYASVLSHDCLERALSFVLANRLEDPTLLATQLIDIFNDVMMNDVDIRRSIRLDAQAFKGRDPSCAQYSWALLYLKGYHSLQSYRIAHVLWNQGRKVLALALQSRISEVFAVDIHPAAKIGEGILLDHGTGLVIGETAVVGNWVSLMQGVTLGGTGKEHGDRHPKIGQGALLGAGATILGNITVGEGAMIAAGSLVLKHVPPHSMAVGNPAKXIGYTEKEDPSLTMKHDARRXXFEHVPVVS

SEQ ID NO: 9648 - protein, 163 aa, Triticum aestivum
  Clone ID: TRIAE-23APR03-C129931_1.p
MASSSALIALLVVLGCAAAASAATFTVGDGQGWTTGANYATWASGKTFAVGDKLVFNYASQAHTVTEVTKSEYDACSSNANGDNSGATTMTLKAGANYYICTIGTHCAAGMKLAVTAGDSSPGTPAAGTPPTTPSGSGGSRVRMEAGPVLAATAGVLLKLALF

SEQ ID NO: 9649 - protein, 355 aa, Triticum aestivum
  Clone ID: TRIAE-23APR03-C12998_1.p
MASPATPRPALIRPRASRSRSQLGAVSLASDHAAATASSGRRRDFVFVVNPSGANGRTGKQWKQLLPFLHTRLADQCNICECITSGPSHAIDVTREAIKDGADAVIAVGGDGTLHEVVNGFFWKGSPVRALDRGPDHLTALGLIPLGTGSDFARTFGWSNDPHQAIDRIVRGVKSKLDIGMMEGPNGDPHFFINVADIHLSAKAGYFASMYKRFGNLCYVLGALRGFWGHSNRDLRIKVNGGEWRTVDKVTALCVGNAKYFGGGMKITPTVDPFSGDLQVVIIQDFKWYSFLLKLHRLYGGTHLTVNGVSSIRVQSIEVVEVVPNGDVFVQSDGEHFGFLPTKFSVLPGAVDFFS

SEQ ID NO: 9650 - protein, 278 aa, Triticum aestivum
  Clone ID: TRIAE-23APR03-C129_1.p
METGGSKREGDCPGQERKKKVRRRSTGPDSVAETIKKWKEENQKLQQENGSRKAPAKGSKKGCMAGKGGPENSNCAYRGVRQRTWGKWVAEIREPNRGNRLWLGSFPTAVEAARAYDDAARAMYGAKARVNFSEQSPDANSGCTLAPPLPMSNGATAASHPSDGKDESESPPSLISNAPTAALHRSDAKDESESAGTVARKVKKEVSNDLRSTHEEHKTLEVSQPKGKALHKAANVSYDYFNVEEVLDMIIVELSADVKMEAHEEYQDGDDGFSLFSY

SEQ ID NO: 9651 - protein, 288 aa, Triticum aestivum
  Clone ID: TRIAE-23APR03-C13001_3.p
MEAPPRSGVDEVRKQGDGFAAFCRRRKGRKRVEMEDRHVAAVALGGDRAQALFAVFDGHGGKSAAEFAAENMPRIVAEELERSARGGGAGRAAVEGAVRRAYLRTDEEFSSTSSKNREQAGGGACCVTALLREGGRQLVVSGAGDCRAVLSRGGRAEALTDDHRASRQDERDRIEALKGGLVLNCRGVWRVQGSLAVTRGIGDAHLKPWVVAEPETRTVDVGADCELLILASDGLWDKVGSQEAVDAAAASSGDLPAACRRLVDMAVSRGSSDDISVLVVQLQRRPLR

SEQ ID NO: 9652 - protein, 473 aa, Triticum aestivum
  Clone ID: TRIAE-23APR03-C13013_1.p
MAAAAAAVTPHVAAVGTGSHHHHQPPHRPPVSISARPRARLVPVAAAAATPATDGVAPVPPHPRRSVVKRHTISVFVGDESGMINRIAGVFARRGYNIESLAVGLNKDKALFTIVVSGTEKILTQVVEQLYKLVNVIQVDDLSKEPQVERELMLIKLNVEPEQRLEVMGLVDIFRAKVVDLSDHTLTVEVTGDPGKIAAVQRNLSKFGIKEVARTGKIALRREKMGQTAPFWRFSVASYPDLEVKMPSKSTLSTAKTTSGDSEESSQGDVYPVESYESFSMNQILDAHWGAMTDSDPTGFCSHTLSILVNDSPGVLNVVTGVFARRGYNIQSLAVGPAEKTGTSRITTVVPGNDESIAKLVQQLYKLIDVYEVQDLTHLPFAARELMIIKVAGNTSARREILDIAEDVFRAKTVDVSGHTITLQLTGDLDKMVALQRLLEPYGICEIARTGRVALCRESGVDSKYLRGYSLPG

SEQ ID NO: 9653 - protein, 110 aa, Triticum aestivum
  unsure (1)..(110): unsure at all Xaa locations
  Clone ID: TRIAE-23APR03-C13031_3.p
METPPPFQESAHCDVCRCTFSTFRRRHHCRSCGRTLCHEHSSYHMALPQYGIYTDARVCYECFNKSSSRRGGVDNVSSXPGGVSGAADSFSGLNLDKDDDSLPTKKFGSS

SEQ ID NO: 9654 - protein, 530 aa, Triticum aestivum
  unsure (1)..(530): unsure at all Xaa locations
  Clone ID: TRIAE-23APR03-C130638_1.p
MEVAVAATTLGVGGDVSSPSSLSLLCGLSALLVLLWALSRAAETCWLRPRRLSRALRAQGLGGTSHPGALADTGGLKEEARSKPMPRCHDIVPRVAPHLLNIVKAXGNVCITWFGPVLTMVIXAEPKLVREILSDKSGHFEKFTNKRLGKLIALGLASYDGEKWATHRGCVCARANXSCLQSMLPAFSTCCTELISSWESKLAGSDGSHEIDIWEDFQNLTGDVISRTSFGSSFMEGRRIFQLQAEQAERIIKAFQYMYIPGYLFFPTENNKRMKQINREIEGLLRGIIEKRERAMENDGLSSGNDLLGLMLQSNKESGASRMRMSTEDVIEECKLFYFAGMETTSVLLTWTLVVLGMHPEWQDRAREEVLSVFGKDKPNFDGLSRLKTVTMILYEVLRLYPPAVTLNRKTSRQMQIGGITYPAGVLLELPIIMVHHNPDVWGKDVLEFKPERFAEGISKATKDQPVFFPFGWGPRICIGQNFAMLEAKMALSMILQRFEFQLSPSYTHAPYTVITLHPQHGAQIILKSL

SEQ ID NO: 9655 - protein, 392 aa, Triticum aestivum
  Clone ID: TRIAE-23APR03-C130730_1.p
MKPRHLPPVLVLALLSLLSLSLRRQLTPLQPPLRPAAGDPLLRRLAAVEGVGSEQVLADAAALLVNGSISTFPSLGNRQRLLYLRLPFARTARGPPRPRTVSRLRIPAEALPSDESLLASFRTSLHSFLLAHHRRRRGGTSNVASVMSELAGVLGRRFPTCAVVGNSGALLGSGRGPQIDAHELVIRLNNARVAGFVADVGAKTSLSFVNSNILHLCASRSAATAAGCGCHPYGPTVPMAMYICQPAHLLDALICNATATHASPFPLLVTDARLDALSARIAKYYSIQRFVSDTGAPASNWTRKHDERYFHYSSGMQAVVMALGVCEELSLFGFGKPAGAKHHYHTNQKKELDLHDYQAEYDFYGDLQARPEMVPFLDEAQGFTVPPVRLYW

SEQ ID NO: 9656 - protein, 170 aa, Triticum aestivum
  Clone ID: TRIAE-23APR03-C130789_1.p
MAGLVLAKCLLLFSLSAALLSLLGTGASAIGLPQPHAPVNFTIGVQGMVWCKTCRYIGYNANMDASPLKGVEVYLQCRHGPGRLKKVQGASGQGGYFVIQSAQMASFTNDECKVYAESSSSTACSLVDEPAAGEGLPLKFDSFVKHGDGLQALYSVGNFFFRPSNPNKCY

SEQ ID NO: 9657 - protein, 151 aa, Triticum aestivum
  Clone ID: TRIAE-23APR03-C13088_1.p
MDREPISLSIEEQKASAIPSTSPAAAAAEMDPDSVAKAFVEHYYRTFDTNRAALVGLYQEGSMLSFEGEKFQGAAAIATKLTSLPFTKCVHTVVTVDCQPAGPTGGMLVFVSGSLQVDGEHHIKFSQMFHLMPLGPGNFYVHNDMFRLNYG

SEQ ID NO: 9658 - protein, 234 aa, Triticum aestivum
  Clone ID: TRIAE-23APR03-C131310_1.p
MKFGKWLKRQIEQSLPAWKDEFLSYNELKPVIGAVSPADFVARLDVQIEKINAFFIEQEEFFIITHRELQGAIRSALERKPAVPAAAHEAEIAAIRREIVNFHGEMVLLLNYSSVNYIGLAKILKKYDKRTGAGIRLAVIETVLVQPFFTAEAVSLMVRECEAMMEAVFPTAPGEGQAAARRDREALVAAEQRIFRNTVSALLAMQDVRSGSSTRGRHSLPPLNLPDSDWLRSF

SEQ ID NO: 9659 - protein, 505 aa, Triticum aestivum
  Clone ID: TRIAE-23APR03-C13133_1.p
HRSFWRESSSSPPPRSPAEQTRNRPRRPLPARRGRRPHAAGGVPQRGGRRAGAGGPHLVPPRAVALGPRPVTPARVASSRRPSTPPLRPRRLQSRTGPPLAAPPRPAPSAGPPPCRWRSSSPGRSTAPVLCDLVMSHPLEWPSLAVQWLPSGSPASARSHRLVLGTHASDDSANHLMLVDAVLPLPPRLAAAAAAEDRAVPAPSVSIGRSAPHQGEVNRARCMPQRPYTVATKTCVDEVHVYHLGEDGEKGGADVVLRGHGAEGYGLAWSATKEGFLLSGSYDKKICLWDLKAGNGAPVLDAQQVFEAHEDVVEDVAWHLKDENLFGSVGDDCKFMMWDLRTNKPEQSIVAHQKEVNSLSFNPFNEWILATASGDGTIKLFDQRKLSRSLHAFDNHEGEVFQVEWNPNMETVLASHAADKRVMIWDVNRIGEEQADEDAGDGPPELLFVHGGHTAKISELSWNPSEKWVVASVAEDNVLQIWEMAESIYSDDNSNNANSASCLST

SEQ ID NO: 9660 - protein, 209 aa, Triticum aestivum
  unsure (1)..(209): unsure at all Xaa locations
  Clone ID: TRIAE-23APR03-C13150_1.p
LDEAQTVGARPTESARCVASGEGRPLTSRRPQGAREGGGGGRTSEIKKVFSRFDPVRRAARISPSELAAVXRAIAPPATESAQGREVASMMDELDTDRDGYVDLGEFAAFHGRGREERELDAELRDAFDVYDINGDGRISVAELSKVLSRIGEGCSTEECEKMIASVDVDGDGCVGFEEFKKMMTAGDAGAPPQPEAIAVPDSNKPKKE

SEQ ID NO: 9661 - protein, 336 aa, Triticum aestivum
  unsure (1)..(336): unsure at all Xaa locations
  Clone ID: TRIAE-23APR03-C13177_1.p
MGFESSAGTVRFLCERPPDPTEPRAERFFALFSLRDLRRGGPLLEAAQAATDPFNLLAPVAAFPLEDTQDVQAIAALEGVLXLLPLDPIVRDEAPEALGVIGLEEVLNDLSLHAIVLHVPAKCQGAIGLEKSISLLKESLAADPAVEVQETCELALRRIEGQKNASGAESTTISPYLSVDPALPAKQGLSVEQLRELLLNEQEKMYERYAALFALRNDGGDYAVSAVIEALGVKSALLRHEVAYVLGQLQNKAASDALSGVLKNVNEHPMVRHEAAEALGSIADQESIALLEEFSKDPEPIVSQSCEVALSMLEYERSGKSFEFLFLQTPHVQQES

SEQ ID NO: 9662 - protein, 469 aa, Triticum aestivum
  unsure (1)..(469): unsure at all Xaa locations
  Clone ID: TRIAE-23APR03-C13179_1.p
KGGFPRLQGNEEQILTPCEKSLDIWRQLWSGLERSDVLVMVVASSNPLFYRCPGLHLYAKEIEMLKTTVQEIXLDQANTAPCNVSWSLAVQFKAHDVSCLFXSTKSASFVLDXKRIGQPYHGKNGFRYRFKDARPVITPSEVXREELLVRWHGEEEXLLSRNLTLAVGEEPESSSESALVLPKRVVVGFVGYPNVXGKSSTINALVGEKKTGVTSTPGKTKHFQTLIISEELMLCDCPGLVFPSFSSSRHEMVACGVLPIDRMTKHRGAIQVVANRVPRNILEQVYKITLPKPKAYEEASRPPTAAELLMAYCTSRGHVSHAGLPDETRAARQILKDYIDGKIPHFELPPGEIDDETDGEDNSDLEGSSTAAXDQSDDGASDEDDEEINRAEPNISHALNDLASFDMNGQMTKGSPKKKKKEASHKHHRKPQRKKDRSWRVGNDGADGSGVIRVVQKPAVNLAASTLAS

SEQ ID NO: 9663 - protein, 338 aa, Triticum aestivum
  Clone ID: TRIAE-23APR03-C1318_1.p
MDLVSDTGDESLLFQALELNDELQRVLQRYDDIAKGVPPNIPVPVAGNINQGTAPPRPAGASFAPLLNVHHEDDEPEDEFSVLSRRSARDGAAAQGNMSSVPRNERPYPSPLLPPPPSTKRPVYTEASSVDYLSGDSYKSEKVPDDFVNPTAPANMSAPSHSKTETDQVPNYDSRSENVPDDFINPTAAPSFSMPSRPTSEPSVNKLESLPDDDFINPTALPGFSSSSTSEDLPKAPWEAQAPVSLPPPPARYGQRQQFFEQQHGFPGENNEGGYDEMLTRTGSLSLNQRNTENGKSASVSTASRQPKPEDALFKDLVDFAKKNPSSPSKPANSRRTR

SEQ ID NO: 9664 - protein, 992 aa, Triticum aestivum
  Clone ID: TRIAE-23APR03-C131_1.p
MAPCHAHGPPPPPPPPRPRAEHETRHALAPGHRHRHQSTTTSPPPPLFSPTPLPAAFRPAARFKLPSPHQSPCLSLFPMACSAAAGVEATALLSPRCPAPSPPDGRSRRRLALASRTRHRSLRAAAQRPHKSATGADPLYNNRANVRSDEASVSAEKERQRKYNDGDGISNLKLEDLVGMIQNTEKNILLLNQARLQAMEHADKVLKEKEALQRKINILETRLSETDEQHKLSSEGNFSDSPLALELGILKEENILLKEDIEFFKTKLIEVAEIEEGIFKLEKEHALLDASLRELESRFIAAQADTMKLGPRDAWWEKVEKLEDLLETTANQVEHAAVILDHNHDLQDRLDNLEASLQAANISKFSCSLVDLLQQKVKLVEDRFQACNSEMHSQIELYEHSIVEFHDTLSKLIEESEKRSLENFTGNMPSELWSKISLLIDGWLLEKKISYNDASMLREMVQKRDSRLREAYLSYRGTENREVMDNLLKMALPGTSSGLHIAHIAAEMAPVAKVGGLADVISGLGKALQKKGHLVEIILPKYDCMQVDQVSNLKVLDVLVQSYFEGNMFNNKIWTGTVEGLPVYFIEPQHPAMFFSRAQYYGEHDDFKRFSYFSRAALELLYQSGKKVDIIHCHDWQTAFVAPLYWDVYANLGFNSARICFTCHNFEYQGTAPARDLAWCGLDVEHLDRPDRMRDNSHGRINAVKGAVVYSNIVTTVSPTYALEVRSEGGRGLQDTLKVHSRKFLGILNGIDTDTWNPCTDRYLKVQYNAKDLQGKAANKAALREQLNLASAYPSQPLVGCITRLVAQKGVHLIRHAIYKTAELGGQFVLLGSSPVPEIQREFEGIADHFQNNNNIRLILKYDDALSHCIYAASDMFIVPSIFEPCGLTQMIAMRYGSVPIVRKTGGLNDSVFDFDDETIPMEVRNGFTFVKADEQGLSSAMERAFNCYTRKPEVWKQLVQKDMTIDFSWDTSASQYEDIYQKAVARARAVA

SEQ ID NO: 9665 - protein, 292 aa, Triticum aestivum
  unsure (1)..(292): unsure at all Xaa locations
  Clone ID: TRIAE-23APR03-C13269_1.p
CCPLTSPLLLLSGHGKASFPKSPKSKRSRGNSLTHDPTAPVPPEPPRPPHPPRRPTGRPASVPPLGEASGRIGAAVYWSAVTAEDLVAAAAGGCDWSTPPXRPPRSSSPRFTVPRPSLQRGPAGPQAATANSIQNKLNYSRSCLFLVLFFLLGRPVVYSCALILAWIKPCFYLMTSLIXTFNEKVTRTVRQFSPHLAAKMRPPITPVIRGRPSSKRSIHICGRPRWLFVLLFSAVSCMLWLTSCSLLTVLWALLIALLTTVLHASFRTPNLKARLNTFREEFRAVWRNYSEL

SEQ ID NO: 9666 - protein, 246 aa, Triticum aestivum
  unsure (1)..(246): unsure at all Xaa locations
  Clone ID: TRIAE-23APR03-C1327_4.p
MGGGNDGHGYPPGGQGGYPPLCYPPQQGGYPPQQGYPPAPGAYPPAPGAYPPAPGAYPPAPGAGGSDGEKGLLSNIMHGVAGAHGGGHGYPSGGHGYPPQQHGYPQQGYPPQHGYPPQQHGYPPQQHGYPPAGYPGSSGHSGSHXRRGMGMGGMLAGGAAAAAAAYXAHKIXHAGNGGVEHDGQHDGRPWRYGGGNATNGQVKDGSTATAVQHGRWEGKHGHGKFKHGKHGKHGXIASGGQFKKWK

SEQ ID NO: 9667 - protein, 237 aa, Triticum aestivum
  unsure (1)..(237): unsure at all Xaa locations
  Clone ID: TRIAE-23APR03-C1327_5.p
MGTHPVARGDTLRKGTRRSREVTLHSKDTRLHLELTHLHLGHTLLHLGHTLLRPERVAVGEKGLLSTSCTVLPGLHGGGHGYPSGXHGYPPQQHGYPQQGYPPQHGYPPQQHGYPPQQHGYPPAGYPGSSWHSGXPWEEEALGMGGMSSWRGISCWRRLRSTQILRAYGAHKLSHGGPGGGGHMMGGMMGGHGGYGGGYGHPGGKFKHGKHGPGKFKHGKHGKPGMFGGGGKFKKWK

SEQ ID NO: 9668 - protein, 159 aa, Triticum aestivum
  Clone ID: TRIAE-23APR03-C1327_7.p
VPRQQWEECYDGHGYPPGGQGGYSPQGYPPQQGGYPPQQGYPPAPGAYPPAPGAYPPAPGAYPPAPGAGGSDGEKGLLSNIMHGVAGAHGGGHGYPSGGHGYPPQQHGYPQQGYPPQHGYPPQQDGYPPQQHGYPPAGYPGSSGHSGSHGGEAWAWAGC

SEQ ID NO: 9669 - protein, 130 aa, Triticum aestivum
  Clone ID: TRIAE-23APR03-C13294_1.p
MPATPAASPGCAGLPAQPPTSSLPGFEGPPSRLGVRRPAWVVRTESNVRRERPKRPDPPCTICKGTGTINCRNCFGRGRINHVDLAVLPKGEWPQWCQICGGSGLDYCHRCHGTGEYREPMGFHFTVNRK

SEQ ID NO: 9670 - protein, 365 aa, Triticum aestivum
  Clone ID: TRIAE-23APR03-C13309_1.p
MTASSPMVLSLLLFASLTALLVLAPRTASPPLPLAVVVGDEEAPPAAAGGAAGISGGGAGVEEGPEDLALYRRVTLDAGEGAAVASKVAFMFLTNSDLTFAPLWERFFAGHADQFNVYVHADPAVRLRLPPTPSFRGRFVAAKPTRRGDPSLIAAARRLLVAALLDDPANAYFALLSQHCVPLHSFPRLYEALFPPKAAHHHRLPSYIEVLTGEPQMPARYVARGDDAMLPEVPFDRFRIGSQFFTLARRHAVLVVRERRLWRKFREPCLPESQGSCYPEEHYFPTLLDMADPAGCTRYTLTRVNWTDSFEGHPHTYSAPEVSPRLIAELRQSNSSTYEHMFARKFAPDCLGPLMAIADTVIFKD

SEQ ID NO: 9671 - protein, 239 aa, Triticum aestivum
  Clone ID: TRIAE-23APR03-C13314_1.p
HPFPSHPLPTSHHPPPSPPERAPPPRPPAQPLQPPGRGAARAPRRRPRTPAAPPPPAAARPRRPPRRPLAGGRRRGRGAPRAAAAPRGPRGRPPPPPPPPRAGAAAGAPPSRSRWPRRTAGAAGTARATRWRRSAPRGTTRTASISRFTRGAEGAKENTMRTKSRKTLPGGSFMWLRIPMVDAENKDYGAELFVNGEIVQRSPERQRRVEPVPQRAQDRPRYSDRTRYVKRRENQAYQR

SEQ ID NO: 9672 - protein, 250 aa, Triticum aestivum
  Clone ID: TRIAE-23APR03-C13314_2.p
MAAAAAASMARRLLSPTTTTSYSTTARLLISRRLASAASVPRAPAAAAKEMLRPAAVASSSALFLRGAGGARGMARRPGGGDGYAPARGGGGGDRAPTEMAPLFPGCDYEHWLIVMDKPGGEGASKHQMIDCYVHTLAKVLGSEEEAKRKIYNVSCERYFGFGCEIDEETSNKLEGIPGVLFVLPDSYVDPEHKDYGAELFVNGEIVQRSPERQRRVEPVPQRASDRPRYNDRTRYARRRENQQQQQPQR

SEQ ID NO: 9673 - protein, 311 aa, Triticum aestivum
  Clone ID: TRIAE-23APR03-C133471_1.p
MASFGSIAVALVVCAMLLQTCVATRRLQALVQEQPITMKYHKGALLSGRIAINLVWYGNFSAPQRAIVTDFVSSLASASASPAPQPEPSVATWFKTAQKYYASSKARFPALALGSHVFDRSYSLGRRLRERDLVRLAARGGPSRAINVVLTADDVAVDGFCMSRCGSHGASPRSRAGRFAYVWVGNPATQCAGQCAWPFHQPQYGPQMAPLAPPNGDVGVDGMVVSLASMVVGTVTNPFGNGFFQGPAEAPLEAATACAGVYGKGAYPGYAGSLLVDPATGASFNANGAHGRKYLVPALVDPDTSACSTLG

SEQ ID NO: 9674 - protein, 200 aa, Triticum aestivum
  Clone ID: TRIAE-23APR03-C13394_1.p
RARGRGGGAGEAAGRWGGGGGGGRGDGVPGHQLLAAADDRGAGAVARGESTSTSSSSSPRSSSSRSASPALVVALQLIFIVTPLNVDDKPRRESGRFVPQYGMGHIQVSLRVEPDDAFFVSIARALKFTPIIFWGRYGTPIAFSSPMHVVVGRPIELKKNPLPTIDEINEVHGQFVGALQELFEKYKTKAGYPGLHLRVL

SEQ ID NO: 9675 - protein, 448 aa, Triticum aestivum
  unsure (1)..(448): unsure at all Xaa locations
  Clone ID: TRIAE-23APR03-C133_1.p
ARGVLNPWERNENHTLCLNSAKAIGCTVVNIGTQFLVEGRPHLVLGLISQIIKIQLLADLNLKKTPQLVELFDDSKDIDEVLSLSTEKMLLRWMNHHLKKAGYKKTVNNFSSDVKDGEAYAYLLKALAPETSPETTLETKNPDERAKMVLEQAEKLDCKRYLTPKDITEGSANLNLAFVAQIFQHRNGLTSDIKQVTLTQSASRDDVLVSREERAFRMWINSLGVESYLNNVFEDVRNGWVLLEVLDKVSPGSVNWKLASKPPIKLPFRKLENCNQVVKIGKELKFSLVNLAGNDIVQGNKKLIVALLWQLMRFNILQLLNRLRSHSKGSQGKQITDADILNWANSKVKASGRTSRMESFKDKSLSNGVFFLELLSAVQPRVVNWKVVTKGEADEEKKLNATYIISVARKLGCSVFLLPEDIIEVNQKMILTLTASIMYWXPAETTTA

SEQ ID NO: 9676 - protein, 358 aa, Triticum aestivum
  unsure (1)..(358): unsure at all Xaa locations
  Clone ID: TRIAE-23APR03-C13436_1.p
MRARTAHKLQKPSLEIEQQLQQLLNSIAQSVNQLEQLFADITLKIDNGALDKIERRNNERIAPVDERADSHLCFYEILANHYVKVPQSGRRILELIVQLWSQSFAANIFALLFHRWLFEASLEGTEVSLRYSSALVQPATNVFXIDIQSTTRYFLRLYHYLLEEVALVPDQLIKISPQAGRNLFCLLSRFMLFYDQDHLLTSFLGHFPAFPNSFLVGGAADYFVIELTDQLQKLKVEPVLLHYLSRMTILQGWELRMSTSTRLKSCLYSFTSPGGPAYPTRAVRHAAWNTLDLLFPVGRYPRHVISLFFRLLYPWYWPSSCWNFVMTCVSTIYYYILNLLVSIWENMRRRDHQRMHRE

SEQ ID NO: 9677 - protein, 261 aa, Triticum aestivum
  Clone ID: TRIAE-23APR03-C1345_2.p
MAPPSSEEPAAASGAGAISKVLVVIAMQTEALPLVTRFQLVEAAADDSIFPKGAPWTRYHGDYKGLHIDLVWPGKDPVLGVDSVGTVSAALVTYASIQLLKPDLIINAGTAGGFKARGAGIGDVFLASDVAFHDRRIPIPVFDSYGIGARKTFETPNIVKELNLKVGKLSTGDSLDMSPHDETAILSNEATVKDMEGAAVAYVADLFSTPAIFVKAVTDIVDGEKPTAEEFLQNLISVTMALDQAVMQVVDFISGKCISDL

SEQ ID NO: 9678 - protein, 198 aa, Triticum aestivum
  unsure (1)..(198): unsure at all Xaa locations
  Clone ID: TRIAE-23APR03-C134877_1.p
LPYAHGRSLSLPTLAPKGGQGRAGAPAAGPPPPCRRTRFRLPRPHRLRDSRAFAPRRLVSHIASKKKEEAATRAAAATAERAGPTNFVKAMAMEISTSFXLRERESLTHVDDINPPAPVHGLASRXLGGGITGXIRRNLRHAEIRGRAALRWERWWTEKEGVADGFRVVINNGAEGCQSVYHLHVHVLGGRQMKWPPG

SEQ ID NO: 9679 - protein, 223 aa, Triticum aestivum
  Clone ID: TRIAE-23APR03-C135148_1.p
LVFRLTRREEERRGGSVEKMMMRSLEPAAEHKASSSFGNLLSIFLRVSSSEPKPPRRSFDAEGVVGLGIVAAMSRACLTAQPIAIGAAARRRAHEEDELSESYTCVITHMATGAGEGGSMRKRVYFGFGDGGDGWFVEAAEEAPARADDFLSRCCLCNKRLDGLDIYMYQGGESLLQLRVPMPPDAHGRPRRKLRIRSPQSQQLLGLAVLRAGCPSLPSVAAA

SEQ ID NO: 9680 - protein, 527 aa, Triticum aestivum
  unsure (1)..(527): unsure at all Xaa locations
  Clone ID: TRIAE-23APR03-C13523_1.p
AGEESSTSRPATPPPAAPPSLLLPSLLLAAPPLSPAAAARPTSYAPRRHPSAGTCYGASRXSNIFAAAPVTXDDCRLNHISLAGKHTTRATTKKRIKXLDMGLRLLGFIEDGGQQGDDTASENKPPWRKEGQAPRRGRRVGGGLVGGGDEDLLGSALAERLPYQGARRXDGPVEYRRIRATRVPRASASAVAFGLGLLSGKGKLGAGNNRAFSVLSESRASDICLRFFDSCKTYKDYRKRKEPDVDKQKEPILXEHVTSALVXRYHLKFTTQDVSSLWFLCKQEASLLNITNQACQLFNEDEVHLLEWTDDLEGFVLKGYGESINYKMGLPLLKDVVQSMEEAIIAREEDYPDGTYEKARLRFAHAETLVPFTCLLGLFLEGSDFEKIQREEPLDLPPMPPQRRNWKGALVAPFASNNMLALYQCPGKNDGKKTSQDQKSSYFLQVLHNEAPVSMPGCSNKDLCPFEEFKEKIVKPHLKHDYNMLCKKPGVAAEEEPSSFSSKLNFFLDLLSRKGYRFKGQDVKTEL

SEQ ID NO: 9681 - protein, 362 aa, Triticum aestivum
  unsure (1)..(362): unsure at all Xaa locations
  Clone ID: TRIAE-23APR03-C1352_1.p
MAAAAASRAAGRLLSPRLLIASRHLQASASEGSARDASTSFIHPAAVVHPDAAIGQGVTIGPFCTVGASARIGDACQLHTGSHVTGHTELGEGCVVXHLPGRTIIGENNVIGNYAVVGVKCQDLKYKPGDECFLRIGNNNEIREYCSIHRSSKPCDCRAVXELLVISLCILYGVCHLXHIIGSNNIVEFANXTLFGACYKLTAHCTLWTAGFEFSLSFNSRCMDTPYRQRVTWCQSIQMKPGLYIRSFSYRFXGGSVEYVPSFLTSWMHNACSDRSEXRGLHLXLRRNGFSDQEVRSLRKAYRKVFMPASSSQSNFEDRLAELEREIELLESPSVSYMVESIRTSFDQGRRGICKFRSWNIS

SEQ ID NO: 9682 - protein, 204 aa, Triticum aestivum
  Clone ID: TRIAE-23APR03-C13559_1.p
ASPAAPSGTSEWPLPGRMIHAPAMQNANPEVRQAFHASGTVSEHALSELPYLRLVIRETLRLHPPLPLLFRECQEPCQVQGYDVQRGTQVLVNAWALGRDERYWPDAPEEFRPERFEEEAAKADFGGGDFAFLPFGAGRRMCPGMAFGLAGVELPLASMLFHFDWKPPGPGSAELDMTETFGLTARRTDQLLLRPVLRVPIPGV

SEQ ID NO: 9683 - protein, 162 aa, Triticum aestivum
  Clone ID: TRIAE-23APR03-C13574_1.p
MSKSEIANHIGHHIYRHMYSGDLPAADGGAGTSGKLAIDDITRYLLNDSQILDGGNDSTGKLAFDEMTRQLLNDSQITIAADERMLMSRVNSLCSLIHRDSGTGQVNPGVHSDNNEIYERKPQAYAPPVEGDSGNGSLPPRQEPFGDLLTHLPRISSFPHFL

SEQ ID NO: 9684 - protein, 163 aa, Triticum aestivum
  Clone ID: TRIAE-23APR03-C135761_1.p
MACVNMYNPDGGAVAFGGGQPGPRISFSSDFSMEPPPPVQNRAMGLRCQEEDQNFEFSVGSHPMMAADQLFSKGRILPFKVEGGRPPSTLRDELRGGAADEERASTTPKGSSRWREMLGLRKSLCVGGGVASNAAAAKKSDKVVAVDADAKIATDMAAPKQEL

SEQ ID NO: 9685 - protein, 136 aa, Triticum aestivum
  Clone ID: TRIAE-23APR03-C13577_1.p
FNGGAIFQIYVVFGSFHFKKKKKTTYRSGGDEETAKLLEDIIYPEEITHCAAGVRWFRYLCLRSLPMGDGLARCSLGDADEMAIIERFHSIVREHFRGPLKAPFNAEARKAAGFGPAWYEPLAVKEVETQAIEQSE

SEQ ID NO: 9686 - protein, 365 aa, Triticum aestivum
  Clone ID: TRIAE-23APR03-C135792_1.p
MERLISRTAVSPAQPRIHLPGRSPFLTTRRAASASAGAGSAAPWTRLCAQPPRLGAAVAAAARHDGASAPAPVEEVAAAAAAGPPWKLLGSLLPKASTAALVLLMTLTASALHSSIPHPAYASAQPVIKSGGLLSAELLSSGWAGFFAGCLHTLSGPDHLVALAPLSIGRSRLESGLVGALWGCGHDAGQIIFGLLFLLLKDRLHIEVLRIWGTRVVGLTLLMIGATGIREASEVQESGLILEGVDMSGSEPLQQAPAVAPRKKKVGFTTFATGVVHGLQPDALLMVLPALALPSRFAGAAYLGMFLVGTVFSMGSYTAFVGSCSEALKDRIPKITEKLTWAASLVAVCLGLALLVGQFFGFTLY

SEQ ID NO: 9687 - protein, 242 aa, Triticum aestivum
  Clone ID: TRIAE-23APR03-C135856_1.p
MGGGAARRVLEAWKLGVVKYGDALRLQERLVADRRAGRVPDLVLSLQHPPTYTLGKRRTDHNLLVPESSLAGIGAELYRTERGGDVTFHGPRQAVLYPILSLRDIGLGARRYVEGLESAMIEVASLYGVKARPGGACETGVWVGDRKIGTIGVRISSGFTCHGLAFNIDPDLGYFKHIVPCGIADKEVTSLRREAAVELPPDEVIHDQLVQSLAATFRFGDVKVKDDSECANMISSAATGQH

SEQ ID NO: 9688 - protein, 317 aa, Triticum aestivum
  unsure (1)..(317): unsure at all Xaa locations
  Clone ID: TRIAE-23APR03-C135_1.p
MLVRSASTPVLGTLHAASGTGGHSPAVHFAESSPTVAYHPPAISCSLSAGGGGGSGSDHDRSRGGGLRRACSDGNLAALGGPADDHHHHLPPRSRPALETIQSFTARDGARDEEEEEDDDADQETSFGQFGFGSTYAQEHPLFLARGLGIDRLGSGLLSADCGGGIDGGAGGSYLAASGGGGGDRSGIEIHYKRLIGEDPCNGLFLRNYAQFLNPVKGDRRRAEEYYSRAILADPDDXGELLSEYARLVWEVHGDEERASSYFDRAARADPHNSHVLAAQAAFLWDTDDRRRARGRRCHELHRVPGRSRVHGFRQAL

SEQ ID NO: 9689 - protein, 319 aa, Triticum aestivum
  unsure (1)..(319): unsure at all Xaa locations
  Clone ID: TRIAE-23APR03-C136025_1.p
KGRXRRGVGWPPFHSTHAPLISIPPSHPSPCLPTSSLSPSSTPPVVPLLPSAVHSPDAMTEDAEGCVAVAVAEAAGIICSLRAADLAGWTPPWKASGPPSSEAAAKEETAWPAVARGKRTRASRSGSAANKNKGRWARGSPASPLDYSGGSGSGASTSGGEDGAFCSPPATVALARGHAVVTPTAAALLLLLLHVGSAGGARRPLILPVPPLPRIAGQRSGKKMRLPEVKQLVLSLSAENVGLRQEMESLQRACTGLSKENGRLETRLEHSSSSSKRKRTGCEEEERRQRKPQQAGGGFELPDLNIPAQDVADAPAAVP

SEQ ID NO: 9690 - protein, 485 aa, Triticum aestivum
  unsure (1)..(485): unsure at all Xaa locations
  Clone ID: TRIAE-23APR03-C1362_1.p
MGKAAGVGAAVGVGAGVGAAVVLGRRRRRGELDRRGAAEDEKKLGAAAVDGDVKLAPATATVLRRGVSHAVVLESDRGARGHIQSQVLIGNIHSHLIPTGXEYGMFYALELMACVLHVFGWGPSRRVWGSCWRERTYVAPTNNCSSSSPYDRSGLVVLVRDEDGDXGLSEHGRRLLALDLVAGAASLAVLEDGEVAAGDHAVVGSQVHVLDPARAAVVFGAGAGGLAXTGGPAAIILGTGTNAAYVEHANAIPKWTGLLPKSGNMVINTXWGSFKSDKLPLSEYDKALDFESLNPGEQIYEKLISGMYLGEIVRRILLKLAHDAALFGXDVVPAKLEMPFVLRTPDMSAMHHDASHDLKILGSKLKDIVGVADTSLEVRYITRHICDIVAERGARLAAAGIYGILKKLGRDKVPRDGSPMPRTVVALDGGLYEHYKKFSSCLEATLSDLLGDEASSSLVAKLANDGSGIGAALLAASHSQYADIY

SEQ ID NO: 9691 - protein, 363 aa, Triticum aestivum
  Clone ID: TRIAE-23APR03-C136339_1.p
MWWRAVARARRRIPGARPVSTAAAGKSGREVVVPRFGGPEVLQLRQGVPAPDLKPGEVLVRARAVSINPLDLRMRAGYGRCIFEPLLPLIIGRDISGEVAATGTSVSSFYIGQEVFGALHPTAIRGTCADYAVLSQDELTSKPSTLTHVEASAIPFAALTAWRALYGTAGISKGQRLLVLGGGGAVGLSAVQLAVAAGCSVSATCGAQSIEQVLAAGAEKAIDYATEDTESTVTGKFDAVLDTIGVAETERIGINLLRRGGHYMTLQGEAASLADRYGLYVGLPAATATLLKKQMQYRCSHGIEYWWTYMRADPDGLHEIQRLSGAGKLQIPVEKTFPISQVREAHEAKEKRLVPGKVVLEFD

SEQ ID NO: 9692 - protein, 290 aa, Triticum aestivum
  Clone ID: TRIAE-23APR03-C13669_1.p
MGASGGGEDKPFNFLQILCEGVIAGGAAGVVVETALYPIDTIKTRLQAARAGSQIQWKGLYSGLGGNLVGVLPASALFVGIYEPTKRKLLDMFPENLSAVAHLTAGAVGGLGASLIRVPTEVVKQRMQTGQFRTAPDAVRLIVAKEGFRGLFAGYGSFLLRDLPFDAIQFCIYEQLRIGYKLMAKRELKDPENALIGAFAGAITGAITTPLDVLKTRLMIQGQTKQYSGIVSCAKTILREEGPGAFLKGIEPRVLWIGIGGSIFFGVLEKTKSVLAERSSRKAALAEKDE

SEQ ID NO: 9693 - protein, 221 aa, Triticum aestivum
  unsure (1)..(221): unsure at all Xaa locations
  Clone ID: TRIAE-23APR03-C137109_1.p
MSDNSIQRALLPENPDANVLQRKPSQGAKRFRRCRSAPRSETDEKPQENGSSLPAKELFSVVRPSFRLVGFLLFLYLLVGVVVFYLVMDQLSGKXRTNRVLDALVLLHCHDDIGGLWRPCSXQRRVLDALYFCIVTMTSVGYGDLVPNTDTTKLLACVFVFTGMAIIALFVSKSADYLVEKQEVLFFKALHMNMKCGEAKMLRQIETNKTKYKFYTAALLL

SEQ ID NO: 9694 - protein, 90 aa, Triticum aestivum
  Clone ID: TRIAE-23APR03-C137701_2.p
MASTCFRAAARAATAACRSAASRSMPSVGRSAARRAPLISRAPLELGCCAVMSLLPLHSAVAAARLTSRLSTASRSSSALSQEMGLSAPR

SEQ ID NO: 9695 - protein, 167 aa, Triticum aestivum
  Clone ID: TRIAE-23APR03-C137729_1.p
IDITHSGSGVSKDVARRGQTSATGKRQLRVLSQRRLITEIQKDNALLRAKQFKSKNPFGLQIMKESYVYVGFFLNLPCEFVRECLPRAHRKLKLWNPQGKSWDVNYVYYSERCGGGLSGGWGKFSLDNNLEKFDVCVFELFSKDNIKVHIYRVVPEITPFLPGPGKK

SEQ ID NO: 9696 - protein, 453 aa, Triticum aestivum
  Clone ID: TRIAE-23APR03-C13788_1.p
MHAMAEPGGALDPPPPPSPAAPTPPVQWPKDGSLDPPPSPSPVAQPPPVEWPEDGVLTRDWVASFTAALDWCSRSIPPDQLPSVLSADFVRRLVVAAAVILHREPNIVRVDPRPDQSVVVVGDVHGQLHDVMFLLRDAGFPSEERIFVFNGDYVDRGAWGLETLLLLLAWKVFLPNCVFLLRGNHESKYCTSVYGFEQEVMVKYKGQGTQVYRKFLRCFEDLPLASIIAGCVYTAHGGIFRGAVVLPLKRSKRAKKGHKYKAGPTDDSTTLKLGSLDELLKARRTVLDTPYEGSNLIPGDVLWSDPSLDKGLSLNNERGIGLLWGLDITQQFLYTNNLKLIIRSHEGPDARDKRHDLLAMDSGYTIDHHVACGKLITLFSAPDYPQFQASVDRYNNSGAYIVLSPPDFATPDFHTFQAVKPRPKAHPYYDFEDVIDSDEELNLGAMDTGTSSS

SEQ ID NO: 9697 - protein, 360 aa, Triticum aestivum
  Clone ID: TRIAE-23APR03-C137971_1.p
MVCIGRLRALVLRAAAGAGAGRRRWARVLCGRAVDVCVTPRPRGHGWRGFRAVAGARTKMMLDSSDSDSGAPAGQLQLQRRAVAAGTQPQDGGYASAGWQREDGKLKCGYSSFRGKRATMEDFYDVKLTEIDGHAVSLFGVFDGHGGSRAAEYLKEHLFENLMKHPKFLTDTKLAISETYQKTDADFLESESSAFRDDGSTASTAVLVGGHLYVANVGDSRAVISKAGKARALSVDHKPNRSDERKRIENAGGVVIWAGTWRVGGVLAMSRAFGNRLLKPFVVAEPEIQEELINGELESLVLASDGLWDAVENEEAVSLAKTEDVPESAARKLTEIAYSRGSADNITCIVVQFHHDKITG

SEQ ID NO: 9698 - protein, 178 aa, Triticum aestivum
  Clone ID: TRIAE-23APR03-C1379_2.p
MAWSAAAAVSRFAASPAAEIRLPFSAAAAASVSFAGRRRFGPVAASLATSATVQKEAVQTEKAPAALGPYSQAIKANNLVFVSGVLGLNPETGKFVSESVEEQTEQVMKNMGEILKASGASYSSVVKTTIMLADLQDFKNVNEIYAKYFPAPAPARSTYQVAALPLNARIEIECIAAL

SEQ ID NO: 9699 - protein, 612 aa, Triticum aestivum
  unsure (1)..(612): unsure at all Xaa locations
  Clone ID: TRIAE-23APR03-C1384_1.p
MENLIALVNKLQRACTALGDPGGESAVPTLWDSLPSIGRRRRREVRAYIRMLKSVVGNVFXLPRGSCIVTRRPLVXLQLHRIDGDREYAEFLHVPRKRFTDFAXVRKEIADETDRQTGHGKGISSVPIHLSMFSPNIVNVSLIDLPGLTKVAVEGQPESIVQEIENMVRAFIEKPNCIILAVSPANQDLATSDAIKISREVDPKGERTFGVLTKIDLMDKGTDAVDILEGRAYRLQFPWIGVVNRSQQDINKSVDMIAARRRERDYFANTPEYKHLAHRMGSEHLAKSLSKHLESVIKSRIPGLQSLITKTVAELETELTRLGKPIANDAGGKLYTIMEICRMFDGIYKEHLDGVRPGGEKIYHVFDNQFPVAIKRLQFDKQLSMENVRKLITEADGYQPHLIAPEQGYRRLIESCLVSIRGPAEAAVDTVHGILKELVHKAINETHELKQFPTLRVEVGNAAFESLERMRDESKKNTLKLVDMETSYLTVDFFRKLPQDVEKGGNPSHSIFDRYNDSYLRRIGTTVLAYVNMVSSTLRNSIPKSIVYCQVREAKRSLLDHFFTELGAREIRQLSKLLDEDPAVMERRTNLAKRLELYRSAQAEIDAVAWSK

SEQ ID NO: 9700 - protein, 281 aa, Triticum aestivum
  Clone ID: TRIAE-23APR03-C139357_2.p
MASLLRTAAALAPPPSSARETRRPSCAASLACSRRAPASPLRAPPLPGPWRLGPDEAARTATQFLCRYMRRDGHEGDGRTQGQDEPSMFGPDDDDGAKIPTQVETLVRGTAIVDAPEYKPLPDLDYLQELLAIQQQGPRSIGFFGTRNMGYMHQQLIEILSYAMVITKNHIFTSGASGTNAAVIRGALRAEKPELLTVILPQSLKKQPPESQELLSKVQNLIEKPQYDHLPLIEASRLCNMDIISKVQQVICFAFHDSRLLMETCQEAKNMRKIVTLFYLD

SEQ ID NO: 9701 - protein, 364 aa, Triticum aestivum
  Clone ID: TRIAE-23APR03-C14024_1.p
MAAALVARVATALVAGALRRGRSGARGAAERTLRRLVSTLVVAEHEGGLVKPSSLSALAAAEAIAKENKVCLLIGGSGPTLLTTAEQVGSSQPIVTDVLVVDSGVFAHPLAEPWAELLPSVQQKGGYSHVIASSTSFGKNLLPRAAALLDVSPVTDVTAISEPRVFVRPIYAGNALCTVRYTGESPCMMSIRSTSFSPATESVSETKVAPITQVDLSFLSEASSRKSSWVNLTSQDTERPDLANARVVITGGRGLKSAENFKLLEQLAEKLGAAVGATRAAVDAGYVPNELQVGQTGKIVAPELYIAFGVSGAIQHLAGMRDSKYIVAVNKDADAPIFQVADYGIVGDLFQVLEELLEKIPDKK

SEQ ID NO: 9702 - protein, 273 aa, Triticum aestivum
  Clone ID: TRIAE-23APR03-C14096_2.p
MASALCGGGGSVAAPCGDLGAAAALAESLPMGAGYRSKSSFPAGRVALADRPLPRSLQAAAAAGQMNGNLTIGKAMRWWEKVTHPNMREVESAQDLAYSLLNAGDKLVVVDFFSPGCGGCRALHPKIAQFAERNPDVLFLQVNYEKHKSMCYSLHVHVLPFFRFYRGAQGRVSSFSCTNATIKKFKDALAKHSPDRCSLGPARGLEEAELLALAANRDLEFTYNNEKPTLVPIAEAIQMEAASIGGPWMPLPAAATQPLALGSENGSLIPSGR

SEQ ID NO: 9703 - protein, 121 aa, Triticum aestivum
  unsure (1)..(121): unsure at all Xaa locations
  Clone ID: TRIAE-23APR03-C14124_5.p
QEHKFQLQVSSSADTKATEETLKQTISRDPTNVSFSLCFFHFSTWFSGTLNTLRQLFHFAPKKHRSTLFIFXGRTKKKYSSSDSQFTAGYVLXXDSANFXLLSRLFPFFLYQPIALQYPVQ

SEQ ID NO: 9704 - protein, 326 aa, Triticum aestivum
  unsure (1)..(326): unsure at all Xaa locations
  Clone ID: TRIAE-23APR03-C141294_1.p
MQKPGKLALPQGRSTIRQFVPESGTSTDGDLVDNTAVLRIGSQCEEGEAPTXKPFHDIGQLNIDYLVFSSXKVVQVNIQDSIRKQMAQELKISLFTQCQYVVTCYQCFYVNGVISIALEYMDGGSLADFPQAVRTVPEAYLAAICKQVLKGLMYLHHEKRVIHRDLKPSNILINHRGEVKISDFGVSAIISSSSAQRDTFTGTFNYMAPERISGQKHGHLSDIWSLGLVMLECATGNFPYPPRESFYELLEAVVDQPSPSAPSDQFSPEFCSFISACIQKNAADRSSAQTLSAHPFLSMYDDLNIDLSDYFTTAGSPLATFKQIAL

SEQ ID NO: 9705 - protein, 374 aa, Triticum aestivum
  unsure (1)..(374): unsure at all Xaa locations
  Clone ID: TRIAE-23APR03-C14131_1.p
MRPSAAATAAFLAPAVTASSRLVPLRRARRFAVRCVAAPPASKPAYSPSKTGNWQWTFEDKPVSVYYEEHEQGTAENVKNILMIPTISDVSTVEEWRVVAKDIVTRKGELSYRATIVDWPGLGYSDRPSLNYNADVMENFLVQLLNSPNSPVADADGELVVVGGGHAATIAIRAAGKGLIRPSAVAAVAPTWAGPLPIVFGRGSDMETRYGLLRGTLRAPAIGWMMYNVLVSNEKSIQSSAKSXQEKAHADADPENGAPQLGESRNERRERQRGRDVPAAFLTGPVDPVQSXREEFLQLCDEFVGVVPMLSGCATLNAPKRSKADIGGSQGRQGRDRSAWAARGGPFRQAQEPLEDFLEGYDSLRETFRMRTCI

SEQ ID NO: 9706 - protein, 386 aa, Triticum aestivum
  Clone ID: TRIAE-23APR03-C141871_1.p
MAAATATATVQAQPGLDAREWDEAAYRRGILRERDLSCRTLFRAVFYDQRDEPDPDVLLAAASSDGSLASFSLSSCIASSASAHAAPQLAAAALVDPVCIVQAHSGPVYDAKFYNDPIQPLLFSCGDDGHIRGWRWHEMQSCLLPLSLQGDHVEPILDLVNPQHEGPWGARSPIPENNAIAISKQDGSLFAAAGDACAYCWDVESGKCKMTFKGHTDYLHSIAVREANHQVVTGSEDGTARIWDCRSGKCTQTIRPVQNKKFEGSWVGCIAIDASESWLACGTSCGISVWSLLSNECIFNADCGAPVQDLLFDKNQILAVGAEPALSRFTINGVVVSQIKCAPPSAFSVSMHSSGMAAVAGHGGLVDVISGFGSHLCAFRCRGLDR

SEQ ID NO: 9707 - protein, 351 aa, Triticum aestivum
  Clone ID: TRIAE-23APR03-C1425_1.p
MQGGSSGIVYGGLKYQARCITDVRADAGSTTFLAGTLSLKEENEVHLIRLLPGENELVCDGLFYHPNEIWDLKSCPFDHRLFSTVYTSGEGYGASVWKIPELYGQSNSPQLEQLFTLDDHTDKIRCVLWWPLGKHDKLISIDDRNIFLWNIDPSNKSAKVISQGSADMLPNLRGGAWDPHNHNAVATITDSSLHFWDLRSMKRSNAIEHAHIRDVDYNPKKQNIIATAEDEFGIRLWDLRMLKHPLKDLPGHSHWTWAVRHNPEYDELILSAGTDSAVNLWLAKVGTDDSGPESPSGSPTRQEEPLLHSYTDYEDSIYGIAWSSHDPSLFASLSYDGRVVLESVKPHLQRK

SEQ ID NO: 9708 - protein, 590 aa, Triticum aestivum
  unsure (1)..(590): unsure at all Xaa locations
  Clone ID: TRIAE-23APR03-C143040_1.p
GKRPRLGSTSRNSSSLPRPPLPAAAIGAALLCAVPPAAVAFAAALSAAVAFGPPDAIRRPVVVREAVSWFAGAWVGASFAAASAASSPAGGVALAVGVQVRVRARALLVALAVWVAMSVCLVVEALYDCVVCPGAWSVGWRPEWRFKWEPLAGDDEEKGGPHYPXVLVQIPVXGAAGELQWPKDRIIVQVLDDSTDPFIKNLVELECESWAVKGLNIKYATRSSRKGFKAGALKKGMECDYAKQCEYVAIFDADFQPEPDFLLRTVPFFVHNPEVALVQARWSFVNDTASLLTRVQKMFFDYHFKVEQEAGSATFSFFSFNGTAGVWRTAAIKEAGGWKDRTTVEDMDLAVRATLKGWKFVYVGDIRVKSELPSTYKAXGRQQFRWSCGGAHLFRKVAKDILTAKDVSLIKKFHMLYSFFLVRRVVAPTVACILYNIILPISVMIPELFLPVWGIAYIPTVLLVVTAIRHPKNLHILPFWILFESVMTMHRMRAALSGLFELSEFNEWVVTKKTGNNFEDNEVPLLQKPRKRLRDRVNFREIVFSAFLFFCASYNLVFPGKTRYYFNLYLQGLAFVCLGLNFTGTCSCCQ

SEQ ID NO: 9709 - protein, 325 aa, Triticum aestivum
  unsure (1)..(325): unsure at all Xaa locations
  Clone ID: TRIAE-23APR03-C1432_1.p
MAESFDKMKVEFTGHDESVQAHAATAHDSGDVPGGYFRPVIEGDPPAADAGGHALPTIDMSRLLDPEFSVEESAKLGSACEHWGFFQLVNHAVDGGLLGQTKADVAEFFGLPLEXRPWRYAQERSLDFWPTKPSTFRDTLDKYTTELASVAEQLFRFMAKDLGXVDQEALLGTFKGLPQCVRINYYPPCRQAGKVLGLSPHTDGVGMTLLLHANDVQGLQIRKDGEWFSVHALPGALVVNIGDVLEILSNGNNGKYRSIEPRAVVNPDKERIAIAAFHSVHLPCTIGPFQELGDARYKTVDGLDFTKGYFAAKLEGRRYLESLKL

SEQ ID NO: 9710 - protein, 156 aa, Triticum aestivum
  unsure (1)..(156): unsure at all Xaa locations
  Clone ID: TRIAE-23APR03-C144422_1.p
MRRWCCSSAGGLARRFLSSPIVVHARPPVPSXPLPPRPLPHPRASPHHGLAVPLGGSCCDRPASXMAMQLRHYAIKGRSRAPTTPTISKVKKYKMKAPSSMKFRFRTMKDGQIRRWRAGKRHNAHQKSKEAKRRLRKPALVHLAYAKVIKKLNFCG

SEQ ID NO: 9711 - protein, 194 aa, Triticum aestivum
  Clone ID: TRIAE-23APR03-C1459_1.p
MATAPAPTAAAPAPAAAAAAAPSASVPRGQVDLVDFIDWTGVECLNQDPAHGIANALKQGYREDEGLHLASDSDEQLLIYIPFMQVIKLHSALFKGPEEEGPKTVKLFSNREHMGFSNVNDFPPSDSVDLSSSHLLESKPVTLKYVKFQNVRSLTMFIEDNQSGADITKIQKIALYGTTVDTTNMKDLKKIEEH

SEQ ID NO: 9712 - protein, 240 aa, Triticum aestivum
  Clone ID: TRIAE-23APR03-C14689_1.p
MSTDAAAADIPVPQVEATADPVAETTAAAAAGDAKPAKATKAKAAKTPKAPKAKKPSAPRKPKATPAHPTYAEMVSEAITTLKERGGSSTVAIGKFIEDKHKAHLPANFRKIMLTQIKKLVAAGKLTKVKASYKLAKAPAAPKKPKTKVPAKKKPAAKKKAPAKKPAAKSPAKKKAAAKPKAKAPAKTKAAAKPKAAAKPKAAAKAKAPAKTTKAAAKPKPAAKTKAPAQPRGRPAKVAK

SEQ ID NO: 9713 - protein, 564 aa, Triticum aestivum
  Clone ID: TRIAE-23APR03-C1471_1.p
MSQSSPFFSIAPAHAGAGGQAAAAALLLRCPAAQLPPAIHCFRLAKVSPAKTLSSHLVLPRATLSSFANADDGSGANSDASGEQSGGSELSEMAKAFHISPRMAMSISVVIAFAALTVPLAMRSLLFHGTTKMKVLAYLTLLSGFYMAWNIGANDVANAMGTSVGSGALTLRQAVLTAAVLEFSGAFLMGTHVTSTMQKGILVTSVFQGNDSLLFAGLLSSLAAAGTWLQVASSYGWPVSTTHCIVGAMVGFGLVYGGVNAVFWSSLARVSSSWLISPLMGAAVSFLVYKCIRRFVYSAPNPGQAAAASAPIAVFTGVTAISFAAFPLSKTFSIAVLQALVCGAIGAVFVSRAIKKQLGDLLSSEAEKIATADNTDVQQGGFDVAGPRGAQLQIVYGVFGYMQVLSACFMSFAHGGNDVSNAIGPLAAALSLLQGVASSAEIVIPTEVLAWGGFGIVAGLTMWGYRVIATIGKKITELTPTRGFAAEFAAASVVLFASKLGLPISATHTLVGAVMGVGFARGLNRVRAETVREIVVSWVVTIPVGALLSVIYTLILTKILKYFM

SEQ ID NO: 9714 - protein, 361 aa, Triticum aestivum
  Clone ID: TRIAE-23APR03-C14763_1.p
MAAGPTPSTAASFRPPLPPPPPCFDYRSASLADTRASAAAADPALAGLVESGALVRVPRRRFGPVPAWRPPDFAEPEDVWILGTSHLSAESADEVERVLRAVRPDNVVVELCRSRAGIMYASDDASGEPLLKSNMFSLGGAKFFGAVNRSINLGGQSALALRLLLAVFSSKISSGANRPFGEEFRAARRVSEDIGAQLVLGDRPIEITLERALKSLSWDEKTKLVISLFRGITSTTDMPQDEKAAVSPYELYEKLSSSYPSLLQPLVHERDMFMAWSLKRSKAVNKSKTVVGVIGKGHMNGVVYALISDQGDLRFRDLVGRESSETWASSVVKGLVRDTVIGLALWALYELLQAAAVHIKL

SEQ ID NO: 9715 - protein, 210 aa, Triticum aestivum
  Clone ID: TRIAE-23APR03-C147_22.p
MAKSFLAMKTGPAAGASEASQALLESDLRELTMAARKLANHAIVLGGGIGFIGTFLQWLAFAAAVYLLVLDKTNWKTNMLTGLLVPYIFFTMPGLLFGFIRGEIGSWVAFVFVVLRLFFPRHFPDWLELPGSLILLTVVAPAIFADTFRGSWLIIGVGVCLVIGCYLLHEHIKASGGLKEAFQKPNGWSNTIGILLLFIYPVWAVVMWFL

SEQ ID NO: 9716 - protein, 253 aa, Triticum aestivum
  unsure (1)..(253): unsure at all Xaa locations
  Clone ID: TRIAE-23APR03-C147_23.p
MDGGDTHRTPEDVFRDFRARRAGMIKALTTDVEKFYQQCDPEKENLCLYGLPNETWEVNLPAEEVPPELPEPALGINFARDGMDEKDWLSLVAVXDAWLLAVAFYFGARFGFDKESRKRLFSMINNLPTIYEVVTGTAKKQVKEKHPKSSSKISKSGTKPSRQPEPNSRGPKMPPPPKDEDDSGGEEEEGEEHEKALCGACNDNYGQDEFWICCDACETWFHGKCVKITPAKAEHIKHYKCPNCSSSSKRARA

SEQ ID NO: 9717 - protein, 254 aa, Triticum aestivum
  Clone ID: TRIAE-23APR03-C14852_1.p
TCSPIRVSLTNWSPLQLGRPHVPGLSRIERNWEVDEPLIRRRLSELKYPKDPLWLAVFPEGTDYTEKKCIKSQEYAAEHGLPILKNVLLPKIKGFNCCLQELRSNLDAVYDITIAYKHRLPTFMDNVYGVDPSEVHIHTKIIQVSDIPTAEDEVSSWLTERFRLKDELLSDFLTQGHFPNEGTEEDLSTLKCVANFVAVIGMTAFFIYLTLFSSVWFRVFAACSASFLTYATLYSVHAPQIVCLPEAGAHAKKA

SEQ ID NO: 9718 - protein, 404 aa, Triticum aestivum
  Clone ID: TRIAE-23APR03-C14915_1.p
HSFIHPWLPSSPPATLPTRPSYSSPPTPPPPHVSASVASVSRCSAAPLFASCHASHASLLLLSPNPAAAARLRVGGLRVRRPRRLRLPVRTAAGGSPLDAEIPDPTVDDDEWGREPPASAPGCSRPGVTDEWGEPGVAEPEQPSGADTPTNDDEWGGEPTPTPPKAKEAPVTKEDEGREELKRCLVDTVYGSGLGLKASSEVRGEVVELVAQLEAANPTSAPVQAPELDGNWILLYTAYSELLPILLAGATPFTRVDKISQEIDSRIMTIINASTISTPFASFSFSATASFEVQTPSRIEVQFKEGSFQPPEISSSVNLPEQIAIFGQKFSLGTVKELLEPLQRAFASIAGSISGQPPLKVPIPGDNKAKSWLLTTYLDKDLRISKGDGGGVFILAKEGSPLLD

SEQ ID NO: 9719 - protein, 383 aa, Triticum aestivum
  unsure (1)..(383): unsure at all Xaa locations
  Clone ID: TRIAE-23APR03-C15163_1.p
MAAQAIHQFAECITCHAWSPDHSMIAFCPNTTEVHIYKFFTDKWEKLHVLAKHDQIVSGIDWSRSSNKIVTVSHDRNSYVWTQEGQDWVPTLVILKLNRAALCVQWSPKENKFAVGSGAKSVSICYYEQENNWWISKVIRKKHESSVTSVAWHPNNIHLATTSYXDVNCRVFSTIIKGVDTRGTSSWGPQAGASVDWKFGEQIAQLDLSPTWAFGVRWSPSGKTLAYAGHSSMIYFVDDVEGSPAAQNLALRDLPLRDVDXLFVSEKMAIGVGFDCNPLIFAADETGLWSFVRYLDERKVTPSTSKASQLPEALGKLYGQSRQGSSSDTVEPSKPRGGAHENCITCIVPLRKGSESIVKRFSTSGLDGKIVVWDLENHITIPK

SEQ ID NO: 9720 - protein, 159 aa, Triticum aestivum
  Clone ID: TRIAE-23APR03-C1523_2.p
MGRRFPAAALAAAVRPYVRFSPAASKAAKPPTAPLDTPRNAGPGAAAGASSGRAEVRDVAAACGMQEDDRVPLAEVVLDCTKRWFQDTLKEARAGDAAMQVLVGQMYRSGYGVNKNEHKSRIWMEKASRYRSTVWKVSHKRPGYNASDSDSDDVKETGK

SEQ ID NO: 9721 - protein, 465 aa, Triticum aestivum
  unsure (1)..(465): unsure at all Xaa locations
  Clone ID: TRIAE-23APR03-C15305_1.p
MAAPPTASASGSAAAAAAAPSAANDGRTLSVVTKRLRARRRKQNRIAQMEEAVAAGKTXLNQEQKEVMRSKPTLAAXVDELERRRAPLAVAVARGRSPSPPAPAXPRSRTGSDSSIPDLLXLVYFGALLRRSSRKSDFIATMVAREHERSSCITYDCVGDGTVDLLLGGDRDLVSAVAALAAARPGSAVGVSHRDPLQACAHHARLWLARADEPIHPGSSVTYAAVRAKLDRIMASDYYTAAAVGGGSYGAEGVQAQESMTASPEASAVEENLAAEGHKEEKEDSHATEIYNDHQSDSADVQNVDREAPVNPPEEYPSVQAEQEKFDMEEQDERDAEPKEQQFQHPRRSHQNQRGGGRGRRGAYPNGRGGRGGGRGMGGGYQNGRGYQGGGGGYQGGGGEYQNGRGGGGGYYNNNNEEGYYQPRNFNTRGRGGRSGGGNSHYSNQGGGGAQGGGHAYAERVEANA

SEQ ID NO: 9722 - protein, 336 aa, Triticum aestivum
  Clone ID: TRIAE-23APR03-C153_4.p
PETAAPWPASCTRSRRSSTWAAAATSTRRTRSTRRRTGSTRRTASAKTVQGNRKVVFGLRDAFVKLEKGLELSGVKISEPEFQGTQVPMVAVVENGMDLDEAKVEKKRKKKKAKRAALVEGGEEEEVKALKQEKKVKKDKNKKEKKEKKKKNKVEDSDGGDSSEQSIDATSEDQQMGDDTDAITFDEALMSNLQKQFEKAAAEAGMPVTPVTAKVAKKRKRSKSSDRSSEVSGGVGSEGNVPAQDGDKSGKKVRFSMKSNLVWNPPTPLPPQCLRLPPSATPRGSALKSGVRPGPIKESSTPVKKAKAKAKSAKKLLKKSPSSAVKRLRKLQTFSA

SEQ ID NO: 9723 - protein, 188 aa, Triticum aestivum
  Clone ID: TRIAE-23APR03-C1541_3.p
MAARALGLAGRALLRPVASPGTQRLLSTDKNSLQGLTNGDPVSRLMQTRKQNDSIYRRFAENDFTGGGSRSGRLNMEITWTAALRVKIDVLRITPKEKKTFVTVKDVKENRKARASAGCLEDRKGRSRLARYAGEATGEHMGRSASKIGLKSIVVKVKGSSFFRKKKKVLLSFAAGSRGARVRSPSPK

SEQ ID NO: 9724 - protein, 294 aa, Triticum aestivum
  Clone ID: TRIAE-23APR03-C15499_1.p
MVTDAAALAVVKAARPVFRGAHDGVAFAANAAFLAAGYSLCAVGPAALADPLPAVDEEVGIDGWNTMDNCYAFLYSKEEEGKKKRILVKCLVIDDFLAIDALDLEAQHKEPCNVQINVKDFFSEEQPKNYKDMYKNFAGFINTLNSSLLVELDGKNAAAAAAQKPDLEGSSSINSSENVLPDTRTTEPAGLIYPPVAPFGHDDTFPAPGAGFYPHSGGPGGSMHVGPNDPRFFPSNPFPAPFGGPGSVPPGVRYDPIGPPDVPGFEPSRFVRRSRHPGGSTHPDLEFFQQGPDF

SEQ ID NO: 9725 - protein, 430 aa, Triticum aestivum
  Clone ID: TRIAE-23APR03-C15513_1.p
MASSILSDCSSLLSSHLDTTFSPDRSFCAAATAASAKTSPPLPPPSPPQLRTPRIRAAMASSILSDCSSCATSRLLPLRRALHPPPPRFRPSPAPAPLPRRPLLAAAASLPLLPRARRMAALAAASSADSATVLADASAKIIDGKLVAKQIREEVGVEIARMKDTIGVVPGLAVILVGSRKDSQTYVRNKKKACDAVGIKSYEVNLPEDASEYEVIKHIATFNDDPSVHGILVQLPLPRHMNDENILNAVSIEKDVDGFHPVNIGRLAMQGRDPFFVPCTPKGCMELLHRSGVEIKGKRAVVIGRSNIVGTPAALLLQKANATVSIVHSKTKNPEEITRQADIIIAAVGVANLVRGSWIKPGAAIIDVGINPVDDPASPRGYRLVGDVCFEEASKVAGAITPVPGGVGPMTIAMLLSNTLDSAKRIHKFK

SEQ ID NO: 9726 - protein, 225 aa, Triticum aestivum
  unsure (1)..(225): unsure at all Xaa locations
  Clone ID: TRIAE-23APR03-C1557_1.p
VTQKQALVSVHATGPNGMQHRTARAAAGAVYRRIGGLFAARRLPRPRPVAEPKAEPLPPPVQLGEVDEEEPGSTTPRDPXKPLLMAIKGXRVYDVTQSTNVLPGPGGPYALFAGKDASXRALAKDVFAGPQDLNGDTSGLGPFELDXLQDWEYKFMXKYVKVGTIKKXLPAEDGTTSTSPETNETVTAEAETEKAPATEHKPXREVSSEEVKEKEATADAVSAES

SEQ ID NO: 9727 - protein, 398 aa, Triticum aestivum
  unsure (1)..(398): unsure at all Xaa locations
  Clone ID: TRIAE-23APR03-C15669_1.p
KKKKKKKKKKKKKKNKTSPPSQSSQPAAAPPSFQRATVYGLLSPTHHPSAWPSVSPQPPPSAPPLRPAASRSAAAPGHPALPSSPPHPRPPRLSASSASAPRRLXPSQKAKSAGRGRSVRCIAAASDAAQLKAAREDIRELLNTTHCHPILVRLGWHDSGTYDKNIKDWPERGGANGSLRFDVELKHGANAGLVNALKLVQPIKDKYPSITYADLFQLASATAIEEAGGPKIPMKYGRVDVTGPEQCPPEGKLPDAGPSAPADHLRLVFYRMGLDDKEIVALSGAHTLGRSRPERSGWGKPETKYTKNGPGAPGGQSWTAEWLKFDNSYFKEIKEKRDQDLLVLPTDAALFEDPAFKVYAEKYAADEEAFFNDYAEAHAKLSSLGAKFDPAEGFSLDD

SEQ ID NO: 9728 - protein, 561 aa, Triticum aestivum
  unsure (1)..(561): unsure at all Xaa locations
  Clone ID: TRIAE-23APR03-C156_52.p
MVGRSSLPDGALFLGLDSSTQSVKATVLSNELIIVASETVNFDSELPHYKTEGGVYRDPTDDGRIYSPTIMWVEALELLLEKLKPKINFSKVVAVXGSGQQHGSVYWKKGSQAVLSSLDPGKSLVSQLKDAFSTMDSPIWMDSSTTKQCREVENAVGGALELSKLTGSRAYERFTGPQIRKIYQTAPHIYENTERISLVSSFMASILVGCYASIDETDGAGMNLMDINKRTWSKAVLEATAPDLEQKLGNLAPACAAAGRISSYFVERHQFDKNCFVIQWSGDNPNSLAGLTLNTPGDLAISLGTSDTVFGITAEAKPSLEGHVFPNPVEPDGYMVMLCYKNGSLTREDVRNQCAEKSWDIFNNYLEKTPPLNGGRLGFYYKDHEILPPLPVGFHRYIVENFSDASSDNLKECEVQEFDPESEVRAIVEGQMLSMRGHAERFGMPNPPKRIIATGGASSNESILKLIAKIFGCPVFTVERPDSASLGAALRAAHGWLCKEEGGFVPISRMYTGNLEKTSLGAKLAVPAPGDEGRELLKKYTVLMKKRMEIERRLVEKIGRA

SEQ ID NO: 9729 - protein, 287 aa, Triticum aestivum
  Clone ID: TRIAE-23APR03-C156_54.p
MGNLCCCVQVDQSTVAIREQFGKFDSVLEPGCHCLPWIFGKRVVGHLTLRLQQLDVRCETKTKDNVFVTVVASIQYRPLAGKESDAYYKLTNTRSQIQAYVFDVIRASVPKLNLDDAFVQKNDIAMAVEDELEKAMSAYGFEIVQTLIVDIEPDAHVKQAMNEINAAARMRVAANEKAEAEKIVQIKRAEGEAEAKYLSGLGIARQRQAIVDGLRDSVLGFSVNVPGTTAKDVMDMVLITQYFDTMKEVGASSKSSAVFIPHGPGAVRDIATQIRDGLLQGQSASDN

SEQ ID NO: 9730 - protein, 562 aa, Triticum aestivum
  unsure (1)..(562): unsure at all Xaa locations
  Clone ID: TRIAE-23APR03-C156_76.p
MVGRSSLPDGALFLGLDSSTQSVKATVLSNELIIVASETVNFDSELPHYKTEGGVYRDPTDDGRIYSPTIMWVEALELLLEKLKPKINFSKVVAVSGSGQQHGSVYWKKGSQAVLSSLDPGKSLVSQLKDAFSTMDSPIWMDSSTTKQCREIENAVGGALELSKLTGSRAYERFTGPQIRKIYQTAPHIYENTERISLVSSFMASILAGCYASIDETDGAGMNLMDINQRTWSKAVLEATAPDLEQKLGNLAPAYAAAGRISSYFVERHQFDKNCLVIQWSGDNPNSLAGLTLNTPGDLAISLGTSDTVFGITAEAKPSLEGHVFPNPVEPDGYMVMLCYKNGSLTREDVRNQCAEKSWDVFNNYIGKTPPLNDGKLGFYYKDHEILPPLPVGFHRYIVKNFNDASSDNLTEHEVQEFDPRSEVRAIVEGQMLSMRGHAERFGMPNPPKRIIATGGASSNESILKLIAQIFGCPVFTVERPDSASLGXAALRAAHGWLCKEEGGFVPISRMYTGNLEKTSLGAKLAVPAPGEEGRELLKKYTLLMKKRMEIERRLVEKIGRA

SEQ ID NO: 9731 - protein, 557 aa, Triticum aestivum
  unsure (1)..(557): unsure at all Xaa locations
  Clone ID: TRIAE-23APR03-C156_83.p
MSSLRPLNTEPSFLHSQKLQSPRDACGAPLRSPSPRVVAGPPKKRMARAGGLFERSLSFKNWEAEVGADEPEAASRCINGARPGTLVLQSPGSKQQXPRGPSPSKAHFVSPRPQAELDDAATKVQKLFKGHRTRRNLADCAIVVEELWWKAYDSASLNIKSISFFDEAKQETAASRWSRAGKRIAKVGKGLSKDEKAQKLALQHWLEAIDPRHRYGHNLHLYYDIWSASSSTEPFFYWLDIGAGKDVHHQKCPRSKLYSQLIMYLGPNERARYEVIVDQGKLMYRRSGLLVETTEDSKWIFVLSTTRSLYIGQKKKGKFQHSSFLAGAATTAAGRLVAKDGILKAIWPYSGHYLPTEENFREFISFLEENNVDLANVKRCSVDDDEYPSFKKTSDEPTEMEEHDEKPTEAQHDGTLNSSQIELPEMDIIKEMVAEDNAETEAAATKMASLPSFKWATAAGARIGCVRDYPADLQSMALEHVNLSPRVVPSPSANRLPIPSPRXPSPKIRLSPRLHYMGLPTPTGRRLPIPSPEIRRQQFMGFQTPEVSLTLPKHKAK

SEQ ID NO: 9732 - protein, 766 aa, Triticum aestivum
  unsure (1)..(766): unsure at all Xaa locations
  Clone ID: TRIAE-23APR03-C156_88.p
MAILGELGTEILIPVCGVVGIVFAVAQWFIVSKVKVTPGAASAAGGGKNGYGDYLIEEEEGLNDHNVVVKCAEIQTAISEGATSFLFTMYQYVGMFMVVFAAVIFVFLGSIEGFSTKGQPCTYSTGTCKPALYTALFSTASFLLGAITSLVSGFLGMKIATYANARTTLEARKGVGKAFITAFRSGAVMGFLLSSSGLVVLYITINVFKMYYGDDWEGLFESITGYGLGGSSMALFGRVGGGIYTKAADVGADLVGKVERNIPEDDPRNPAVIADNVCDNVGDIAGMGSDLFGSYAESSCAALVVASISSFGINHDFTAMCYPLLVSSVGIIVCLLTTLFATDFFEIKAASEIEPALKKQLIISTALMTIGVAVISWLALPAKFTIFNFGAQKDVSNWGLFFCVAVGLWAGLIIGFVTEYYTSNAYSPVQDVADSCRTGAATNVIFGLALGYKSVIIPIFAIAVSIYVSFSIAAMYGIAMAALGMLSTMATGLAIDAYGPISDNAGGIAEMAGMSHRIRERTDALDAAGNTTAAIGKGFAIGSAALVSLALFGAFVSRAGVKVVDVLSPKVFIGLIVGAMLPYWFSAMTMKSVGSAALKMVEEVRRQFNTIPGLMEGTAKPDYATCVKISTDASIKEMIPPGALVMLTPLIVGTLFGVETLSGVLAGALVSGVQIAISASNTXGGAWDNAKKYIEAGNSEHARSXLGPKGSDCHKAXAVIGDTIXGDPLKDTSGPSLNILIKLMAVESLVFAPFFATYGGVLFKYI

SEQ ID NO: 9733 - protein, 294 aa, Triticum aestivum
  Clone ID: TRIAE-23APR03-C1576_3.p
MGNCRSSSHALLGKPQVVPDSEWGIQDFGKTHVPGFEWRIQDFSSLLKTGAKSTTSGAFHCSGYNWFLQVIPMHKEAGAGTPYVALRLVPSQLSLVPGHTVHAVFELSIYNHTKGMYCGCKAATYNFDFKNTYSKERCLIPLQELLKSSAFLVDDSCVFAVEILKIDVSSPEKKAVVVQKKATIVQNLFVQSKGFIKGTYTWTMNNFLELDLKHFIQSPTFEVGGQKWYIGMYPRGDKYSTDCLSLYLYPDVSDELQLESKKVAVMTLSILDQKNGKHFTRTSGSTFLSKYQCY

SEQ ID NO: 9734 - protein, 470 aa, Triticum aestivum
  Clone ID: TRIAE-23APR03-C15860_1.p
SKHRILSPPPHCRTNTPVSATPNPRPLSRNPPMAATGAAAPAPAAVQPPRQFKLDPQSELRVEVLPDATLRVRLVSGTAEIFGTELPPEGWLTIPPRSKIAIFTWHGATVELDGVSESEYTSDETPMVIYVNTHAILDARRARARAAQGGDLEASQGPRVIVVGPTDSGKSTLCKMLLSWAAKLGWKPTYVDLDIGQGSITIPGCISATPIEKPIDIVDGIPLEMPLAYFYGHPNPSINPDVYKALMRELAQTLETQFSGNAESRAAGMVINTMGWVEGLGYELLLNAIDIFKANVVLVLGQEKLWKMLKDAVQSKPNIDVVKLHKSEGVVLRNSKYRQKTRSFRIKEYFYGIANDLAPHSNVVNFSDVSVFRIGSGHQAPRSALPIGAEPVADPTRLVAVNISTDMVHTVLAVSYAKEPDEIISSNVAGFIHVTDVDIQRKKLTYIAPCPGDLPSRLLIASSLTWYEQA

SEQ ID NO: 9735 - protein, 282 aa, Triticum aestivum
  unsure (1)..(282): unsure at all Xaa locations
  Clone ID: TRIAE-23APR03-C15866_1.p
MAAPFFSTPFHPYVYQSQQGSVTAFQISGGDVQVLQVMVKPQDKLTAKPGTMCYMSGNIQMDNNYLPENDGGVWQWIFGKSITSTVFFNPGPDDGYVGISAPFPGRILPIDLANFGGELLCQADSFLCSVNDVSXTSSITVDXACIVAMTTTINFQLQNPTPHRRAVLVFGGVNQLKASLTGPGVVFIQSLPFNRLSQRIASRSVGAPSLRDNPRFFIQIVTLVLASFLIIACPSIGSGMRIASRSVGAPSLRDNPRLFIQIVRFFFLAYVMIVWSIILTDV

SEQ ID NO: 9736 - protein, 500 aa, Triticum aestivum
  Clone ID: TRIAE-23APR03-C1590_1.p
MSSSSPPHHTTAVPSRHLPPLPSGQRKQQLRAEPTMLPFLLSLLLLTGAAAGVQGHDDAAARRTMEEFAGFPASDDGEGGRASPLRVDSESLQRQIDELASFSDSPAPSVTRVLYSDKDVQARRYIKGIMKQLGLSVREDAVGNIFGRWVGSEAELGAVATGSHVDAIPFSGKYDGVVGVLGALEAISVLQRSGFQPKRSLEVIMFTSEEPTRFGISCLGSRLMAGSEELVRSLKRTVDNHNVSFVDAADSAGYKIHPDDLHNVFLNQDAYFAFIELHIEQGPILEKEGIPIGIVTAIAAPASIKVEFEGNGGHAGAVLMPARNDAGLAAAELALAVEKYVLESGSIDTVGTVGILQLHPGAINSIPSKSHLEIDVRDIDEKRRNYVIEKVHKSAIDISKIRGVELSEFKIINQDPPALSDKSVINAMEFAAKQLGLEYKLMISRAYHDSLFMARISPMGMIFIPCYKGYSHKPEEYASPEDMANGVQMLALTMAKLSLE

SEQ ID NO: 9737 - protein, 466 aa, Triticum aestivum
  unsure (1)..(466): unsure at all Xaa locations
  Clone ID: TRIAE-23APR03-C15947_1.p
MGGAEHAMDSVAVVAVPFPAQGHLNQLLHLSLQLASRGLDVHYAAAAQHIRQARTRVHGWGEEALRSIQFHDLGISSYVSPPPDPTADSPFPSHLMPLFEAYTASARAPLAALLEDLSGSCRRVVVVHDRINAFAAEEAARLPNGEAFGLNCVAVSMLVGRIDANHRLLRENGVVLSSVERYATXEFLEYASRARPAKQISTGAGILANTCRALEGDFIDVVAGHLAADGKKLFAIGPLNPLLDDSASKQSKQRHECLNWLDKAPPASVLYVSFGTTSSLRAEQIEELAAALRGSRQRXIWGVRDADRGDIFVEAGESRHEKFLSEFTKHTEGTGLVITGWAPQLDILAHSATAAFMSHCGWNSTMESMSHGKPILAWPMHCDQPWDAELVCNYLKAGILVRPWEKHSEVVTAKAIQEVIEEAMISDKGMAVRQRARALGDAVRASVADGGSSRKDLDDFTAYITR

SEQ ID NO: 9738 - protein, 272 aa, Triticum aestivum
  Clone ID: TRIAE-23APR03-C16022_2.p
MRASKRPLGVVMAWVRRQPPKVKAFLAVVTGMAALVFIRFIVHDHDNLFVAAEAVHALGIAVLIYKLTKERTCAGLSLKTQDLTALFLAVRLYCSFVMEYDIHTVLDTATLVATLFVIYMIRFKLRSTYMVDKDNFALYYVVIPCAVLALVVHPSTSHNIANRFSWAFCVYLEAVSVLPQLRLMQNTKIVEPFTAHYVFALGVARFLSCAHWVLQVLDTRGRLLTALGYGLWPSMVLLSEIVQTFILADFCYYYVKSLVGGQLVLRLPSGVV

SEQ ID NO: 9739 - protein, 518 aa, Triticum aestivum
  unsure (1)..(518): unsure at all Xaa locations
  Clone ID: TRIAE-23APR03-C16031_1.p
MGCCRSSLRAVTHPHPEKPPGAGAGAAPARRPSFSASAHQAAPAPAASASSSESEAGFAEFSLAELRAATGGFAAENIVSESGDKAPNFVYRGRPRRPPPPPPPASAVARCPGPAPPGSRRSPEGVGRLRHRRLANLIGYCCDGDERLLVAEFMPNDTLAKHVFHWENQTIEWAMRLRVAYHIAEALDYCSNEGRPLYHDLNAYRVLFDENGDPRLSCFGLMKNSRDGKSYSTNLAYTPPEYLRTGRVTPESVIFSFGTVLLDLLSGKRIPPSHALDMMRGNNIQMLMDSHLEGNYSTEEATALVDLASQCLQYEARDRPNTKKLVNILEPLQTKLEAPSYEMLGIPNHAEEVAPPPAPQPPQHPLSPMAAAXSRMDLTAIQQILVSTHYRDDEGSNELSFQEWTQQMRDMLDARKRGDLAFRDKDFKTAIECYTQFVDVGTMVSPTVYARRSLCHLMCDQPDAALRDAMQAQCVYPEWPTAFYMQAVALSKLDMQSDAKDMLSEASQLEEKKQKNSR

SEQ ID NO: 9740 - protein, 251 aa, Triticum aestivum
  Clone ID: TRIAE-23APR03-C16044_1.p
MEVLFDCVADPLEGSTSGALVDKILDKTGMKGTGKWTVQQAAELAVAAPTIAASLDGRYLSGLKDERVAAASVLEEEGMPVGLLEKINVDKKVLVDRVRQALYSSKVCSYAQGMNLLRAKSVEQGWNLNLAELSRIWKGGCIIRARFLDRIKKAYDRNPELANLIVDREFAREMVQRQGAWRWVVARAVEAGISTPGMSASLSYFDTYRCNRLPANLIQAQRDLFGAHTYERIDRPGSFHTEWTKLAREGK

SEQ ID NO: 9741 - protein, 101 aa, Triticum aestivum
  Clone ID: TRIAE-23APR03-C16154_3.p
LADINTQQHNKKCRITHLLKLLFHINIFRNSSVIFFLLDELPNLAELVLVGGELEASSSTLRSSMPAASDALLRLELDSIRFVTPRAAREFSFCSFGEILL

SEQ ID NO: 9742 - protein, 153 aa, Triticum aestivum
  Clone ID: TRIAE-23APR03-C1615_1.p
MELSGSPGTWSGLSLRLGQFLFAAASVCVMSSAIGFANYTAFCYLIASMGLQALWSLGLACLDGYALRMKKELNSAVLVSLFVVGDWVTSILSFAASCSAGSVVVLFDKDAYFCSRDPHLPCGTFELATAFAFLSWALSATSALVMFWLLASS

SEQ ID NO: 9743 - protein, 395 aa, Triticum aestivum
  unsure (1)..(395): unsure at all Xaa locations
  Clone ID: TRIAE-23APR03-C16254_1.p
PETPTKEIRWLSPALLPPSRAPPKPLASLHTSHLAPQRTASARLRLQCIKMCSAPAAPGGSKKTVWVWTENRQVMTAAVERGWNTFLFGSKEVGKDWSSTARIHPLFIDGLEIFDEGNQKVAAISEISSPSELQLIXPDNVEXENIVAAFEGCGRILQAVSTNSTEAQVFLQALEPGRVGVVRNVEDMDDIIKLKDYFDRRNEAKSQLQLTKXATVSKVEVVGVGDRVCVDLCSIMRPGEGLLVGSYARGMFLVHSECLETNYIASRPFRVNAGPVHAYVTVPGDKTSYLSELQSGREVIVVDQNGLWRTSIVRRVKIESRPLILVEAKENSGNGTYSIFLQNAETVALIGPDRGSGGRTAIPVTSLKVGDEVLVRKQGGARHTGIEIQEFIVEK

SEQ ID NO: 9744 - protein, 388 aa, Triticum aestivum
  Clone ID: TRIAE-23APR03-C16463_1.p
MTTATAIVAGHGIAFRRSLHLPNPPGKPSFSVARPHAHYRLLVPATPSPRPCRSISSQSPTAAAADTAEDEEEPAEESEGSEEELDPLAEVCYLDPDADAEGIREWEVDFCSRPILDARGKKVWELVVCDATLSLQFTRFFPNTSINSVTLRDALASVASSLGVPLPDRARFFRSQMQTIISRACNDLGVKAVPSRRCVSLLLWLEERYETVYSRHPGFQKGTKPLLTLDNPFATNLPDNLFGDKWAFVQLPFDDVREEVELLERRYAFGAGLDLDLLGFELDETTLVPGVAVESSRAKPLAAWMNGLEICSMEVDTGRANLILSAGVSTRYVYAGYQKSAATTQEAEAWEAAKKTCGGLHFLAIQENLNSDSCVGFWLLLDLPPPPV

SEQ ID NO: 9745 - protein, 194 aa, Triticum aestivum
  Clone ID: TRIAE-23APR03-C16465_1.p
HHVQGGFRLCLTTNKLQSHACVSSSGHQEGERKGQHNHLARGALPGRPRRSYGWRSRGGTAGAAPGPGTPSLVPGPSAEASAGREGSSSSTGAARQLRVGRRTINKISNLRAYDLGLNLSLPRCRESPPAQRRKEAELEAERARERGPPPTPTGAANAHDSGSGECSASGRSSPEPVGVGGGGGEGVGVPESFF

SEQ ID NO: 9746 - protein, 130 aa, Triticum aestivum
  Clone ID: TRIAE-23APR03-C16586_1.p
QRPSFISKTKVKGKQTNLWPRPKARCSQTRSNSRGYSTPQGPVDSATRRATGNPSRTPGGGIMPGVQDIQQRQNRGKVELLQHTRQLAPTNPQTCSRTQGPIDNVQGLQLQDQRTGGAAAAGPTARRVVT

SEQ ID NO: 9747 - protein, 463 aa, Triticum aestivum
  Clone ID: TRIAE-23APR03-C16697_1.p
MAVAVLLAAILALSPLPLSLASPSAAAAADRITRLPGQPPVNFSMYSGYVTVDAAAGRALFYWLVESAAAKPESAPLVLWLNGGPGCSSVGYGASEELGAFRINADGRTLSVNPYSWNKMANVLFLDAPAGVGYSYSNTSSDLLAPGDNKTAHDSYTFLVNWLERFPQYKYRDFYIAGESYGGHYVPQLSQLVYRNNKGVRKPILNFKGFMVGNAVIDDYHDFVGTFEYWWTHGLISDDTYQKLQLACEFDSSEHASDACNKIYDVAEAEEGPIDAYSIYTPTCKKTSLHRRRQIKGRRPWLPRGYDPCTEQYSTKYYNLPEVQKAFRANVTGIPYAWTGCSDVLFEYWKDSPRSMLPIYRELIAAGIRIWVFSGDADSVVPLTGTRYSIDALYLPTVTNWYPWYDEEEVAGWCQVYKGLTLVTIRGAGHEVPLHRPRQALKLFEHFLQDKPMPRPVPSIQSF

SEQ ID NO: 9748 - protein, 177 aa, Triticum aestivum
  unsure (1)..(177): unsure at all Xaa locations
  Clone ID: TRIAE-23APR03-C1686_1.p
SWRSCGVGEEHIGAHLDTLAHVVRLXRYGPPPDAETSMSLQAHRDDSIMTAIVQHGVEGLEVQAQDGIWLAVPPEPDLFTFVAGELFTVVTNGRVPGCFHRVRTPSNRERLSALFGCPGKDGVLLSAMDELVDDEHPLLYRLCTNDGYTTFRHSDEGRKASDPLKAFCGVEKDDHRS

SEQ ID NO: 9749 - protein, 377 aa, Triticum aestivum
  Clone ID: TRIAE-23APR03-C1688_1.p
MASFNAAGAGAANPNPNKSLEVRALGQYCCPWSKWLKPNVWVDSTGDCLRFVQVNPAPGDSVSSLSFSPKANHLIATSWDNQVRCWEVQPGGQCQAKASISHDQPVLCSAWKDDGTTVFSGGCDKVVKMWPLLSGGQATAFSGHEAPVKELAWIPQMSLLVSGSWDKTLRYWDIRQPNPAHVQQLPERCYALSLSYPLMAVGTADRNVVIFNLQNPQAEFKRIVSPLKFQTRCIAAFPDQQGFLVGSIEGRVGVHHVDDSNQSKNFTFKCHREGNDIFSVNSLNFHPVHHTFATAGSDGGFNFWDKDSKQRLKAFSKCPSPITCSTFNQDGSIFAYAVCYDWSKGAEKHNPSTAKTNIFLHSVQESDVKGKPRTGKK

SEQ ID NO: 9750 - protein, 296 aa, Triticum aestivum
  Clone ID: TRIAE-23APR03-C16907_1.p
MLSLRCWAPAFGIAFERAVVLRPRKFNSLVVCGARGPRPRYPRVWKTDKRIGTVSKSQKLVKCIKGLSNVKEEVYGALDSFVAWELEFPLIAVKKALKTLEDEKEWKRIIQVIKWMFNKGQGKTMGSYQTLLKVDVADGRIEEAEELFQKIFSRYMEGLPRVFFMKIISLYYRLGSYEKMFEVFADMEELGVRPDTSIVRMLGDVFMKLEMLDKYEKLNRKYPPPKFEYRYIKGKRIRIRVYPDDSTEEVTKRDSDRDELEDAGSMNLDNELKEAPRTVLDMNVLGNAASGDHEFV

SEQ ID NO: 9751 - protein, 550 aa, Triticum aestivum
  unsure (1)..(550): unsure at all Xaa locations
  Clone ID: TRIAE-23APR03-C1691_1.p
ISQNEPPTKVCSLRKSCRWLLQADARAEAITKATKQPANPSASAGRACGGRPPARNSATNHAFFGVARREEYGSRIDEVRALSGKANNGSFTANGTVAKGGQENGAVKDSSRAARAVVVDNDGKENGDPNDGAFDVNTLRKKTGGKKGGGGGKKNDVKKAAKTEPKKVVKQMRVWDDKPPKNEKLDFTDPADERGEEVIEKVLTNQGDSMMDKDEDLSSDSEDEEDEEEENAGAGQKKKGWFSSMFKSIAGNNVLEKSDLQPALKALKDRLMTKNVAEEIAEKLCESVAASLEGKKLGSFTRISSTVQTAMEEALLRILTPRRSIDILRDVQAAKERGKPYVVVFLVGVNGXVGKSTNLAKXVAYWXLLQHNLSVMMAACDTFRSGAVEQLRTHARRLQIPIFEKGYEKDPAVVAKEAIQEATRNKSDVVLVDTAGRMQDNEPLMRALSKLINLNKPDLVLFVGEALVGNDAVDQLNKFNQKLADLSTVPTARLIDGILLTKFDTIDDKVGAALSMVYISGSPVMFVGCGQSYTDLKKLNVKSIVKTLLK

SEQ ID NO: 9752 - protein, 576 aa, Triticum aestivum
  unsure (1)..(576): unsure at all Xaa locations
  Clone ID: TRIAE-23APR03-C1695_1.p
ANLPETPCYSEPPNPFGGTMARPLASHGNHVMVGSSAVIRWAQVGRFFATTLYTLGYEKRGAVLEEESGITLHSPSVNLFRKQVLDGNWDNAVATLNKLGLLDENXMKSAAFLLLEQKFFDLLRNDNLMGAIKTLQNEISPLGVNRKRVHEMSSCIISSPQNFLLAFPKLGTEASDSRLKLLEELQKVLPPAVMVPERRLENIVEQALTVQREACYLHNSIDGLSLYVDHHCGRDQIPSRTLQVLREHGDEVWFLQFSNNGKYLASSSNDKSAIIWKVDEDGELLLKHRLTGHEKPVMMVAWSPDDSQLLTCGMEEAIRRWNIESGECIHVYEKPGLGLTSCGWFPDGKQILCGLSDQSLCLWDLDGKEADCWKGQRSSKTSDFAVTKDGKFIIIMNRDSTILLFNRDTKQERLIEEDNTITSFSLSDDGDFLLVNLISEKIHLWNIRNDPSRVKQYIGHKRSRFVIRSCFGGSDQAFIASGSEDSKVYIWHRATEDVIETLSGHXGAVNCVSWNPTNPHMLASASDDHTIRIWGVKKASTKRKDIGSSSSSNGTHMNGSANGNGFVHQCNGSRSK

SEQ ID NO: 9753 - protein, 1051 aa, Triticum aestivum
  Clone ID: TRIAE-23APR03-C169_2.p
MLPRKREIVAGEVEDLQKKTRAGEGEVTREEGDAAMAGRGNEIDEDLHSRQLAVYGRETMKRLFGSNVLVSGLQGLGAEIAKNLVLAGVKSVTLHDDGNVELWDLSSNFFLSENDVGQNRAQACVQKLQELNNAVLVSALTGDLTKEHLSKFQAVVFTDISLDKAIEFDDYCHSQQPPIAFIKSEVRGLFGSVFCDFGPEFTVLDVDGEEPHTGIVASISNDNPALVSCVDDERLEFQDGDLVVFSEVHGMTELNDGKPRKVKNARPYSFFLEEDTSSFGAYVRGGIVTQVKPPKVIKFKPLKEAMSEPGEFLMSDFSKFERPPLLHLAFQALDKFRTELSRFPVAGSTDDVQRVIEYAISINDTLGDRKLEEIDKKLLHHFASGSRAVLNPMAAMFGGIVGQEVVKACSGKFHPLYQFFYFDSVESLPVDPLEPGDLKPKNSRYDAQISVFGSKLQNKLEEAKIFMVGSGALGCEFLKNLALMGISCSQNGNLTLTDDDVIEKSNLSRQFLFRDWNIGQPKSTVAATAAMVINPKLHVEALQNRASPETENVFNDAFWENLDAVVNALDNVTARMYIDSRCVYFQKPLLESGTLGAKCNTQMVIPHLTENYGASRDPPEKQAPMCTVHSFPHNIDHCLTWARSEFEGLLEKTPTEVNAFLSNPTTYISAARTAGDAQARDQLERVIECLDRDKCETFQDSITWARLKFEDYFSNRVKQLTFTFPEDSMTSSGAPFWSAPKRFPRPVEFSSSDQSQLSFILAAAILRAETFGIPIPEWAKTPNKLAAEAVDKVIVPDFQPKQGVKIVTHEKATSLSSASVDDAAVIEELIAKLEEVSKTLPSGFHMNPIQFEKDDDTNFHMDVIAGFANMRARNYSIPEVDKLKAKFIAGRIIPAIATSTAMATGLVCLELYKALAGGHKVEDYRNTFANLAIPLFSIAEPVPPKTIKHQELSWTVWDRWTVTGNITLRELLEWLKEKGLNAYSISCGTSLLYNSMFPRHKERLDRKVVDVAREVAKMEVPSYRRHLDVVVACEDDDDNDVDIPLVSVYFR

SEQ ID NO: 9754 - protein, 1053 aa, Triticum aestivum
  Clone ID: TRIAE-23APR03-C170_1.p
MLPSKRPSDAAAGDENGRGGDARGPGSGRRRARAAAGAVTAAPQEIDEDLHSRQLAVYGRETMRRLFASDVLVSGLNGLGAEIAKNLALAGVKSVTIHDVKTVKMWDLSGNFFLSEDDIGKNRAAACVAKLQELNNAVLISALTEELTTEHLSKFQAVVFTDIDLDKAYEFDDYCHNHQPPISFIKSEVCGLFGSVFCDFGPKFTVLDVDGEDPHTGIIASISNDNPALISCVDDERLEFQDGDLVVFSEVHGMTELNDGKPRKVKNARPFSFSIEEDTSNFGIYVKGGIVTQVKEPKVLCFKALRDAMTDPGEVLLSDFSKFERPPVLHLAFQALDKFKKDHGRCPAAGCEEDAHSFLKIAAAINEASADRKLDTIDEKLFRQFASGSRAVLNPMAAMFGGIVGQEVVKACSGKFHPLNQFFYFDSVESLPTYPLEPQDLKPSNNRYDAQVSVFGSKLQKKMEEANTFVVGSGALGCEFLKNLALMGVSCSSKGKLTITDDDIIEKSNLSRQFLFRDWNIGQAKSTVAATAASAINPSLHIDALQNRACPDTENVFHDTFWEGLDVVINALDNVNARMYMDMRCLYFQKPLLESGTLGAKCNIQMVIPHLTENYGASRDPPEKQAPMCTVHSFPHNIDHCLTWARSEFEGLLEKTPNEVNSFLSNPAQYAAAMRKAGDAQARELLERVSECLNKDRCSTFDDCISWARLKFEDYFSNRVKQLTFTFPEDAATSMGAPFWSAPKRFPRALQFSAADQSHLNFIMSASILRAESFGVAIPEWAKDTSKLADVVNKIAVPTFEPKQGVNIVTDEKASNLSSTSVDDVAVIEDLLAKLQEYAKMLLPGFQMKPIQFEKDDDTNFHMDLISGLANMRARNYSIPEVDKLKAKFIAGRIIPAIATSTAMATGLVCLELYKVIAGEHPVEDYRNTFANLALPLFSMAEPVPPKVMKHKETSWTVWDRWSVQGNLTLAELLQWFADKGLTAYSISCGTSLLYNNMFARHKDRLTKKVVDIAREVAKVDVPEYRRHLDIGVACEDEDENDVDIPLVSVYFR

SEQ ID NO: 9755 - protein, 300 aa, Triticum aestivum
  Clone ID: TRIAE-23APR03-C1712_1.p
MVDVMVLCDVRVLRTVSVLEPDPEPASRTRKCTILRSESRHVLNTDPYRGAFRSDAAAYAREVEEHINFGSSGRVGGFIAETFQGVGGTVELAPGYLKSVYDTVRKAGGVCIADEVQSGFGRTGSNYWGFQTQDVIPDIVTMAKGIGNGLPLGAVVTTPEIASVMAQKIQFNTFGGNPVCSAGGLAVLKVLDKEKRQAHCADVGAHLVERLKSLQQKHEIIGDVRGRGLMLGVELVTDRTEKTPAKAETAVLFEKLKDLGVLVGKGGLHGNVFRIKPPMCFSKDDADFLVDAMDYAMSGF

SEQ ID NO: 9756 - protein, 245 aa, Triticum aestivum
  Clone ID: TRIAE-23APR03-C1718_2.p
MCRGMVDDLRPLGPRRLDVRAFYLRLSSSYSSTSPPPAELTLVYRPAIGGSALELASRALPPACPAEATLLLVRGADDAPAYASADRVSAAEGARFEVYAGKELAAEGAFFPRRRLDGGGWRVECRRPAGSRSRVAEVLVLAEGGVLIRARARAARRIGCATPLEGIPEEDASSWGSCECGACGDEWQMVGDSSSDDDDGDKLKEEELEAETMRWALEMGAWAVCVGVGLLATARRFSRRRAALR

SEQ ID NO: 9757 - protein, 241 aa, Triticum aestivum
  Clone ID: TRIAE-23APR03-C1718_4.p
MADKGCLKRLQKEYHALCKEPVPQIVARPLPNDILEWHFVLEGSVATPFEGGYYYGKLKFPSDYPFKPPSISMTTPSGRFAPHKRICLSMSDFHPESWNPMWSVASILTGLLSFMMDDALTTGSIRSTDGEKKRLAKASLAYNCESKNCPHFRKLFPEYVEKYNQQQEKEQTGAEPEPQENHAPAPSHAAVLQAAAMVNNIGRPVAGVRGEKKLKKRVPFWLMVVIVSVFGAVMALPLMQL

SEQ ID NO: 9758 - protein, 277 aa, Triticum aestivum
  unsure (1)..(277): unsure at all Xaa locations
  Clone ID: TRIAE-23APR03-C17316_1.p
MLCSGPHASLQRPEPRGGSGRRAPTLTGLASPRLPARAGGRGRRPPLAAPGGSPDLPSSSSTPPPFGAGDDQAAAAAAAASSSSSGFCIIEGPETVQDFDKLDLQEILDNIRSRRNKIXLHMEEIRRLRIQQRIXKMLHLQTLSMGGKSYADFIRNVHLPLLLRQVDPIVASFSGGAVGVISALMVVEINNVKQQEHKRCKYCLGTGYLACARCSSTGAVVLTEPVSTFSDGDQPLSAPKTERCPNCSGAGKVMCPTCLCTGMAMASEHDPRIDPFD

SEQ ID NO: 9759 - protein, 712 aa, Triticum aestivum
  unsure (1)..(712): unsure at all Xaa locations
  Clone ID: TRIAE-23APR03-C1736_1.p
MEESFVPRRGIKNDVRGRLXCYKPDWTGGLSAGLRILAPTTCRDSAAAVPGISLGEPKAWSTPRVPSDLQTWESTAPRELVPSLVRGQHLLTPVAEAPALRMSTPLCLFAKDRPDLRVNLFLAWLGCAGGWXTALVMVLLAVDGVPFEVNEHRLINFQQVVMLVGWVAVLQLLKKIATEFLWPXRENIEALQFVPSWSFAHGMLPIVLSFGLLLTALRSRKARSWRYGAGWLPGFTPVPGLPPAGLLWDHMDSQXAGVLFPRHDHAPGSSQGSTSSQSSSKVHISMTWPQRGMRSHGAFMPATMIAVLFYFDHSVASQLAQQAELNLTAVRSCHXIVLLLRFLTLMWCLIGIPPSNGVIPQRPMHTKSLATLKHQILRNRLVATARQSMRQNASLSQLYNNMQDAYHQIQTPLIHQQQTVSGLNELKDSTVHGVSSMDNFDAPVDETXFDIEKEEXDYWLMCIYLKPPDLREHRLCXGGWAAMPLLKKIPTAVLWGYFAFMAIESLPGNQFWERILLLFTAPSRRYKVLEEYHTTFVETVPFKTIAMFTLFQTTYLLVCFGITWIPIAGVLFPLMIMLLVPVRQYILPKLFKGAHLNDLDAAEYEESPAIPFNLAAQDIDVALGRTQSAEILDDMVTRSRGEIKRLNSPKITSSGGTPVTELKGIRSPCISEKAYSPRVAELRHERSPLGGRDSPRTGEARPSKLGEGSTPK

SEQ ID NO: 9760 - protein, 268 aa, Triticum aestivum
  Clone ID: TRIAE-23APR03-C17464_1.p
MSSLRATSALLHTYYTSSAAACRVGARRLGGSFRVPSKASSAFVLDEVARAAGGVRRRAATRAASWDSEKSPYETLELERDADEETIKVAYRRLAKFYHPDVYDGKGTLEEGETAEARFIKQAAYPELLIDDERRKAYDKEHFVNPMKASQAWMEWVMKKRKAFDKRGDMAVAAWAEQQQRELTLRARRLSRSKVDPEEERRLLAKERKASMEFYSTTLKDHTLVLRKRDIMRKREEEDKMSEISRLLAAEGLELDTDEDDDDTTFLK

SEQ ID NO: 9761 - protein, 232 aa, Triticum aestivum
  unsure (1)..(232): unsure at all Xaa locations
  Clone ID: TRIAE-23APR03-C174_18.p
MGYCKTLAVGXFAMLLLAPAVLATDPDPLQDFCVADLDGKAVSVNGHTCKPMSEAGDDFLFSSKLAKAGNTSTPNGLAVTELDVAEWPGTNTLGVSMNRVDFAPGGTNPPHIHPRATEIGIVMKGELLVGILGSLDSGNKLYSRVVRAGETFLIPRGLMHFQFNVGKTEASMVVSFNSQNPGIVFVPLTLFGSNPPIPTPVLTKALRVEAGVVELLKSKFALGFNSWEPSHK

SEQ ID NO: 9762 - protein, 227 aa, Triticum aestivum
  unsure (1)..(227): unsure at all Xaa locations
  Clone ID: TRIAE-23APR03-C174_19.p
MVYSKTIACMFTMLLLAPAIMATDPDPLQDFCVADLDDNAVRVNGYPCVPQLEAGDDFLFSSKLARGGNTSTPNGSAVTRLDVTEFPGENTQGISMNRVDFAPGGXNPPHIHPRATEIGLVVXGELLVGIIGSNESGNRLYSRVVRAGENFLIPRGLMHFQFNTGDTVATMFVSFNSQNPGIVFVPLTLFGSDPPIPTPVLTRALRVDAGVVELLKSRFAGGSFQAS

SEQ ID NO: 9763 - protein, 224 aa, Triticum aestivum
  Clone ID: TRIAE-23APR03-C174_20.p
MGYSKTLVAGLFAMLLLAPAVLATDPDPLQDFCVADLDGKAVSVNGHTCKPMSEAGDDFLFSSKLAKAGNTSTPNGSAVTELDVAEWPGTNTLGVSMNRVDFAPGGTNPPHIHPRATEIGIVMKGELLVGILGSLDSGNKLYSRVVRAGETFLIPRGLMHFQFNVGKTEASMVVSFNSQNPGIVFVPLTLFGSNPPIPTPVLTKALRVEARVVELLKSKFAAGF

SEQ ID NO: 9764 - protein, 224 aa, Triticum aestivum
  Clone ID: TRIAE-23APR03-C174_25.p
MGYSKNLAAGLLAMFFLAPAVLATDPNPLQDFCAADLDGKAVSVNGHPCKPMSEAGDDFLFSSKLAKAGNTSTPNGSAVTELDVAEWPGTNTLGVSMNRVDFAPGGTNPPHIHPRATEIGIVMKGELLVGILGSLDSGNKLYSRVVRAGETFLIPRGLMHFQFNVGKTEASMVVSFNSQNPGIVFVPLTLFGSNPPIPTPVLTKALRVEAGVVELLKSKFAGGS

SEQ ID NO: 9765 - protein, 192 aa, Triticum aestivum
  Clone ID: TRIAE-23APR03-C174_27.p
MESSSSSLLLSSYTGGNKRAREADLDAASSAEAEAAKRMRPEDLLDLLDDDADAAAAGDLASVMRSLEEEICAGDLAPPQPELGFLLEASDDELGLPPAAAAASSSSDDAEGWEPEVTAGVFGEQIWSFEDEIEGAYAFGGVAYSPEAAAATAAADAEWGDDGFDAGLFGFGDESLGPSDVDVLRQETMPAV

SEQ ID NO: 9766 - protein, 225 aa, Triticum aestivum
  unsure (1)..(225): unsure at all Xaa locations
  Clone ID: TRIAE-23APR03-C174_35.p
MGYSKNLGAGLFAMLLLAPAVLASDPDPLQDFCVANLNGKAVSVNGHSCKPMSEAXGDDFLFSSKLXKAGNTSTPNGSAVTELDVAEWPGTNTLGVSMNRVDFAPGGTNPPHVHPRGTEIGMVMKGELLVGILGSLDSGNKLYSRVVRAGETFLIPRGLMHFQFNVGKTEAYMVVSFNSQNPGIVFVPLTLFGSNPPIPTPVLTKALRIEAGVVELLKSKFAGGS

SEQ ID NO: 9767 - protein, 289 aa, Triticum aestivum
  unsure (1)..(289): unsure at all Xaa locations
  Clone ID: TRIAE-23APR03-C1756_1.p
FSPVGLLPQIHIHPWPWRSPPASSSRPLLAAAAASALAGANDLVRELQSLRSRSPAGVIHLTDTSVTRFLSSPAPRPYSVLVXFFDATSLHSKTDLHLPQLRREFALLSASFHANNPDSSDLFFADIEFSESQHSFSQFGVNSLPHVRLXRPEHSRLADSEQMDQSHFSRLADSMVEFVEARTGLEVGPIVRPPLVSRNQMILLGLLFLISIPFGIKRIMEGDTLLHDRKLWMAGALFVYFFSVSGGMYGIIRHTPMFITDREDPNKLVFFYQGSGTRPNSARGAVYTL

SEQ ID NO: 9768 - protein, 406 aa, Triticum aestivum
  unsure (1)..(406): unsure at all Xaa locations
  Clone ID: TRIAE-23APR03-C175_44.p
MDPPPPPPPQPAHGGYAARFSPAGLIHAPLSALLEYSSGVLRAQAGGGGPQRGEPAAGADGEVSIRIAGPDDAPGAGAGDAGGQQPADEEAPAARGDEAGAGGGSGRGDSPYQGYDVQRLARWVEHALPFSLLLLGVFIRQHLQGFFVMIWIAAVMFKSNDILRKQTALXGERKMPMLIGIVTVFTIHVFGVYWWYRNDDLVRPLVMLPPKEIPPFWHAIFFIAVNDTMVRQAAMVVKCVLLIYYKNSKGRHYRRQGQMLTVVEYSLLLYRALLPAPVWYRFFLNKEYGSLFSSLTTGLYLTFKVASMVEKVRSLLASVNALSHKDLHYGSHATTEQVLAAGDLCAICQEKMHTPILLQCKHIFCEDCASEWLERERTCPLCRALVKPGDIRSFSDGSTTLFFQLF

SEQ ID NO: 9769 - protein, 244 aa, Triticum aestivum
  Clone ID: TRIAE-23APR03-C176_124.p
PQQPFPLQPQQSFLWQSQQPFLQQPQQPSPQPQQVVQIISPATPTTIPSAGKPTSAPFPQQQQQHQQLAQQQIPVVQPSILQQLNPCKVFLQQQCSPVAMPQRLARSQMLQQSSCHVMQQQCCQQLPQIPQQSRYQAIRAIIYSIILQEQQQVQGSIQSQQQQPQQLGQCVSQPQQQSQQQLGQQPQQQQLAQGTFLQPHQIAQLEVMTSIALRILPTMCSVNVPLYRTTTSVPFGVGTGVGAY

SEQ ID NO: 9770 - protein, 298 aa, Triticum aestivum
  Clone ID: TRIAE-23APR03-C176_183.p
MKTFLILALRAIVATTATIAVRVPVPQLQPQNPSQQQPQKQVPLVQQQQFPGQQQPFPPQQPYPQQQPFPSQQPYMQLQPFPQPQLPYPQPQLPYPQPQPFRPQQSYPQPQPQYSQPQQPISQQQQQQQQQQQQQQQILQQILQQQLIPCRDVVLQQHSIAHGSSQVLQQSTYQLVQQFCCQQLWQIPEQSRCQAIHNVVHAIILHQQHHHHQQQQQQQQQQPLSQVSFQQPQQQYPSGQGFFQPSQQNPQAQGSFQPQQLPQFEAIRNLALQTLPAMCNVYIPPYCTIAPFGIFGTN

SEQ ID NO: 9771 - protein, 96 aa, Triticum aestivum
  Clone ID: TRIAE-23APR03-C176_187.p
MKSSTLVAILVLQTVMVMGILSQAAAKDNFPKCCDNCNSWSGYQFCEDVGPRCRRGCANCQVVQMSPVKTFRCGDGRPVYDGHDTPTPCPPPCKKH

SEQ ID NO: 9772 - protein, 446 aa, Triticum aestivum
  unsure (1)..(446): unsure at all Xaa locations
  Clone ID: TRIAE-23APR03-C176_189.p
MASPAPPLKDAVGGLDRDPFVALLAKLIGESQRLQNDPPALVPQEDLXAQHVVDALRPVSTDTGGGPLVVRKVSYTDGRSNVIVEYPGTVPGRVVSFVGMHMDVVPANPSEWDFDPFSLTFEGDDKEKLRGRGTTDCLGHVALVTQLMRRLGEVKPPLKHSVIVVFIANEENSSVTGIGVDGLVKDGLLDKLKTGPLFWIDTADKQPCIGTGGMIPWHLKATGKLFHSGLAHKAINSMELNMDALKEIQTRFYNDFPAHEKEKLYKFATPSTMKPTKWSYPGGGLNQIPGECTISGDIRLTPFYSTSFVVQKLKEYVDDINAGLETKLPTRGPVSKYVLPDENLRGRLEIAFDGDVMNGVACNLESXGFQALCKATEEIVGYVEPYSITGSLPLIRELQDEGFDVQTAGYGLLKTYHAKNEYCLFSDMAQGFQVFVSIISQLEADA

SEQ ID NO: 9773 - protein, 229 aa, Triticum aestivum
  Clone ID: TRIAE-23APR03-C176_191.p
MDDDAGDASPPPGPAPLAATGAPSLRDMAASPTSSRSVTETVNGSHRFVIQGYSLAKGMGVGKHIASETFTVGGYQWAIYFYPDGKNPEDNSAYVSVFIALASEGTDVRALFELTLQDQSGKGKHKVHSHFDRSLESGPYTLKYRGSMWGYKRFFRRTALETSDFLKDDCLRINCTVGVVVSTIDYSRPHSIQVPDSDLGYHFDSLLDSNEGVDVILNKERTRLMRVRI

SEQ ID NO: 9774 - protein, 509 aa, Triticum aestivum
  Clone ID: TRIAE-23APR03-C176_193.p
MMRRGVAGMALLLVLLLLLSGWSAMGTPRSRERWEEGEGEWRPEEEAKGGGGSGGTGKGLFLLDKVEKVVESEGGSVHVVRGLPVPEAPWQHGGWSAECGACREGLMHIGFITMEPKTLFVPQYIDSNLILFVQRGDVKVGWIHKGGLVEKQLKMGDVLQIDAGSIFYMVNTGKGQRLHIICSIDASDSAGFAPYQSFYLGGGGKQTSVLAGFEPKILVTALNTTYDELGRILPVRTGGTGGPFVSYTTESGSGGKEHGQGGERDVGENGRESEPWRPVGRGDDDEPGSGQSTWTWSWRKLMSRFIGGELNKKSDKTLRAPEPYNLFDHEPSFRNTYGWSISVDKHDYEPLDHSDIGVYLVDLTAGSMMAPHVNPRATEYGVVLAGEGVIQVVFPNGSLAMSAEVRAGDVFWIPRHLPFVQVASRGGPFVFFGFTTSARRNKPQFLTGPTSVLRMMLGPELAAGLGVPQKELRKVVEAQTVAVIEPPLPEKEKGRKEREPFVMKQVARE

SEQ ID NO: 9775 - protein, 337 aa, Triticum aestivum
  unsure (1)..(337): unsure at all Xaa locations
  Clone ID: TRIAE-23APR03-C176_194.p
MAPELAGKMTAKAAVAAAKPATKAYVTFLAGAGDYWMGVVGLAKGLRKVGSAYPLVVAVLPDVPELHRKILLSQGCIVREIAPVYPPENQTQFAMAYYVINYSKLRIWEFVEYERMVYLDADIQVFDNIDELFDLPKGHFYAVMDCFCEKTWSHTPQYQIGYCQQCPEKXVTWPAAEMGPPPALYFNAGMFVHEPSMATAKALLDTLRVTPTTPFAEQDFLNMFFREQYKPIPLVYNLVLAMLWRHPENVQLEKVKVVHYCAAGSKPWRFTGKEENMDREDIRILVRNWWDIYNDESLDFKGLAADADELEAAAKKPLRAALAEAGTVKYVTAPSAA

SEQ ID NO: 9776 - protein, 438 aa, Triticum aestivum
  Clone ID: TRIAE-23APR03-C176_206.p
MDDDDAGGGGDASPQHEAGGGAVVIERGAGAATGPARDAAAASPTSSRSVTETVNGSHRFVIQGYSLAKGMGVGKHIASETFAVGGYQWAIYFYPDGKNPEDNSAYVSVFIALASEGTDVRALFELTLQDQSGRGKHKVHSHFDRALDAGPYTLKYRGSMWGYKRFFRRTALETSDFLKDDCLKINCTVGVVTSTMEYSRPHSLEVPDSDIGHHFGTLLESQEGADVIFSVAGEKFHAHKLVLAARSSFFRSEFLDPESDEENSEVDTSNEIKEIVIDDMEPKVFQAVLHFMYRDNLVGDDELSASSSDCPIFDTLAGKLLAAADKYELPRLRVLCESYLCKQISVKSVATTLALADRHHATELKSVCLKFAAENLSAVIRTDGFDYLKDNCPALQSEILRTVAGCEEECSSGGKSQSVWGQISDGGDTSGRRVRPRV

SEQ ID NO: 9777 - protein, 287 aa, Triticum aestivum
  Clone ID: TRIAE-23APR03-C176_238.p
MKTFLILVLLAIVATTATTAVRFPVPQLQPQNPSQQLPQEQVPLVQQQQFLGQQQPFPPQQPYPQPQPFPSQLPYLQLQPFPQPQLPYSQPQPFRPQQPYPQPQPQYSQPQQPISQQQQQQQQQQQQQQQQQQILQQILQQQLIPCMDVVLQQHNIAHGRSQVLQQSTYQLLQELCCQHLWQIPEQSQCQAIHNVVHAIILHQQQQKQQQQPSSQVSFQQPLQQYPLGQGSFRPSQQNPQAQGSVQPQQLPQFEEIRNLALQTLPAMCNVYIPPYCTIAPFGIFGTN

SEQ ID NO: 9778 - protein, 304 aa, Triticum aestivum
  Clone ID: TRIAE-23APR03-C176_243.p
MKTFLVFALIAVVATSAIAQMETSCISGLERPWQQQPLPPQQSFSQQPPFSQQQQQPLPQQPSFSQQQPPFSQQQPILSQQPPFSQQQQPVLPQQSPFSQQQQLVLPPQQQQQQLVQQQIPIVQPSVLQQLNPCKVFLQQQCSPVAMPQRLARSQMWQQSSCHVMQQQCCQQLQQIPEQSRYEAIRAIIYSIILQEQQQGFVQPQQQQPQQSGQGVSQSQQQSQQQLGQCSFQQPQQQLGQQPQQQQQQQVLQGTFLQPHQIAHLEAVTSIALRTLPTMCSVNVPLYSATTSVPFGVGTGVGAY

SEQ ID NO: 9779 - protein, 213 aa, Triticum aestivum
  unsure (1)..(213): unsure at all Xaa locations
  Clone ID: TRIAE-23APR03-C176_245.p
MAPRVGSGPSTSWVFLGDQSVGKTXSIITRFMYDKFDNTYQGXRLGIDFLSKTMYLEXDRTVRLPTLXDTAGQERFRSLIPSYIRDSSVAVIVFDVASRQSFLNTSKWIEEVRTERGSDVIIVLVGNKTDLVDKRQVSIEEGEGKAKDLGVMFIETSAKAGFNIKALFRKIAAALPGMETLSSAKQEDMVDVNLKSSNANSSQSQAQAGGCSC

SEQ ID NO: 9780 - protein, 474 aa, Triticum aestivum
  unsure (1)..(474): unsure at all Xaa locations
  Clone ID: TRIAE-23APR03-C176_254.p
MSDRQPSEXPEEQVDLEGDDDVMDDEEGYRRRRHGGEDSDEPEDEPEEPQIEVEGDGDGDGREEDAGMAVASDEPAAASGDEMEKGDEPEDEEEKMKWEELLALPPQGSEVFVGGLPRDTTEEDLRELCEPLGEIFEVRLMKDKETKENKGFAFVTFTAKDVAQRAIEELHDKDHKGRTLRCSLSQAKHRLFVGNVPKGLSEDELTSIIKGKGPGVVNIEMFKDLHDPSRNRGFLFVEYYNHACADYARQKLSSPDFKVDGSQLTVSWAEPKGSSSSSSDSSSSAAQVKTIYVKNLPENVSKEKVKDLFEVHGEVTKXVLPPAKAGHKRDFGFVHFAERSSALKAVKGSEKYEIDGQVXLEVSMAKPLSDKKPDHSFKPGGAPSYPLPPYGGYMGDPYGAYGGGPGFNQPMIYGRGPAPAGMRMVPMVLPDGRLGYVLQQPGGMPPPPPPRRGDRRDGGGRGGGGKPXRRYRPY

SEQ ID NO: 9781 - protein, 326 aa, Triticum aestivum
  Clone ID: TRIAE-23APR03-C176_262.p
MAPASFAASLAVSLSAPVRLIPPRCFRGRPRWSRPIRASSDTKGAPNGERRIGALERRVGDLRALVASVPPAVVSIRKNIGLNSIAGFGFGIAFLAALARQVIIRTQQQDSSGSVSDLVRRGHLKSGQRGIAKPRVYNDPFNNSLVKIDEDTSTAQMFGKEYRMAPVRLTNEQQAMHQKRRSHAYQWKRPTVFLKEGDPLPPDVDPETVRWIPVNHPFAAGSVEVDEETAKRNVYQKDGVPSRVKAEHEALRARLEASNDVTPFSNGPRGMQHSARSSKLSDEPSGNLQQSKPDMVNDQNGQPMLEPEPEPKSSDNGSLSKSLEGQ

SEQ ID NO: 9782 - protein, 307 aa, Triticum aestivum
  Clone ID: TRIAE-23APR03-C176_269.p
MKTFLVFALLTVAATSAIAQMETRCIPGLERPWQQQPLPPQQTFPQQPLFSQQQQQQLFPQQPSFSQQQPPFWQQQPPFSQQQPILPQQPPFSQQQQLVLPQQPPFSQQQQPVLPPQQSPFPQQQQQHQQLVQQQIPVVQPSILQQLNPCKVFLQQQCSPVAMPQRLARSQMLQQSSCHVMQQQCCQQLPQIPQQSRYEAIRAIIYSIILQEQQQVQGSIQSQQQQPQQLGQCVSQPQQQSQQQLGQQPQQQQLAQGTFLQPHQIAQLEVMTSIALRILPTMCSVNVPLYRTTTSVPFGVGTGVGAY

SEQ ID NO: 9783 - protein, 434 aa, Triticum aestivum
  Clone ID: TRIAE-23APR03-C176_284.p
MSFLPIPLPIVGDIASRLNGQEKPRGDDTTSSAPAPVLGTVASRWRELHGENSWKGLLDPLDPHLRASIISYGEMVQAAYDAFNTERRSPHCGACFYGYEDLLAGVGVPHHGNNYEVTKFIYATSSLPLPSSFLLLPLPSLPDVWSRESNWMGYVAVATDEGAAALGRRDIVVAWRGTVQNMEWVNDLDFAPVPAAPVLGSAASQHRLAVVHHGFLSMYTSSNKSSEFTKTSARDQVVKEVRRLVELYKDEEVSITICGHSLGASVATLNAVDLVSSGINKPEGSTKSFPVTAIVFASPHVGCRFFRSAFNSFPDLKALHVQNAGDVVPMYPPLGYVDVAVELTIRTIRSPYMRKPATVGTLHNLECYLHGVAGEQGSAGGFKLEVDRDIALVNKGADALTDEHPVPACWWVPRHKFMVKGEDGRWTLQDFKHI

SEQ ID NO: 9784 - protein, 366 aa, Triticum aestivum
  Clone ID: TRIAE-23APR03-C176_291.p
MPGLVPSSSSAHLLSRSLAAARTLSAAAGYSSSPSPSSSVKMARSALDEVTDTGAFDRTPSTFRSFVSRDASARFPAVAGRYHLYVSYACPWASRCLAYLKLKGLDHAISFSSVKPIFERTRESDDHLGWVFPATADEVPGASPDPFNGAKSVRDLYEIASTNYTGKPTVPVLWDKQLKTVVNNESSEIIRMLNAEFNDIAENPGLDLNPAHLQGSIDEVNGLVYDAINNGVYKCGFAKKQGPYDEAVTRLYEALDKCEEILGKQRYMCGNQLTEADVRLFVTLIRFDEVYAVHFKCNKKLLREYPNLFNYTKDMYQIPGISSTVNMEHIRKHYYGSHPSINPYGIIPQGPNIDYNAPHDRERLFL

SEQ ID NO: 9785 - protein, 222 aa, Triticum aestivum
  unsure (1)..(222): unsure at all Xaa locations
  Clone ID: TRIAE-23APR03-C1772_1.p
MILSLKQKKKKVLRMPMHCCRDVSWGLSTGFFGVSAAALPSVPLPGRGATPRDDLRAKSDHVQEPIPRDVWESIWTAWLEKPEAALLMLDPYGGLMSSISPSKTPFPHRQGNLYQLQYYSFWYENGTAAAEKRMSWVRGLYKEMEXYVSKNPRAVYVNYRDLDLXGRMSWTATVTSYEKARVWGEKYFKGIFKRFAAVKGMVDPDDFFKNEQSIPPLPAAKI

SEQ ID NO: 9786 - protein, 274 aa, Triticum aestivum
  Clone ID: TRIAE-23APR03-C17754_1.p
NAGCRRRTFTYVWLCLFFGKIYRGSDGIRGVFRGFGTSAVGALPGRILALTSLEISKEMAFKYSEHFDMSEASRIAVANGVAGLVSSTFSSSYSVPLDVVCQRLMVQGLPGMQTYRGPFDVINKVVRSEGLRGLYRGFGITLLTQSPASALWWSSYGGAQHAIWRSLGYGNGTQKKPSHTELVAVQATAGTIAGACSSIITTPIDTIKTRLQVMDNYGSGRPSVMKTTRLLLREEGWRGLYRGFGPRFLNMSLWGTSMIVTYELIKRLSVKPEQ

SEQ ID NO: 9787 - protein, 255 aa, Triticum aestivum
  unsure (1)..(255): unsure at all Xaa locations
  Clone ID: TRIAE-23APR03-C17758_1.p
MNECLPNRQSISGWDWLVIHSNCAQPSFHLAGWPACSFAAGGCCPPGGGCPPSHAGGCACGRWVCVLPSRPAGWEAGAYLAVWNHPPASGRCDTWQKIEXCSVCLDRXLSKSTAAERKXFGLLSECDHPFCISCIRMWRGPSXPTSGMDVNSALRACSICRKLSYYVIPSVLWYFSKEEKLEIAEIYKAKLKSIDCKYFDFGTGTCPFGTSCFYKHAYRDGRLEEVVLRHLDCDDGSTLIAKNIRLSDFLGRLHL

SEQ ID NO: 9788 - protein, 405 aa, Triticum aestivum
  Clone ID: TRIAE-23APR03-C17806_1.p
MALALRLRRALAAASTSASLLRPTASAAAPPHRAPLLAPFVAPLPRPFLPGGAAGFRSTAAAAARGNYGGGADDAKIDPDEILFEGCDYNHWLITMEFPDPKPSREEMIETYLQTLAKVVGSYEEAKKRMYALSTTTYVGFQAVMTEEMSEKFRGLPGVVFILPDSYLYPETKEYGGDKYENGVITPRPPPVQYSKPSRNDRNRNCRGNYENTSPQGNFQGSRPQQDVRGYAPQQNYAQAGQDGRGYGRNDSADHPGYNAPGGYQGRVNEAGQGFQDPQERRSFSQGQEGDLRPGGPSAPGNYGQPPAPGNYGQPPAPGNYGQPPAPGNYGQPPAPGSYGKPSGPPAYGQPSGSRYPGGNQGGPGYGGDNRQGAAPAYGGDNLQGVSGQYPSPGEGQQGNWQGRQ

SEQ ID NO: 9789 - protein, 632 aa, Triticum aestivum
  unsure (1)..(632): unsure at all Xaa locations
  Clone ID: TRIAE-23APR03-C17808_1.p
PPSSSVPLLSSAQPNQPGPILAQLQETYACSPATERGRGILLAADAKAETIAYCTGRSVITRRLDAPLVTRRLSAYADPPIVARFSSNGXWVATADASECARACGSGNDRALKAXEFRPITGRFLDLRXSSTAMRIDLSAGTAXGKSPVRAVRWGAGSTGGGVDGHSKRVYTCEVNPTRPFRVETCAEYFLPNYYLGPPFKFKHSIRDHTNFVNCIRYSPDGTKFITVSSDKKGLIYDGKTGDKIGELSSEGSHTGSIYAGCWCPVSILVRALSADKTAKVWDISEDXSGTLNRTLVCTGIGGVDDMLVGCLWQNDNLVTISLGGTFNVFSAINPDKEPVSFAGHLKTASALALFPQSNPRTMLSTSYDGVILKWIQGVGYGGRLIRKNNTQIKCFVATEEELITSGYDNKVFRIPVNGDQCGDAESTDVGGQPNALNIALQQPEFALVTTDSAIVLLNKSNVTSTTKVSYTITSSAVSPDGTEAIVGAQDGKLRIYSISGDTVTEEAVLEKHRGPITTIHYSPDVSMFCSADSNREAVAWDRATREVKLKNMLFHTARVNCLAWSPDSRFVATGSLDTCAIIYDVDKPAASRTTIKGAHLGGVHGISFADNDTLVTAGEDACIRVWKLTHQ

SEQ ID NO: 9790 - protein, 179 aa, Triticum aestivum
  Clone ID: TRIAE-23APR03-C1784_1.p
TNLNSTMRVRYHGPRTVKPLAAFYSDVSGISASVESTNGEAMPHPLDEIEPKKDVEPENCPFWWARSPENILQQDTYLALAASFVILRLLYLLFPRIVSAAKWAWRRHTLFANLMGVHEYFFTYLEQARQKLSRLYPSKRGNLQEGARNATAWASKSLASVSIGEPSTIGRTNSTNELR

SEQ ID NO: 9791 - protein, 77 aa, Triticum aestivum
  Clone ID: TRIAE-23APR03-C18013_1.p
MAKCLAVALLLLVVLAHCDGRELNEKDRALAAIRGAGAGVGESKILGLPDLPVVGTTTGTSTINGPLVVIPGIPAHP

SEQ ID NO: 9792 - protein, 625 aa, Triticum aestivum
  Clone ID: TRIAE-23APR03-C18020_1.p
MTGLGALGMKSPPGTTMMAALVHLLAAFSAAVLAAAGGEQPLSKIGIHRATLAIHPGASVDVSPLLLGLQGQDQEWVTIGFNNPKPSKDDWIGVFSPANFSDSICPSENQWVEAPLLCTAPIKFQYANYTTSDYAKTGKGSLRLQIINQRSDISFALFSGGLSNPKLITRSNSITFANPKAPVYPRLAQGKSWDEMTVTWTSGYSTKEATPFVEWGIQGQIQILSPAGTLTFSRDTMCGPPARTVGWRDPGFIHTSFLKDLWPNLKYTYRIGHRLFNGQIVWGRQNSFKAPPYPGEDSLQRVVIFGDLGKAEIDGSNEYNDFERGSINTTYQLVKDLKNIDMVMHIGDICYASGYLSQWDQFTAQVEPIASTVPYMVASGNHERDWPGSGSFYGTLDSGGECGVPAQNMFYVPAENREQFWYSTDYGMFRFCVANTELDWRPGTEQYKFIEHCLSSVDRQKQPWLIFLAHRVLGYSSATFYGAEGTTEEPMGRESLQLLWQKYRVDIAMYGHVHGYERTCPVYENVCVAKGSDRYSGAFTATTHVVVGGGGASLAEYTAERARWSHAQDLDYGFAKLTAFNHTTLLMEYKRSRDGSVRDSFTVSRDYRDVLACGVDNCASTTMAS

SEQ ID NO: 9793 - protein, 517 aa, Triticum aestivum
  unsure (1)..(517): unsure at all Xaa locations
  Clone ID: TRIAE-23APR03-C1803_1.p
CTMSGCTAILRRSSQNLMELSIGSKSPGASLRGFNSCARGKVKPGNSIIGQMKAMDRFPPANGVSRAMMPLSAYMGTNWLXTSRPSFNALPGPLGVSSIRRAYSSDTGIKPEVPIVPPTETAEVGTGGTTWMDIFENARNSTIDATTDAGKKVKEMTDAVTPHVQSFLEANPDLEKVVVPLGGTLCGTLLAWFVMPIIFKRLHKYGSQNPISALLGNSVNTNASYSTSLWSALEDPAKYLITFMAFSEMAAVIAPSVSPYFPQALRGAFVLSVVWFLHRWKANFITKAMANQTALVTDRARLSAFNQVSSLGLIALGVMGLAEACGVAVQSILTVGGVGGVATAFAARDVLGNVLNGFSLQFSRPFSVGEYIKAGSIEGTVLEIGLTSTSMMSPEKLPFTVPNSLFSSQIIVNRSRAQWRVSVTKIPIKLEDIEKVPAVAEEIKSMLRSNPKVISETDAPYCYLSRLESSYGELVIGCILQKMRKDELIYAEQDILLGAARIIKSHGVEFGSTTQCC

SEQ ID NO: 9794 - protein, 541 aa, Triticum aestivum
  Clone ID: TRIAE-23APR03-C1805_1.p
MESAPAAAFMERERLTAEVTFSGDAQAAASSEGAERLPTSIIIKIRRRLPDFARSVNLKYVRLGLRHGGSLTSYLPMLCVPVLAAAAYSFVRLDVIYLSIDLLSCVAWLGTAMLLLTVYYFKRPRPVYLVEFACYKPEDQNKITKEAFLDMTESTGCFNDETLAFQTKITTRSALGDETYLPPGVQARPPRLNMAEARLEAEAVMFGCLDALFESTGIDPRRDVRILIVNCSLFNPTPSLASMIIHHYKMREDVKSFNLGGMGCSAGLIAIDLAKDMLQANPNAYAVVLSTENITLNWYFGNDRSMLLSNCIFRMGGAAALLSNRRADAGRAKYRLLHTVRTHKGATDECFKCVYQREDDVGKVGVSLARELMTVAGDALKTNITTLGPLVLPLSEQLKFLKSLMMRRVFRAKGVRPYIPNFRRAFEHFCVHAGGRAVLEEVQRSLSLEDKDMEPSRCALHRFGNTSSSSLWYELAYAEAKGRVKRGNRVWQIGFGSGFKCNSAVWRALRDVPAVSPPGPEEKACNPWADCVAKYPPKAYV

SEQ ID NO: 9795 - protein, 372 aa, Triticum aestivum
  unsure (1)..(372): unsure at all Xaa locations
  Clone ID: TRIAE-23APR03-C18094_1.p
NGVDAFLACPDHSPAAGRSLTPARGAPASSPALISAVQDLYEFICSGPLVERIGYARERIAESIDRWLWRGSQVSRLFRIXELRLTDAEKSRIYHFYIPVXFLWCEDQVADHRSKYNDGDEIPPLVIGVSAPQGSGKTTLVFALDYLFRVSGRNSATLSIDDFYLTAAEQGKLRETHAGNALLEFRGNAGSHDLQFSIDTLESLIKLTKEGTKMKLPRYDKSAFGGRGDRADPSTWPEVEGPTEVVLFEGWMLGFKPLPNEVVTAVDPQLEVINKNLEAYYDAWDRFIESWIVIKIKEPNCVFQWRLQAEVAMRADGKAGMSDEEVMDFVSRYLPAYHAYLPTLYKEGPNGAKKDHLLVIDIDEERTPISGS

SEQ ID NO: 9796 - protein, 293 aa, Triticum aestivum
  unsure (1)..(293): unsure at all Xaa locations
  Clone ID: TRIAE-23APR03-C1812_1.p
TPHQTSQPSQAIPGVAAGPRRGAAAGDSRGGHPAAARSGGLCPAGSGRPEAGVRCPPSKXTNTNSSTSNYCNFSKPRXFSKSCHRCWTQAGGPRNVRLRGGXRSPRPARPRRRPPRPAGARTPSASGPRLSSSSSRSNSGSGTASPHGQRGRIHRRRRTTAHNANSNTAAFANRMTNYPFAADVPPPXPIFADQASRRFGPLFWRRLLPPPLPVXFSFSAEPKMEEAIGSLLLPGQXPAQEPEEPTCTSTVADMAPFMSLDAGIFELGDASPADYWNGGSCWTDVQDPSVYLP

SEQ ID NO: 9797 - protein, 418 aa, Triticum aestivum
  Clone ID: TRIAE-23APR03-C18328_1.p
TQATNKRRAPVLLPGAMAAALAAPTGLLKLPPSYAPPSSPSSPLSGTSYGRRSRRRPRLCRRGAPLLAVAAGEVSYTEPEEALLEALVGVQGRGRAVAPRQLQEVESAVQTLEALEGVPDPTNSSLIEGSWKLIFTTRPGTASPIQRTFVGVDSFSVFQEVYLRTDDPRVVNVVKFSETVGELAVQAEATINDGKRILFRFDRAAFAFKFLPFKVPYPVPFRLLGDEAKGWLDTTYLSRSGNIRISRGNKGTTFVLQKSADPRQMLLSAISAGTGVKEAIDDLTSSKKGDVVDMNTLAGEWQLLWASQSESGGGSWSSVASAGLKDFQTIKEDGQLKNLVNPFPGVSLSARGNICKTGNNNDTFSVSMNEGVIQVGGIQFPLETGGEYVMEILYIDNKIRISRLNQYKLVHLRIVNKT

SEQ ID NO: 9798 - protein, 340 aa, Triticum aestivum
  Clone ID: TRIAE-23APR03-C18332_1.p
MAAASSAAAASSAAAAPADTYDIPWVEKYRPSRVADVVGNADAVSRLEVIARDGNMPNLILSGPPGTGKTTSILALAHEMLGPSYREGVLELNASDDRGLDVVRNKIKMFAQKKVTLPPGRHKIVILDEADSMTTGAQQALRRTMEIYSNTTRFALACNTSSKIIEPIQSRCAIVRFSRLSDQEILGRLMVVVAAEKVPYVPEGLEAIIFTADGDMRQALNNLQATVSGFRFVNQENVFKVCDQPHPLHVKSMVKNVLDGKFDEACSGLKQLYDLGYSPTDIITTLFRVIKNYDMAEYLKLELLKETGFAHMRICDGVGSFLQLSGLLAKFALVRETAKA

SEQ ID NO: 9799 - protein, 205 aa, Triticum aestivum
  unsure (1)..(205): unsure at all Xaa locations
  Clone ID: TRIAE-23APR03-C18395_1.p
GAAPTSEHILETQDRAEVERILKNXEQCKKTLSGLGYIEFTFEDFFSMFIEELQNVLQGHETSIGPEELLERTRDQTTSDYVVMFFRFVTSGEIQRRAEFFEPFISGLTNSTVVQFCKSSVEPMGEESDHVHIIALSDALGVPIRVMYLDRSSCDTGNLSVNHHDFIPAANSSEGDAAMGLNPAEEKPYITLLYRPGHYDILYPK

SEQ ID NO: 9800 - protein, 433 aa, Triticum aestivum
  unsure (1)..(433): unsure at all Xaa locations
  Clone ID: TRIAE-23APR03-C18399_1.p
MATMSRALGSAFVGFTRTPAVPATTPLPLPSSRASSALLLRWQRSRGVVGGGGGARRYSSGRNAKISMSLRAGIVGLPNVGKSTLFNAIVENGKAQAANFPFCTINPNTGVVAIPDPRLDVLSNVQHPLALVDICXLVKGSKAQGFRGLGXNQFLSNIREVDSILQVVRSFEDDDIIFGGKCDHFILCNICRYLIALHHNLDXLVSFVNHSNKXAMLYYEQXYVVIPFWSGLEKILDALMDGKPARSVDLPDHEKEAIQHLYLLTMKPVIYVANVTESDLADPDKNPHVQEVAKLASELKSGMVTISAQVEAELSELPLEERVEYLNSLDVAESGLGNLVKATYNLLGLRTYFTTGEQETKAWTIIAGMTAPQAAGVIHSDFQKGFIRAETVSYDDFVAAGSLGAAREKGVMRLEGKEYIVQEGDVMLFRFNV

SEQ ID NO: 9801 - protein, 164 aa, Triticum aestivum
  Clone ID: TRIAE-23APR03-C18416_1.p
MLLMRSAAAPCSFTSMLLRRLTSSSSASYAIRRQATLALSSLSSPSSSARFTTWSPPHLSGSTRTGRFSAWASAPGPAGPTGSTITQSMETKIKEQLEADTVTVVDASGDGRHICIDVVSKAFEGKSAVNRQRMVYKVIWEELQSTVRAVDQMTTKTPGEAAGN

SEQ ID NO: 9802 - protein, 267 aa, Triticum aestivum
  Clone ID: TRIAE-23APR03-C18441_1.p
MAVTATTAAAAAAMLAAVMAIFLSFVLCFYIFLCAKRSRGGAPPPPGSGVMAHLRFLFCGGDGRAGAGDGVAPWFYDGGLDDASMASLPRREVAKGEAMDCAVCITELAAGETARVLPRCGHGFHVDCVDMWLKSHSTCPLCRCPAVDAPPLPPAPVQAPEADQESPNFPTNVLFFGSQDDVSTGRAQPQQQQQQTPATTTPQSAPTPSQAQACGLRRLLGCGGASPPPAPQEEDAARDIEMGLAGGESSASSRQTKPSQPAGSGSC

SEQ ID NO: 9803 - protein, 203 aa, Triticum aestivum
  Clone ID: TRIAE-23APR03-C18474_1.p
MAAARAALLRRPGLGAAAANPVLFSGHGLRYRKLEVILTTTIDKLGKAGETVKVAPGHFRNYLMPKMLAVPNIDKFAILMREQSKLYKREEEVVVKEVSKEEDDARQAEEKLKQCQAAAKRLDNALLVFRRFISEGIELRSPVTKDEIVSEVARQLNVNIYQDNLHLVTTSVIPWQTSRRNCGATSLYRADIPSPKRLSTLGP

SEQ ID NO: 9804 - protein, 272 aa, Triticum aestivum
  Clone ID: TRIAE-23APR03-C18501_1.p
MWWPSSLLYPPPASAFVTAMSVVSFASLASAGLSELRGQHMAYSKFWHVVSGQQQKKGGTGGAQLPGRDGMLVAYAPALVAAAASFVVPGAVEGLRAELLAAALAVHFLKRVLEVLFIHRYSGNMPLNTALTISSSYLLSAITMIYAQHLAVELPDPSTNLLYPGVLLFAVGIAGNFYHHYLLSQLRKGGDDDKGYKIPKGGLFEFVTCPHYLFEITGFFGFAMISQTVYALAMASGTAAYLVGRSFATRRWYESKFEEFPASIKALVPYIL

SEQ ID NO: 9805 - protein, 479 aa, Triticum aestivum
  unsure (1)..(479): unsure at all Xaa locations
  Clone ID: TRIAE-23APR03-C18617_1.p
MGRAFVYVVLGGGVAAGYAALEFARRGGYSRGELCIISEEAVAPYERPALSKGYLLPEDPSRLPKFHTCVGANDELLTTKWYKEQGIELVLGTRVISADVRRKTLLTATGETISYKTLIIATGARALKLEEFGISGSDAANICYLRNLEDADKLVNAMSSCSGGNAVVIGGGYIGMECAAALVTNKIKVTMVFPEKHCMGRLFTEKIADYYESYYTLKGVTFTKGTVLTSFEKDSTXEGXLSVISXKMGNHXLPADMGVVGIGIRANTSLFEGQLLMEKGGIKVNGQMQTSDSSVYAVGDVAAFPIKLFDGDIRRLEHVDSARRTARHAVAAILEPSKSRDVDYLPFFYSRVFTLSWQFYGDNVGEVIHYGDFTSNSPRFGAYWVSKGQITGAFLEGGDRDDYEALSVVVWRKTKVSDMSELERQGLAFAIQESKKDVPDSGVTLGEKPTFVWYATAGVVAAVSISAFGYWYGRKRRRW

SEQ ID NO: 9806 - protein, 393 aa, Triticum aestivum
  Clone ID: TRIAE-23APR03-C18637_1.p
MAQDEVPESSSPSSAAAGRLNAAAPEFTPRSAAPHQAHPHRRGPHHHHHHHHQPHHQHQHQYRHQHHHQGEDEGDAAAVVDNAQLVLPEELARRVVKQVEFYFSDVNLATTDHLMKYITKDPDGFVPMTVVASFRKIRELIDRSLLPGALRTSTELVVSDDGKMVRRRVPFSDVDAEEVQSRIIVAEKLPEDHRYQNLMRIFSTVGSVKSIRTCYPQGIDISAGKSSRIEMLFANKLHAFVEYGTVEDAEKAVAEFSGGRNWRDGPRVRSLLGCLKHGIGQGRKGGDEEAADEDDPEEYEAEDAAQGEDGFYDKAGMRQGRGRGRGGRGRGRGQYHGQSRDGGHPIGTPPSNHSAEHPVVSKPPPGPRMPDGTKGFAMGRGKPQVSPAVLSDA

SEQ ID NO: 9807 - protein, 350 aa, Triticum aestivum
  Clone ID: TRIAE-23APR03-C1869_2.p
MAAPRRSGARLAAFLALLLHLAAVIEGKSFYDVLQVPKGASEDQIKRSYRKLALKYHPDKNPDNEEATKRFAEINNAYEVLTDQEKRKIYDRYGEEGLKQFQSGRGGGGGGMNMQDIFSSFFGGGGGGMEEEEEQIIKGDDVIVELDASLEDLYMGGSLKVWREKNIIKPAPGKRRCNCRNEVYHRQIGPGMYQQMTEQVCDQCPNVKYVREGDFLTVDIEKGMQDGQEVSFFEEGEPKIDGEPGDLKFRIRTAPHDRFRREGNDLHATVTISLLQALVGFEKNLKHLDNHLVQIGSQGVTKPKEVRKFKGEGMPLHQSNKKGDLYVTFEVLFPKTLTDDQKAKLKEVLA

SEQ ID NO: 9808 - protein, 345 aa, Triticum aestivum
  unsure (1)..(345): unsure at all Xaa locations
  Clone ID: TRIAE-23APR03-C18719_1.p
MAVVVCVTGAGGFIGSWIVKLLLARGYAVRGTSRRADDPKNAHLWALDGAAERLTMVQVDLLDRASLRAAFHGCDGVIHTASPMHDTPEEIIEPVITGTLNVVEMAADAGVRRVVLSSTIGTMYMNPHRDPDAPLDESCWSDLDYCKQTKNCYFYAKTIAELDPXAGDRATSRDLAVRNIFPGRGDPAAXPSMNTSTRHILKYLTGEAKAYVNESHAYVHVKDAAEAHVRVLEAPNAGGRRYVCAERTLHRGELCRILAGLFPEYPIPTRCKDEVNPPKKGYKYTNQPLKDLGMKFTPVQEYLYEAVKSLQEKGFIQKASGNKGLASRGSSPPQNSTAPVFMSKL

SEQ ID NO: 9809 - protein, 454 aa, Triticum aestivum
  unsure (1)..(454): unsure at all Xaa locations
  Clone ID: TRIAE-23APR03-C18724_1.p
METKPRPSRVGRVTAKKRPRPDASSSTTRKLQRREIAAFPEPTFAASTTRERXRNIEPHEEFXDTYDPKENXENNPYLRKRSKIIEIIGARDIIFALSQLGVCAAFSRVTNQXRFAFMNGSPDHVXIRSLFFITRTNVSLITVSVYGXSENFSALRCRTTRIEYIRRGKPDAGFPLFETESLRWPGFVEFDDVNGKVLTYSAQDSTYKVFDLKNYTLLYTISDKDVQEIKISPGIMLLIYSRKKGYIPLEILSIEDGKRLKSFRHLLHRNKKIDFIEQFNEKLLVKQDGENLQILDVTNSKITEVSSNEFVTPSAFIFLYEMQLFLTFRNRSVSVWNFRGELVTSFEDHLLWHPDCNTNSIYITSNQDLIISYCKAEPDDPSSEDNACSINISDILTGKCMAKIKAGNLCKQKSSKFLCTPLEALGDITSLYYDEEREEIITGNHQGLIHVWSN

SEQ ID NO: 9810 - protein, 153 aa, Triticum aestivum
  Clone ID: TRIAE-23APR03-C18819_2.p
DGTSEGASETVQKRIAGDSQSPHASSPSSSGGGMMDDGGVEHAQIPNSFGHELRACLRCRLVKTYDQFRENGCENCPFLDMDKDRDNVVSCTTANFTGIISLMDPNRSWAARWLRIGRFIPGCYTLAVSEELPEEYQGMCQDNNVQYFPPKRP

SEQ ID NO: 9811 - protein, 426 aa, Triticum aestivum
  Clone ID: TRIAE-23APR03-C18868_1.p
MQTQRSPAMVGGGPGSAVGSPSPATVPVRRRCEGTAMGAVTLDLRPGLGVGPFTLGMPISDAFAQIEHQPNIYDVVHVKYFDEEPLKLDFVISFPDHGFHLRFDPWSQRLRLIEIFDVKRLQLRYATSLIGGPSTLATFVSVYALFGPTFPGIYDKERGMYTLFYPGLSFAFPIPSQYTNFFNNGEVADLPLEFPDGTTPVTCRVSIYDSSTDSKVGVGSLMDKAVVPALPAGSLYMEEVHAKLGEELWLTTGGQHIPFGASPQDIWTELGRPCGIHQKQVDQMVIHSASDLRPRTTLCGDYFYNYFSRGIDILFDGQTHKIKKFVLHTNFPGHSDFNSYMKCNFVIYDAEAEGAQQPGNTSKNCITPRTKWEQVKEILGDCGRAAIQTQGSMNNPFGSTFVYGYQNIAFEVMKNGYIATVTLFQS

SEQ ID NO: 9812 - protein, 328 aa, Triticum aestivum
  Clone ID: TRIAE-23APR03-C18870_1.p
MFIQKAWRTAAFGLYGFTQFTKSGFVEHAKKFREEDMQIRLDGKNCLVTGANSGLGYATAQGLASHGATVYMLCRNKERGETALNEIRSKTGNMNVHLEICDLSSINEVKTFATKFSSLEKPLHVLVNNAGLLEHKRTTTSEGLELNFAVNVAATYTLTELVMPLLEKAAPDARVITVASGGMYTEPLNTNLQYSESEFDGTKQYARNKRVQVALTEWWAEKYSNKGVGFYSMHPGWADTPGVSKSLPGLSEKLSGNLRSNEEGADTVVWLALQPKEKLVPGAFYFDRAEAQKHLKYAGTAASHEQIGSIVDSIRSICNLPANPQVYQ

SEQ ID NO: 9813 - protein, 203 aa, Triticum aestivum
  Clone ID: TRIAE-23APR03-C189399_1.p
MLLAVEGGGFFSSSASGYSHGLALLLLGRKEEEKPVKAWSQYRLVDGEAEHVYHLANTKNQAPRKCAPFICFGSTALELEGASPPKLSSSNTLDSLEEPSRSTKKKVTTNGSITGDERKGCLKSNSKRDSSEHCIVVSEGEEPRESLEEVQTLKSGMERRKVQWTDTCGKELFEIREFEASDGSLSDDELENEGFRKCECVIQ

SEQ ID NO: 9814 - protein, 496 aa, Triticum aestivum
  Clone ID: TRIAE-23APR03-C18992_1.p
KIFFSVFFPPPRSLLFVGNLCVPPPPGGALKKKREPPPPHFFPPFLERHKPQLPSRQTDSSVGTRTHPFPFRRGGRSNRPRTAMATTPPPPPLPLLLLPLLLLAAFSAAEEFPRDGKVIDLDDSNFEAALSSIDFLFVDFYAPWCGHCKRLAPELDEAAPVLAGLSEPIMVAKVNADKYRKLGSKYGVDGFPTLMLFIHGVPIEYTGSRKADLLVRNLKKFVAPDVSTLESDSAIKSFVENAGTSFPMFIGFGVNESLIAEYGGKYKKRAWFAVAKDFSEDWMATYDFNKIPALVAVHPKYNEQSVFYGPFEGRFLEDFVRQSLLPLTVPINTETLKLLDDDDRKVVLAILEDDSDVNSTQLVKILRSAAHANRDLVFGYVGVKQWEEFVETFDVSKSSQLPKLLVWDRNEEYELVEGSEKLEEGDQASQLSQFLEGYRAGRTIKKKVSGPSFMGFMHSLVSMNSLYILMFVVALLGVMMYFTGQDDTQPRRVHDE

SEQ ID NO: 9815 - protein, 479 aa, Triticum aestivum
  unsure (1)..(479): unsure at all Xaa locations
  Clone ID: TRIAE-23APR03-C189_1.p
MGAGMATLPEANTSPAPNGGGCGGIRVENCYVSKSRLQEXAQKAGLMTPEYQTRQVRGPSHXPIFEVRPSWINNTKYDSLPGXFFSRKAAEQSAAEVALMEIGKSVVLPTNATIPAVQETGLCKNLLQEYAQKMNYAIPXSYICNKQGPYICTVENWWNXQYIGATARTKKEAEIKAARTALLDKLSCKAKSRGXSQNGTTKXYIVEPGKRQSKEIEKKPVETPKSLKTKKCGNKNQXNKKKFVKKNXGQEVNEAKDXNGVAGDAHHSEVPMKPAVTSDRYSEHLSMLQPDDEGGRVEHEPLSNAPMVLRNEEARNVKQEALISTAMPQPHMEDRRVGAEPPRDAAMVQPNDEARCIKQELLIDAAMPLPNEEAGAAANPVPLSDSITAQPNAVTTNINEESLRNAASVQHNEEARTVNQEPPSSASLQQPKEPRVENGEFVSENKDQTLGDASREANRSNEDVPEKCSDNSSAFTSVE

SEQ ID NO: 9816 - protein, 247 aa, Triticum aestivum
  Clone ID: TRIAE-23APR03-C1915_1.p
MPSHLALLSCLLVLLLSLDKFFLHYLKRWLSGGGSIIPRIPTGAFKAHSHRPMAAAGRWSETAMLVIDMQKDFVDPAMGSPVLVAGGEAVVPAVAEAVAVARERGIFVVWVVREHDPSGRDVELFRRHLYSGGKGPTVKGLIGAELADGLFIKEGDCKLVKPRFSAFFATHLDSVLKTQGIKNLVIVGVQTPNCIRQTVYDAVELDYEKVIVLIDATAAARPDIHLANIRDMKTIGVETPTLEEWRR

SEQ ID NO: 9817 - protein, 207 aa, Triticum aestivum
  Clone ID: TRIAE-23APR03-C1917_2.p
MAVPLVLVLLVAMFTGSDAMYCVCKSDANPAAMQKAIDYACGKGADCTQITSSGPCFQPSSVVAHCSYACNSYYQKNAGMGATCDFMGVATLVAADPSAGSCKYPASASGVGTGAGTGGMGTGGTGMGTGGMGTGTGSTGTGTGVSTGGMGSMTPPGATSTGMPGSPFGGGAYGPSGMNQDYNAAAVGRRVASAGLLVAAAPLLLHL

SEQ ID NO: 9818 - protein, 505 aa, Triticum aestivum
  Clone ID: TRIAE-23APR03-C1918_27.p
MALRWALLRSAEISPGRKAALEYLHSLSKAQPTSSISCAGLHPAGRSFSTQAATTSSTPQPPPPPPPPEKTHFGDLKDEDRIFTNLYGLHDPFLKGAMKRGDWYRTKDLVIKGADWIVNEMKKSGLRGRGGAGFPSGLKWSFMPKVSDGRPSYLVVNADESEPGTCKDREIMRHDPHKLLEGCLIAGVGMRASAAYIYIRGEYVNERLNLEKARQEAYASGLLGKNACGSGYDFDVHIHFGAGAYICGEETALLESLEGKQGKPRLKPPFPANAGLYGCPTTVTNVETVAVSPTILRRGPEWFASFGRKNNSGTKLYCISGHVNKPCTVEEEMSIPLKELIEKHCGGVRGGWDNLLAVIPGGSSVPLLPKHICDDVLMDYDALKAVQSGLGTAAVMVMDKSTDVVDAIARLSYFYKHESCGQCTPCREGTGWLWMIMERLKVGNAKLEEIDMLQEVTKQIEGHTICALGDAAAWPVQGLIRHFRPELERRIRDRADSELLMAASA

SEQ ID NO: 9819 - protein, 357 aa, Triticum aestivum
  Clone ID: TRIAE-23APR03-C19190_1.p
MALPPTAAPAAALRCAGAHVGRVPLPRHAGGAYLRSALPFRLGVLSSRRCRAGAGAVVSATRSPGLGNAGNLREGSNLAKNWDLSRQIGDEHGVLIECRDVHKSFGDKHVLQGVSFKIRHGEAVGIIGPSGTGKSTILKVMAGLLAPDKGEVFICGKKRQGLVSDEDISGLRIGLVFQSAALFDSLNVRENVGFLLYENSKLSEERIGELVTETLAAVGLKGVEERMPSELSGGMKKRVALARSIINDDTKETIEPEALLYDEPTAGLDPIASTVVEDLIRSMHVTGKDAMGKPGKIASYAVVTHQHSTIRRAVDRLLFLHEGKIVWEGMTEEFTTSTNPIVQQFASGSLDGPIRYF

SEQ ID NO: 9820 - protein, 205 aa, Triticum aestivum
  Clone ID: TRIAE-23APR03-C1924_2.p
MSTSEYDYLFKLLLIGDSSVGKSCLLLRFADDAYVDTYISTIGVDFKIRTVELDGKSVKLQIWDTAGQERFRTITSSYYRGAHGIIIVYDVTDRESFNNVKQWLSEIDRYASDSVCKLLVGNKCDLVDSKVVDTEEAKAFAESLGMNFLETSAKESINVETAFLTMSSEIKNKMASQPAAERKSTVHVHMKGQPIQQQSSSCCSS

SEQ ID NO: 9821 - protein, 112 aa, Triticum aestivum
  Clone ID: TRIAE-23APR03-C192743_1.p
MESGGGARVRRQLQAVGRVAAYLGGGLLLLSTASTAAVRSLRFLSDTNQRKFAMQCGACEGKGTYGCRLCRGSATVEWSRLYDPVFVNPCLCPTCDGTRVQRCLNCLGKGYA

SEQ ID NO: 9822 - protein, 330 aa, Triticum aestivum
  Clone ID: TRIAE-23APR03-C192781_1.p
FTFRETCSILKKKKKVTEKSYPLVMPSYPKLWNGAFSYSERYTMPDAIDIVRYAEKRGVNVLAEIDVPGHARSWGVGYPELWPSDSCREPLDVSNNFTFKVIDGILSDFSKVFKFKFAHLGGDEVNTSCWTETPHIKEWLNNNHMNVSDAYRYFVLRAQKIAISHGYEVINWEETFNNFGDKLDRKTVVHNWLGGDVAPKVVAAGLRCIVSNQDKWYLDHLDATWEGFYLNEPLKGINNTEQQRLVIGGEVCMWGEQIDASDIEQTIWPRAAAAAERLWSPLEQIAEDTRSATSRLSRFRCLLNQRGVAAAPLAGDGRTAPYEPGPCVRQ

SEQ ID NO: 9823 - protein, 318 aa, Triticum aestivum
  Clone ID: TRIAE-23APR03-C192_27.p
LLLYSLFYRKKRPRRSRDGPNSVSETIRRWKEVNQQLEHDPQGSKRSRKPPAKGSKKGCMQGKGGPENTQCGFRGVRQRTWGKWVAEIREPNRVSRLWLGTFPTAEDAARAYDEAARAMYGALARANFPVHPAQAPAVAVAAAIEGVVRGASASCESTTTSTNHSDVASSLPRQAQALEIYSQPDVLESTESVEHYSHQDSVPDAGSSIARSISEEDVFEPLEPISSLPDGESDGFDIEELLRLMEADPIEVEPVTGGSWNGVEIGQQEPLYLDGLDQGMLEGMLQSDYPYPMWISEDRAMYNPAFHDAEMSEFFEGL

SEQ ID NO: 9824 - protein, 283 aa, Triticum aestivum
  Clone ID: TRIAE-23APR03-C193005_1.p
MEEKATQKAAAEGNPSPELCLRIPGDYAVGSVPTVLYVPDFISQTEQSQLLHHIYQAPAPKWKILKNRRLQNWGGVVHEKGLLPQALPPWLTKITDRICQWTGLFPSAINHVLINEYHPNQGIMPHQDGPAYFPVVAIISLASPVVLDFTPHGKLRELEHTYLQNTQSDELQESNGSYKVEGTKEAGPASSSLLLMPCSLLIFKDQAYTDFLHGIQDNELHNLDKVANISQCPQFKHLSHDYSPGKADSSASSEPSGTFRRTTTRVSLTCRLVLNVHSKLFKF

SEQ ID NO: 9825 - protein, 483 aa, Triticum aestivum
  unsure (1)..(483): unsure at all Xaa locations
  Clone ID: TRIAE-23APR03-C193334_1.p
MAAPASDHGGTLPVPLPPSPRQGHITPFSPFGQRLASHAGARCTLAVTAYTLRRGRDPXPGRPPARPTSPTPWPPAASAASPGDVAASLPRLYSGGSVRGVRAAAVGRRREGRXPVRAVVYDAFLQPWGAKRGPAAWRCVRVPGAACASLFTQAPAVNVAYAHAGAGRLTVPVLAGTVPPELPGLPAGLGPDDVPSFLAKLDECPAYLDLLVSQFLGLDAADHVLVNSFHELQPLESAYMASMWGAKTVGPTVPSAYLDNRLPDDASYGFHLHTPTTAATKAWLDARPARSVAYVSFGSIAALGPEQMAEVAEGLFNSGAPFLWVVRALETSKIPDGFADKVGENGLIVPWTAQLEVLAHGAVGCFVTHCGWNSTTEALSAGVPMVAVPHWSDQPTNAKYTEDLWRVGVRARPDAGGVVRREEVERCVREVMGSEQYRTRAAEWSGKTKAAMSEGGSSDRNILEFLRGLRSRKSERSGAAEDL

SEQ ID NO: 9826 - protein, 488 aa, Triticum aestivum
  unsure (1)..(488): unsure at all Xaa locations
  Clone ID: TRIAE-23APR03-C193_38.p
MALSVEKTXXGREYKVKDLXQADFGRLELELAEXEMXGLMACRXEFXPSQPFKGARISGSLHMTIQTAXLIETLTALGAEVRWCSCNIFSSXQDHAAXXIXRDXXAVFAWKGEXLEEYWWCTERCLDWGVGGGPDLIVDDGGDATLLIHEGVKAEEEFEXSGKXPDPESTDNPEFKIXLTIIRDGLKTDAXSKYRKMKERLVXVSEETTTGVKRLYQMQESGTLLFPAINVNDSVTKSKFDNLYGCRHSLPDGLMRATDVMIAGKVAVVCGXGDVGKGCAAALKQAGARVIVTEIDPICALQALMEGIQILTLEDVVSEADIFVTTTGNKDIIMVDHMRKMKNNAIVCNIGHFDNEIDMNGLETYPGVKRITXKPQTDRWVFPETKTGIIVLAEGRLMNLGCATGHPSXVMXCSFTNQXIAQLEXWNEKAXGKXEXKVYVLPKHXDEKVAALHLGKLGARLTKLTKSQSDYISIPIEGPYKXLRLYRY

SEQ ID NO: 9827 - protein, 452 aa, Triticum aestivum
  Clone ID: TRIAE-23APR03-C19414_1.p
MRPTATGPGGGVVRRRKAGAAAAAAAASREWLVVPASGRARVEEAGKHAVMARTGLPARDLRVLDPLLSYPSTILGRERAIVVNLERVKAVITAAEVLLPNSKDPDFARFVRDLQARVLAYSADQAAEFTDMDGESSAIASPFPAPSSSKGHELEMAKRTPNAVGEMTHSSSVPTLTAMKDGSTKVLPFEFRALEVCLESACRSLEEETVTLEKEAYPALDELTSKISTLNLERVRQIKSRLVAISGRVQKVRDELEHLLDDEMDMAEMYLTEKLAREDISETSSRVEVDDHDHDHDPSQLEEDMDEDYRSEPAGTASNGSSIGYKPNIEELEMLLEAYFVQIDGTLNKLSHLREYVDDTEDYINIMLDDKQNQLLQMGVMLSTATVVITAGVAVVGLFGMNIGISLYTPVGEEQTRAAHVKFWETTFGTIAGCTILYVIAMGWGKRSGLLQ

SEQ ID NO: 9828 - protein, 95 aa, Triticum aestivum
  Clone ID: TRIAE-23APR03-C19428_3.p
MAAAAARSFLRSGSATSSLRGAAARAASRSGPATPSRRLLSSPPRARLALRSPLEMSSACLESLMPMHSATASALMTSLLAAPARVGSCWISEDH

SEQ ID NO: 9829 - protein, 233 aa, Triticum aestivum
  unsure (1)..(233): unsure at all Xaa locations
  Clone ID: TRIAE-23APR03-C19434_1.p
MERAGGRKANQLRAYSCTRNPLERAHGSARWAQGDTVVLAAVYGPRPGTRKGENPEKASVEVVWKPKTGQIGRQEKEYEMTLKRTLQSICLLTVHPNTTTSVILQVMGDDGSLLPCAINASCAALVFAGVPMKHLAVAIGCGVLADGAVILDTSKAEEQQLKSFAHLVFPNSSKSVDVKESQQKDGQPERGLITSITHGVMXRGRLLQLYREGSCRIRADLGFHEDHLAEAHT

SEQ ID NO: 9830 - protein, 241 aa, Triticum aestivum
  unsure (1)..(241): unsure at all Xaa locations
  Clone ID: TRIAE-23APR03-C19475_1.p
MADDVAPCTASGYLDPSYWDGRFGKEEHYEWFKDFSHFRHLLAPLLSPSLSVLEVGCGNSRLGEELLREGVTGGVTCIDLSPVAVQRMRDRLAEQGTSGVDVVVADMLDLPFESESFDLVIEKGTMXGDPWNPNPTTVDNVTKMLEGIHKVLKPGGKFVSITFGQPHFRRRFFEAPEFTWSVEWNTFGDGFHYFFYILQKGKRSPESNSHQVTLPAVPSFNMLHEELESEDYIFCTNVDEL

SEQ ID NO: 9831 - protein, 378 aa, Triticum aestivum
  Clone ID: TRIAE-23APR03-C194871_1.p
MASALGAQVAAVAPIGSDGRHYRSCSSLKGNNSRNKSWTGKLAWENKTLQPRHTKKVFCMSVQQASKSKCKVAIKPLELENTKEPPLNLYKPKGPYTASIVSVERIVGPKAPGETCHIVIDHGGNVPYWEGQSYGVIPPGENPKKPGAPNTVRLYSIASTRYGDSFDGRTASLCVRRAVYYDPETGKEDPSKKGICSNFLCDSKPGDKIQITGPSGKIMLLPEDDPNATHIMIGTGTGVAPFRGYLRRMFMEDVPSFKFGGLAWLFLGVANTDSLLYDEEFTNYLQQYPENFRYDKALSREQKNKSGGKMYVQDRIEEYSDEIFKLLDDGAHIYFCGLKGMMLGIQDTLKRVAEQRGESWDQKLSQLKKNKQWHVEVY

SEQ ID NO: 9832 - protein, 186 aa, Triticum aestivum
  Clone ID: TRIAE-23APR03-C194_126.p
MTALAKPAASAPKPSAAKPKAAAAGASHPTYFEMIKEAIAALKDRTGSSSVAIAKYIEEKHGKALPANFKKMLSVQLRASASKGKLVKVKASYKLSDAAKKDAPKPKAKPAAPKAAAKPAKDAAKPKKKAAVKPKKAAAAAGTKRKAPEKKTLVAKAKKSPAAKAKAKPKTVRSPAAKKGRKVAAA

SEQ ID NO: 9833 - protein, 60 aa, Triticum aestivum
  Clone ID: TRIAE-23APR03-C194_157.p
RRIRVRFRRGSLRNGYLPDDVRALQTPFKSYLSDMLALVKKEAAERKALGALPLYERTLP

SEQ ID NO: 9834 - protein, 176 aa, Triticum aestivum
  Clone ID: TRIAE-23APR03-C194_163.p
MGDERVKAEALQILGLFQVLPRLVVFDLDYTLWPFYCECRSKRESPSLYRHAKGIICALKEKGVDMAIASRSPTSDIARVFIDKLELQPMFVAQEIFSSWTHKTEHFQKIHRKTGVPYKSMPFFDDEDRNIQSVSKMGVTSVLVNNGLNLDMFKLGLSNFATTVAASEPAPAPEDN

SEQ ID NO: 9835 - protein, 232 aa, Triticum aestivum
  Clone ID: TRIAE-23APR03-C194_193.p
MASSADPWVREYGEAARLADDVAAMVADRAALPQSGPEVMRHTSAIRRKITILGTRLDSLEGMLARLPPKSITDKELNKRRDTLSNLKSRAKQMAESFNMSTFANREDLLGQSKKAADDMSRVAGLDNQGIVGLQRQIMKEQDEGLEKLEQTVLSTKHIALAVNEELDLHARLIDDLDDHVDGTNSRLQRVQKRLAVLNKRAKGGCSCMSLLLSTVGIVMLVVIVWLLIKYL

SEQ ID NO: 9836 - protein, 419 aa, Triticum aestivum
  unsure (1)..(419): unsure at all Xaa locations
  Clone ID: TRIAE-23APR03-C194_195.p
MSTLLPQYQRETLEWLKSACCMVNLTHQLPVYCQCHSCHAVLDLWFQYQFLSSSSLEAILTPNPMYSDVQLKEVMNYNATAMDESTEFLQLILSGNDEGYNTTSELQVWDVLDFYFSESFSDVQFDSIMGFTSDVSTSSHDYMMNIVDLVERPVALLSLNETEEPNNATNKAPVDHSTMDPDDTSLYLQMKPPDSETESTSASQDVIGIEYVDEKLHSKGLPDLMDVDSSSRLRKSPVRTKHVTLVLDLDETLVHSTLDHCDISDFSIQVFFNMKDHTVHVRQRPHLXKMFLEKVAQMFELVIFTASQRIYAEQIIDRLDPDGKLISQRIYRESCIFSDGSYTKDLTILGVHLAKVAIIDNTPQVFQLQVDNGIPIKSWFDDPADQELVELLPFLETLVDAEDVRPLISRTFHGTIQQD

SEQ ID NO: 9837 - protein, 195 aa, Triticum aestivum
  unsure (1)..(195): unsure at all Xaa locations
  Clone ID: TRIAE-23APR03-C194_214.p
MPWQQQEVEVYTLLRQQAASGGRQQEQRQRQLLLVFPFPSPLLFGGGGFRKSRDRARGSPPPPPPSPRMTSMLSAFSSWFVNPRRNPLARIHMLTISNRLKNYGLRYDDLYDPYFDLDIKEALCRLPREXVVDARHQRLKRAMDLSMKHQYLPDDVRALQTPFKSYLSDMLALVKKEAAERKALGALPLYERTLP

SEQ ID NO: 9838 - protein, 504 aa, Triticum aestivum
  unsure (1)..(504): unsure at all Xaa locations
  Clone ID: TRIAE-23APR03-C194_255.p
MDRLVAAGILGFLLIASVGSHAARAPEQYWKSALPNTPMPSSLSQLLNNQAGGTSVNIGSGGVHVDAGHGMPGGTTVDVGKGGVGVNVKPGSAKPGRTTVGVGKGGVGVNVKPGYGKPGGTTVGVGKGGVDVNVKPGSGKPAARRSALARVAXGVNVKPGYGKPGGTTVGVGKGGVGVNVKPGGGTTVGVGKGGAGVNVKPAYGKPGGTGTTVGVGKGGVGVNVKPGYGKPGGTTVGVGKGGVGVNVKPGYGKPGGKPRGKPVHVNVSPFMYNYAATETQMHDDPSAALFFLEKDLHAGKKMNVHFMATPCAGEKFLPRSEADTIPFSSEKVPEILSRFSVAPDSVEAAEMKQTLRECEATADNGEKKSCATSLESMVDFATSSLGTSHVRAVSTVVGKEGSPEQEYTMTGVKRAAGADQLVACHAEPYAYAVFACHLXQATRAYTVSMVGKDGTAVEXVAVCHADTAGWNPRHVAFQVLKVKPGAAPVCHFLPQDHVVWTRSG

SEQ ID NO: 9839 - protein, 339 aa, Triticum aestivum
  Clone ID: TRIAE-23APR03-C194_259.p
MPNLECRMYEPRFPEVDAAVMIQVKHIADMGAYVSLLEYNNVEGMILFSELSRRRIRSISSLIKVGRQEPAIVLRVDRDKGYIDLSKRRVSEEEARSCEDRYNKSKLVHSIMRHVAETLEIDLEPIYQRIGWPLYRKYGHAFEAFKLIVADPDAILDVLTYEEKETGPDCQEVTKVVPAVTPEIKETLVQNIRRRMTPQPLKIRADVEMKCFQFDGVLHIKQAMRKAEAAGNTNCPVKIKLVAPPLYVLTTQTLDKDQGISVLTDAVKACTAEIEKHKGKLVVKEAPRAVSEREDKLLNAQLDTLVEQNAEVAGDDDSEDEEDKGMGDIDLTNSGVHAD

SEQ ID NO: 9840 - protein, 215 aa, Triticum aestivum
  Clone ID: TRIAE-23APR03-C194_262.p
ESIHLSSSFLKPQASRAHRTRSSFPFRYFLRLATMTALAKPSASAPKPKKTSAAGAAHPTYFEMIKEAIAALKDRTGSSSVAIAKFIEEKHGKALPANFKKMLSVQLRSSAAKGKLVKVKASYKLSDAAKKDSPKPKAKPAAPKAAAKPAKDAAKPKKKASAKPKKAAAAGTKRKAPEKKKLVAKAKKSPAAKAKAKPKTVRSPAAKKARKVASA

SEQ ID NO: 9841 - protein, 544 aa, Triticum aestivum
  Clone ID: TRIAE-23APR03-C194_267.p
MSLHRFFCRSLVVLPRSSYGFCMICWRCNNILLDHLFTVNRHSILLNHLFTVYRHGLAKIFDLSVYVTCPHDDSLCPLVLIIFFLCRSWVVYLYPPAMGKEKTHINIVVIGHVDSGKSTTTGHLIYKLGGIDKRVIERFEKEAAEMNKRSFKYAWVLDKLKAERERGITIDIALWKFETTKYYCTVIDAPGHRDFIKNMITGTSQADCAVLIIDSTTGGFEAGISKDGQTREHALLAFTLGVKQMICCCNKMDATTPKYSKARYEEIVKEVSSYLKKVGYNPDKVPFVPISGFEGDNMIERSTNLDWYKGPTLLEALDQINEPKRPSDKPLRLPLQDVYKIGGIGTVPVGRVETGVIKPGMVVTFGPTGLTTEVKSVEMHHESLLEALPGDNVGFNVKNVAVKDLKRGFVASNSKDDPAKEAANFTSQVIIMNHPGQIGNGYAPVLDCHTSHIAVKFAELVTKIDRRSGKELEALPKFLKNGDAGIVKMIPTKPMVVETFATYPPLGRFAVRDMRQTVAVGVIKGVEKKDPTGAKVTKAAIKKK

SEQ ID NO: 9842 - protein, 369 aa, Triticum aestivum
  Clone ID: TRIAE-23APR03-C194_276.p
MEHRGLLLVLAAALCLAGAADARHAKKSYQAVFSFGDSLSDAGNLIVDGIPKALTTARAPYGMTFFGRPTGRCSNGRVVVDFLAEHFGLPLPPASQAHGKDFKKGANFAITGATALEYSFFKAHGIDQRIWNTGSINTQIGWLQKMKPSLCKSEKECKDYFSKSLFVVGEFGGNDYNAPLFSGVAFSDVKTYVPLVAKAIANGVEKLIELGATDLLVPGILPIGCFPLYLTLYNSSKKSDYNARTGCLRRYNRLAFHHNRELKQQLDQLQKKYPKTKIMYGDYFKAAMQFVVSPGKFGFSTAVQACCGAGGSGAYNFNLKKKCGEAGASVCSNPSAYVSWDGIHMTEAAYRMVANGWLNGPYASPPIMK

SEQ ID NO: 9843 - protein, 514 aa, Triticum aestivum
  Clone ID: TRIAE-23APR03-C194_286.p
MANIDMAAVLADMERDAAADARTPRTKLVCTLGPASRSVPMLEKLLRAGMNVARFNFSHGTHEYHKETLDALRQAMHNTGILCAVMLDTKGPEIRTGFLKDGKPIKLTKGQEITVSTDYDIKGDTNTISMSYKKLPQDVKPGHVILCADGTISLAVLSCDPAAGTVRCRCENTAMLGERKNCNLPGIVVDLPTLTEKDKEDILGWGVPNDIDMIALSFVRKGSDLVTVRQLLGQHAKRIKLMSKVENQEGIVNFDDILRETDVFMVARGDLGMEIPVEKIFLAQKMMIYKCNLAGKPVVTATQMLESMIKSPRPTRAEATDVANAVLDGTDCVMLSGESAAGAYPEVAVKIMARICVEAESSLDNDAVFKEMIKAAPLPMSPLESLASSAVRTANKARATLIVVLTRGGTTAKLVAKYRPRVPILSVVVPVLTTDSFDWTVSSEGPARHSLIYRGLIPLLAEGSAKATDSESTEEILQAALKSAVKKQLCKAGDAVVVLHRIGMASVIKICTVK

SEQ ID NO: 9844 - protein, 164 aa, Triticum aestivum
  Clone ID: TRIAE-23APR03-C194_306.p
MAFPKPLAALLLAVALAATAMSAAGQDPQNCKPSRKVTVQNLCGKDLYLGIEPLANSKLLYSPGYLLRHGTHVSYDVCSWTGRVKVQDAVVTEFHIGYDGGAWYQVSTDQSHMPIRVSITPHGHPLKDHCPTAGCNSGGHCFEHSVPGGKCHGVDEIKIVFYNP

SEQ ID NO: 9845 - protein, 164 aa, Triticum aestivum
  Clone ID: TRIAE-23APR03-C194_307.p
MAFSKPVAALLLAVALAATAMSAAGQDPQNCKPSRKVTVQNLCGKDLYLGIEPLANSKLLYSPGHLLRHGTHVSYDVCSWTGRVKVQDAVVTEFHIGYDGGAWYQVSTDQSHMPIRVSITPHGHPLKDHCPTAGCNSGGHCFEHSVPGGKCHGVDEIKIVYYNP

SEQ ID NO: 9846 - protein, 447 aa, Triticum aestivum
  Clone ID: TRIAE-23APR03-C194_320.p
MGKEKTHINIVVIGHVDSGKSTTTGHLIYKLGGIDKRVIERFEKEAAEMNKRSFKYAWVLDKLKAERERGITIDIALWKFETTKYYCTVIDAPGHRDFIKNMITGTSQADCAVLIIDSTTGGFEAGISKDGQTREHALLAFTLGVKQMICCCNKMDATTPKYSKARYEEIVKEVSSYLKKVGYNPDKVPFVPISGFEGDNMIERSTNLDWYKGPTLLEALDQINEPKRPSDKPLRLPLQDVYKIGGIGTVPVGRVETGVIKPGMVVTFGPTGLTTEVKSVEMHHESLLEALPGDNVGFNVKNVAVKDLKRGFVASNSKDDPAKEAANFTSQVIIMNHPGQIGNGYAPVLDCHTSHIAVKFAELVTKIDRRSGKELEALPKFLKNGDAGIVKMIPTKPMVVETFATYPPLGRFAVRDMRQTVAVGVIKGVEKKDPTGAKVTKAAIKKK

SEQ ID NO: 9847 - protein, 448 aa, Triticum aestivum
  unsure (1)..(448): unsure at all Xaa locations
  Clone ID: TRIAE-23APR03-C194_321.p
MGKEKIHISIVVIGHVDSGKSTTTGHLIYKLGGIDKRVIERFEKEAAEMNKRSFKYAWVLDKLKAERERGITIDIALWKFETTKYSCTVIDAPGHRDFIKNMITGTSQADCAVLIIDSTTGGFEAGISKDGQTREHALLAFTLGVKQMICCCNKMDATTPKYSKARYEEIVKEVSSYLKKVGYNPDKVPFVPISGFEGDNMIERSTNLDWYKGPTLLEALDQINEPKRPSDKPLRLPLQDVYKIGGIGTVPVGRVETGVIKPGMVVTFGPTGLTTEVKSVEMHHESLLEALPGDNVGFNVKNVAVKDLKRGYVASNSKDDPAKEAANFTAQVIIMNHPGQISNGYAPVLDCHTSHIAVKFAEIQTKIDRRSGKEIEAAPKFLKNGDAGFVKMIPTKPMVVETFAQYPPXLGRFAVRDMRQTVAVGVIKAVEKKDPTGAKVTKAAAKKK

SEQ ID NO: 9848 - protein, 138 aa, Triticum aestivum
  Clone ID: TRIAE-23APR03-C195134_1.p
DPENGNADGQSDCKPGYTDVSSSPPEPSSGIEQRCRSLDESRDLQQKHQAPEELEFNDQLKAFDYAEARKNTSFGEVRSERRKDNAVASAINVDSGDKRKSLKQTPGAGGGEEDEGNFQNPRRRQAFPPSGNRSATYH

SEQ ID NO: 9849 - protein, 206 aa, Triticum aestivum
  Clone ID: TRIAE-23APR03-C19532_1.p
KKYVELSLADDWFVTEAMDVLVGWTKNLCFSKDLPGCSVLDIGTGSGRLLQQLAKQGFSDLTGIDYSEAAIELARNLAIRDGFEHINFLVDDVLESKLERRFELVMDEGTLDAIGLHPDGPVKRMMYWQSVASLVSPGGILVITSCSRTKDELVQEVENFNQRKLGATLSEGALASDAVVFKYLDHVQAYPNVDGVCIATVAFLHT

SEQ ID NO: 9850 - protein, 446 aa, Triticum aestivum
  Clone ID: TRIAE-23APR03-C195748_1.p
MAPPRPPPARGGRRPPPKSAPLRPEEELLLEAASDGDLVLFKRLARMMDGGRGRVTEAVEAVVECTAGALHLAAGQGELAMCRYLVEELRVDINAIHDGGETPLAYAINGANIATVKYLLDHGADPDKVDDKGFTSLHIAAEEGYCNIVELLLSRGASVDALSNRGTPLHLAATNGHHQTVKILLDHNADCNKIVNGVYTPLLVSIYAPSLKCVKLLIQAGADVNGVGNITPLIAAVGLTECMKCLLEAGADPNVPDEFGRMPIEFAAICGTREDVEILFPLTSRIPAVRDWSVNGIICHAYSLPGQKFYERGLERDRASLKFQGRKALERKDYLSAIELYTKAMGLDYEDATLYSDRSLCFLQIGEGDKAFADAYTCRMMRPDWPKACYRQGASLMLMKDYEKACGALFDGLKMDPRNLQIENALREAMDSLEISRGAKTVSKCP

SEQ ID NO: 9851 - protein, 325 aa, Triticum aestivum
  unsure (1)..(325): unsure at all Xaa locations
  Clone ID: TRIAE-23APR03-C19578_1.p
MGESQPLHAPTAVPHLAGAADEQAAAGVPPPLLPGKEFTRNXKGLVLVLMGVSLRLXQLIAPSLKYPGISPAKTIPIWYGLSAPPGTSCSVLPXGAIGSSLGSLPSAGTDIXEPVWGRKEXFLKFIILINSICGILAFCIAVALYYVTGKESFLVTPLSGFHGALAGFLVGLKQLLPNLELPMCFFWKIKAKWMPFFVMCFSTIMAFIVPDSINFLPTLLSGMYVSWLYLRYFQKNPLTGLKGDPSDDFSFPSLFPDAMRPVTDPVANLFDRMLCARSKPSEIALPVTDPTKASRRRERGERVLEERMAADHAADAEAPAHSAED

SEQ ID NO: 9852 - protein, 125 aa, Triticum aestivum
  Clone ID: TRIAE-23APR03-C195_2.p
RGGRGPAPWRLFEDEEADSDDNFEAGGGAVSAFDGQGPTRPPLAPSPTVIMRIREPKTTTLISASGKMVCTGAKSEQQCKLAARKVKYLTMFSSPNLARSKKSVGVRSETSTMSSSESFTKLVNA

SEQ ID NO: 9853 - protein, 185 aa, Triticum aestivum
  unsure (1)..(185): unsure at all Xaa locations
  Clone ID: TRIAE-23APR03-C196023_1.p
MAEEPNSWAEVAELHDGAGADFWLPDEFLDDDFFSDEKAAAAAAAAAAARSDSDDEDGLGGLSRRVAGLDCGAGDRAIPKAEVMSGSPQSTLCVLQASGEDSPTGGASQVSSPPSSPLEQQPADPWDLLHEAAGQVARLGVDSIPVPVNPPPIHGAGVAPPARKPSPPLLPSPKPXGHYQFPPNN

SEQ ID NO: 9854 - protein, 432 aa, Triticum aestivum
  unsure (1)..(432): unsure at all Xaa locations
  Clone ID: TRIAE-23APR03-C19616_1.p
ATWPDGCRDEEEEEERWSFLALLLELLRKSLLRCRAEDGGQGQGGMEIGLPTDVQHVAHVTFDRFHGFLLRRFNTIDAVXHMIPXANATVFGVSTQSMQCSYDTRGNSVPTILLMMQRRLYEQGGLRAEGIFRINAENSQEEFVRDHLNSGTVPDGIDVHCLAGLIKAWFRELPSGVLDSIPPEQVMQCQSEEDCARVAKCLPPTEAALLDWAVNLMADVVQEEQINKMSDRNVAMVFAPNMTQMADPLTALMYAVQVMNFLKMLIQKTLKDREESNLEDASLPQKDPSDENGHQNPSLPVNPQPEETSGRPSFVSEEPIVYSPTHSAEDKPPVEGDSIASVVHTSDVRSSVEGSASCSQPALVASSAIADASCATAANLLPSRGSRGLNSRRTRKGKRQCGTPAAPPAEKSRGASIVSRINSKVERIEAWR

SEQ ID NO: 9855 - protein, 381 aa, Triticum aestivum
  unsure (1)..(381): unsure at all Xaa locations
  Clone ID: TRIAE-23APR03-C19669_1.p
MGGASGDAIKLFSPLIEQLEEPLETIFQXVHQGYPRGTVLRFLKARXCNATKAYKMLMDCLNWLXQNEIDSFLAKPLLPADLYRFIXDTLLVGLTGYSRSGFNLFHAFGVGLSTXATEHRYLQSHIQMNEYRDRVVLPGASXRCPRKQINTCLKVMDMTGLKLTVLNLNQIVIAITAVAAVNFHLKFRKYEMXNILNAPSAFSACWKVVKPLLQERTKKKIKVLYGPGRDEXLKVMAFASLPHCXKREGSGSGSEVDGVAYDPPFHQELYNYVKQQALRNQDSVGPAKQGSMHVXSPTPEPGRRAKIMETIQSELHSLNGRRRHFPAPAAGSPPSGPRCPCFLLISMIVPAMNHEVRSGSTMRGRRASNCPEQVTAYFILI

SEQ ID NO: 9856 - protein, 202 aa, Triticum aestivum
  unsure (1)..(202): unsure at all Xaa locations
  Clone ID: TRIAE-23APR03-C19701_2.p
MDVPTAGRAAAAAPQRRAWEWEGRVVSPVPAATADEAWALLSDFLAFHKWHPRVAVCRLASASPSGAAAAPGCVRYCEGTPPADGTPADWAHETLLEHDQARRFFRYEMNDNNMGFGAFFAAFRVVPAAAGGCLLRWEFECEPVRGTPKEALEARLQAGLDGMAARVHEHLMSARAAVAAAAXVAAGLEAADELKLDNSIAA

SEQ ID NO: 9857 - protein, 675 aa, Triticum aestivum
  unsure (1)..(675): unsure at all Xaa locations
  Clone ID: TRIAE-23APR03-C19718_1.p
RNPNREGPAAAPAMAGDERYTSAGAPRRKHMLPTLSADQSEDDEEDDTIEVADDDDPGPPQQMQRHRQVLDLEEDEEEEDEARTDGPEHDAHHKQEREAEAEAGEEGVAVVAGEGEGQLIMHEESEAEADHADLDYGEIDPGRVHRSPARELRVGVMQTDARDTDGEEDGXXHQAVPSSRREVVASESEGAEDNYYAGQAPEDEEATQRKPRSKPMEEERDHEVVRDVFGDSDEDEPAPYHAPHEIDEDSNPMEDEFFYYCWSVSGKEMACDDIRYDSDDNREPKTKXKPVVPPLNLVGPRXQPPGRPVGLHGVLVADRPPILPWPCPPLASGHDPVHVTDESGTKKKIRLEDNIVRWRTVKNSDGTTSVESNARFVKWKDGTMQLLIGNEVLDISVHEANHDQSHLFLRSGKGVLQSQGRLLQKMRFMPSSLSSKSHRLLTALVDSQNRKTVKMQKWYDAKDPERVKQEKERAEGQSIRAHSILQRKREKVNHKYTQPARQRRQLSPGFLEDALDEDEETDNHYSSRRMASRGRFEDDLEAEALGERRIINAKKSNMSRGVPRKPSVPPSRPARRQEYSESEREESEYETEGEDIEHSPTGGREELDEEDEYEEDPEPMSDEGIQEPKRKRESAVGGSQRRREVDSDEDSPPRKQAATVHRRKGVVFESDDEDE

SEQ ID NO: 9858 - protein, 334 aa, Triticum aestivum
  Clone ID: TRIAE-23APR03-C19734_1.p
MRGSEMRRRAPEYRRQSRRRLPGWIWWLVGIFLVVGLMLFVLHHNQKEQFRPPVINKGSETEEVSPEIFNFTEELLSSTSFARQLADQMTLAKAYVILAKDVRNLQLAWELSSQIRNSQRLLSQGAVSGRAITQEEAHPIITRLARLIYKAQDSHYDISTTMVTLKSHALALEERAKAAVVQTAEFGQLAAESLPKNIHCLTVKLTEEWLQNPKLRSRSEEHRNSTRLVDNNLYHFCIFSDNVLATSVVVNSTVSNANHPQQLVFHVVTDRINFGAMSTWFLINDFKGCTVEVHCIDEFSWLNAASSLVRWLFFFFICSSLHRPTMEKRRVQGY

SEQ ID NO: 9859 - protein, 409 aa, Triticum aestivum
  Clone ID: TRIAE-23APR03-C19756_1.p
MGEQVATKEEANKEESPAPAAAPEAAPAPAPAEEKKDEAAADQDPKKEEPPAADPPSPPPPVPVILGVEVHCTGCAKRIRRSLLRCKGVEAVHVDMSANQVTIKGAVDPQALCDRLRAKTKRDATLISPLPPPPPAEGEEPPPPPPPAPPLVSEARTVELLVNMHCEACAQQLQTKMMRMKGVVSAQTDLAAGRLTLSATVEDEKIVEYIHRRTGKIASVVPPPPPEPPKEEEPPAPAADAEPPKDEAPADGKKEEAGDNKAAEDGKGAAEAGEEKKEGAGEEDQKPGKQEGVAVDGFPPEEMMKRMVYWPYGGAPGGGIHYKLHPADAEEAMMARRMAMHAMPPPMPPPPHHHHHNPYAMMHQQWAPPPPPPPPGMPMYNSYNYGSSYMMERPPQMFSDENPNACVIS

SEQ ID NO: 9860 - protein, 417 aa, Triticum aestivum
  Clone ID: TRIAE-23APR03-C197725_1.p
MAPPSQLVLAASSTDAGVAAWDLRTGSEAIRHRPCASRPRAVAAVAGRFLAAAQIAAGNSAPIHYYHWDKPQVAVKSFPAEPIRALIADPEGNYLIGGGVSGDIFFWEVASGELLVRWHAHYRDVRCLALYDMLLVSASEDGSIKIWDLLTMLDEQSRFEAKTPYLYNFNQHTLPVTDIACFHGAIAVSSSEDRTCKIWSLSEGRMLRSISFPAIIDSVEIDPRSHIFYAGGRDGKIYVTAMGVDASSQGRDDSSILGILDDHSKAVTSLTSSTDGLLLVSGSEDGNVRVWDTRSQQVTRKFKPSQGPVTNVLIVTPKRLNLPPLQPLRKVCAASGEVVPRAVILPNPENDVHIAGNLSSNLLEQLLDAQQHGSSRLFDSGVSTLNGVPNQQGAEWRSKYLELQDLFVHEVLGDMSS

SEQ ID NO: 9861 - protein, 309 aa, Triticum aestivum
  Clone ID: TRIAE-23APR03-C19780_1.p
MEKYEKLEKVGEGTYGKVYKAQDKATGQVVALKKTRLEMDDEGIPPTALREISLLRLLSSSLYVVRLLAVEQATKGGGAGGGGKPVLYLVFEFLDTDLKKFVDAYRRGPAPKPLPTQVVKSFLYQLCKGIAHCHGHGVLHRDLKPQNLLVDKEKMILKIADLGLSRAFTVPMKSYTHEIVTLWYRAPEVLLGATHYSTSVDIWSIGCIFAEMVRKQALFPGDSELQQLLHIFKLLGTPTEEDWPGVTALRDWHEFPQWKAQRLTRAVPTLEPEGIDLLSKMLQFDPANRISAKAALEHPYFNSLDKSQF

SEQ ID NO: 9862 - protein, 332 aa, Triticum aestivum
  Clone ID: TRIAE-23APR03-C198003_1.p
MSSSAPLPLQRYFCHQCDRAVAIAAPASRDDEVFCPLCAGGFVEELLDDEDPPNPSPQIHPFFPLASFLDLRNPSDLAGVLGPPSPSAPRAASASANNQFDVTDFLHGHLGGLLSGGATIQIVLEGSSFPGGFASFGAGGPVPGGVSLGDYFMGSGLEQLIQQLAENDPSRYGTPPAAKAAVAALPDVAVSADMMAADGGAQCAVCMDDFLLGAAAKQLPCKHVFHKDCILPWLNLHSSCPVCRHEMPTDDPDYENHQRQAAAPAAAAAAPASPGGGPSPRVMERRFRISLPWPLRAAFGAQQAESSDQDAAGSGDYNDDPNASGRSYDDLD

SEQ ID NO: 9863 - protein, 291 aa, Triticum aestivum
  Clone ID: TRIAE-23APR03-C19802_1.p
PPPSPPLPTQLNPTGETGRSSCGGGDVGPRQGRQGAGEGRRQAPPEGAPRQHSGHHEAGDPAAGAAGRREAHLGAHLRGDPRRAQDLPRERHPRRRHLHRARPPQDRHRHGRRLRAQAPGPHPLRLRRLGHQRRAAPASNEINYFYKASSICLWFVVSSVLFALLCSCLMLESMYDVPSLNANRIWKYLGAHLRGDPRRAQDLPRERHPRRRHLHRARPPQDRHRHGRRLRAQAPGPNPLRLRRLGHRRRDLQASKEISSICLGYVVSSVLFALLCSCLMYRDRCTSTKTE

SEQ ID NO: 9864 - protein, 188 aa, Triticum aestivum
  Clone ID: TRIAE-23APR03-C19834_1.p
MAAIKLVSLSLVVLLSIGLASATRVVRYASSTGTGSGVGNGGGTVNGSGGGTGSGNGNAYSGSSGAHANAGGGGSGGGASQDGGTGHGAGSGDGSSSSYTSDGRYSYGGDSYAGGNGAGSGGGQAAGPGSSGYGAGGGAGSGSSAASGGWYPYANANANGNGGGIGTGQNGGSGGGTGGGSGNAGAYP

SEQ ID NO: 9865 - protein, 148 aa, Triticum aestivum
  Clone ID: TRIAE-23APR03-C19836_1.p
HLMFLSARNESSESEDIQELINSSLKCNASTPADDMESGRGGAGAAGSTSSSPSPPVVLPSEQKARYSREEDPGRCSCSDSFFGKYFSFLLLMFVTASLVILPLVLPPLPPPPSMLMLVPVAMLLMLLVLAFMPTSGGRGATGPTAYL

SEQ ID NO: 9866 - protein, 334 aa, Triticum aestivum
  unsure (1)..(334): unsure at all Xaa locations
  Clone ID: TRIAE-23APR03-C19860_1.p
MALVCSRPASLLLIAALLSAATFLAVPNKKTHLPTNGARTRSGSLPPTPRGSPRDRNPYTHRHHSPSSTSSAAATTTSTCLGRDALRRAAPTSSTAISKNFLVVLFGRGTYHIDLSGHDVSAVGADIKHCXSKNILVFLSIGGFGNQYSLPTAQSAAXDVADYIWNAYMLGTRKGVYRPFGDAFVDGIDFFIENGAPANYDELAKRLWNFNKDFRGRTPVQLTATPRCGYPDRHVEWALATGLVGRIFVRFYDDADCAANWQRQWDKWTAAYPSAQIYLGLPASEQKVGYVHPKNLYYSVIQVAQKAANYGGVMVWERYEDKRTNYSSYAIQWA

SEQ ID NO: 9867 - protein, 148 aa, Triticum aestivum
  Clone ID: TRIAE-23APR03-C19867_1.p
MDHHHPPPLPQQHGDHYRPLVLSPQPDHAHALQYQQPQQQATPPPQHHHPSLASHFHLLHLVTRLGDAIATGTRDQAFDALVEELTSQFARSQQLLNSISGTLSSKSVTVEGQMQSLEETRQLLDQRKDLIAKYKSSVEDLLKGDPTR

SEQ ID NO: 9868 - protein, 377 aa, Triticum aestivum
  unsure (1)..(377): unsure at all Xaa locations
  Clone ID: TRIAE-23APR03-C19884_1.p
MEKGTPAIGWAARDDSGLLSPYSFSRRVPKDDDVTIKVLFCGICHTDLHIAKNEWGNALYPIVPGHEIVGIVTDVGPGVKSFKAGXRWAVGYFLDSCRSCDTCSKGCRRGPENQCPTLALTSTAAAFAGSTTQGGFSDVLLVDQRYVLRVPEGLPXLAERRRLLCAGVTVYSTHXSSGLNGAGVKHLGVVGLGGLGQHGASSSARRSGACPVTSDRARRRRKREGGRXGSAATSFLLSQDSEQVKAXAAGTMDGXIIDTVSGGHRLVPLLELLKPXGQVVMVGAHSAPLGLAAYAIMGRGKLVAGNRVGXLASCHAMPDFAGKXHGITAGVAXVKMDYVNAVVLATGEERREIPLRHRRRRQPVGRRRLVLPNTPYA

SEQ ID NO: 9869 - protein, 322 aa, Triticum aestivum
  unsure (1)..(322): unsure at all Xaa locations
  Clone ID: TRIAE-23APR03-C19896_1.p
GRRRSSREGWPGGSRSDCPTARPRRPPPDPRPPRPSPPARSAPPPSXEPPSAPPPAEAYQPGGGAGLPAPAGPLAVPAEGILLPGCSQGFTNKAAKKRGRAMKYGDDGSTSLALVPVPMPEEPTAVAPGDSGAFSAPAVKPAAGGVLAVPPVGMKKRGRPKGSTNKVKKQDKVMSALAFIGTAGAGFTPHVIAVQAGEDVAAKILSFAQHGVRAVVVLSANGAISNVTLRQSATSGGTVTYEGRFCCRSLSGSFAMEDTAGLRSRAGGLTAALASSDHRADGPGHAGLLGHAKRVLRQPHEPGSPGGGHPQQQRPVQHDVAA

SEQ ID NO: 9870 - protein, 112 aa, Triticum aestivum
  Clone ID: TRIAE-23APR03-C198_63.p
MAPSQPKSGLFVGINKGHVVTKRELPPRPSDRKGKGTKRVLFVRNLIREVAGFAPYEKRITELLKVGKDKRALKVAKRKLGTHKRAKKKREEMSSVLRKMRSGGGGAADKKK

SEQ ID NO: 9871 - protein, 558 aa, Triticum aestivum
  Clone ID: TRIAE-23APR03-C198_77.p
MGQDERQHPELPDMEKELSADAVACDHCSGPQAVVYCRADSARLCLPCDRHVHAANAVCSRHLRAPLCAACRATGAVFRHAGPEFLCSNCDFGRSRDAELPLHDRCTVQGYTGRPSAHDLAALLGVPDFDKPSAGKADDCWWAIWEEPQVFSLEDLIVPTTSSHGFQPLVTPSSPKIHNSPDGKTNDEVIRQLRELAEVDMGGGQITPREEAEQAAHLLPSRTESQHTTGNGDFGTDNSHEVATMPTPSYENGGWNNNDYHALNGACKTEHEQEQAPASSAEACLSSFVQMSELCPSMSNGSMMDDGQQANPGTGMPMQAFPKRSGFDVVAGPDRDIVISRYKEKRRTRRFDKQVRYESRKARADSRLRIKGRFAKANQRLKALRAAKELLSAPDGASPAPAAAPDADQHCIRNGDHGTTEEQADQPELPGPVDAPEDASKENVSPTKESDEVEDNGEVPLKFRNYLPHDERLRGGKVAPLSLPKFEDPIAADAAEPKQLENPFGNIAPKNPNWDLKRDVQKRIDKLEKRTQKALAEIALEQQKEKEALEEGGDAAQE

SEQ ID NO: 9872 - protein, 381 aa, Triticum aestivum
  unsure (1)..(381): unsure at all Xaa locations
  Clone ID: TRIAE-23APR03-C198_78.p
MDQDERQHPEPPAMEKELSADALACDYCSGPQAVVYCRADSARLCLPCDRLVHAANAVCSRHLRALLCAACRATGAVFRHAGTEFLCSNCDFGRSRDAELPLHDRCTVQGYTGRPSAHDLAALLGVPDFDKPSAGKADDCWWAIWEEPQVFSLEDLIVPTTSSPWAPRPLVTPSSPKIHNSPDGKXNDEVIRQLRELAEVDMGGGQIXTRERAEQAAHLCLPGQSHSXXPGNAIFGTDNSHEVXPMPPLVYENGGWTNNDYHALNGACKTEHDQEQAPASSAEACLSSFVQMSELCPSMSNGSMMDDGQQANPGTGMPMQAFPKRSGFDVVAGPDRDIVISRYKEKRRTRRFDKQVRYESRKARADSRLRIKGRFAKANQS

SEQ ID NO: 9873 - protein, 277 aa, Triticum aestivum
  Clone ID: TRIAE-23APR03-C19927_2.p
MARRFLAVFAVALALSQSASAKSWLDKRFNTDGTVRTGYDASGQEVVMLNLNQQSGAAGFNSKEQYLYGEFSIQMKLITGNSAGTVACIYLSSGDDEWRDEIDMEFMGNSSGHPVVLNTNVWANGDGKKEHQFDLWFDPAADYHTYTIIWNPENILFKVDNLFIRSFKRFAGLPSPSSKPMRLHATLWDGSYWATEKGKIPINWSNAPFVVSYRNFYANTCVSGGACHAGSDRWMKKQLDAAEWGTVKWAERSYMRYNYCDDGYRFPQGMPGECSRY

SEQ ID NO: 9874 - protein, 280 aa, Triticum aestivum
  Clone ID: TRIAE-23APR03-C19928_1.p
MRSLLLSAPSASPTSFLPRSTALRPLLSLPFRPDLSRPRPLGPPARSLSKKAAMTAAAAKARVDGRGSAMEAREAQSGEIHVIVGPMFAGKTTALLRRVQAEAGTGRTVALIKSDKDNRYGLDSVVTHDGTKMACWALPELSTFQDKLGREAYDKVDVIGIDEAQFFDDLHDFCSKAADHDGKIVVVAGLDGDYKRNKFGSVLDIIPLANSVTKLTARCELCDRRASFTLRKTQETRTELIGGADVYMPVCRQHYLDGQIVIEATRIVMDIERSTEVARC

SEQ ID NO: 9875 - protein, 178 aa, Triticum aestivum
  Clone ID: TRIAE-23APR03-C19940_3.p
MAARARTVAAMSSNSSILLAAAVALALLVSSASAQSGCTAALVGLYPCMNYISGNDTAPTKSCCSQLGSVVQSQPQCLCSALGGDSSSLGGMTINKTRALELPKACNVQTPPASKCNGGGTAPGAATPTTPEVQTPAGSGSKTTPSAYLQENGGSSLQGPAGLVLALAAAAVYAVSSL

SEQ ID NO: 9876 - protein, 188 aa, Triticum aestivum
  Clone ID: TRIAE-23APR03-C19990_1.p
MVVVGGGSGNAWAKEMTLRRRMASIFNKTREHFPSLKDYNDYLEEVEDMRIDVEAIEARIARYQQENAEQIYLSRAKRAEDLAAALKASRMVTVKAGPSDTAAGTSQGISGGAGVQGQYAPAAVPGGLNQPRPTGNAPQPIGGSSDPLHGYDEETMRLRAERGARAGGWTAELGRRRALEEAFNSIFV

SEQ ID NO: 9877 - protein, 208 aa, Triticum aestivum
  unsure (1)..(208): unsure at all Xaa locations
  Clone ID: TRIAE-23APR03-C199948_1.p
MTRRRRRRRARPASPPAALEDDDLLRKIFLLLPPHPSTLPRLSVVCKQWRDVVTDPHFLRGFRDQHRKPPLLGLXNTPDHISHERFFPRDIRSMNINDCRHGRVVFFAQRLGEVVLFDPATGGRRCVVVPPVFTGKEIGVFNAASGIWGDIISIENREMYNLRQPSTLIGNALYWLFPGDDGEGILEFDLGRQSLANIKMPHGLEYYR

SEQ ID NO: 9878 - protein, 492 aa, Triticum aestivum
  unsure (1)..(492): unsure at all Xaa locations
  Clone ID: TRIAE-23APR03-C200015_1.p
MGEEAPAAVTAAATSPAPHLLLICFPGQGHVNPMLRLAKRFAAKGLLVTFSSTSYVGGKITASSGVEAGGDGVPLGRGRIRFEFLDDDFDGNDLDDLMRHLETTGPVVFAELLRRQEEAGRPVTCVVGNPFLPWAIDVAHDAGIPTAVLWVQSCAVFSLYYHHVHGLVEFPPEDDLDARVNLPGLPALSVADVPSFLLPSNPYKLLTDAILKQFRTIHKASWVFVNSFYELEPDVVDALPGISPPPPPLIPVGPLVELEEEGAVRGDMIKAADDCVGWLDAQAPRSVVYASLGSVVVLSAEELAEMAHGLASTGRPFLWVVRPDCSAMLPEGYLDSVAGRGMVVPWSPQDLVLAHPSTACFLTHCGWNSTLETLAAGLPVVAFPQWGDQCTDAKYLVEEFKMGVRIGTPLRRDSVRDAVEDVVAGPDAGAMLEKARAWCAAARTAVAAGGSSDRHXQAFVDQVVAGTIGARADKDIVAAEQQGFDSSSLRGN

SEQ ID NO: 9879 - protein, 188 aa, Triticum aestivum
  Clone ID: TRIAE-23APR03-C200287_1.p
MAPGALARLIIGRRAASPLLARPFAAKARAPQRAPEPEPLSEEDDDFTSGGEAAPIPTEGISKPLAGILKELGKRVPESLLKTRLEDNGFALKYIPWHLANKILNMHAPEWSGEVRNIVYSSDGKSVSVVYRVTLYGTDAEIYREATGTASVEEKGFGDPVQKAEGMAFRRACARLGLGLHLYHEDMS

SEQ ID NO: 9880 - protein, 363 aa, Triticum aestivum
  unsure (1)..(363): unsure at all Xaa locations
  Clone ID: TRIAE-23APR03-C2003_1.p
MASTLALPRPSAPSPGTNVRAPLRSRASTRVSDGSAVAAVADTLFADYKPTTAFLFPGQGAQAVGMGKEALNVGSSXELFDKANDILGYDLLNLCIDGPKEKLNSTVISQPAIYVTSLAAVEVLRAREEGQSVIXNSVDVTCGLSLGEYTALAFAGAFSFEDGLKLVKLRGEAMQDASDAANSAMVSVIGLDSEKVQQLCDAANEDVDEKERVQIANFLCXGNYAVSXGVKGILPVEVNATSFKTIVTVLASCCGLLSTNPRSLQFSRTTRIRPWTNYKRLDHRGIPAFSKVDAQPHSXARGLIKEDYRDNRMTXSPVQWETTVTTLFXKALRRAIELGPXGKVKAGIIERINKGASIENIGA

SEQ ID NO: 9881 - protein, 455 aa, Triticum aestivum
  unsure (1)..(455): unsure at all Xaa locations
  Clone ID: TRIAE-23APR03-C200_1.p
GSRGAVAVPLPARRGRAVGLPRGPHPAPPGPVAPDWLPRSLWGPSPPGRAXYARLGPRFTAPSLTRRTSXVIGPDVSAHXFKSNVFDKSHQEVCRLQRPLFPPGXVFDTSSQVRLEXFTCSTKTSRTRKHSSFVDLKFAVAQLILLTASRCLPVRVVREKVFDDVSALFHDLDNGMQPISVFFPYLPIPAHRRRDQARTRLAEIFAKIIKSRKASGQSEEDMLQCFIDSKYKNGRQTTESEVTGLLIAALFAGQHTSSITSTWTGAYLLKFQQYFAEAVEEQKEVMKSHGDKIDHDILAEMDVLYRCIKEALRLHPPLIMLLRQSHSDFSVTTREGKEFDIPKGHIVATSPAFANRLPHIFKNPDSYDPDRFAAGREEDKVAGAFSYISFGGGRHGCLGEPFAYLQIKAIWTHLLRNFEFELVSPFPENDWNAMVVGIKGEVMVSYKRRKLVVDN

SEQ ID NO: 9882 - protein, 371 aa, Triticum aestivum
  Clone ID: TRIAE-23APR03-C201009_1.p
MALQVAGGAGCCGCLPLLGQRPTAAFRPPRAVASEGAAVEDGSKVMLGGSGVAVTKLGIGAWSWGDTTYWNDFQWDDRKLKDAKGAFEASLDSGITFFDTAEVYGAGVSGAINSESLLGRFIKERKEKEGVEVAIATKFAALPWRFGRGSVISALKGSLSRLGVSPVESYQLHWPGIWGNEGYLDGLADAYEQGLVKSVGVSNYSEKRLRDAHERLKKRGVPLASNQVNYSLIYRNPEENGVKAACDELGITLIAYSPIAQGALTGKYTPANPPTGPRGRIYTSDFLSKLQPLINKIREIGGSYDKTPTQVVLNWLICQGNVIPIPGAKNAEQAWEFAGALGWLLTEQEVEELRSMAREVKPVMGFPVEKL

SEQ ID NO: 9883 - protein, 391 aa, Triticum aestivum
  unsure (1)..(391): unsure at all Xaa locations
  Clone ID: TRIAE-23APR03-C20217_1.p
MSPSLDLPSRILPRVLIVSRRTVRKNKFVDFVGEYHLDLVVGYGAVPIIVPRVAGVHAMLDSFEPIHGVLLCEGEDIDPSLYDAGGDGIDGDALSPEQLEAVRRLHPSDAVVDHEKDSIELLLARRCLERSVPFLGICRGSQVLNVACGGSLYQDVEQELHPAAXATVCHMDYANYDGHRHPXLRVLPDTPLHDCFAESLTGXPPGDGKRLERPDDFDSPGCAKAYQEFVRAVVACKAKLAAAHAHVHVQSAVTTPAKLNHEMEKQRKVIGRSVSLAKNMYMFGNNNSAQHPAQHRDGDLDGGAEFLESNTALSVQQEKWLKQMGATVRNASGYMNRLKVSEEREAAARALMAKMSVAQLASLAAFYRAMGNVCSEVLDAKLQPPSTTLHE

SEQ ID NO: 9884 - protein, 154 aa, Triticum aestivum
  Clone ID: TRIAE-23APR03-C20240_2.p
MATAACPLPHRSLLLLHLALLAFLLAAAPAAQAWTGEIRGRVVCDVCADSAIGPEDHVLEGAEVAVLCITKSGEVINYQAFTNYKGVYSVAETMPESDRWDSCLARPISSFHQHCTRRGDAHSGVKFTYNKQSGSSHNVKTFLYKPANVPLYCS

SEQ ID NO: 9885 - protein, 276 aa, Triticum aestivum
  unsure (1)..(276): unsure at all Xaa locations
  Clone ID: TRIAE-23APR03-C20259_1.p
MYHPHLQQHRRGGESEAASPGDPSSSMSDPTTAAAACHNPPPAPAPASPKSKRGLPGNPAPEAEVVALSPATLMATNRFVCEXICGKGFQRDQNLQLHRRGHNLPWKLKQRGSKEVVRKKVYVCPEPGCVHHDRSRALGDLTGIKKHFCRKHGEKKWKCDKCAKRYAVQSDWKAHSKVCGTREYRCDCGTVFSRRDSFITHRAFCDALTAPTAKAITGGGLPPPTPAHPQQHAMLYSPATILDASKQQATKEPRRRFEPINQSTKGPWQQAIANRR

SEQ ID NO: 9886 - protein, 348 aa, Triticum aestivum
  unsure (1)..(348): unsure at all Xaa locations
  Clone ID: TRIAE-23APR03-C20279_1.p
MATAVAAFRSFIHPTAIAAAIPLPPSHFNLNNFQRHCVGLRLFSSSHRRHPILLPASTSAASGQEFSSDGEYYSEEGPEEYVEEEGEEAEPEVQAVRGYYPPRNRXPALGQEPGRIYVGNLPYTFTAAELTAAFSEAGSVDDVQIIYDKITDRSRGFAFVTMATAEEAAKAVQMFNGALLGGRTVRVNFPEVPRGGEKAVASAAVARTSLRFVDDGTYKGYAGNLGWGVPADALKTAFEGQPGLVGARVIFERXTGRSRGFGFISFQTIEDAKAALQAMDGVELDGRPLRLSLAAQNPPAGSTPSTVQSQQEQTASGGSEPEVDKNSTTSGQFEGEMEKSNLQTTASY

SEQ ID NO: 9887 - protein, 223 aa, Triticum aestivum
  Clone ID: TRIAE-23APR03-C203053_1.p
MAAFASTSPSPAISASAWRMDSLRAALPALRSSPSAAVRPRRQAASAAPFLRSSFVSTSSASSSVSPAPMSSAASASLAFSYTSSFSVESSFAHRLFGIDVRGRILAMRHGKRIPRLNRPADQRKALLRGLTTQLLKHGRIKTTKPRAKAMRKWVDKMITMAKDGSLHKRRQALGYIYEKHIVHALFAEVPDRYGERNGGYTRIIPTFPRRGDNAPMAYIELV

SEQ ID NO: 9888 - protein, 201 aa, Triticum aestivum
  Clone ID: TRIAE-23APR03-C203353_1.p
MKMKRCILLMLALEAAVLVAGRPSAVAVSNDVGTILMPTEGKGQVGTAAASRPWDCCDNTICTRSLPPICICLDEVDECASTCMACVPSVSNPFRRVCGDRYYGDPGPKCTYNTVAGDNNDDALVAAAAEEEKPWECCDMALCTRSYPPMCRCVDEVEQCAATCKSCGVSILNPFRHVCNDWYNGFPGRKCTEAAHAGGNN

SEQ ID NO: 9889 - protein, 360 aa, Triticum aestivum
  Clone ID: TRIAE-23APR03-C20353_1.p
MESCSLVDTAAAALCSTPGARRRGRAGSAARFFNCSSSSREHGVSASYSIGRMLSGVRSAARRKLFRSEPEWMGVNWPDSIGHHWWTSLENNFVLEASEDEYGGVVVDADRLPSDEAAFARSLAASLSYWQSVGKKGVWLKLPVDRSEFVPIAVKEGFKYHHAEEAYLMLTYWIPDEPSLLPANASHQVGVGGFVINDQMEVLVVQEKYRGWALDGVWKLPTGFIQESEEIYTGAIREVQEETGVDTEFVDVVAFRHAHNVAFQKSDLFFICMLRPLSSAIKIDETEIQAAKWMPLEEFVKQPFIQEDHMFQKIMDICIQRLRKCYCGLTAHNVVSKFDGRQSTLYYNVGEPEDVNCDAA

SEQ ID NO: 9890 - protein, 404 aa, Triticum aestivum
  Clone ID: TRIAE-23APR03-C204339_1.p
MDSPEIPPSDRREERPPASLPLPAAFLEFLGENGLDPALYSKADTIPRYIRLKPGMESSVVTEIESELKCDLMRVSWLPDFYAIPPEIQIAGSKAYQQGKIYGIDAASGAAILALDVQSGDHVLDLCAAPGAKLCMLADMLGSSGSLTGVDVAKHRLAACRTMLQKYSLGDRSRLFVADGTSFSILPVNSNLGSMEAFVGIEDNGSIFSEWTSKRSWKDRQKSKKAKAAGSPHLPSTSEPELIYYGKDSGLVGLQKRYVLHPSTDAAACTSGYDKVLVDAECTHDGSIKHIQKFEFWGWKTLDRRVLNVERTGNLLHLQLGLLTNGFKLLKTGGSLVYSTCSLTVAQNENVVQQFLSKHPSAELLKINPADSWPCRSGGIQKTLRFDPATSQTSGLFVAKFVKL

SEQ ID NO: 9891 - protein, 319 aa, Triticum aestivum
  unsure (1)..(319): unsure at all Xaa locations
  Clone ID: TRIAE-23APR03-C20443_3.p
MFLMEFLFANWLNEIPTAATIFISSPHHRAVPTTRLLSLSPPHRTDGAKHAGEQLSSDSARMEMLFSSLFCDSASSENFSGHPGVERCPFLRNINGATTFSFSSALPVAARGGKGPIFEDGPGFESAFKLFHGQDGIVPLSGRSYVPDENRSESTDVKPEPALPFNPLAARAATISLSAFGPFGFNFFNGKGKKQNKKPNNLDQSHKKPNKPDQNSMKQKGGNPPSHEAMSDEWLENGQCPLARSYRAMSGVLPLVAKAPQPPACLKMECRPAIFSARAXRPQPLPTRIVPPALLVLPANLETMRAAWVSVGNAAPTGV

SEQ ID NO: 9892 - protein, 342 aa, Triticum aestivum
  unsure (1)..(342): unsure at all Xaa locations
  Clone ID: TRIAE-23APR03-C2046_1.p
AASLPGAPALIEKPPTRPESAARAPPRLPPRAPQSAGGAPPRSPPRHTPEPGSRAAVRRRAEAGVRARAMDVDSVECLSLPDAAMDADDVGLALHPHGGILAAASRPAAYPKAGAGAGGIVAPGSSVHELLECPVCTNSMYPPIHQCQNGXYIKVKHAALCSFRPYSCPYAGSECSVTGDIPXYLVNHLRDDHKVDMHSGCTFNHRYVKSNPREVENATWMLTVFHCFGQYFCLHFEAFQLGMAPVYMAFLRFMGDENEARNYSYSLEVGANGRKMVWEGTPRSVRDSHRKVRDSHDGLLIQRNMALFFSGGDRKELKLRITGRQEKETQTPPQAACVTATG

SEQ ID NO: 9893 - protein, 476 aa, Triticum aestivum
  Clone ID: TRIAE-23APR03-C20478_1.p
MPLFHPAPCARPAAGRAASRFSGAVVAASGAGGARPPKAPPRRPRGKPRFSRQSAIKKSFQQEQVVSSTPVPADPTVAIIGGGASGLACASALAARGVRAVVFDTGMHGLGGRMATRMVDDGRRLVFDHAAQFFTASDQRFQELVDEWVEKGLAREWRGSIGELEAGGHFTAIPSSTPRYIGVRGMRPLADAMLPENDLIKVVRPSWISKLEPFNGLWRLFENEKPQGQYDAVVIAHNGKCANRLLSTSGLPQLTRQMKRLELSSVWALLAAFDDPLPIPQDNSYGTFEGAFVRDIDSLSWMANNTRKLFPLETNRPECWTFFSTASYGKKNKVPQENIPNATAEKVKRDMLGGVELALGLSTGSLQRPFYTRVQLWGAALPMNTPGVPCIFDPQGRAGICGDWLTGSSIEAAVLSGMSLGDHVADYFASGGERPEEFAIGLDDSLNRVEGHDIGQFPGLDPQKPQVAEPQLAPSI

SEQ ID NO: 9894 - protein, 168 aa, Triticum aestivum
  Clone ID: TRIAE-23APR03-C2049_3.p
MAALPLATAEVCDANSHLITGGELRALQPIFQIYGRRQVFAGPVVTLKVFEDNVLVREFLEEKGQGRVLVVDGGGSLRCAILGGNPVQQAQNNGWAGIVVNGCIRDVDEINGCDIGVRALASHPMKANKKGMGEKHVPVTIAGTRICDGEWLYADTDGILVSRTELIV

SEQ ID NO: 9895 - protein, 225 aa, Triticum aestivum
  Clone ID: TRIAE-23APR03-C205127_1.p
MSASNHSGAGASSPSRSHHLLLPAVPKSRIPFCPACGSPTKLAVPDGDEKTRAVCSSCGRVHYENPKMVVGCLVEHDNKVLLCRRKIEPAYGLWTLPAGYLEVGESAAEGASRETLEEACADVEIVSPFAQLDIPLIGQSYIIFRARMKTPGFSPGSESLECELFALDDIPFDSLAFSSIIVTLRMYIEDVKAGNIKFHYCTINKRIGAGPSDLRSFDIDNHLAV

SEQ ID NO: 9896 - protein, 320 aa, Triticum aestivum
  Clone ID: TRIAE-23APR03-C205251_1.p
MAATLSQLDDGIVRSMAIGAVFTDYAGKISCLDFHRKEDLLVTSSEDDSIRLYNTTSATLSKTTYHKKHGADRVCFTHHPSSILCSSRYNVESGESLRYLSLYDNRCLRYFKGHKDRVVSLCMSPVNDSFMSGSLDHSVRIWDLRVNACQGILRLRGRPSVAYDQQGLVFAVAMEGGAIKLFDSRSYDKGPFDTFLVGGDTAEVSDIKFSNDGKSVLLTTTNNHIYVLDAYGGEKKCGFSLESSRNIATEAAFTPDGQYVISGSGDGTLHAWNINTVQEIACWNSHIGPITALKWAPRRAMFATASTALTFWIPNESSSS

SEQ ID NO: 9897 - protein, 300 aa, Triticum aestivum
  unsure (1)..(300): unsure at all Xaa locations
  Clone ID: TRIAE-23APR03-C20528_1.p
MVDPRQVLAGFLTLSMFVMLGNMIKHDHFTSVSELAVEATGVELNAMKIADNTEITKAGVELEATEEIKPCWTKPSPKDDQSNGFVTMSLTIGPEYHSSQIADAVVIARYLGATLVLPEIRGNELGKSRKFQDMYDVEKFKMNLDGVVKVVDKLPAEWTTKKPAVIRVPNRVTEDFILDTIQPAFQKNSFLRLAIIFSSVSLKPKGTNNKDLDSTACHAMFTGLKLNAEYSEVAEQMLGRLKELSKKSDGKVLAVDMRTDFLEKQTGKTTAGARRKXCYNPQEVLNFLRXKVGFSANTSI

SEQ ID NO: 9898 - protein, 661 aa, Triticum aestivum
  unsure (1)..(661): unsure at all Xaa locations
  Clone ID: TRIAE-23APR03-C206_20.p
MPPKSKAAAAAAEPVSVEDLFTALHRHIEAGEFPQAVKVADQVLAVSPGDEDAVRCKVVAHIKSDATDKALAAIRAAERLPIDLSYYKAYCYYRQNKLQEALDILNGQEETAAVLQLESQIYYRLGXMNDCMSSYEKLQKFKVDSIDLKINIIAALVAGGRASEVQAAMKAQKVDLTTRALRDTRSFELAYNSACTLIENKKYSEAKEQLDLAKRIGKEELMVEDYAEDEIEYELAPVSVQLAYVQQLQGQTQEAMETYANMINKKSGDPSSLAVATANLISVKGTKDVADGLRKLDRLVEKSTAPNQLQLIESLEFKLSSRQKEALYSARVLLLLHANKIDQAQELVSGLLATFRDNVFPVLLQAAVHVREKKVPKAEEVLSRYAEKHPDNSTGVLALAQIAANANHFQIAADSLSKISDIQHMPATVATLVALKERLNDSNGAASVLDSAIKWWKNAMTEDNKLDMFMREAATFKLNHGRDKEACQLYEELVKSYGSTEALSGLVATSARTDLAKAEQYEKQLKPLPGLQGIDVKSLEKTSGARHVEQAMKVDAPEEVKKQKAKKRKRKPKYPKGYDPANPGPPPDPERWLPKRERSTYRPKRKDKRAQVRGAQGSVSREKHDASAANAGATSSKPTTSAKAPEPPKGSNKSRKKKSRS

SEQ ID NO: 9899 - protein, 187 aa, Triticum aestivum
  Clone ID: TRIAE-23APR03-C20761_1.p
MTTRRWWKRRDGSDDADDLVPMDTQEQEELVRSLEQKQVHQSRRWRHVFAGFLLSYTVFLVYSSFHHAWSPWELRYHAYFMEDLPSPMVIVADWIAALACLFAVKGLLQASNSSKKWIWYSFYVGMAVAIFWTYYLLKLPRIRWDVVWLPLGPLIAYASSLYVDHTLMKSMQDISTLRGYMYNFKSL

SEQ ID NO: 9900 - protein, 288 aa, Triticum aestivum
  Clone ID: TRIAE-23APR03-C2079_1.p
MGDRAYGPSSKPVPVAAPRSANGTANGGGVGTPRPPSMVPGRVPPPPMYRPKPMQPPPGRRRSGRGWCCACCLWLTLVLVGLVFLGAIALGVFYVIYHPELPTFAVTSLRLAALNVSDSDSVTSRIEFTVTARNPNEKIAFVYGDIGAAFAADGTDIGDGTVPGFLHPSRNTTVIKGSASAAAATVDPVQAASLRSKKSHAMSVEMDSKVGFQIGQFKSKRISVRVLCGGFSAGLAKPAPSPAPIIVAAAPAPTRSKIRLSSSSTGGGGSATTDAKCKLRVKIWIWTF

SEQ ID NO: 9901 - protein, 141 aa, Triticum aestivum
  unsure (1)..(141): unsure at all Xaa locations
  Clone ID: TRIAE-23APR03-C208525_1.p
PVTELGRQAQIQLGGEQELGSHGRPARPHPRPGGPGPRPGRRRPRPRRPGQPHDPRQCPRLAQRHKPCHRRLICIPSGGTSAPDRRSSSLEVLRRIPRLPPPKSPRIPRPSPATRIHWMXARRXHDVVRTGEVTCGPFHRY

SEQ ID NO: 9902 - protein, 209 aa, Triticum aestivum
  unsure (1)..(209): unsure at all Xaa locations
  Clone ID: TRIAE-23APR03-C209166_1.p
MAMAPRRRTLLKVIVXLGDSGVGKTSLMNQYVNKKFSQQYKATIGADFLTKEVLIEDRLVTLQIWDTAGQERFQSLGVAFYRGADCCVLVYDVNAKRTFNTLGTWHDEFINQAGPSDPKQFPFILVGNKVDLDAGSRRVVPEKKAKDWCVSKGDIPYFETSAKDDYNVDPAFLCIAKLALEHEHDQDIYFNSVAEQGPKTEGQTSGCAC

SEQ ID NO: 9903 - protein, 382 aa, Triticum aestivum
  unsure (1)..(382): unsure at all Xaa locations
  Clone ID: TRIAE-23APR03-C209227_1.p
MSTIPLIKAVVAPSVQETKQSREEPMSDLMVADVDAAAPPPPSQPDNPVRRIAGRPHRAATRPLLPAIPPPDAGGRAPLFRGHLPLDTSLGTYIRLHPPNPVPPAPRLPVILHFQRGCLVGRHRLLXSSCEAVAAGLRAYVASLHYRPAAEXRLPAAYDDAVAAVMWLRDVAPQDPWIAAHGDIARCFVMGSSSGGNMAFNAGVRTKGIDLSPAAVRGLLLHQPYLGGVERTPSEERSEDDFMVPLEANDKLWSLALPLGADRDHEFSNPEKAVAQEAVVGLPRCLVSGSDGDPLIDRQRGFATWLRDSGVEVVAKTDXPGFHAAELFVPREGRGDVRAGSPISYPRPALPRCVSPIGGRLRLARAVWVGFSPVVRLRLVIK

SEQ ID NO: 9904 - protein, 151 aa, Triticum aestivum
  Clone ID: TRIAE-23APR03-C209236_2.p
MASSALSGTHHRLLLPCFLRRLPRPRSRSCSRLRLAACHADTLLSSSGAQGPPSPAACSSASSAGGFSDWLLTNGLPPGKVAILERPVPCSRGGKDRPLHFVAAGQDLEAGDVAFEVPMSLVVTLERVLGDESVGELASGSRPAEFCHLVI

SEQ ID NO: 9905 - protein, 394 aa, Triticum aestivum
  Clone ID: TRIAE-23APR03-C2101_16.p
MSSDEEVREEKELDLSSNEVVTKYKTAAEIINKALKLVLLECKPKAKIVDICEKGDNFITEQTGNVYKNAKRKIERGIAFPTCVSVNNTVCHFSPLATDDSVLEENDMVKIDMACHIDGFIAVVAHTHVIKGGPVTGRAANVLAAANTAAEVAMRLVRPGKKNKDVTEAIQKVAAAYDCKIVEGVLSHQLKQFVIDGNKVVLSVSNADTKVDDAEFEENEVYAIDIVTSTGEGKPKLLDEKQTTIYKRAVDKNYHLKMKASRFIFSEISQKFPIMPFTARALEEKRARLGLVECMNHELLQPYPVLHEKQGDLVAHIKFTVLLMPNGSDKITSHPLQQLEPSKSIEGDAEIKAWLALGTKSKKKGGGKKKKGKKGDAAEVAEPMEVSKDAPSQE

SEQ ID NO: 9906 - protein, 115 aa, Triticum aestivum
  Clone ID: TRIAE-23APR03-C21071_1.p
MAAADYDRAYRPYAPSSAADYDRPYRNEIVPYGDRRIDLVVKPPPPTRSPPPPLPVTKSGGGGGIGSAWCFSDPEVKRRRRVASYKAYSVEGKVKASFRRGFRWIKDKCTGFIHG

SEQ ID NO: 9907 - protein, 661 aa, Triticum aestivum
  unsure (1)..(661): unsure at all Xaa locations
  Clone ID: TRIAE-23APR03-C210_1.p
MAAQAASSASEGGSPAAAAAAAAAAASSFPATSLYVGDLDVSVQDAQLFDVFAQIGGVVSVRVCRDVTSRKSLGYAYVNYNTPADAARAXEMFNLTLINGRPNRIMNSNRDPTLRKRGTAIILIKNLEKSINNKVLYDTFFGFGNFFXVKVEPDPAGKSKGFVLFQXERDEAAHAAIEKLNGMLMNKKKVEVGPFVRKQERDNSPGNVKNDNVYVKNLAETTTEDDLKEIFGKFGAITSVVVMRDGDGRSKCFGFVNFESPDEAALAVQDLNGKKFSDKEWYVGRAQKKSGNEIELKEKFEKNLQEAADKYQNTNLYLKNLDDTVDDEKLRELFAEFGXTITSCKVMRIQTAASXGSGFVAFKSADDASRALXAEMNNKMVGNKPXYVALAQRKEXNRKARLQAQFSQMRPVPMAQTVGPRMQMLPPGVPVGLHMFYGLAPQLINPQPRFGFQQPFMPGLESGDAVLPCLMLRMVQLGQQPQRPPGRRAGAGGMQQPLPMGQEPALGRGCGRGSAVPTCPSRPGPAXHGAGGVIDIPDMIMGGMPMRXDVGESQPVPIGALAAAFANSPPXTPRMMLGEALXPLVAPLEPDRAAXKATSMTLVMVQTEQDHVAESPGVLKAKDAEGTAGSWQRPPAAPKSTLSSTWVGSSLHSRHHLFLSP

SEQ ID NO: 9908 - protein, 309 aa, Triticum aestivum
  Clone ID: TRIAE-23APR03-C21108_1.p
MGAPKQKWTAEEEAALKAGIGKHGAGKWRTILKDPEFSNILRYRSNVDLKDKWRNMNVTVNASGTRDKVRTTTTTTPTAKKPRSAPKQENHPTAITTITSDGDDDVIDVKPIIKPIVTFTTGSGNKSLSRLENIILEAVKTLNEPTGSYKTAVANYIEEQYWPPADFDHVLSAKLNELTSSGKLMKVNRRYRIAPSSSFLEGRRSKMLLLADIKKEPTKVEKVERDGFTAHTKSQVDAELARMRNMSAEEAAAAAARAVAEADAIMAEAEAAVREAEAAEADAVAAQAFAEAAMLTLKNRSSAKLIIRG

SEQ ID NO: 9909 - protein, 595 aa, Triticum aestivum
  Clone ID: TRIAE-23APR03-C2111_1.p
MLPSSRGGGRRRFVLLLSLTAVLAFASPLRASASESDHKYKAGDSVKLWVNKVGPYNNPQETYNYHSLPFCQPSENPGHKWGGLGEVLGGNELIDSQLDIKFLRNVERGSICTLELDPKKTQQFADAIESSYWFEFFIDDLPLWGFVGETDKNSENKHYLYTHKNILVKYNDNRIIHVNLTQESPKLLDAGKNLDMTYSAKWVPTDVSFARRFEVYLDYPFFEHQIHWFSIFNSFMMVIFLTGLVSMILMRTLRNDYAKYARDDDDLESLERDVNEESGWKLVHGDVFRPPRSLTLLSALVGIGTQLAALILLVIVLAIVGMLYVGRGAIITTFIVCYALTSFISGYVSAGLYSRNGGKNWIKAMILTASLFPFLHFAIGFALNTIAIFYGSLAAIPFGTMVVIFVLWAFISFPLVLLGTVVGRNWSGAPNNPCRVKTIPRPIPERKWYLTPSVISLMGGLLPFGSIFIEMYFVFTSFWNYKVYYVYGFMLLVFVILLIVTICVTIVGTYFLLNAENYHWQWTSFFSAASTALYVYLYSIYYYHVKTKMSGFFQTSFYFGYTLMFCLGLGILCGAIGYVGSTLFVRRIYRNIKCD

SEQ ID NO: 9910 - protein, 500 aa, Triticum aestivum
  Clone ID: TRIAE-23APR03-C21163_1.p
MKLRLRSMDARGGVAETHRVQLPDTAVLADVKSFLAAKLSAAQPVPAESVRLSLNRSQELCSPDPSATLAALGLASGDLLYFTLSAELLSQPPPPQTLPRNPSPDTASIGQIASGSQSPGEAGGSSSPPQNLHIQPVSSSLPQNLHIEPISSPRPRALHVEPILPVASDPPDVVMAEAVHAPKSLSSLVIGILKREMEAEDAGCANGTVIHRLAVSLQAALVDAGFLAENPMGSRPGLLKDWASGAAATLTVKYTLPELVAMLPEGEEGKTVVLNCSLMPNFVMIYGCVPGACSEVRRLCLELPKLAPLLYLDSNEVGATEEKEILELWRVLKDELCLPLMISLCQLNGLRLPPCLMALPGDLKAKVLEFVPGVDLARVQCACKELQDLAADDNLWKMRLELEMSPSSKGSGWSGDWKQRFVAAWKVDNSRRHHKRPPSPRFSGYGWGIGTRNPLNFPVIGGDSDRLPFINHNILGRSFGNQRRNISPNCNFEGHRQGFP

SEQ ID NO: 9911 - protein, 166 aa, Triticum aestivum
  Clone ID: TRIAE-23APR03-C2121_1.p
RIQDQKAALQCVKRKRLYEHQVEQLGNCKLSIHQQMIMLVSATATTVTMNAMRSGASGMYAMHKSTHIEVANKTMDEINDNMENMRQIQDLLSAPMGAASDFDEDELEAELADLEGEELEAQLLAPTTSAPMTAPARVPQQSSRPTAQSSKTEDDELAALQAEMAM

SEQ ID NO: 9912 - protein, 223 aa, Triticum aestivum
  unsure (1)..(223): unsure at all Xaa locations
  Clone ID: TRIAE-23APR03-C2121_5.p
MSGVFGRVFGKSKEQSQASALASIDKLSETLEMLEKKENLLMKKANLEVEKAKAFTKAKNKKAAIQCLKRKRLYEQQVEQLGNFQLRIHDQMIMLEGAKATTETVDALRTGASAMKAMHKSTNIDDVDXKTMDEINDNMENMRQIQDLLSAPMGAASDFDEDELEAELADLEGEELEAQLLAPTTSAPMTAPARVPQQSSRPTAQSSKTEDDELAALQAEMAM

SEQ ID NO: 9913 - protein, 287 aa, Triticum aestivum
  Clone ID: TRIAE-23APR03-C21262_1.p
MAKSFTLLALLSALVVLSLLVSPIACSRKLPRPATKAHKNHTAATPSSSAAYGSGGWLAGGATYYGAPNGDGSDGGACGYQSAVGNRPFSSMIAAGNPSLYRDGKGCGACYEVKCTGNQACSGQPATVVITDECPAGAACLGEAAHFDMSGTSMGAMAKPGMADKLRAGGIIKIQYKRVPCKYPGMNIAFKVDQGSNPYYLEVLIEFEDDDGDLNAVDLMEANCGTWTPMAQNWGALYRLNSNTGKPLRGPFSLRLTSDSGRKLVVNNVIPASWKAGATYRSLVNYP

SEQ ID NO: 9914 - protein, 349 aa, Triticum aestivum
  unsure (1)..(349): unsure at all Xaa locations
  Clone ID: TRIAE-23APR03-C2126_1.p
HVAPLRFSCPVHQPKLRAPSSASDSTSGHGGQLPHPPATAPTSAAAPSPTRESTASRTSTSPALDDEAPPGAPPLIADVCFSLEAGQRCLLVGSNGAGKTTILKILGGSHMVAAFLVGALGRSAFHDTALTSSGDLCYLGGEWRRDVAFAGYQVNIQMDISAEKMLFGVTGVDPQRRDELFKILDVDLTWRMHXQICMGLHKPLNVLLIYEITVDLDVLANTNLLTYLKKECAEQGATIIYATHIFDGLDDWPTHIVYVAHGKLQLALPLEKVKEMSQLSLMRTVERWLRKERDEDRRKRKERKEKGLPAFDKVIEGSRVVNNGWAAGRLTSTIAGEDNFSFSSNSVLR

SEQ ID NO: 9915 - protein, 507 aa, Triticum aestivum
  unsure (1)..(507): unsure at all Xaa locations
  Clone ID: TRIAE-23APR03-C21296_1.p
MVPNGNGNLKADIQQVESKTSENDPGATDVNTLSTQNVSKQGNQRSGCLNFVNRFSSGATLXKLGPSPSVKFRQLALQRDDFSRSIHSDNHDNHEHFRLIRKINWGHLWAMGKDWIRQPLNMALFVWIAVVSVSGAILFMVMTGMLNHALPSKSGVSFXFEVNNQILNALFTLMCLYQHPMRIYNFVLLCRWDQKDILRLRKEYCKNGTYKPNEWMHMMVVVVFLNLNCFAQYALCGLNIGYRRSERPPLGVAVTISFAFGAALFASVYNIVSPLGKDYDAELREGDPEAQAGVTSTEGARPATSGRSLERRYSFLQSDERRFVESRPEWVGGLSDFWDSITIAYLSIFCSCCVFGWNVQRLGFGNMYVHIATFLLFCLAPFFIFNLAAXHPEQGTLREALGLTGIALCFFGLLYGGFWRIQMRKRFNLPGNPFCCCNPDVTDCFQWLCCCSCSLAQEVRTADYYDIAEERSYRGQVNGESQGVMSPMAREDGLPLFKSTRSFAVQE

SEQ ID NO: 9916 - protein, 149 aa, Triticum aestivum
  Clone ID: TRIAE-23APR03-C212_26.p
MADQLTDDQIAEFKEAFSLFDKDGDGCITTKELGTVMRSLGQNPTEAELQDMINEVDADGNGTIDFPEFLNLMARKMKDTDSEEELKEAFRVFDKDQNGFISAAELRHVMTNLGEKLTDEEVDEMIREADVDGDGQINYEEFVKVMMAK

SEQ ID NO: 9917 - protein, 325 aa, Triticum aestivum
  Clone ID: TRIAE-23APR03-C212_73.p
MMMTRASMGAMEGAALDEVVRRLVEGGRGGRQVQLSEAEIRQLCVDAKRVFLSQPNLLRIQAPVKICGDIHGQFVDLLRLFDLGGYPPTSTYVFLGDYVDRGKQSLETICLLLAYKIRYPDKVFLLRGNHEDAKINRVYGFYDECKRRFNVRLWKIFSDCFNCLPIAALIDDKILCMHGGLSPELTNLDQIKDIERPAEIPDYGLLCDLLWSDPSPDGEGWGESDRGVSCTFGADMLIEFLEKNDLDLICRAHQVVEDGYEFFAQRRLVTIFSAPNYCGEFDNVGALLSIDENLMCSFQILKPNETGTSRVKRQIPNKPATGGSA

SEQ ID NO: 9918 - protein, 143 aa, Triticum aestivum
  Clone ID: TRIAE-23APR03-C212_81.p
MAAALSLRAPFSLRAVAPPAPRVALAPAALSLAAAKQVRGARLRAQATYKVKLVTPEGEVELEVPDDVYILDQAEEEGIDLPYSCRAGSCSSCAGKLVSGEIDQSDQSFLDDDQMEAGWVLTCHAYPKSDIVIETHKEEELTA

SEQ ID NO: 9919 - protein, 70 aa, Triticum aestivum
  Clone ID: TRIAE-23APR03-C21318_1.p
MSKARNALVVTGLVIFAGTGLAFPFYFVKSKNRPIIDSTKPLPPQATFRGPYVNTGSRDIGPDHTEYPKK

SEQ ID NO: 9920 - protein, 334 aa, Triticum aestivum
  Clone ID: TRIAE-23APR03-C213434_1.p
MAAAALCFRASALSVACFLLAVPLLMAQDPSNLSLEHYSKTCPNAEHVVRAEMECAVRDEPRNAALMLRLHFHDCFVQGCDGSVLLDDTATMIGEKQADQNVNSLKGFEVVDKIKAKLEAECPGTVSCADLLAIAARDAVVLVGGPYWDVPVGRLDSKEASLDLANKDIPTAEQGLVTLISKFWEKGLDATDMVALVGSHTIGFARCANFRDRIYGDFEMTSKYNPASATYLSKLKEICPLDGGDDNISAMDSHTSATFDNAYFETLIKGEGLLNSDQEMWSSIAGYSTADTVNKYWADPELFFKQFSDSMVKMGNITNPAGGEVRKTCRFVNT

SEQ ID NO: 9921 - protein, 254 aa, Triticum aestivum
  Clone ID: TRIAE-23APR03-C21378_1.p
MMGRPVFVLFGSSIVQYSFSNGGWGATLTDVYARKADIVLRGYIAWNSRRALQVITKIFPKDSAVQPSLVVVYFGGNDSIAPHPSGLGPHVPLEEYMDNMRKIGEHLKSLSDKTRVIFLSCPPLNEELLKKSTSTALSEIVRTNETCRLYSEACISVSKEMGIKVVDLWNAMQKREDWATACFTDGLHLSEEGSNIVVEEILRILKEAEWDPCLHWKAMPTEFGEDSPYDLVASSGKSTINPSEWTFHRKRSWE

SEQ ID NO: 9922 - protein, 401 aa, Triticum aestivum
  Clone ID: TRIAE-23APR03-C21384_1.p
MQAAAAVHRPHLLAASPLGGRASRRPSTVRMALREDGPSVAIVGATGAVGQEFLRVITARDFPYRSLRLLASERSAGKRIDFEGRDYTVQDLAAPGAFEGIDIALFSAGGGVSRAHAPAAVASGAVVVDNSSAYRMDPDVPAVMPAVNPSATAVVEIGSGSRMAPDVPLAIPEVNPEALAHVRLEEKAIVANTYCSTIICLMAVTPLHRHAKVKRMVVSTYQAASGAGAAAMEELKLQTREVLEGKPPTCNIFSQQYAFNIFSHNAPIVENGYNEEEMKMVKETRKIWNDKDVRVTATCIRVPTMRAHAESVNLQFEKPLDEDTAREILRAAPGVTISDDRAANRFPTPLEVSDKDDVSVGRIRQDLSQDDNRGLELFVCGDQIRKGAALNAVQIAEMLLK

SEQ ID NO: 9923 - protein, 376 aa, Triticum aestivum
  unsure (1)..(376): unsure at all Xaa locations
  Clone ID: TRIAE-23APR03-C21435_1.p
MELATRDLAALGAADLVRVSAAIPRAAPRTFALLTACLVFPLSFAVLAHSLFTHPILRRIRTSDYTATSAQWVALFAYQFLYLIFLFTFSLLSTAAAVFTVASLYAAKPASIASSLSALPPILPRLLRTFLWVSLLMLAYHVGFVITVVLLILLFDPPMTASTPPPLSFLLALLAVAFLFLAIHVYISALWHLASVISVLEPLCGLAAMSKSRQLLQGRTRTARRPPSSSPSTSTSPRSGTSPASSPCSSPSAASPPCPRAGSXLQGRTRTAAVLVFSYFAICGLITGMFRSAVVKARGEEGSLDMSLAGRIGVGALLVSVLVCVNLLGLLAQSVFYYACKAYHNQEIDRTALYEHLGGYLGEYVPLKSNIQMENL

SEQ ID NO: 9924 - protein, 373 aa, Triticum aestivum
  unsure (1)..(373): unsure at all Xaa locations
  Clone ID: TRIAE-23APR03-C215497_2.p
MKARQFLNVVLQRYGRGSLYTVSRIKPDEHLFYPSTAQAQAAAKSKLSMDWPSSAVVPPWMETISRMPPPRLRFEQSVSDDKRLDFLPFYERGSGGDSKIFCVDAAGHTVLYDIEAGSIQTLPCLNSPKGSRPIGFSTTDPDAPDPERADVFYVMDRVPSSXTPTTSRYGCAVTLXNGRTMKGWNWLKLPTPPGYADNCIGNSHALLEIEGDSILGGSSGEERLGTYWVNTASRKWFKGGSWTLAFLSRAGHGPELDNLLFGIGRDAPNHFCAMGISRLLSKRCPPLVYSWPHLDLPEDWIMQDCSFVYLGNGRFCITKVFEFGLDEDTGNTTDMGAVMSGVEVVHHKKSGLIMVNHRSKFYRFFRDDIQCVL

SEQ ID NO: 9925 - protein, 474 aa, Triticum aestivum
  unsure (1)..(474): unsure at all Xaa locations
  Clone ID: TRIAE-23APR03-C21550_1.p
MLLRRLLHPSHHLRRGLQTLTTTTNAAAAAAPSTPHPLSAPLPFRRLPARLLSPRLLSTSGGDDDTRRPWAFTQDSGDPDPFADVDPAAAVPGEAPLGSSAVVEDPWSKDFRAEDSDKADVFEEIYKDAAAAAPAVRKAVPAEPWTWDLEGEKDDPFAARKDAAAAAPTARKAAPAEPWTWDMEDEKDDPFAAAVLDVGVEGIADEGAQIEELVDGKEEEDAERQRQEDKAREQQLMETLKGPDRAFGDLISASGITEEMIDSLILLKDARGIPGLPPLSEIQDRAIQKMNATSSRAEVERQMQEEIAKARVRQVDEKGRAYGTGKRKCSIARVWIQPGDGKFVVNDKQFDAYFPILDHRADLLRPFTVTKTLGLWDVACTVKGGGVSGQVGAVRLGLRGARQEGDVACTVKGGGVSGQVGAVRVGVSRALQNGEAGLRPYLKAAGXLTRDSRVVERKKPGKAKARKSFQWVKR

SEQ ID NO: 9926 - protein, 355 aa, Triticum aestivum
  Clone ID: TRIAE-23APR03-C21747_1.p
MASRFVNLAVKHMNGRHIPFSIHRINPADFFYPTGSPVPKQGSAFVPPDEIQLPPATIAFDWPSRQGQPCSMDFMAFGANRDKIVAVDSIGCSYLYDAPVRSISTNMPMMPTCMLQPMSIAVGDNGLLVMSKADHQFVALNDGCDPNSRYLLPMSGWYWQSLKPPPFPSRSYHQNEKGSHHPFEVSSYTVVGNSQFWVSTVGAGTFSFDMNSGAWMKAGNWELPFRGRAEYVPEHNLWFGMFGKDDQLCASDLIAVSAVSSPVPHILWKELVWPKDWKLRSTHLLPLGSSRLCIARFFLTSDDDKEENMSDYKRSTTNNFGVLTGVEVVSDEGGLRIIHHKSIRFDFGLSIASVL

SEQ ID NO: 9927 - protein, 147 aa, Triticum aestivum
  Clone ID: TRIAE-23APR03-C217772_1.p
KHEARRGAQPGPITAPLQNQLRRPTVLGLVIVPDAELVPLRSFPPLLQQVTRSRRLSHSYDEVERGGRGYSRCGGEGKAALQELPHGGRGVRELMSGAQAEGEDVATAKDWRYCCAYRHAGGAAEALIVLLVRCAYNHRSLFNLELP

SEQ ID NO: 9928 - protein, 447 aa, Triticum aestivum
  unsure (1)..(447): unsure at all Xaa locations
  Clone ID: TRIAE-23APR03-C2180_1.p
MDVDCEVSAAAAAAVXNGLGGGVQPAAAPSVSADQLDVEAYAAQYSGRTRVARLLFIAEGCGVEAIQLEALRMAHDEARAREDTVLYLDAVLKINGRLGPRYRHDQAWVDSVNRRAEQRKEKLETELNGYRTNLIKESIRMGYNDIGDFFYAHGHLSEAFKSYIRTRDYCTTSKHIVQMCMHVILVSIELGQFAHVTNYVSKAEQTPDTLDAVIVAKLRAAAGLANLETKKYKLAARKFLETGPELGSNYSEVIAPQDVAVCGALCALASFDRSELKSKVIDNINFRNFLELVPEVRELVNDFYASPYGSCLEHLEPLKPNLLLDIHLREHLGTLYNDIRHKAIIQYTLPFISVDLNTMASAFKSSVSMLEKELAALITENKIQARIDSHNKILYARHADQRNATFQRALQTGNEFERDIKAMLLRANLIKHDFNQKNWPGQRKMNL

SEQ ID NO: 9929 - protein, 685 aa, Triticum aestivum
  unsure (1)..(685): unsure at all Xaa locations
  Clone ID: TRIAE-23APR03-C21869_1.p
MSRASAVLPPPAPSTAYGSAFLPPPASPCDGDLLRSLHRLARDLPAAGAPAPFLRPAFPSLSRRARLLAAAFDHLLLCAAGEGGLPRSAPASPPEVRLVLHLFQAVVPDCAAAGPNSAAAASPRRRTPSRATWPKTGHGLANLEPGRSTAPKPPISRWFRENRVAMEGRVPGRSEPAQAAPANKAAPEVARRTASYLGKKLSVSFSPDAANRVVHEIRLLSKSGSDNRAFXASERWTAAMIALVGLLRYAKCVLFSATPRPSDSKADVDVEDDGESPAPPPDLRCPISLDLMRDPVVAASGQTYDRESIDRWFSSGKSTCPKTGQVLANLELVPNKSLKNLISKWCRENGVAMEVCEASKSEQAQAVAANKAALEVARMTASYLVKKLSVSFSPDAANRVVHEIRLLSKSGSDNRAFVGEAGAVPMLVPLLYSEXAGLQLNAVTALLNLSILEANKKRIMHADGAVEAVTHIMSSGTTWRAKENAAAAVLSLASVHTYRRRLGRNPSVVEKLVHLVRTGPTSTKKDALAALLSLAGERENVGKLVEAGVAEAALSAISDEETAAAVLAALAKRGGAEAIVSIDGAVARLVAEMRRGTEWARESATAALVLLCRRLGARAVTQVMGVAGVEWAIWELMGTGTDRARRKAASLGRICRRWAAASAADGERGAECPASSVVPPAMMAS

SEQ ID NO: 9930 - protein, 148 aa, Triticum aestivum
  Clone ID: TRIAE-23APR03-C219067_1.p
MAMAVEARLRQEKVKKFEDFVDRRLKPDLVNAIAQRDNLFQQQKTFLDLKKNIENLEKNGVTSMRSMVNLGSEVYMQAEVPDTKHIFVDIGLGFHVEFTWQEALQFISVREARLARQIDEYTHLIASIKAQIKLVCEGIRELLQFPAE

SEQ ID NO: 9931 - protein, 257 aa, Triticum aestivum
  unsure (1)..(257): unsure at all Xaa locations
  Clone ID: TRIAE-23APR03-C21956_1.p
MAASLPSLSPAPTPSPAATTLASNLLSFPAPRPRLAATHRRAVVAAASSRPPPPPPPSPEGGDEEVERAMGMDGGIPGTSGELLRRVSSRAYGMRRHLMESLDSLAYDVFGDXTPWREQHPKPVYVLARXDNQLWTMKTRRNRSEVERELGMLFSKGGGSGVGTKSKYSGSKFSMVVEDLTEGVLVFEDEDDAAKYCDLLQGGGQGCEGIAELEASSVFNMCRQMKALAVLFRRGRIPPTPQSLERDLRARNRSLED

SEQ ID NO: 9932 - protein, 87 aa, Triticum aestivum
  unsure (1)..(87): unsure at all Xaa locations
  Clone ID: TRIAE-23APR03-C21_2.p
MKRXTTLVLVXALAVLLLLASGPAGVTAARTSPKDVATASPNEKVAAAAAEDHECEMMAGQKXRDVCMARRTLAAHTDYIYTQEKHN

SEQ ID NO: 9933 - protein, 257 aa, Triticum aestivum
  unsure (1)..(257): unsure at all Xaa locations
  Clone ID: TRIAE-23APR03-C2202_1.p
MAASLPRLSLPPTAALPAVTSSRYRPDLAPVPNRRRLGLRLHRSPVVPAAAASSPSLLSSSPQPGSGIGDALGGVAIFSAATGEPVLIRDLWDQNEGMAVVALLRHFGCPCCWELALTLKDAKERFDSAGVKLIAVGVGTPDKARILAXERLPFPLDYLYADPERKAYDLLGLYFGVGRTFFNPASVKVFSRFDSLKEATKNYTIEATPDDRPSVLQQGGMFVFKGKELLYARKDEGTGDHAPLDDVLNICCKVPVA

SEQ ID NO: 9934 - protein, 307 aa, Triticum aestivum
  Clone ID: TRIAE-23APR03-C22038_1.p
MASRCAARLPHPPCAAPQHGWASSRVSARPAQSGASRGRAVACAVSFRPCIDIHKGKVKQIVGSTLRDASDDGTALVTNFESDKSPAEFANIYKEDGLVGGHVIMLGGDPASRSAALEALHAYPGGLQVGGGINLENAMSYLNEGASHVIVTSYVFSDGKMNIERLTQLVELVGKQRLILDLSCRKKDGRYAIVTDRWQKFSDVFVDGPTLERLAAYADEFLVHGVDVEGKRLGIDEELVELLGSHSPIPTTYAGGVSTMDDLERIKKAGKGRVDVTVGSALDIFGGDLPYDTVVRWHKEQNLVSQR

SEQ ID NO: 9935 - protein, 589 aa, Triticum aestivum
  unsure (1)..(589): unsure at all Xaa locations
  Clone ID: TRIAE-23APR03-C22057_1.p
GCKSLISSLLFRDTHRLVVLSVRQIWYPTPPAGPILVGPGRQTTQGERPSDYGEKGGIRSGNRGADSYAPGPDDTGNRYLCTYRKIGNKIVRGGEIAXKLRRDTLAKSRIGDKQPRSDTQAKIRFSXSLPNYDDRIITIFSSGWETTFCEALAKKVXPTLGPLLRILEKVGPDWDAVNLLNPLSLDQLLVSLPLASXNTDRPLMTGTYSLEGPTSEXGLRVPMXVNNNLRADGTSSDELLLIIGDPMVLIKALPXVSSRLHGNPSRSQHLLASSLTQPFPAGSRLGSSSTAPVVGITPMVIYIRPTEGDMVGDWPSIYQQRREVSSAKEFSXRLLCAAANVGGVIGKRGGISKQIRQESGAFIKVDSSFDDPVSPTIDATVRLQPRCSEKIDEASVRLQHTTSEKIDAESGEPSYTTRLLVITALRRTSIANIRIISTEDVPKAASAIRIISQVGVPKVASDDEEMVQISGDLDVARHALVQITTRLKANFFEREGALSGFPPVIPYHPLPASVSDEPKYLSRDNKSAGHDYPYSSGYRASDDVLPVDRYANYGSSQVYGGGYGAYSGGSGSSGLSGSTYLSSGKRYGY

SEQ ID NO: 9936 - protein, 596 aa, Triticum aestivum
  unsure (1)..(596): unsure at all Xaa locations
  Clone ID: TRIAE-23APR03-C2206_1.p
SNPSICPPPPRRHHLTPGFVLLHPAAKPSRSFPGPPPIRSDRPPAMADEAKAKGNAAFSAGRFEEAAGHFSDAIALAPANHVLYSNRSAALASIHRYSDALADAEKTVELKPDWAKGYSRLGAAHLGLGEAASAAAAYEKGLAHDPSNXALRAGMLRCAERITKANRGGISQGELQEKQSRARKSTTTQTILSCASWRRMSMDFQGNPRAAQDHLRDPGVAQKIQKLINARXPNQTIQQSQNEARGGCSEIVLRCVTSVHCFSGQRERTSIRXWDLSVGVVRTAWHNVIPAYNYMEFEPEDISYRTDRAAVFIEMGKYDECIEDCDKAVERGRELRADFKMVARALTRKGTALAKLAKNSKDYDIAIETFQKALTEHRNPDTLKRLNEAEKAKKDLEQQEYYDPKLADEEREKGNEMFKQQKYPEAIKHYNEAIRRNPKDARVYSNRAACYTKLGAMPEGLKDAEKCIELDPTFTKGYTRKGAVQFFMKEYEKAMETYQAGLKHDPNNQELLDGIRRCVEQINKANRGDISQEDLQEKQSKAMQDPEIQNILTDPIMRQVLMDFQENPRAAQDHLKDPGVAQKIQKLINAGIVQTR

SEQ ID NO: 9937 - protein, 402 aa, Triticum aestivum
  unsure (1)..(402): unsure at all Xaa locations
  Clone ID: TRIAE-23APR03-C22073_1.p
IRHEATDMLSVSQFIPDLDVPTLMLGDIVISVETAARQAEARGHTLLDELRTLVVRGLLRLLGFDRVRGRVGCNGIEPHHYDILKSLRWKGKGLAKNAPDLSKPNTXTLDGQVTNSLKRAGSLRFYRPKFKYIFCDMDGTLLNSKSQVTARNAEAXKEARSRGVNIVIATGKTRPAAIDALNMVDLSGRNGIVSESSSGIFLQGLLVYVLEGXEIYRNTLNQEVCREAFLYSLEHKVPLVAFSQDRCFSMFKDPLVDSLHEVYHEPKAEIVASIDQLLGTAEIQKLVFIGTSEGVSSTLRPYWTKAIKERAGVLQAQPDMLELVPPATSKGTGVKILLDHLCISPDEVMAIGDGENDIEMLQLASLGVALANGAEKTKAVANVIGATNDEDGVAQAIYDYAF

SEQ ID NO: 9938 - protein, 303 aa, Triticum aestivum
  unsure (1)..(303): unsure at all Xaa locations
  Clone ID: TRIAE-23APR03-C22143_1.p
MEGSISGPAARGVAVVTGGNRGMGLEICRQLAAHGLTVVLTARDEKGGAEAAEKLREEGLSDVAFHQLEISEPASAAHLAAFIKDKFGKLDILVNNAGVRPFKETLAGKDGMERAEWLRQRTTQTTQDAEDCLRINYHGNKTVTEALLPLLRSSSDGRIVNVSSPWGVLRYISADEIWREMDDVANLSTQRLDEISDLFLEDLGKGNGALERRGWARPTRCXAAYMASKALVCAYTRVISREEGAALRVNCVHPGYVLTGMNDYTGVLTAAEGAAAAVAVALAEKGGVTGAYFDRTELGASFV

SEQ ID NO: 9939 - protein, 134 aa, Triticum aestivum
  Clone ID: TRIAE-23APR03-C22145_2.p
MASSLATAPAAVRDMQCDLESQANALSKIQKDISKNHEVRKQFTIQVGENELVLKELELLNEGANVYKLIGPVLVKQDNAEAKANIKKRIEYITAELMRMDRALKDLEEKQNSKKESIIKLQQKMQAVQAKAQA

SEQ ID NO: 9940 - protein, 429 aa, Triticum aestivum
  unsure (1)..(429): unsure at all Xaa locations
  Clone ID: TRIAE-23APR03-C22148_1.p
RRRRAAPGTPTPTAAIAALRLRYAARATTTSTSSIFAVAKPPGQLEQSFSDVVSKGMDHHDARQDLDGSKHRTISLRGDDVGKKSVVVRTTLLQKRRRKNKGEERKLEECAKILQKAVVGRERLMNMQKLWSMFLDXLNCLDGVGTQICSQKIAPWVFAGDXPDSAKTKPKESDNMVQEAPXANVPSLLELKRIYYELMIRYYSXHTIDYLEILPFLLSRSMNIPSIKEDPAKXWTPDFFKEVRVGFVGASAPSIDPMLSQAFLMLQLHDKNLSEIPXNFELSIEXLVVIQGVELLEISLGGYDTEDNLAXGSLRXKVVEDHKLDVTKHNFLVVPKYYAGTSLRQLADLGDVCFEEAENDNSDXVNGKGLDCLTLHTAEGNSCALHAWPRTAKGLLNFVDDKPPKKLNETGVQKAPLNTQGDDVPQGCV

SEQ ID NO: 9941 - protein, 379 aa, Triticum aestivum
  unsure (1)..(379): unsure at all Xaa locations
  Clone ID: TRIAE-23APR03-C22156_1.p
MDLTGNASAKSELTTIPASIGALSKLVRMDLHQNKITSIPSSIKGCSSLAEFYMGNNLLSTIPDDIGMLSKLGTLDLHSNQLKEYPVGACKLKLSFLDLSNNALSGLPAELGTMTTLRKLLLSGNPMRALRSSLVSGPTSTLMKYLRSRLSSEEEASGSRTTPTKDDQISAARRLSVSSKELNLSGLGVPNVPPAAWETSDVVKLDLSKNLIEDLPNELSLCSSLQALIPSNNKIKKWPGMVVSSLPSLTSLKLDNNPLAEISPTDLESLSKLERLDXSGPASSSSEPSVVSSLPQLLELYLMRMKLQEFPIGLVQLKHLRILNLSQNNLTTIPEGIKDFSALIELDLSDNNITRLPAELGLLEPSLQVLKLDGNPLRR

SEQ ID NO: 9942 - protein, 190 aa, Triticum aestivum
  Clone ID: TRIAE-23APR03-C22177_2.p
MSSSSSFPGPRFPGAGAGASGGGGGGGGGSGSSVRPWGSSGGTSVSSSGKRIQKELLDLNASDCSAGPKGDNLYHWLSTIIGPQGSPYEGGIFFLDVVFPLDYPFKPPMVTFKTRIYHCNVDSTGAVSLEILKDGWSPALTISKVLLAIKAIITNPDPYNPLVESIARLYLTDRAKHDEIAAEWTLRFAR

SEQ ID NO: 9943 - protein, 431 aa, Triticum aestivum
  Clone ID: TRIAE-23APR03-C22204_1.p
MAQPQPQQRVYQAWKGNNRFFLGGRLIFGPDAKSLLVSVALIVVPVLVFCAFIAPHLLHRFSDYNAGYAIPAVAVGFMIYVLLLLLITSAQDPGIVPRASHPPEEDFAYGNPLAGETPGRLQFPRIKEVMVNGMLVKIKYCDTCMIYRPPRCSHCSICNNCVERFDHHCPWVGQCIGQRNYRYFFLFVSSSTLLCIYVFAMSALHIKFLMDGDYPTVWKAFKHSPACLVLMIYCFIALWFVGGLTGFHSYLISTNQTTYENFRYRADSRPNVYDRGCLNNFLEVLCSKGKPSKHRFRAYVQEEVRAPVVNFGRQMEEEPAGGPRAKVEDDPEIGSDLLKISRRRNYEDVDVEMGNQDDGEKEGMGDAKLAAGSGSQIPAVGSEVRVRHSSWDRRSGNWDMSSDVIGRSASDVLGRSASLTEAAPRSQRETH

SEQ ID NO: 9944 - protein, 599 aa, Triticum aestivum
  unsure (1)..(599): unsure at all Xaa locations
  Clone ID: TRIAE-23APR03-C22237_1.p
MPEAPFRRPLHRPDCSVVLGSAGSLCLGNKMDEQRIARISVTWRGRQLDVDADPSCTVKEFGQLLQVLTNVKPETLKLIVPQSANKGSKADQFQFSDPHSSLTLKEAAVSEGKPIRMMGVFEDEIEEVSDNGKRSDLRIIGFEEEEHRLRQRSSGRPRVSLKLPQGQYIFCDFRTLHLPGVELNPPPSEALKRMHILACDPGIIAIMNKHRWRVGIMTEMAPVGNMLAVTXKCILGFNNNMXTGISLRLRTDDLKKDFGNMKSIKKTLLHELFSYATLGEERVLLQDFIQENVKAEPDPDDNDAMPIDVTIVTSGSAGFVASTEQNTIGYSEPVPDDVAKKSSVGCLEPDPDDSADVDLLKXEGDGEYDNDPVPDIQMLVSALESVTSRNKMQAEIRQTTILSSEPDQPDPDDNAANLKSDELQRIEGPVAALCSRLHKAIEXAPVASNTYRGRRSTPYVLESEPDPDDNAADLKSDELQRIEEPVAALCSRLQKAIEMLRSQATPSEAASALQTLFKIIKNVIENPNDIRYRRLRKTNPHFQRSVANYKAAMEVLELIGFCEDVVSDEIGRAETYLVLKRNDPGLLWLAKSSLEVSMA

SEQ ID NO: 9945 - protein, 167 aa, Triticum aestivum
  Clone ID: TRIAE-23APR03-C22263_1.p
MEESGASAAAVVPRLLAAKEESGKSFSDIAAETGLTNVYVAQLLRRQAQLKPDMAPAFRAAVPALTDELVELMMRPPFRSYHPDIVHEPAIYRLNEAVMHFGESIKEIINEDFGDGIMSAIDFYCSVDKIQGADGKDRVVVTFDGKYLPYTEQRSEHMMSRLNRNAS

SEQ ID NO: 9946 - protein, 344 aa, Triticum aestivum
  Clone ID: TRIAE-23APR03-C2226_1.p
MDEAGTSSSAGSAPRGGRPARSGVFYKFTQQDLPAWKPAMTPGYVIAIFLIIGIIFVPLGLICLQASNRVAEIVHRYDIDCVPNAYRSNKQAYIKDSSISKECIQKVKVQYHMKAPIYVYYELDNFYQNHRRYIKSRSDKQLRYGLKYTDSSCSPIEKSDGLPIVPCGLIAWSLFNDTYDFTRGSMGIVVDRKNISWRSDREHKYGKDVYPFNFQNGSLIGGGKLDPDIPLSNQEDLIVWMRAAALPQFRKLYGVIEEDIQADEIITMHITNNYNTYSFGGKKSLVLTTSTWLGGKNDFLGYVYLITGSLSIFLSILFALIHVKIPRPHGDAAYLSWSRKNGNN

SEQ ID NO: 9947 - protein, 142 aa, Triticum aestivum
  unsure (1)..(142): unsure at all Xaa locations
  Clone ID: TRIAE-23APR03-C22378_3.p
MAVSVELPKEYGYVVLTVVAYAFLNFWMSFQXYKVFYPTMYATESENKDAKPFNCVQRGHQNSIEMMPLFFATLLLGGLQHPVVAAALGLLYTVARFFYFKGYATGVPENRYKLGGLNFPAIMGLIICTASFGINLVIREAI

SEQ ID NO: 9948 - protein, 172 aa, Triticum aestivum
  Clone ID: TRIAE-23APR03-C223797_1.p
MDLLGGCGWERRLDLLSGKTFLTPHRHQAAQDGHQDLNLPPTASTAPAAAVTTCAAVCTLDMVRDALQRAAAARSARSPDTSSSSSASTSSSCPSLGKRSRSPPSSTGSPPANPAMRASACPSCLTYVLIAEADPRCPRCTSKGPPLPTKPAAHNSGKKPKIDLNAAADETE

SEQ ID NO: 9949 - protein, 167 aa, Triticum aestivum
  Clone ID: TRIAE-23APR03-C223_1.p
MRRRCNLSTTNKLSMASNHRRFLLSGAVLLSVLAAVAALESVEDECQPGVAFPHNALATCHTYVIKRVCGRGPSRPMLVKERCCRELAVVPDYCRCEALRVLMDGVRVEEGHVVEGRLGDRRDCPREAQREFAATLVTAAECNLPTVSGVGSTLGATGRWMTIELPK

SEQ ID NO: 9950 - protein, 205 aa, Triticum aestivum
  Clone ID: TRIAE-23APR03-C2240_20.p
MAEGKKDAPKLNQRMVSSLSKRTAAAHSWHDLEIGPEAPLIFNAVVEITKGSKVKYELDKKTGMIKVDRILYSSVVYPHNYGFVPRTLCEDGDPIDVLVLMQEPVIPGCFLRAKAIGLMPMIDQGEKDDKLIAVCVDDPEYRHLNDLKELSPHRLAEIRRFFEDYKKNENKEVAVNDFLPPETAQAAIKHSMDLYAEYILQSLKN

SEQ ID NO: 9951 - protein, 409 aa, Triticum aestivum
  Clone ID: TRIAE-23APR03-C2240_30.p
MAFEKIKVANPIVEMDGDEMTRVFWQSIKDKLIFPFLDLDIKYFDLGVLHRDATDDKVTVEAAEATLKYNVAIKCATITPDEDRVKEFNLKQMWRSPNGTIRNIINGTVFREPIICKNVPKLVPGWTKPICIGRHAFGDQYRATDAVLKGPGKLRLVFEGKDETVDLEVFNFTGAGGVAMAMYNTDESIRGFAEASMAIAYEKKWPLYLSTKNTILKKYDGRFKDIFQEIYEAGWKSKYEAAGIWYEHRLIDDMVAYALKSEGGYVWACKNYDGDVQSDFLAQGFGSLGLMTSVLMCPDGKTIEAEAAHGTVTRHFRVHQKGGETSTNSIASIFAWTRGLAHRAKLDENARLLEFAQKLEEACVGTVESGKMTKDLALLVHGSSKVTRSDYLNTEEFIDAVAAELKSRL

SEQ ID NO: 9952 - protein, 268 aa, Triticum aestivum
  Clone ID: TRIAE-23APR03-C22424_1.p
MQATAASFLARPLPWPRRIGRSAYGAVAVHGGVSPLPPRLRGVRCSMSLSIGAGSSDIGDSGFSYQYAPVFRRYRERDPYKLLGVDRDASEEEIRSAKDFLVQQYAGHEASEEAIEGAYEKIIMKSYQHRKKTKINLKTKLLKRVEESPSWVKAFLGYFEVPSMDIISKRLFFFAFIAGWSIATSAENGPAFQLAISLFSCIYFLNDKMKNLLRASTTGFGVLVGGWIVGSMLVPLIPTFIIPPTWSLELLTSLVAYVFLFLGSTYLK

SEQ ID NO: 9953 - protein, 254 aa, Triticum aestivum
  unsure (1)..(254): unsure at all Xaa locations
  Clone ID: TRIAE-23APR03-C22454_1.p
MAAPRPTVLVTGAGGRTGQIVFNKLRERSDQFAARGLVRSEESKHKIGGADDVYVADIREADHLAPAVQGADALIILTSASPKMKPGFDPTKGGRPEFYYEDGAYPEQVDWIGQKNQIDAAKAAGVKHIVLVGSMGGTNPNHPLNNLGNGNILVWKRKSEQYLADSGVPYTIQRPGGLQDKDRGVRXLIVGKDDELLQPDTKAIPRADVAEVCVQALQYEEVKFKAFDLASKPEGEGTPTKDFKALFSKVTARF

SEQ ID NO: 9954 - protein, 442 aa, Triticum aestivum
  unsure (1)..(442): unsure at all Xaa locations
  Clone ID: TRIAE-23APR03-C22466_1.p
KALPFPISTLLPRHTSAPGPPFFPPPPRHRAPPGARSPRRPSHPPPPAVARPPPRQEPPPPPVRRTVLRREKHGPGAAGGEGGGMGGGERRVAVAAVRIAGADAVADNVAAAEGVNSDAXRRGSNKVIIQERFEGYYHCQAQRMDFFXRAKRIYLRSPTMIKKQKPTMKMDEVIPERFVVISGQCLXKSVAILXADGTDLGLCRQSHFPDGPGYQERFYFNPGDTGFKAFKTKYATIGVGICWDQWFPETARAMVLQGAEILFYPTAIGSEPQDMNLDSREHWKRVMQGHAGANLVPLVASNRIGKETVETEHGNSTIKFYGNSFIAGPTGEIVKLANDKEEEVLVAEFDLDEIKSSRQGWGIFRGRGPDLYKVLVTLDGKTSSSSLVTLLSCSIDLKYALLWKRTLGPQNLGEQQTVDRSFCLASPCINSERPLRFQLGDF

SEQ ID NO: 9955 - protein, 134 aa, Triticum aestivum
  Clone ID: TRIAE-23APR03-C22511_4.p
MGSLMAGWDSPVLGHGTKARVTRNRSLTKEEVEAFWRQRGKPAPEDGGDVTSPLGSPGRPMEKSPLGSSQRSRSPASSPVSGVHEETIGAADAGKSRDWWTRSNWAFLNEPPQEERPGTAHTYTPQFHVAAGNA

SEQ ID NO: 9956 - protein, 191 aa, Triticum aestivum
  Clone ID: TRIAE-23APR03-C22511_5.p
WLGLGFAGSWRWHQRYICGYTHGSVTACSHVYVFLLLAARVTRNRSLTKEEVEAFWRQRGKPAPEDGGDVTSPLGSPGRPMEKSPLGSSQTQRSRSPASSPVAGGHEEIDAADAGKSRDWWTRSNWAFLNEPPQEERPGTAHTYTPQFHVAAGNRLTGHVRRVYAILVPRHAAGMPRLGLLPAPRIGHFPL

SEQ ID NO: 9957 - protein, 311 aa, Triticum aestivum
  Clone ID: TRIAE-23APR03-C22523_1.p
MDRSEEETIMSDSDPLLDRKDQSGSLPQLSPPQPATVTVLEIEDEETDGSYAACCRICLEAESEIGDELISPCMCKGTQQFVHRSCLDHWRSVKEGFAFSHCTTCKAQFHLRVETLEDNSWRKIKFRLFVARDVILGFLAVQITIAIISAVAYFLDRDGSFRNSFSDGWDRILSKHPIPFYYCIGVVVFFVLLGFFGLIVHCSSLNDNQDPCLVGCRNCCYGWGILDCLPASLEACFALVVLFIVVFAILGIAYGFLAATMAVQRIWQRHYHILTKRELTKEYVVEDLHGSYSAPKLEPEHEERLKILKLL

SEQ ID NO: 9958 - protein, 520 aa, Triticum aestivum
  unsure (1)..(520): unsure at all Xaa locations
  Clone ID: TRIAE-23APR03-C22564_1.p
MVGKDLVLQRNAPVDIREIAAKATLREVRQNGHTYVELRRVGKRVIFFCTICLTECFSDNVLFDHLKGNLHSRRYAEAKVTLFGPMPWPFNDGVLFFNNSRENDPLLLDSSSHNTSELALVPHPDFAGNGXEVTSRLRDGSSSHNGAKGSFIGANGRLNPGSSPLTEDSALSNRSETDGPLVIPGVLIKDVVLNLPVHLLGYGNIAYXELLKLGEGRKKISKIWCAWVGEEASLGSEASNIYEQSGFAIVNFSYAYELGRKWPSEDQDLPISAGSFFVIDEAGHRGKRRKKSFSDQEASSEESNGQTHDSRSQAIVTGSPTGSSCNLQLSPLSSKSMRRELRKQKRLAAEKVCDICGRSMLPGKDVATLLNCSTGNLACSSRNSSGAFHLFHTSCLLHWTILCQYEVLADQIAKMGKSKRGRKAKTAPKSRIMSILCPECQGTGIHVEGDELEKPTVTEXEMFRYKLKSIEAHKAWMKTPEVLENCSTGLHFPAEHLENAEEQVMPLKSLPFFAADGYMA

SEQ ID NO: 9959 - protein, 231 aa, Triticum aestivum
  unsure (1)..(231): unsure at all Xaa locations
  Clone ID: TRIAE-23APR03-C22572_1.p
MAEPVKLIGAFGSPFVHXRAEVALRLXGVPFELILEDLXNKSELLLKHNPIHKTVPVLLHGDRPAVLESLLIVEYVDEAFDGPPLLPVDPYGRAMARFWAQFIEQKCSRPFWMAVWLDDGEAREGFVRDTKENLALLDARLQGKRFFAGDAVGYLDLAACGLAHLLGVIEEVAGASIVGAGEFPALRRWAEDYTSDATVAACLPRREQLAAHFAGKKDRIKLAVSAMVGRA

SEQ ID NO: 9960 - protein, 148 aa, Triticum aestivum
  Clone ID: TRIAE-23APR03-C2260_10.p
MASKRILKELKDLQKDPPTSCSAGPAGEDMFHWQATIMGPPDSPYAGGVFLVNIHFPPDYPFKPPKVSFKTKVFHPNINSNGSICLDILKEQWSPALTISKVLLSICSLLTDPNPDDPLVPEIAHMYKTDRSKYETTARSWTQKYAMG

SEQ ID NO: 9961 - protein, 194 aa, Triticum aestivum
  unsure (1)..(194): unsure at all Xaa locations
  Clone ID: TRIAE-23APR03-C22645_1.p
MGQALRRASGRLGPPPRATSPAANPPPPARRAAPPPAAAPGRAPPEAGLGVSQNAVTPWTKDAQGALVERDPRYDGRLNHMFGRITTKPGGKPXMGEAYVVERYNKAXLPQVRTIRSRTWAEQGTSLTETWNVRHIQEIIVPYQGQASSHRGPMSVDQIALRFRVEASVVHGIVQFVSLPQDEGIEKKDERRDL

SEQ ID NO: 9962 - protein, 329 aa, Triticum aestivum
  Clone ID: TRIAE-23APR03-C22719_1.p
MASSSPPPSSTASRDDDDDDRRQDAMWERRTHARILVSDADAGCIIGKAGSDIHAMEARSGAHIKLSGRGRPLPGTDRRVVLVSGLFRTVMDAAELVLEKLFYLGDQVIDAEATVVLVVPDACCGALIGKGGEVIKSLAEESNAGITVSPYDICYGFHDRLVTITGHLDNQLQAIFLILSELLDDVRYSSSVASLSFPSSSVRYGGDGQDEHVERYHSRPDTPVRSPDYDSHVQGTLTMGVADEYVGAVIGYGGRPIQEIERVTGVQIKIVKGEFIPGTNEREVVISGTREAVDAAEAMIVQRVSDAAKGRRWQQGGGGGDRRPVKEVE

SEQ ID NO: 9963 - protein, 772 aa, Triticum aestivum
  unsure (1)..(772): unsure at all Xaa locations
  Clone ID: TRIAE-23APR03-C2272_1.p
MSMATKQATLPRSGAFSKGYNFAYAWEKNAPVTEEQNAAISALSHAVAERPFPVNLEDGGTAVPEKESALEEAGAMDAVLVNTHQFYKWFAELESAMKSETEEKYRLYESTLEERVNSCDGILQQVDVTQNLFEELQSLHSSVAIKTQTLHDACDXQRLVGFAEALRSHPSEIQRATSKFSSFARXLSFYYSLPLLKRVGQTIXYELENXDSGMHKYVHACVMLRIVFQSRQLQSRALGMIRSHVLSTLKAASSQVQAAIRGSGSGKNAVTEGVEASLIYVRFKAAAGELKPVFNEIESRSSKKEYAQTLSECHSLFCEQRLYLIRGTVQQRISEFAKKETLPSFTRSGCAYLMEACQFEHQLFAHFFPASAPDVSTMAPLMDPLCTHLYDTLRPRLIYEGNIDSLCELVDILKVEVLGEQLSRRGKSAAGLRPILQRILADVLERLAFCARTHIREGIANFRPSDEDLDYPGKLERSTISSANVSDNSDMYATWYRPLEKTVSCLSKLYHCLESSVFTGLALEAVEVCTASLQSASKVIAKRATPMDGQLFLIKHLLILREQIAPFEIEFSVTHKELDFSHLLDHLRRILRGQVSLFDWSXSTSLARTFSPRILENQIDARKELEKGLKSTCEEFIMSITKLVVDPMLSFVTKVTAVKVALSSGSQGQNLDSVLAKPLKTQAFASPDKVAELVQKVGTAIQQDLPKAMTKLMLYLQNPSTRLIIFKPIKSNIVEAHIQLQSLLNSEYSAEEIQSIGMLSISDLQSQLDSLL

SEQ ID NO: 9964 - protein, 256 aa, Triticum aestivum
  Clone ID: TRIAE-23APR03-C2278_1.p
MRRGMGGCARVTEFGYRHKLHANCIQPWPGSSTILAPLVDYRLATEGVTRTQVESKAVAGSISESLGRSVLSQSKRCSSMVLSLMDCRLGSSVNLHLKCKAQRGRNCCGISPAKKHFLAPLPTVDHQELVGCTLCLEDFRVGTESTEMRWETLLRSNCILPWLELHSSCPICRFQLPTEESKNPCESGSGGGTVSADGDHAESSNSDIEGANHDGGSLLDESSINDRDVTSALNAIFGDGSSSSSSDENGPCASES

SEQ ID NO: 9965 - protein, 328 aa, Triticum aestivum
  unsure (1)..(328): unsure at all Xaa locations
  Clone ID: TRIAE-23APR03-C22810_2.p
RCRPSSGTTRCIPNKNKSNSGPARRVFLDYEFQCRRNAVAGPAALARFVSHCGYSTASNSQRLAGKVAVITGAASGIGKATAAEFVRNGAKVILADIXDDLGRAVAAQLGPDAAYARCDVTDEAQVAAAVDLAVARHGRLDIMHNHAGVTGRMVLDSVGSLDLADFDRTMATNARSAVAGIKHAARVMVPRRSGCIICTASTAGVLGGIIAHPYSVSKAAVLGVVRAAAGELARSGVRVNAVSPNYIPTPLVMRILEQWYPKASAEEHRRIVEGDINEMEGAVLEPDDIARAALYLASDEAKYVNGHNLVVDGGFTVGKAPNMPAPAL

SEQ ID NO: 9966 - protein, 128 aa, Triticum aestivum
  Clone ID: TRIAE-23APR03-C22822_4.p
RSRSLGFGSCDGHGLTTVACSWQAYPIFAATGVAVGICVMQLVRNITTNPEVRVTKENRAAGVLDNHDEGRRYARHPFRRFIDGKSAEIMPGINSFFTDPPRTRRRRRRRRALVQGRKEFLREIFFPF

SEQ ID NO: 9967 - protein, 153 aa, Triticum aestivum
  Clone ID: TRIAE-23APR03-C22828_1.p
KKKRACLPYLLPLHNMWSHADAVYQLHPYLQQFGLFYAFIDTMALVPGWLFLMIFMTVYFFVVRRKWSPHFLRYHIILAILLDTGSQALATMCNWNPSIVFQGKPMAYFWMTLAFIQIFTVVECMRCALSGMYPNVPFISHTAFIHSDLNLFR

SEQ ID NO: 9968 - protein, 94 aa, Triticum aestivum
  Clone ID: TRIAE-23APR03-C22830_5.p
ITNQKHTISSPLLSSHGCSRSQVRGLRPPGRPLRGRAGPGRVGTADGRSSDVHRALRVCALPEREGLHRYLHSPAALRSQMPLHLFWHGLLGWL

SEQ ID NO: 9969 - protein, 612 aa, Triticum aestivum
  Clone ID: TRIAE-23APR03-C228_1.p
MRAHREQEERTSFPQSATTSAPPRGPGRRLWVGVPAPVRPRRPITAVRSSRTAGRHTARPGKRLAARRRSPLPGPAPATRTRAARNLLLVVGPRGPAGEPAGLGGVPGGLPPPMAANGRRAMVSSPPYDQYKDGWETTVVSAIKVVDKYERVRYFHCYKRRVDRVFVDHPCFLEKVRGKTKEKIYGPDAGTDYEDNQQRFSLLCQAALEVPRILNLDNNPYFSGPYGEDVVFVCNDWHTGLLACYLKSNYQSNGIYRAAKVAFCIHNISYQGRFSFDDFAQLNLPDRFKSSFDFIDGYDKPVEGRKINWMKAGILQADKVLTVSPYYAEELISGEARGCELDNIMRLTGITGIVNGMDVSEWDPTKDKFLAVNYDITTALEGKALNKEALQAEVGLPVDRKVPLVAFIGRLEEQKGPDVMIAAIPEILKEEDVQIVLLGTGKKKFERLLKSIEEKFPSKVRAVVRFNAPLAHQMMAGADVLAVTSRFEPCGLIQLQGMRYGTPCACASTGGLVDTIVEGKTGFHMGQLSVDCNVVEPADVKKVVTTLKRAVKVVGTPAYHEMVKNCMIQDLSWKGPAKNWEDVLLELGVEGSEPGVIGEEIAPLAMENVAAP

SEQ ID NO: 9970 - protein, 331 aa, Triticum aestivum
  Clone ID: TRIAE-23APR03-C229_1.p
MEEAAAGPLHTRVCIIGSGPAAHTAAVYAARAEPKPVHFEGWLANHIAARGHLTTTPHVETVRGFPDGILGLDRMDRCRAQSVRFGTKIFYRTVTSVDFSSRPFRVSSDDTVVHADPVVLATVACARGLHFAGSDAFWNRGITACAVCDGAAPIFRNKPIAVVGGGDSAMEEANFLTKYGSRVYIIHRRDAFRASKIMQARALSNPKIQVVWDSEVVEAYGGSDGGPLGGVKVKNLVTGEVSDFRVAGLFFAIGHEPATKFLAGQLELDSEGYVATKPGSTHTSVKGVFAAGDVQDKKYRQAITAAGSGCMAALDAEHYLQEVGAQEGKTD

SEQ ID NO: 9971 - protein, 613 aa, Triticum aestivum
  unsure (1)..(613): unsure at all Xaa locations
  Clone ID: TRIAE-23APR03-C22_35.p
MATRARVTIPLLFLLGTSLLFAAAVSASHDEEEDRRGGRSLQQCVQRCHQDRPRYSHARCVQECRDEQQQHGRHEQEEQGHSHGRHGEGGREEEQGRGXVGRHGQGEPEEEEGRGRGRHGEGEREEHGRHEQGRGRRGEGERDEEHGDSRRPYVFGPRSFRSIIRSDHGFVKALRPFDEVSRLLRGIRNYRVAIMEVNPRSFVVPGLTDADGVGYVAQGEGVLTVIENGERRSYTVRQGDVIVAPAGSIMHLANTDGRRKLVIAKILHTISVPGKFQYFSAKPLLASLSKRVLTAALMTSDEQLGRLLFGRRQGQEEEESISIVRASEEQLRELRRQASEGGQGHHWPLPPFRGDSRDTFNLLEQRPKIANRHGRLFEADGRSFHALAQHDVRVAVANITPGSMTAPYLNTQSFKFAVVLEGEGXEVHIVCPHLARDSEXREHEHGKGRRSEEEDDDQRQQRRRRGSGSESESESEEEQDQQRYETVRARVSRGSAFVVPPGHPVVEIASSRGSSNLQVVCFEINAERNERVWLAGRNNVIGKLDSPAQELTFGRPAREVQEVFRAKDQQDEGFVAGPEQQSRHEQEQERRRGDRGRGDDAVGAFLRMATGAF

SEQ ID NO: 9972 - protein, 275 aa, Triticum aestivum
  Clone ID: TRIAE-23APR03-C22_37.p
MATARLLLRSASLLPLRRSPLHSSGFQPRAAMASDAASQFQKIQIQREDTTFDVYVVGKENAPGVVVLQEWWGVDYEVKNHAIHISQIGDGYRALIPDLYRGKVALEVAEAQHLMEGLDWQGAIKDIQASVKWLKENGSPKVGVTGYCMGGALAVASGVLVPEVDAVVAFYGTPSSELADASKAQAPIQAHFGELDSFVGFADVTAAKSLEEKLKASGVAHEVHIYSGCSHAFMNASPEALKRRKGMGLTDENQGAIDLAWSRFSTWMGRFLGSA

SEQ ID NO: 9973 - protein, 348 aa, Triticum aestivum
  unsure (1)..(348): unsure at all Xaa locations
  Clone ID: TRIAE-23APR03-C23068_2.p
MVRTTVQELAAAVEEPPRQYVVHERDRDHLLAADEMPDPIPLIDLGRLTAADEAHKLREALQTWGLFLVTNHGIEESLMDAMMSASRDFFRQPPEEKNKCSNLIDDGEHLEMEGYGNDKVVTPQDQGLSWNDRLHLRXVEPQDERNFAKWPTHPESFRDVLXEYASRTKRIRDLIFAINSPRSWTWMKDYFVNXISNTARGFARFNYYPPCSRPELVLGMRPHSDVGLLTILFVDHDVGGLQVQRNGKWYNVPVKPYTLVINLADCMEIMCNGIFMSPVHRVVTNAKKERLSLGVFYVVDGETVLEPAPGLLDDKRPPRYGKFKAKDFGFSFXEHFRQGKRFIETLKI

SEQ ID NO: 9974 - protein, 151 aa, Triticum aestivum
  Clone ID: TRIAE-23APR03-C23091_1.p
MSLGGGGGDGVSPGNVPVCYYGAGGRVSATLERRVRAAGVLLRCAACGLAVLAAALLGADRQSRTFFSCDQVMAYVIIGAVAVAMEAALLGKTGQVEFQWMKTCELYQRFCTQAGGGVACAVAASATMVGIALVSAFNLFRLYGHGKGSSK

SEQ ID NO: 9975 - protein, 340 aa, Triticum aestivum
  unsure (1)..(340): unsure at all Xaa locations
  Clone ID: TRIAE-23APR03-C23095_1.p
MLRTKPQLSSSLLASTPLFNPPSNPNHAKPIAASPSPRRRLRISAASTAVSPGATALSRVDVLSEALPFIHRLPGNAVVVNYGGAALKSPEXQSSVXSDDLVLLSCVGLRPILVHGGGPEXINSWLLRVGVEPXFRQRPPPSARRPTAGVVHNAAAVGVVGELAPLVPPALRPIIASGHIPVIATVAADETGQAYNINADTAAGEIAAAIGAEKLLLITDVSGILADRDDPGSLVKEIDIAGGRRAAAVGQVAGGMIPKVECCVRALAHPGSLVKEIDIAGVRQMVSGGQVAGGMIPKVECCVRALAQGVHTASIIDGRVPHSLLLEILTDEGTGTMITG

SEQ ID NO: 9976 - protein, 359 aa, Triticum aestivum
  unsure (1)..(359): unsure at all Xaa locations
  Clone ID: TRIAE-23APR03-C230_105.p
MSCSHLSTAWSSSALASTSTRRRASTGSSSLVVRCSLRDLRNRIDSVRNTQKITEAMKLVAAAKVRRAQEAVVSSRPFSXEALVEVLYNMNQEIQSEDIDLPLTRQRAVKRVAIVVLTGERGLCGAFNNNVLKKAEARMEDLRQLGVDYTVISVGKKGNAYFQRRDYIPTERFLELAGIPTVKDSQAICDLIYSLFVAEEVDKVELVYSKFVNLVRSDPIIQTLLPMSPKGEICDVNGICVDATEDELFKLTTKEGKLTVEREKIKIEMQPFSPVVQFEQDPVQILDALLPLYLNSQILRALQESLASELAARMSAMSSATDNAIDLRKNLSMVYNRRRQAKITGEILEIVAGADALSG

SEQ ID NO: 9977 - protein, 112 aa, Triticum aestivum
  Clone ID: TRIAE-23APR03-C230_58.p
INPSPSSVSSFPLSKDCAAAKPNPSLRPPSNPHRLQRGGMSRRWSRTIYVGNLPGDIREREVEDLFYKYGRIVDIDLKVPPRPPGYAFVEFEDPRDAEDACAGRDGNLGKSR

SEQ ID NO: 9978 - protein, 377 aa, Triticum aestivum
  Clone ID: TRIAE-23APR03-C230_80.p
MADGEDIQPLVCDNGTGMVKAGFAGDDAPRAVFPSIVGRPRHTGVMVGMGQKDAYVGDEAQSKRGILTLKYPIEHGIVSNWDDMEKIWHHTFYNELRVAPEEHPVLLTEAPLNPKANREKMTQIMFETFNAPAMYVAIQAVLSLYASGRTTGIVLDSGDGVSHTVPIYEGYALPHAILRLDLAGRDLTDSLMKILTERGYSFTTTAEREIVRDIKEKLAYVALDYEQELETAKSSSSVEKSYELPDGQVITIGAERFRCPEVLFQPSLIGMEAPGIHETTYNSIMKCDVDIRKDLYGNIVLSGGTTMFPGIADRMSKEITALAPSSMKIKVVAPPERKYSVWIGGSILASLSTFQQMWISKGEYDESGPSIVHRKCF

SEQ ID NO: 9979 - protein, 377 aa, Triticum aestivum
  Clone ID: TRIAE-23APR03-C230_92.p
MADGEDIQPLVCDNGTGMVKAGFAGDDAPRAVFPSIVGRPRHTGVMVGMGQKDAYVGDEAQSKRGILTLKYPIEHGIVSNWDDMEKIWHHTFYNELRVAPEEHPVLLTEAPLNPKANREKMTQIMFETFNVPAMYVAIQAVLSLYASGRTTGIVLDSGDGVSHTVPIYEGYALPHAILRLDLAGRDLTDSLMKILTERGYSFTTSAEREIVRDIKEKLAYVALDYEQELETAKNSSSVEKSYELPDGQVITIGAERFRCPEVLFQPSMIGMESSGIHETTYNSIMKCDVDIRKDLYGNIVLSGGTTMFPGIADRMSKEITALAPSSMKIKVVAPPERKYSVWIGGSILASLSTFQQMWISKDEYDESGPAIVHRKCF

SEQ ID NO: 9980 - protein, 272 aa, Triticum aestivum
  unsure (1)..(272): unsure at all Xaa locations
  Clone ID: TRIAE-23APR03-C23140_2.p
MASSPSPSAARALLVLAAAALVLSSVSAAAGSPPLAKGLSFDFYSAKCPQAEAIVFSFLKDAVRKDVGLAAXLLRIHFHDCFVQGCDGSVLLDKTNGVDSEKVSPPNVTLRPSAFKAINAIRALLQRACGGPVVYCADIGALAVRDSCHLAGGPRYAVPLGRRDGLTPASLDTILGALTPTTSXLLNRQGLFTSDQDLHTDAGTKPVVTRFAVDQAAFFDQFVKSMVKMGQINVLTGNQGQIRTDCSVPNAARSTGDELPWSVVEAAESFVL

SEQ ID NO: 9981 - protein, 393 aa, Triticum aestivum
  unsure (1)..(393): unsure at all Xaa locations
  Clone ID: TRIAE-23APR03-C231545_1.p
MEAFLAGFRAPPRASAVPTARSPPPSPFFLGTRRSKPSSSASVVCMAERHLISKLDSTEKAWKEMSIRLGDPDIVSDPSKYQKLAQSVSDLGEVVTAYREFKECERQIEETKALQKENGDDPDMAEMIASELESLSDQLAELEERLTVLLLPSDPLNSRNILLEVRAGTGGDEAGIWAGDLVRMYQRYCELNNWKFKPVSCSEAEKGGYKTYVMEVKGKQVYSKLKFESGVHRVQRVPQTETMGRVHTSTATVAIMPEPDEVDVVIDPKDIELKAPRSGGAGGQNVNKVETAIDLIHKPTGIRIFCTEERSQLQNKERAFQLLRAKLXGTGARSEKIRTYNYKDNRVTDHRLKMNFVLSSFLLGDIESAVQSCAALEQKELLEEMATSSAVKA

SEQ ID NO: 9982 - protein, 104 aa, Triticum aestivum
  unsure (1)..(104): unsure at all Xaa locations
  Clone ID: TRIAE-23APR03-C2317_1.p
LNDKEIPGSRCCHTLLFVIVYGIVAVACTVAILVSETDVMAPPELXKQVEQVLSSNSGIAHFVKIFPGVSHGWTVRYKSEDAAAVKSAEEALADMIDWFNKNLK

SEQ ID NO: 9983 - protein, 519 aa, Triticum aestivum
  unsure (1)..(519): unsure at all Xaa locations
  Clone ID: TRIAE-23APR03-C231806_1.p
MAVAGAPPVLQLLPQQWQLILAILLVPLGFLLLRGRSGSGLKLPPGPMRLPFVGNLHQIGPLPHRSLAALARRHGPVMMLRLGMVPTVVLTSPEAAREALKTKDDDCSSRPLSAGPGLLSYGYKDVAFSPWSDYVREMRKLFIIELLSRRRVQSAYYARDAQIDKLIETLTVVGPNPVPLEAHIFATMDRIVGLFAFGESYAGEQFKGQFVPLLNATMDMLGSFSAQDFFPNGVGRLIDRITGVKGDRERGXGEHGRVSEDQKEQCDGRKGTGGGGSDLVQELLDIRKRAAASAAGTFTRDHVKAILMNTFIGSIDTTTVTITWAMAELIRKPRVLQRAQLEIRTAAGGGSRVHQADMPKMSYLRMVLSETLRLHPPATLLVPRETLRPIQVAGYDIPAKTQVIVNAWAISRDPSAWKDPEEFNPERFQDTDVDFNGSHFEFIPFGAGRRICPGLAMGVANAEYILANLLYCFNWALPNGVSREGVNMEEEGVLTYRKKTSLMLVPTPYHPAQEKEEEY

SEQ ID NO: 9984 - protein, 243 aa, Triticum aestivum
  Clone ID: TRIAE-23APR03-C231_13.p
IGVEPSEKAVPAAAAAPAPSIPLPRRPTPSASRARRRPPRPCRLDPVRNLSPLGFEGNMARLVSSSLLRGLARSCRAPSTATVSRPAFQQFMNYSSGISGDSNVNGGTSATRVTADTDTHQDFQPTSKGSDMSLQDIVAQDIKENPVVIFMKGYPEAPRCGFSALAVKVLQQYGVSITARDILSNMKLKESVKAYSNWPTFPQIFINGEFVGGSDIILSMHQKGELKDLLGDSAQKGEQDSAQ

SEQ ID NO: 9985 - protein, 244 aa, Triticum aestivum
  unsure (1)..(244): unsure at all Xaa locations
  Clone ID: TRIAE-23APR03-C2323_1.p
ISIHDLQLPIKEYQLKLKPLLYAFGFKHLSMTTIRAFXFFYLLLPQPRPPTDDDDDXICFKYDSERPDLVTPFHNSLKQIAREISVVTTRRVFERIAVCHVSQRTAWKLLKDAAKSSKRKALRGMSIPEYTYCVARTTFRAHALGVAATWVVQSVVQVYKCFIRQPDNDDELFDEKEKLRLFARRIYSVTIKCGFSLVFASIGAGLGVLLHPVHGQWIGCILGDFAGPVVAILIFEKLQFPLEG

SEQ ID NO: 9986 - protein, 410 aa, Triticum aestivum
  Clone ID: TRIAE-23APR03-C23260_1.p
MELRLRAPASPASASPRGTSVSPSPRPHPRLPSQPIQKRLSGSAVSVSRRGTAARSSLCSALMAASYNTGTPDLVDFDWETLGFQLVPTDFMYIMKCSSDGVFTKGELVPYGPIELNPAAAVLNYGQGLLEGLRAHRKEDGSVIVFRPEENALRMRIGADRLCMPAPSVEQFLSGVKQTILANKRWVPPTGKGSLYIRPLLIGSGAMLGVAPAPEYTFVVYVCPVGHYFKDGLSPISLLTEEEYHRAAPGGTGDIKTIGNYASVVSAQRRAKAKGHSDVLYLDPVHKKFVEEVSSCNILMVKDNVISTPLLTGTILPGITRRSIIEIARNLGIQVEERLIAIDELLDADEVFCTGTAVVLSPVGSIVYHGRRVEYGGGKVGAVSQQLYSALTAIQKGLVEDSMGWSVQLN

SEQ ID NO: 9987 - protein, 238 aa, Triticum aestivum
  unsure (1)..(238): unsure at all Xaa locations
  Clone ID: TRIAE-23APR03-C23277_1.p
VFLRHFPRPPREAPRGPRVRLARSVAPPLPPPPRKALAPFIPGTDSRKGFLAARLFLRHAEPDRVPWVQERSTLPQRGPQRVLRRVPRRHQRAASRNXEMAQLICVGCRTLLMYTRNATTVRCSCCDTVNLARPAPPVNSIAHVNCGQCQTVLMYPYGASSVKCAICNFITNIGMNTVRPLPPTMHAPNGISYSVPSTSAPSAQSQNVTVVVENPMTVDDKGKLVSNVVVGVTSGGKK

SEQ ID NO: 9988 - protein, 157 aa, Triticum aestivum
  Clone ID: TRIAE-23APR03-C2327_1.p
MRQGRHLRQTTPSDVPPPGVCPGRYLRRQLRPPWGNARQRIHRTPYGHVTSSSWVRCFEGFCRCGRCFLRGRCAVCGYAMNFFSTDGHQWMPCGSKRPVAGQTTMQERTTKGLASQLLPPPISKNDFENVLARQRPTVGKKDLEVHEKFTKEFGEEG

SEQ ID NO: 9989 - protein, 492 aa, Triticum aestivum
  unsure (1)..(492): unsure at all Xaa locations
  Clone ID: TRIAE-23APR03-C2329_1.p
MRLLLQGLGLDQERHQHGGAPVAVRPRMSSLQSVRIAATEVWYRSQRPDLVRACRSPRTNTVTHRTPSSSRQTEGWANNQLYDAARAYLATRINTDMQRLRVSRVDETKSMMFSMEEGEEMADVHEGTEFKWRLVCRDNSSASSSNGNGRGGSGNFKLEVRSFEMSFHRKHKDKALTSYLPHILAVAKKIKEQNRTLKIYMNEGESWFAIDLHHPSTFSTLAMDHKLKQSVMDDLERFVKRKEYYKKIGKAWKRGYLLYGPPGTGKSSMIAAMANYLKFDVYDLELTEVNWNSTLRRLLIGMTNRSILVIEDIDCTVELQQREEGQEGTKSNPSEDKVTLSGLLNFVDGLWSTSGEERIIIFTTNYKERLDPALLRPGRMDMHIHMGYCCPESFRILASNYHSXDHHVTYPEIEEMIKEVMVTPAEVAEVLMRNEETDVALKGLIQFLKRKKDGAGKPENVDQVAKEEEQEKEMMAQSDVPDNQDQQDGSKE

SEQ ID NO: 9990 - protein, 367 aa, Triticum aestivum
  unsure (1)..(367): unsure at all Xaa locations
  Clone ID: TRIAE-23APR03-C233_29.p
MSDVTAEFTPRQRLPTPSPSLSPQQSRSRQPPPPGSDPLALGVVIFIAVCFLLVSISAPSSILHQVPEGHVGVYWRGGALLKTITTPGYHLKLPFITQFEPIQVTLQTDQVKGIPCGTKGGVMISFDKIEVVNRLNKDFVYETLLNYGVHYDKTWIYDKIHHEINQFCSAHSLQQVYIDMFDQIDETMKEAIQRDCTRYAPGIEIISVRVTKPNIPVSIRRNFXLMEEERTKALIAIERQKVAEKEAETQKKIALSEAEKNALVSKILMQADANGRRTVPKGSRQIDNEMFLARERALADANYYRITKEAEANKLKLTPEYLELRFIESIANNTKIFFGEKIPNMIMDQRLIRNHLDSAPSKDQLEI

SEQ ID NO: 9991 - protein, 451 aa, Triticum aestivum
  unsure (1)..(451): unsure at all Xaa locations
  Clone ID: TRIAE-23APR03-C233_36.p
MELAHRFLDRGFAVTFVNTKFNHRRVVAAAAGAATAYSSAGGGRLRLVAVEDGMDDAGDHENLILLNAAMQEAIPPQLEALLDGEDAAGEGLGKVTCVVVDSGMSWALDVVKRPGPSRRPRLWPASAAVLSVLVNAKRLIRDGVIDDDGAPVNLKNNSFHLNESATSMDATFLAWNYMGNRDAERLVFHYLTSTAQAAAEKADFLLCNTFSDIEPAVFTGPTPATILPIGPLRTWQRPTRHAPVGHFWHADDDACTSFLDGQPRGSVVYVAFGSISIMTAAQLQELALGLESSGRPFLWVVRPEQAGKLPAGFAGAIDGLGKGKVVGWAPQEQVLGHPXAVGCFVTHCGWNSTLEGVRNGXGPMLCWPYFTDQFTNQTYICDIWRVGLRVASAEGGGLVMKERVVELLDRIFEDEGAKERVLRLKEMAEKNMSEEGESLNNLNVLMESMGR

SEQ ID NO: 9992 - protein, 362 aa, Triticum aestivum
  Clone ID: TRIAE-23APR03-C233_37.p
MNMNYGSMGPGAMVRCRQCSSSITAMPGARAVQCMQCSCVTRVSGRGRQQHGYGQGYGNGGGMLMPPMRPTPAFGGGRGKKRAVLIGIKYTNRRSCELRGPINDVKCMRYLLTERFGFPNDCVLILTDEERNPCRQPTKDNIRMAMHWLVQGCSYGDSLVFQFSGLGAQVPDDDGDELDGMDEALCPVDSFQQGPILDDEINEAIVRPLVHGVKLHAIVDACHSATVLDLPYQCTVSKQTGRWRWRDERPMTGACKGTSGGQAVLISGSSNGKSNMSVLPEPYATIGAMTHSFIRAVECEPRTTYGRLLTSMRAIMRDSGGNCNLQGPIGGSIHKVANFSGVEEPQLSSAYKFDIEREPFCM

SEQ ID NO: 9993 - protein, 358 aa, Triticum aestivum
  Clone ID: TRIAE-23APR03-C233_44.p
MNMNYGSMGPGAMVRCRQCSSSITAMPGARAVQCMQCSCVTRVSGRGRQQHGYGQGYGGNGGGMLMPPMRPTPAFGGGRGKKRAVLIGIKYTNRRSCELRGPINDVKCMRYLLTERFGFPNDCVLILTDEERNPCRQPTKDNIRMAMHWLVQGCSYGDSLVFQFSGLGAQVPDDDGDELDGMDEALCPVDSFQQGPILDDEINEAIVRPLVHGVKLHAIVDACHSATVLDLPYQCTVSKQTGRWRWRDERPMTGACKGTSGGQAVLISGSSNGKSNMSVLPEPYATIGAMTHSFIRAVECEPAHNYGRLLTSMRASCATAAAMQPASPIGGPSAPKLQAALEDLNFLCLQFDIQRLLM

SEQ ID NO: 9994 - protein, 382 aa, Triticum aestivum
  Clone ID: TRIAE-23APR03-C2347_1.p
MVAEAEVMHQQPAPVLEVQYRRCVAKGAGMSAVAVPEVEVEVAVELPRMGLANTDGATSVSAETLQFVPNIRSGSFADIGPRRYMEDEHIRIDDLSAHLGSLLVCPLPSAFYGVFDGHGGPDAAAYMKRHAMRFLFEDREFPQALQVDDVFLQSVEECIRSAFLQADLALADNLDISRSSGTTALAALVFGRQLLVANTGDCRAVLCRRGIAMEMSRDHRANYAEECERVAASGGYIEDGYLNGVLSLTRALGDWDMKVPDCSTSPLIAEPEFQQATLSEDDEFLIMGCDGIWDVMTSQHAVSVVRRGLRQHDDPERCARELVMEAKRLETADNLTVIVVCFGSELGSPPPPPAAAAARPRSCKGLSAEALCNLRSWLETDR

SEQ ID NO: 9995 - protein, 357 aa, Triticum aestivum
  Clone ID: TRIAE-23APR03-C2348_1.p
MSSLHRCLPWLILLLVLRDGGGGTAVAAAGKVPAIIVFGDSSVDTGNNNFIPTIARSNFWPYGLDFADGHPTGRFSNGRLATDFISEAFGLPASIPAYLDTTLTIDDLAAGVSFASASTGLDNATAGILSVITMAEQLDYFKEYKLRLKLAKGDARGEEIIREALYIWSIGTNDFIENYYNLPERRMQYTAAEYEAYLLGLAESSIRAVHALGGRKMDFTGLTPMGCLPAERMGNRGDPGQCNEEYNAVARSFNAKLQQAVVPKLNKELPGLHLVYADTYDVLDAVVRKPSDYGFEHAERGCCGTGMFEAGYFCSLSTSLLCTNPDKYVFFDAIHPTERMYNMLADKVMNTTLHVFL

SEQ ID NO: 9996 - protein, 212 aa, Triticum aestivum
  unsure (1)..(212): unsure at all Xaa locations
  Clone ID: TRIAE-23APR03-C23496_1.p
MASPTLSPHPLPSTTATKLTSAPPAAPSSLLRPAALAPARRAVRGVFAVSAMPGPKPRAKARIVVGILEVALETATPTPAPPVGPARGDKGVNFMAFCKDYNAKTADKPGYIIPVEITVFDXIRASTLSSKTPPASVLLLKAAGVEKGSKEPQREKGGKVTVDQVRTIAQEKLPDLNCKTIESAMRIIAGTAANMGIDVDPPILVKKEKVVF

SEQ ID NO: 9997 - protein, 356 aa, Triticum aestivum
  Clone ID: TRIAE-23APR03-C2355_1.p
MDATRAVNKAWKGPCGVAGTQKIVIPPGNFLVGALELSGPCTSSIIIRLDGNLLGTGDLTAYKKNWIEVMRVDNFAINGHGIIDGQGPLVWEKNQCSKHYDCKILPNSLVLDYVNNATIRGITLKNAKFFHLNLFNCKTVLVENVEITAPGNSPNTDGIHMGDSEDVPIQVVRGLLVGAQGPPLPGPKHVKIHGSRCGPGHGISVGSLGRYKDEKDVEDIQVTNCTIKGATNGLRIKSYEDSKSALRATRFVYDDVRMDNVSYPIVIDQKYCPNNICAKAPGASKVVVADIVFKNIVGTSATPEAVTLNCVNNVPCQGLQLVNVNLKYTGTNNKTMAVCKNAVGKSVNVVKELACL

SEQ ID NO: 9998 - protein, 317 aa, Triticum aestivum
  unsure (1)..(317): unsure at all Xaa locations
  Clone ID: TRIAE-23APR03-C235_32.p
MEFKVVSKTAALPAAWHGTSQGAQGRSSVAFGSAWRKASSRPARALFAATNNSAPVARVEKQRIDQSQILTLDSIRTSLIRLEDSIIFGLLERAQYCYNADTYDSDSFHVDGFGGSLVEFMVRETEKLHAKVGRYKSPDEHPFFPEDLPETLLPPIQYPTVLHPIADSININKEIWKMYFDEVLPRLVKEGSDGNSGSSALCDTXCLQALSKRIHYGKFVAEAKFQESPEDYTPAIKAQDGAQLMQLLTYETVERAIEHRVETKAKIFGQEVNIGAEAKGMAPVYKIRPSLVAGLYGNRIMPLTKDVQVAYLLRRLD

SEQ ID NO: 9999 - protein, 317 aa, Triticum aestivum
  Clone ID: TRIAE-23APR03-C235_38.p
MEFKVASKAAALPAAWHGTSQGAQGRSSVAFGSAWRKASSPPARALFAATNNSAPVTRVEKQRIDQSQILTLDSVRTSLIRLEDSIIFGLLERAQYCYNADTYDSNSFHVDGFGGSLVEFMVRETEKLHAKVGRYKSPDEHPFFPEDLPETLLPPIQYPTVLHPIADSININKEIWKMYFDEVLPRLVKEGSDGNSGSSALCDTTCLQALSKRIHYGKFVAEAKFQESPEDYTPAIEAQDGAQLMQILTYETVERAIEHRVETKAKIFGQEVNIGAEAKGMAPVYKIRPSLVAGLYSDRIMPLTKDVQVAYLLRRLD

SEQ ID NO: 10000 - protein, 496 aa, Triticum aestivum
  Clone ID: TRIAE-23APR03-C235_48.p
MARKMLKDGEAPLVADDGGTYDYDLFVIGAGSGGVRGSRTAAGFGAKVAICELPFHPISSEWLGGHGGTCVIRGCVPKKILVYGASFRGEFDDAKQFGWEINGDINYNWKKLLENKTQEIVRLNGVYKRILGGSGVTMIEGAGSIVDAHTVEVTQPDGSKQRHTTKHILIATGSRATLVDIPGKELAITSDEALSLEELPKRAVILGGGYIAVEFASIWKGLGAEVDLFYRKELPLRGFDDEMRTVVASNLEGRGIRLHPGTNLTELSKTADGIKVVTDKGDELIADVVLFATGRAPNSNRLNLEAVGVEVDQIGAIKVDEYSRTSVPSIWAVGDVTNRINLTPVALMEATCFAKTVFGGQTVKPDYKDVPCAVFCIPPLSVVGLSEQEALAEAKNDLLVYTSSFNPMKNSISKRVEKSTMKLVVDADTDKVLGAAMCGPDAAEIMQGIAVALKAGATKATFDSTVGIHPSAAEEFVTMRTLTRRVSPPSKPKTNL

SEQ ID NO: 10001 - protein, 431 aa, Triticum aestivum
  unsure (1)..(431): unsure at all Xaa locations
  Clone ID: TRIAE-23APR03-C235_52.p
MKLTIKRVPTVVSNYQEDAGERPRGGCGRNCLGHCCLPVSELPVYAFKANPTKLPLQEDAVPTDFFINLLLGQWEDRMTQGLFRYDVTACETKVIPGNLGFVAQLNEGRHLKKRPTEFRVDRVLQPFDSAKFNFTKVGQEEVLFQFENSGSDDSYFLRSAAVTVADRAPNVVAINVSPIEYGHVLLIPRVLDHLPQRIDQESFLLALHMAXAEAASPYFRLGYNSLGAFATINHLHFQAYYLTVPFPVEKAATQRIPLAEGGIKSGVKVSKLMNYPVRGLVFEEGNTLNDLANVVSSACIWLQDNNVPCNVLISDSGRKIFLFPQCYAEKQALGEVSQELLDTQVNPAVWEISGHIVLKRRDDYEEASEXRAWRLLAEVSLSEARFEEVXAYIFDAACLVQSQVEEETDDAIYAPVLVGPSAVGEGCLVIP

SEQ ID NO: 10002 - protein, 188 aa, Triticum aestivum
  unsure (1)..(188): unsure at all Xaa locations
  Clone ID: TRIAE-23APR03-C235_53.p
MGIVFTRLFSSVFGNREARILVLGLDNAGKTTILYRLQMGEVVSTIPSGFPVLXIGFNVETVQYNNIKFQVWDLGGQTSIRPYWRCYFPNTQAIIYVVDSSDTDRLVTAKEEFHSILEEDELKGAVVLVYANKQDLPGALDDAAITESLELHKIKSRQWAIFKTSAIKGEGLFEGLNWLSNALKSGGS

SEQ ID NO: 10003 - protein, 703 aa, Triticum aestivum
  unsure (1)..(703): unsure at all Xaa locations
  Clone ID: TRIAE-23APR03-C236_1.p
MDSAAAGMRDSALDLLAALLTGRAPPAAADGDQNRRLLALLATSLAVLVGCGVALLFRRSSSGAAPLAHKSAAAKPLAAKKDQEPDPDDGRQRVALFFGTQTGTAEGFAKALAEEAKARYDKAVFKVLDLDDYAAEDEEYEEKLKKENIAFFFLATYGDGEPTDNAARFYKWFSEGNERGEWLSNLKFGVFALGNRQYEHFNKVGKEVDQLLAEQGGLTGKISFKRDRGGTGPCHPVXFGCRNRQMDFIYEDELNNFAESGALSELVVAFSREGPTKXEDATHINKSFSLSNGHVLXDSQHRLRRRQGHGKGRAPPASDRSCIHLEFDIAGTSLTYETGDHVGVYAENSIETVEEAEKLLDYSPDTYFSIYADQEDGTPLFGGSLPPPFPSPCTVRVALARYADLLNSPKKSVLLALAAHASDPKEAERLRHLASPAGKKEYSQWIIASQRSLLEVISEFPSAKPPLGVFFAAIAPRLQPRYYSISSSPRMAPTRIHVTCSLVHGQTPTGRIHKGVCSTWMKNSTPLEESQECSWAPIFVRQSNFKLPADPTVPIIMVGPGTGLAPFRGFLQERLALKETGVELGRAILFFGCRNRQMDFIYEDELNNFAESGALSELVVAFSREGPTKEYVQHKMAEKAAELWSIVSQGGYVYVCGDAKGMARDVHRALHTIVQEQGSLDSSKAEGYVKNLQMEGRYLRDVW

SEQ ID NO: 10004 - protein, 175 aa, Triticum aestivum
  Clone ID: TRIAE-23APR03-C23776_1.p
MAAEEAKKVEVETTTATKDIAEEKAIVPVPDNSKAIVAVVKDAEGTRGSSERDAYLTKIMSEKRTTLINAWEESEKARAENRAAKNLSFITSWEHAKEAEMEAELKKIEEQQKKKKAAYKEKLKNKLAMLHKSAEEKRAMAEAKRGEEIIMAEEIAAKYRAKGEAPTKLLGLLKA

SEQ ID NO: 10005 - protein, 383 aa, Triticum aestivum
  Clone ID: TRIAE-23APR03-C23784_1.p
PAGSAGDVLEDNPVGKLKVFVYDLPSKYNKRLVTKDPRCLNHMFAAEIFMHRFLLSSAVRTVNPEEADWFYAPVYTTCDLTRAGLPLPFKSPRMMRSAIQFISKRWPFWNRTDGGDHFFVAPHDFAACFHYQEENAIARGILPLLRRATLVQTFGQKNHVCLKEGSITIPPFAPPQKMQAHLIPPDTPRSIFVYFRGLFYDNGNDPEGGYYARGARASLWENFKNNPLFDISTEHPATYYEDMQRSVFCLCPLGWAPWSPRLVEAVVFGCIPVIIADDIVLPFADAIPWDEIGVFVDEEDVPKLDSILTSIPIDDILRKQRLLANPSMKKAMLFPQPAQPRDAFHQILNGLARKLPHPETIYLQPGEKHLNWTAGPVGDLKPW

SEQ ID NO: 10006 - protein, 118 aa, Triticum aestivum
  Clone ID: TRIAE-23APR03-C23819_1.p
TNLKPLPIQLFPLVNPPPPRGPGAGRMAGGPAAPLKSLERGASDAEPRLEKLEALLLKEGGPSERRSSVMRDHESKHDATNKECLAEKEQKKKPTVEKENLQYRVYHLIRTIKAEESR

SEQ ID NO: 10007 - protein, 78 aa, Triticum aestivum
  Clone ID: TRIAE-23APR03-C23874_1.p
MKKLLASITGSQKISMPTTIVVSGIAKMFVGEVIETARIVMSERKDSGPIRPCHIREAYRRLKLEGKIPKRSVPRLFR

SEQ ID NO: 10008 - protein, 204 aa, Triticum aestivum
  Clone ID: TRIAE-23APR03-C238_1.p
MRQAWCVVPVGAGSVAFLPLHQTAQLDIEATFRIDASAIEALNEADVSYNCTTSSGAATRGALGPFGLLVLANRALTEQTGVYFYVSKGLDGGLRTHFCHDELRSSHASDVVKRVVGSTVPVLDGEDFSVRVLVDHSIVQSFAMGGRLTATSRAYPTEAIYAAAGVYMFNNATGTSVTAEKLVVHDMDSSYNHIYTDDDLVVVD

SEQ ID NO: 10009 - protein, 496 aa, Triticum aestivum
  Clone ID: TRIAE-23APR03-C239203_1.p
MAGGDEHEHDAPGRLESILTDKSAPLAERAWAAGAVELRLLSRLAAPAVVVYMINYVMSMSTQIFSGHLGNLELATASLGNTGVQTFAYGLMLGMGSAVETLCGQAYGAHKYDMLGIYLQRSIVLLGLTGIPLAVMYAFSEPLLLLMGQSPEIARAASIFVYGLIPQIFAYAVNFPIQKFLQAQSIVLPSAYISTATLILHVLMSWVLIYKVGLGLLGASLVLSVSWWIMVAAQFVYIIVSPTCRHTWTGFNWQAFSGLPSFFKLSAASAVMLCLETWYFQVLVIIAGLLPNPEIALDSLSICMTIYGWVFMISVGFNAAASVRVSNELGAGNPKSAFFSVWVVTGISATISTILAVVILCLRNHISYLFTDGEAVSDAVADLCPFLAVTLVLGGIQPVLTGVAVGCGWQQFVSYVNIGSYYIVGVPLGVVLGFFFNLGAKGIWGGLIGGTALQTVILLWVTIRTDWTKEVEEAHKRLNKWDDKNEPLLTGFKDNN

SEQ ID NO: 10010 - protein, 266 aa, Triticum aestivum
  Clone ID: TRIAE-23APR03-C239937_1.p
MICLRAIPSPRLLHLPLPRLASSPLRRLRPSAAAMSSSPSVAAPTVAAPVEHIVLIKVRPEAVASGAAAAMVSALQALSTLVPGVSYIHAGPVLRLRSPAAEALGPTHLLHSRYATKADLAAYAPHPAHVAAVQAHVAPNALDATAVDWVNAAGAPSPVAPGAAVRLTLAKVKQGVEVGQLVEKVAAATKDAGEASGAKVSFGENFSPARAKGYQFGMVAVFGSVEELDAVEGDGKVEEAKAALRPMLDEVMVLDFVVDAPAAASL

SEQ ID NO: 10011 - protein, 492 aa, Triticum aestivum
  unsure (1)..(492): unsure at all Xaa locations
  Clone ID: TRIAE-23APR03-C23994_1.p
MADGEAPGRLESILTDSSAPLAGRVWAAGAIELRMLTRLAAPAVVMYMINYLMSMSTQIFSGHLGSLELAAASLGNTGVQMFAYGLMLGMGSAVETLCGQAFGAQKKDMLGTYLQRSAVLLCCTGIPLAVIYAFSEPLLVLLGXSPEIAHAASIFVYGLIPQIFAYAINFPIQKFMQAQSIVLPSAYISTGTLVLHLLLSWVVVYKAGLGLLGASLVLSLSWWVIVAAQFAYIAVSPACRETWTGFTWQAFSGLPAFLKLSAASAVMLCLETWYFQILVLIAGLLPDPEIALDSLSVCMTISGWVFMISVGFNAAASVRVSNELGAGNPKSAFFSVWVVTSLCAAISVVFAIVMLCLRNHISYLFTESEIVSDAVADLCPLLAITLILNGIQPVLSGVAVGCGWQQFVAYVNIGCYYIVGVPLGIVLGFVFNLGVKGIWSGMIGGTTMQTAILLWVTIRTDWSKEVEEAHKRLNKWDDTKKQPLLTAATDNS

SEQ ID NO: 10012 - protein, 413 aa, Triticum aestivum
  unsure (1)..(413): unsure at all Xaa locations
  Clone ID: TRIAE-23APR03-C239_1.p
MQAAAAARRHLLDQHHLSPASSAAIAAFRSAAQPALAPQGLGGADGARYMSARAPAVKGAGHLVRKGTGGRSSVSGIVATVFGATGFLGRYVVQQLAKMGSQVLVPFRGCEDSHRHLKLMGDLGQIVPMNYNPRDVNSIKTAVAKSNVVINLIGREYETRNYGFEEVNHQMAEQLAMISKEHGGIVRFIQVSALGASASSPSRLLRAKAAGEESVLKEFPEATIMRPATLIGTEDRILNRWAMYAKNWGFLPLFGGGSTKFQPVYVVDVAAAIVNSLKDDGTSMGKTYELGGPDIYTVHXLAEMMFETIREYPRYVXLPFPIAKAMASPREMLLNKVPFPLPTPSIFNLDQIKALTXDNLVSENALSFADLEIKPHKLKGYPTEFLVCYRKGAPSFGATVSEKMGSADVAPRF

SEQ ID NO: 10013 - protein, 95 aa, Triticum aestivum
  Clone ID: TRIAE-23APR03-C24010_1.p
LPKKSPLISKDHERAYFDSADWALGKQGGHPQKPKGPLEALRPKLQPTQQQARSRRFLHASTDSDEGANSPTEATTPNQEFTEEAKAAENKESTE

SEQ ID NO: 10014 - protein, 352 aa, Triticum aestivum
  Clone ID: TRIAE-23APR03-C240735_1.p
MASSRTAAMLVLVAAVLCPAALSKPSAAFISMPTDHVGGRIPPVSPADGLAFDFHADSCPQLQDVVRSAVETALQREIALAAGLLRIFFHDCFPQGCDASVLLTGDGSELQLPPNLTLQPRALQLIESIRAQVHAACGPVVSCADITALATRDAVAFSGGQGYDVPLGRLDSLAPAPSSAVFDLPQASSNASTLIDVFETRNLDNVDLVTLSGGHTIGKGHCSSFSNRFSEDSDFVRSLASNCSSDFNRLQDLDVTTPDVFDIKYFTNLQQGKGVFTSDQKLTADWRTEWVVNGFAGNHWWFFGQFAASMTKLGNLQGPQGNVGEIRRNSCFVRNGQSILTTTSDEGLAASA

SEQ ID NO: 10015 - protein, 133 aa, Triticum aestivum
  Clone ID: TRIAE-23APR03-C240_4.p
YLSAGFFRGNSFGSDDFAELADAPRPSLLRVKAASDDTSASGDEIIEDLKGKWEAIEDKPTFLLYSGGAVVALWLTTVVVGAINSVPLLPKLLELVGLGYTGWFVYRYLLFKESRKELATDIESLKKKIAGTE

SEQ ID NO: 10016 - protein, 309 aa, Triticum aestivum
  unsure (1)..(309): unsure at all Xaa locations
  Clone ID: TRIAE-23APR03-C241123_1.p
MTTFEVTRSFGASVDNTKIKFSKLYLHEIWGGPNTNQTGGLISGDPALHFGLSTANSWGIYDDLGSEAKLVAKAQGWRTEIHPNWYSWFSMTFFEGERFKGSTLQVMGASRPLNDGEFAIIGGTGDFAMARGVLTKRQVVDVAGHKIFQLSTTGFCHMNIPVPAPTKMGPWGAKDAPLREMERKSQRLEXSVTIYFTSVVSAIQFSYIGEDGQICNSGLWGITGCTNSPSTIETIKFCPNEFVKEITGTVGDPDYLSHLKIVTNIKTYGPFGPQDGKSPFSFTVPEGKTVVGFFAQCDDYIRKIGVYTI

SEQ ID NO: 10017 - protein, 314 aa, Triticum aestivum
  unsure (1)..(314): unsure at all Xaa locations
  Clone ID: TRIAE-23APR03-C24113_1.p
MKALILVGGFGTRLRPLTLSVPKPLVDFANKPMILHQIEALKDVGVTEVVLAINYQXPEVMLNFLKDFXSKLGIKITCSXETEPMGNRXGPVALARDKFDDGXATIMVTKIDEVIREYPFARAXGFHKSHGGEAPIMVTEVDEPSNYGMGVSAXETGNVGRFAMVLPGFWMAIGQPRDSITGLRLYLESLRKRAPARLAAGAHVLGNVLVHETAXFGEGCLIGPDVAVGPGCVVEAGVRLSRCTVMRGARVKKHACISGSIVGWHSTVGKWARVENMTILGEDVHVCDEVYSNGGVVLPHKEIKSSILKPEIVM

SEQ ID NO: 10018 - protein, 444 aa, Triticum aestivum
  unsure (1)..(444): unsure at all Xaa locations
  Clone ID: TRIAE-23APR03-C24129_1.p
MIKWGISSGTPADSYYEIRSDCTDDVPKSKFKIKAGKTLSVRKWQAAFNPDGCLDIVSVLSRIQKGGVHPTVRGEVWEFLLGCFDPRSTFDEREEIRQIRRLQYARWKEECKEMDSHVGSGKVITAPLITEDGRPIKDPLVLLEATSNQNTSEGASTSNHNGIEVDESAERITDKQIIEWKLTLHQIGLDVLRTDRTMVFYENKENVSKLWDILARLAWIDKDVGYCQGMSDLCSPMIVLLNDEADAFWCFEKLMRRLRGNFRCTDQSVGVANQLQHLASIIQVLDPKLHDHLETLGXGDYLFAFRMFMVLFRREVSFGDSLYLWEMMWALEYDPDIFFAACEEASGAHKKVSASWVRGVRQVADWDKDKDVSEETDGPVPISVFMVASVLKEKREKLLQEARGLDDLIRILNDVNGNLDAKKACAGALKLHKKYLKLVQAKKT

SEQ ID NO: 10019 - protein, 504 aa, Triticum aestivum
  Clone ID: TRIAE-23APR03-C2413_2.p
MDRQLLRTVKQATKNHAGLMYHRLVGHIPHLLVVTLLVVVAPQLSTLTPEKVRALWNTAVNAPALAMACWAAALAAYTYASSRPQPVYLVDLAGYKPPVELEASRAKTIVHFSRCGRFSEQSMAFQKRMLERSGLGEATHFPMSLIRLPVDMCDRTAMEESHAVIFGVVDEVLRKTGVDAGDVGVLIFNSSLLSPTPSFTSLIVNRYKFRDDIVTHNLSGMGCSAGIIAIDLAKRLLQVHRNTYALVVSTENITLNAYMGNNRPMLVTNTLFRVGGAAILLTNRAGDRARSKYQLIHTVRTHRGAHDQSYGCVTQEEDEVGEVGVSLSKELMAVAGEALKTNITTLGPLILPMSEQLRFLATVVLKKVFRAQVKAYLPDFKLALEHFCIHAGGRGVLDELENSLKLSPWHMEPSRMTLYRFGNTSSSSLWYELAYCEAKRRIKKGDRVWQIAFGSGFKCNSAVWRALRTIDDAGESPWTQDVDVLPVDVPKVVPIDETSYQVPI

SEQ ID NO: 10020 - protein, 313 aa, Triticum aestivum
  unsure (1)..(313): unsure at all Xaa locations
  Clone ID: TRIAE-23APR03-C24143_4.p
MATNGRTVASVDPDVALAYKFPEVSFAYDERDVALYALGVGACGADAVDDKELHLVHHRDGQRHIKALPTFASLFPNKNSNGRGIVNVPGIHFDASLLLHGQQYIEIYKPIPSCASVVNKXKVAGLHDKGKAXILEIETTTSLKDSGEVLCMNRSTIFLRGAGGFSDSSRPYSYTTYPANQISRISIPNSTPSAVYEDQTQQSQALLYRLSGDYNPLHSDPMVAQVAGXFAARAVIKSFCNGDPAAVRNIFGRFLLHVYPGETLVTEMWVDGQRVQYQTKAKERDRAVLSGYVLLKHIPSSLSSGADNGGGRL

SEQ ID NO: 10021 - protein, 466 aa, Triticum aestivum
  Clone ID: TRIAE-23APR03-C24162_1.p
MEPRVGNKYRLGRKLGSGSFGEIYLGTNVQTNEEVAIKLENVKTKHPQLLYESKLYRVLQGGTGISNVKWFGVEGDYNVLVMDVLGPSLEDLFSFCNRKLSLKTVLMLADQMINRVEFIHSKSFLHRDIKPDNFLMGLGKRANQVYMIDFGLAKKYRDTSTHQHIPYRENKNLTGTARYASVSTHLGIEQSRRDDMESLGYVLMYFLRGSLPWQGLKAGTKKQKYEKISERKIATSIEALCRGYPSEFQSFFHYCRALRFEDSPDYQYLKRLFRDLFIREGFQFDYVFDWTILKYQQSQMTSAPPRAIAAAAGQSSGMAPIASNNRLSATEEGRSGWSDDPTRRQVPPTGINAGSLAKQKSPVRPDVSAPKEAVLSSSTFLGRSGVSSRRPAVCSSRDLPSSEAEPSRSRAPDVSPGTFQRNSAPRRTSQTLDYSDPRHKSNSNNYESTIRGIRGLNFNANDRIHY

SEQ ID NO: 10022 - protein, 514 aa, Triticum aestivum
  Clone ID: TRIAE-23APR03-C241692_1.p
MAPLGIIGGYVFYNYNVLLVQQSASPCLPPSLPLHRPPSLTPPKSHRATLMASPPTGPAAPAGLESMEGLALDIIIAKAGARPAAALACASTHLRAAVAEDAVWRSFCARDLGLDAPLDPEDRPLPSFKDAYKVWSESFGMYPLPLVKRVKLFWSSLKGWISENFPEALRTLSKGASEAQIRSAEDDLGFKLPMPTKLLYRFCNGLLPFSRNHFEDVRMAPLGIMEGYVFESCTLNNGSSGSVEGSFTFVPGRLTQPEGGLFDGPNLALVASSWYHPKTFILNCSSGDLYVGTANLSAGEMMPCVPKSLIKPTDSDMPQDGLLLWLEEHLRRLQNGMIKIRPLKTSRYICLYPEASPLCSSAVTNGVKVRASAVFAPEHPYGGHPGTYLYSYSIRLSVPEACMLGGVYFSSCQLHSRHWIIRCKDTVVSDVNGEGVIGKFPLLLPGQDEFVYESCTPLNGSSGSVEGSFTFVPGRVTQPEGKPFNVTVAPFPPQVPDYFLSAIAPAPLIRGVSP

SEQ ID NO: 10023 - protein, 229 aa, Triticum aestivum
  Clone ID: TRIAE-23APR03-C2419_1.p
MGGFCCCLSTDDFEEYVHPNNPVYRQCISLRQLFHNMFGGYTAAFQRLDSRPSNPAQGAAPLASTNPSTNITESSLSETFHLVSRPPPYDIDPRYARVQREGLVSRREKSINLTHEESPALRRNGSSSGVEHLAAQKKRSSTDPEGEHKVRRSESTKSLSGRAYNSSYAVITSDDEDVCPTCLEEYTPENPQIITKCSHHFHLSCIYEWMERSDTCPICGKEMEFCESP

SEQ ID NO: 10024 - protein, 192 aa, Triticum aestivum
  unsure (1)..(192): unsure at all Xaa locations
  Clone ID: TRIAE-23APR03-C2427_1.p
LFITRTKWXVSLIWWPVFCWCLNTSLHMGHTVPQVALLXLWAGIFIWNNWIEYVLHRYLFHIDTKSYWTNTAXHYLLHGCHHKHPMDGLRLVFPPTAAAILCYPFWNFVKLFTTTTTTPGVFGGGLLGYVIYDCTHYYLHHAHPSFDPAKYLKKYHLNHHFRIQNKGFGITSTLWDHVFGTLPSTKTAGKSS

SEQ ID NO: 10025 - protein, 241 aa, Triticum aestivum
  Clone ID: TRIAE-23APR03-C24291_1.p
MAANVGEGHERQRRQRGWRRRGQASMCIICLDAAAGSPPLPLCGHPLCWAWLYQLAAHSTRTSPECPVCKWPSVEEDKLVPLYGPGKDRVDPRSKGVPAGAEIPNRPTGQRPATAPQADPNNHFPNANPNPWFMGGGGVPLANARWGNYTFSAAFGGLFPLLSFQVHGFPDAAAYGQPAGFPYGYGHGHGHGHAFHGGHAHAAAPRHAPPGQQQQQQQADVYLKALLILVGFLVIASLITF

SEQ ID NO: 10026 - protein, 475 aa, Triticum aestivum
  Clone ID: TRIAE-23APR03-C243049_1.p
MAHDGASHGATTAPLLASTEKPPRNMYAFGCATLASMTTILMGYNLALMSGAQLFIREDLGLTDEQVEVLAGSMNVYMLVSILAAGWAADLLGRRGTLVLANGFLMAGALAMSLGGSYAALMAARFITSIGVGFSLVVAPVYNAEISPASARGVLSSLLDIFVNVGILLSYVSNYALAGLPVHLSWRVMYAIGVLPPVLLAAGVLAMPESPRWLAMRGREDDARAVLVRTSDTAAEAELRFEEIKRVVEAPREADSGVWRELIFRPSAMVRRILVFVVGLNFLQQALGVDAILLYSPLMFKKAGMSSNSAILGATVAIGVVKTCFILVVSLFSDRFGRRPLLLASAGGVAASLTGLALTLCIGETSPASTAACVAFTLATVAAFSVGWGSLPSTYTAEITPLRLRAQGSSLGMAVNRLTCGVVSMSFISLAGWITMPGCFFLYASMAATAYVFVFLRLPETKGRTLEEMDVLFSK

SEQ ID NO: 10027 - protein, 175 aa, Triticum aestivum
  Clone ID: TRIAE-23APR03-C244_126.p
MDTAMHPAGADAGGLAELLADNAGTGTEGIICGMPDFKMGGKRGDESAPTDAGDEDGEDDDGDEDGDFAEGEEEISEGEEYDNPKASDTKKKQIGEGEENGEDDEEEQEEQEGGGGDDDDDDDDDDNEEDDDDDDDVAAEDDEDGVEEEDDDQDNDDDEEEDDEDSLQPPKKRKK

SEQ ID NO: 10028 - protein, 446 aa, Triticum aestivum
  Clone ID: TRIAE-23APR03-C244_147.p
PSHLLSSPTKSPIRLAGAPPPPRRHLLGLPGAPAPPLRPPPPRRQPNRGSGRMELQTSGRPIEVLMEKVLSMNIVSSDYFKELYKIKTYHEVIDEIYNQVDHVEPWMTGNCRGPSTAFCLLYKLFTMKLTVNQMHGLLKHPDSPYIRAIGFLYLRYAADPKTLWTWYEPYIQDDEEFSPGSNGKMTTMGVYVRDVILGQYYFDSLLPRVPLLILRQVTAHLEKMKLPTKQSGITGDSSRLGSDDTARRPPSVKASLSVSFGQRAPHRASTRDSSPVRKTLPSVRERERSHDGGHAKSPPRKHRSQSRERSRDIERDRSDRDRGRYKDREHGRHSRDNRDRDYRRSSYSDRDVERRGHERRDRDSDRNGRSSGRRSRSRSRSPSRGRTNGDSHRSSPFGKAPEPSNLAKLKDLYGDATNAKDDAGDDRARRDSGTEEVIRLGGARWR

SEQ ID NO: 10029 - protein, 357 aa, Triticum aestivum
  unsure (1)..(357): unsure at all Xaa locations
  Clone ID: TRIAE-23APR03-C244_181.p
MAKEAGGEGAMSESVLRKVLVSYCYVAVWIFLSFTVIVYNKYILDPKMYNWPFPISLTMVHMAFCSSLAVALVRVFRVVDLPSSPAMTTQLYTSSVLPIGALYSLSLWFSNSAYIYLSVSFIQMLKALMPVAVYSIGVLFKKETFRSSAMLNMLSISFGVAIAAYGEARFDLRGVALQLAAVAFEATRLVLIQILLTSKGISLNPITSLYYVAPCCLGFLFLPWVFVELPRLRAVGMFEPDFFVFGTNSLCAFALNLAVFLLVGKTSALTMNVAGVVKDWLLIAFSWSVIRDTVTPINLFGYGIXFLGVGYYNHVKLQALKAKEAXXKVAQADEEAGSLLQERDSHGGERKTETQSS

SEQ ID NO: 10030 - protein, 213 aa, Triticum aestivum
  Clone ID: TRIAE-23APR03-C244_187.p
MKPAVEGDERAAEIARIKAAAAAAKKAAEEVVDVDDEGEDDEGDEEEEAVDGDDDDDDDEVDDDGEEDEDEGVEGEDKGSAAQQVVDISDEDDDGGDEEEGGDDDDDDDDDDDDEEDDDEVDEEEEPEEELGTEYLVQPLARAEDEEHSSDFEPEENGDGAEDEEIEDDDAEDGEDPVKAQSSSKRKRSGGEDEDDDDGDDDGDDDEKPPSKR

SEQ ID NO: 10031 - protein, 211 aa, Triticum aestivum
  Clone ID: TRIAE-23APR03-C244_188.p
MKPAVEGDERAAEIARIKAAAAAAKKSAEEVVDVDDEGEDDEGDEEEEAVDGDDDDDEVDDDGEDDDDEGVEGEEKGSAPQQVVDISDEDDGGGDEEEGGDDDDDDDDDDDDEEDDDEVDEEEEPEEELGTEYLVQPLGRAEDEEHSSDFEPEENGDGAEDEEIEDDDAEDGEDSVKAQSSSKRKRSGAEDEDDDDGDDDGDDDEKPPSKR

SEQ ID NO: 10032 - protein, 208 aa, Triticum aestivum
  Clone ID: TRIAE-23APR03-C244_191.p
MKPAVEGDERAAEIARIKAAAAAAKKAADEVVDVDDEVDEEEAVDGDDDDDDDDEVDDDGEEDEDEGVEGEEKGSAAQQVVDISDEDDDGGDEEEGGDDDDDDDDDDDDEEEEDEVDEEEEPEEELGTEYLVQPLGRAEDEEHSSDFEPEENGDGAEDEEIEDDDAEDGEDSVKPQSSSKRKRSGGEDEDDDDGDDDGDDDEKPPSKR

SEQ ID NO: 10033 - protein, 561 aa, Triticum aestivum
  Clone ID: TRIAE-23APR03-C244_198.p
MADLQTPLVRPKRKKVLVDYLVQFRWILVIFVVLPASALIYFNIYLGDMWSAMKSEKKRQKEHEDNVQKVVKRLKQRNPKKDGLVCTARKPWIAVGMRNVDYKRVRHFEVDLSAFRNILEIDPERMVAKVEPLVNMGQISRATCPMNLSLAVVAELDDLTVGGLINGYGIEGSSHIYGLFSDTVVALEIVLADGRVVRATKDNEYSDLFYGVPWSQGTLGFLVSAEIKLIPIKEYMRLTYTPVKGPLKEVAQAYADAVAPRDGDPAKVPDFVEGMVYSATEGVMMTGVYASKEEAKKKGNKINSVGWWFKPWFYQHAQTALKKGEFVEYIPTREYYHRHTRCLYWEGKLILPFGDQFWFRFLFGWLMPPKVSLLKATQGDAIRNYYHDNHVIQDMLVPLYKVGEALEFVHHEMEVYPLWLCPHRLFKLPVKTMIYPEPGFEHQQRQGDTSYAQMFTDVGVYYTPACIFRGEEFDGAESVKRLEQWLIENHSYQPQYAVTELNEKDFWRMFDASHYEHCRHKYGAVGTFMSVYYKSKKGRKSEKEVQEAEAAILEPAYADEA

SEQ ID NO: 10034 - protein, 125 aa, Triticum aestivum
  Clone ID: TRIAE-23APR03-C244_205.p
SNPHLPKVCFSIVSIWSCTLSLGGRLLELTIGLGLTVSLGGRFLGLTLSLGGRFRGLHLPLDQPRLLHDLVFDGADVRAGGAEEAQAVAAGGRLDLQQHPARRAEVHGRLPHFSAAVLRSAAALR

SEQ ID NO: 10035 - protein, 507 aa, Triticum aestivum
  unsure (1)..(507): unsure at all Xaa locations
  Clone ID: TRIAE-23APR03-C244_206.p
MAARLVVVLLLLALVAACHGVSAAAAGASPRRPNWLGGLSRASFPKGFVFGTATSAYQVEGMANAXGRGPSIWXAFAHVPGNIAGNQNADVTTDQYHRYKEDVNLMKGLNFDAYRFSISWSRIFPDGDGKVNQEGVAYYNNLINYLLQKGITPYINLYHYDLPLALEKKYGGWLNAKTVGLFADYADFCFKTFGDRVKHWFTFNEPRIVALLGYDVGSNPPQRCSKCAAGGNSATEPYIVAHNFLLAHGYAVARYRTKYQAAQKGKVGIVLDFNWYEALTNSTEDQAAAQRARDFHVGWFVDPLINGHYPQIMQDLVKERLPRFTPSEAKLLKGSADYIGINQYTASLMKGQKLLQQTPTSYSADWQVTYAFERNGKPIGPKANSNWLYIVPSGMYGCVHYLSQKYGNPPIVITENGMDEPGGLTREQYLRDATRVRFYRSYLGELKKAIDGGANVLGYFAWSLLDNFEWSSGYSSKFGIVYVDFSSPPLDRHPKASAYWFRDLLQH

SEQ ID NO: 10036 - protein, 516 aa, Triticum aestivum
  Clone ID: TRIAE-23APR03-C244_208.p
MAGEMAARSASRVLLLLLLALALVAACHGVGAAAAGASPRRPNWLGGLSRASFPKGFVFGTATSAYQVEGMAAGGGRGPSIWDAFAHVPGNIAGNQNADVTTDQYHRYKEDVNLMKGLNFDAYRFSISWSRIFPDGDGKVNQEGVAYYNNLINYLLQKGITPYINLYHYDLPLALEKKYGGWLNAKTVGLFADYADFCFKTFGDRVKHWFTFNEPRIVALLGYDVGSNPPQRCSKCAAGGNSATEPYIVAHNFLLAHGYAVARYRTKYQAAQKGKVGIVLDFNWYEALTNSTEDQAAAQRARDFHVGWFVDPLINGHYPQIMQDLVKERLPRFTPDEAKLVKGSADYIGINQYTASLMKGQKLTQQTPTSYSADWQVTYAFERNGKPIGPKANSNWLYIVPSGMYGCVHYLSQKYGNPAIVITENGMDQPGGLTRDQYLRDATRVRYYRSYLGELKKAIDGGANVLGYFAWSLLDNFEWISGYSSKFGIVYVDFNSPNLYRHPKASAYWFRDLLQH

SEQ ID NO: 10037 - protein, 133 aa, Triticum aestivum
  unsure (1)..(133): unsure at all Xaa locations
  Clone ID: TRIAE-23APR03-C244_209.p
MAPSKLALFLALNLVLLAAVQGCGPYCPPVIPTPPIRPPPAVPSTGGGSCPINTLKLGVCANVLNLLKLRISVPANEQCCPLLGGLADLDAAVCLCTAIRANILGIKLNVPIDLTLLLNXCGKKCPANFTCPI

SEQ ID NO: 10038 - protein, 299 aa, Triticum aestivum
  Clone ID: TRIAE-23APR03-C244_211.p
MVPLRIYRHLIPQLAAAARSLSAPKVAASASCAPRPISPLPALAMAAYGTGACADSKLLFRQLFEKESSTYTYLLADVGDPEKPAVLIDPVDRTVDRDLNLIKELGLKLIYAMNTHVHADHVTGTGLIKTKLPGAKSVISKASGAKADHSVEHGDKIYFGKLFLEVRATPGHTAGCVTYVTGDSPDQPSPRMAFTGDALIIRACGRTDFQGGSSDQLYQSVHSQIFSLPKDTLLYPAHDYKGFPLPPVEREFAYIARLPRDKGTFKTIMENLNLSYPKMIDVAVPANMVCGFQDPPSKV

SEQ ID NO: 10039 - protein, 153 aa, Triticum aestivum
  Clone ID: TRIAE-23APR03-C244_217.p
MANSNLPRRIIKETQRLLSEPAPGISASPSEENMRYFNVMVLGPAQSPYEGGVFKLELFLPEEYPMAAPKVRFLTKIYHPNIDKLGRICLDILKDKWSPALQIRTVLLSIQALLSAPNPDDPLSENVAKHWKSNEAEAVETAKEWTRMYASGA

SEQ ID NO: 10040 - protein, 355 aa, Triticum aestivum
  unsure (1)..(355): unsure at all Xaa locations
  Clone ID: TRIAE-23APR03-C244_223.p
MAGGGGAGGLSESVMRKVLLSYCYVAVWIFLSFAVIVYNKYILDPKMYNWPFPISLTMVHMSFCSSLAVGLVRVLRVVEPPSSPPMTPQLYTSSVVPIGALYAMSLWFSNSAYIYLSVSFIQMLKALMPVAVYSIGVLFKKETFRSSSMLNMLSISFGVAIAAYGEARFDLRGVALQLAAVAFEATRXLVLIQILLTSKGISLNPITSLYYVAPCCLCFLLVPWIFVELPRLRAVGTFQPDFFIFGTNSLCAFALNLAVFLLVGKTSALTMNVAGVVKDWLLIAFSWSVIRDTVTPINLFGYGIAFLGVGYYNHIKLQALKAKEAQKKSAQADEEAGSLLQERDSHSDRKSENQA

SEQ ID NO: 10041 - protein, 508 aa, Triticum aestivum
  unsure (1)..(508): unsure at all Xaa locations
  Clone ID: TRIAE-23APR03-C244_234.p
MAARSAVLLLLALVAAACHGVGAAGAGASPRRPNWLGGLSRASFPKGFVFGTATSAYQVEGMAAGGGRGPSIWDAFAHVPGNIAGNQNADVTTDQYHRYKEDVNLMKGLNFDAYRFSISWSRIFPDGDGKVNKEGVAYYNNLINYLLQKGITPYINLYHYDLPLALEKKYGGWLNAKTVGLFADYADFCFKTFGDRVKHWFTFNEPRIVALLGYDVGSNPPQRCSKCAAGGNSATEPYIVAHNFLLAHGYAVARYRTKYQAAQKGKVGIVLDFNWYEALTNSTEDQAAAQRARDFHVGWFVDPLINGHYPQIMQDLVKERLPXFTPDEAKLVKGSADYIGINQYTASLMKGQKLTQQTPTSYSADWQVTYAFERNGKPIGPKANSNWLYIVPSGMYGCVHYLSQKYGXNPAIVITENGMDQPGGLTRDQYLRDATRVRFYRSYLSELKKAIDGGANVLGYFAWSLLDNFEWISGYSSKFGIVYVDFNSPTLDRHPKASAYWFRDLLQH

SEQ ID NO: 10042 - protein, 154 aa, Triticum aestivum
  Clone ID: TRIAE-23APR03-C244_240.p
MDGSKAKKVAAKKFGGPRKKSVTKSIKAGLQFPVGRIGRYLKKGRYAQRVGSGAPVYLAAVLEYLAAEVLELAGNAAKDNKKTRIVPRHLLLAIRNDQELGRLLSGVTIAHGGVIPNINPVLLPKKAAEKAEKAGAAPKSPKKTTKSPKKATKA

SEQ ID NO: 10043 - protein, 460 aa, Triticum aestivum
  unsure (1)..(460): unsure at all Xaa locations
  Clone ID: TRIAE-23APR03-C24516_1.p
MNTDAQLRFNCRKRCLPADGRLDDHWRGQQRKRRGVRVLVPDCFLVPPPEAKSADFDMWYYIRSIPDMWDNGLRLLKGWVRASKDVPQDPSDLTCLTKNNDVKPGRVLAAGNWKVDDPVKVALKAAAPPPPRREKVKPYWKYLHEETRHNDKSLGEIDARVALLEKTLEEQRRVALLEKTLEEQRRVALLEKTLEEQRRVALLEKTLEEQRTLAEPPKEDLSQFFVPLTAEDEKEVQDCLYGNGSSSKVLVLHEPSNIEVSREKFRCLRPHGWLNDEVINLYLELXKERGMREPKRFLKCHFFNTFFYKKLACGKTGYDYKSVKRWTTSRKLGYELIECDKIFVPVHQNVHWCLAIINMKAKTVQYLDSLGGDDFRVYEMLARYIVDEVKDKSNKEIDISSWTKESIDCIPLQENGWDCGMFMLKYIDFHSRGVSLSFGQEHMEYFRRRTAKEILRLRAD

SEQ ID NO: 10044 - protein, 343 aa, Triticum aestivum
  Clone ID: TRIAE-23APR03-C245201_1.p
MASGSSAAARRLLLLRHRRRHLVPNHHFSSSSADEVLDGGRVKIFDRDLKRRHRDRAAWAMRETDPLVDAVADNLLDRLEDCRKAFPSALCLGGSAGAVRRSLRGRGGIEKLTMMDMSVDMVNKWRELESATDDGPEMNFIVGDEEYLPMKENSQDLIMSCLGLHWTNDLPGAMIQCRLALKPDGLFLAAILGGETLKELRIACTIAQMEREGGISPRMSPLAQVRDAGNLLSRAGFALPGVDVDRYTVKYNSALELVEHLRAMAETNALFQRSHILKRDTALATAAIYQSMFGLEDGTIPATFQVIYMTGWKEHSSQQKPKRRGSATVSFGDIRKQFGSNQD

SEQ ID NO: 10045 - protein, 263 aa, Triticum aestivum
  unsure (1)..(263): unsure at all Xaa locations
  Clone ID: TRIAE-23APR03-C24532_1.p
MAAAAEEASTAPRSRPEEEEEEEAMAVLDFDMLCASVGMSAERRKGAGMEAVAACSGGAESAGGGGVQRMWEGDVVIDCLEDRRIALEAACCPCYRFGKNTRRANLGSCFLQAMAYFISLVAVLVSLVARAGARNHXYPGTIRTEQVGLPCAPSIRGRMGKHSGSRGADGSRPVCLRHLICPCCTLCQEARTLEMNNVQCGVWHGRGDTICLGSNGEGNKAFAALHKSPFVLIKSPELCGMDRISSGADEHQPLVPSAQPEQE

SEQ ID NO: 10046 - protein, 230 aa, Triticum aestivum
  unsure (1)..(230): unsure at all Xaa locations
  Clone ID: TRIAE-23APR03-C24655_1.p
WHTSASPGPSSSAPEPRQWARRWPPGWGPRRLELACKVPLXSVATCAFAGXWGSLGGGVSGSLIGLASGGAVARGAAXAALSPAPAAPSRAPNRPSTSSLSSDLFVVGIILIVLSSLRLREQVGRAVQSAVQSQISAISSPFTEPSDLFETGGARGLPAHALRRLPAIKVGADTAVDEAGEALCCSVCLQDLEVGESARRLPGCRHVFHAPCIDRWLVRHASCPLCRRDI

SEQ ID NO: 10047 - protein, 325 aa, Triticum aestivum
  unsure (1)..(325): unsure at all Xaa locations
  Clone ID: TRIAE-23APR03-C247449_1.p
MATRNRTPLFRKYRDALRHVRAPAGAPSASSSPGGGPAVVEMASLLRPDRNYAPLSTDDPSASSSRGAAMVGLPPAWVDVSEEISANMQRAKTKMAELAKAHAKALMPSFGDGRDDQRAIEILTHEITDLLKRSEKKLQKLSMKDSSEDSNVRKNVQRSLATDLQTLSMEFRKKQSTYLKQLRQQKEGQDGVDLEMNMNGSKSTFELEDDEFEDVGFTEVQMSKLKKSEAFTREREREIEQVAQSVNELAQIMKDLSVLVIDQGTIVDRIDYNVQNVAASVEEGYKQXQKAERTQKKGGMVMCATVLVILIFILIILLVLKKILF

SEQ ID NO: 10048 - protein, 365 aa, Triticum aestivum
  Clone ID: TRIAE-23APR03-C2474_1.p
MARAVLPTGPGNRSGVTPETLEHLLDVRFWKATRDRIQTGNPLLRAAAPSCTSVGFKNSIPPLPGHRPRPGRPSPLLRRRVLRSLLAPRPAPFDAAEAGSPESVTSRSSPAGEEVLSEIERFLMQEDEAAGAEPVDGISVDEFFDALFDGGEEGGEKGNGSEAEAGGSTDGDSRREEEGVEVVTPETEAEVVTPETEVDGDDPISKKKRRQMRNRDSAMKSRERKKSYVKDLETKSKYLEAECRRLSYALQCCAAENMALRQNMLKDRPIGAHTAMQESAVLSETLPLVSLLWLVSIVCLFLTPGLPNRSLAAPRRAERGLAMVAGKPSSDQPETLELLPHGRRWRGTRERIKLDAPPLRAAAAC

SEQ ID NO: 10049 - protein, 230 aa, Triticum aestivum
  Clone ID: TRIAE-23APR03-C24792_2.p
MSEQQDHVSKSSSSSISTSTQESEEEVSVTIGSLLAQARNDKGHSLGRRLLHLGSIPHRPRVNGDIPNVDNATLDHERLLERLGTYGLAEFQIEGDGNCQFRALADQIFRNPEYHKQVRKAVAKQLKEFRKHYEGYVPLDYKVYLKKMKRSGEWGDHVTLQAAADRFGAKICLLTSFRDTCLIEIVPRDAAPTRAKYLLWLSFWCEVHYNSLYANEDLPTRKTKKKHWLF

SEQ ID NO: 10050 - protein, 409 aa, Triticum aestivum
  Clone ID: TRIAE-23APR03-C24890_1.p
MAAYLSMGEAHRRIADYLSRLDDAISQSDGADLASLLAISSAPASTPLSDALAAFPDFPRLASDRFPHLSDFLPPLLRAIHSHSLRRFGDAYSSFEKAASAFLQEFRNWETPWAMEAMHMVALEIRLLAEKADRELVMSGKNPDKLQAAGSFLMKVFGALAVKGPKRVGALYVTCQLFKIYFRLGTVNLCRSVIRSIETARNFDFEDFPVKDKVTYMYYTGRLEVFNENFLVADQKLTYALMHCNPQSESNLRKILKFLIPVKLSIGVLPRRTLLEKYNLLEYADIVTSLRRGDLRLLKQALDRHEDQLLKCGVYLVLEKLELQVYRRLVKKIHIIQREKEPSKAHQIKLEVLVKTLQWLGITMDVDEVECIMACLIYKNLIKGYFAHKSKVLVLSKQDPFPKLNGKPV

SEQ ID NO: 10051 - protein, 389 aa, Triticum aestivum
  unsure (1)..(389): unsure at all Xaa locations
  Clone ID: TRIAE-23APR03-C24906_1.p
SPPPLPLQSNLASPSSLPLPAGGPPRRRASFVERRSRVTVLALVLLLPSACHGSGAFNVTATERNLCXEPAPETHIVAYASAAQSLVAAALSASICPRCNDLTMDLDTWYLSLXGGQCXQAFVGVAHNLNAIIVAIRRTQENRFACSVXQNWIKDXQCKQLDLSYLDMPKAKVHRGDFSYKTNTIIXLAITSAVHNARMSXGDIGEIVTGHSMGGAKAAFCALDLAIKLGSDNVQRVTCRHGRVGNAGMSYDFVKCTRTSYQARKRQCTTHDFRTASCWQCNLRHHLCQICAKHDSTGTRTTERASFASGFDPNCCRGVPHLPPRAFRTIFTYLXIDMESDDWSTCRIISVQSVERLRKDLVSNIIMTKHGVEVSIVENSMQTDWSSSR

SEQ ID NO: 10052 - protein, 130 aa, Triticum aestivum
  Clone ID: TRIAE-23APR03-C249322_1.p
MARSVPYVSAAKLVSMARGNRVAVIDVRDEERSYQAHIAGSHHFASGSFAARLPELVQATSGKDTLVFHCALSQVRGPSCARMFSDYLSESKEDSGIKNIMVLERGFNGWEISGQPVCHCKDAPCKGTCS

SEQ ID NO: 10053 - protein, 327 aa, Triticum aestivum
  Clone ID: TRIAE-23APR03-C24940_1.p
MTTNWSLSMTTVLKKSEDDKWLGMGNQELLEYFSDYAATKARHAYGPGGHRGMSVLIFESSAVGYMEAERLHKHFIDQRTDRDTWQNRRVPFLPGGKRQLYGFLARKEDMETFNRHCQGKSRLKYEMRSHNEMVVAQMKQMSEDNQQLNYLKNKVVKTEQRSKVVEETLGVITQKLRETMEENIFVRSKAKEKHSEYEEEMKSQEKFFHDQIENIHKATEDKESEFERLLQEERAKARQCDVDSGTTENRRLRKEQVQRFIECQVKDVQEFEAERDELIKAHEEKKVQLKKEYMAKEVELEKEFDAALTGLMEKHRPGTFQASSSRP

SEQ ID NO: 10054 - protein, 209 aa, Triticum aestivum
  unsure (1)..(209): unsure at all Xaa locations
  Clone ID: TRIAE-23APR03-C24979_1.p
VVCGTKSGNRGXFGDAAHGGGQGAGEERGRSGALDGACIGLRGLPGPPVLXDGCCVLGVMPRRSQTSXEISGASVGKVKIVPDTHGRKCEMGGHVEAFNALPGGNAXMEEWLDKIPWALLGVDGNLVRLLDVDGYYDRLLALFGKGAAEGFIKAECRPIIVSAPTAREVLTKMEQYTRSHRKVASRPSWKLTELGYGKAAPAPVEQASS

SEQ ID NO: 10055 - protein, 389 aa, Triticum aestivum
  unsure (1)..(389): unsure at all Xaa locations
  Clone ID: TRIAE-23APR03-C25044_1.p
IRATPALAGRRGGRVAAPAVTAAADGKSNFIYCGTSDAWSVVVRXRLPYIPCVRPSWASTGERAYFEAPALPEXPRLCPDHVPXVYHFXDRAMSLIGMRYIKDRPTSSSVRDYMAKTLFFTSLLYNSTTEHKKQVARYCENVEMCRLTEQVVFSDPYMVSKYNRWNSPFLDKDAEAVREDDGLKLEIAELKSMFIERAQALIHGDLHTGSIMVTPDSTQVIDPEFAFYAPMGYDIGAFLGNLILAYFAQDGHADQTNDRKAYKQWILKTIEESWNLFQQKFLGLWNKHKDGNGEAYLPAIYNNPELLSVVQKKYMTGLLHDSLGFGSAKMIRRIVGIAHVEDFDSIEDASKRASCERRALDCAKAILKGRRQFESIEQVIVHVQSVNHD

SEQ ID NO: 10056 - protein, 413 aa, Triticum aestivum
  Clone ID: TRIAE-23APR03-C25062_1.p
MGSWVLLAVVLGSLVGAARGSEPWSNGTQVYSTNANSGSGSNGAFVALTLIQSAAAKGAVCLDGSLPGYHLHRGSGSGSNNWLVNLEGGGWCNDVKSCVFRKGSRRGSSNHMERQLQFTGIMSNRPEENPDFYNWNRVKVRYCDGGSFTGDGADAASGLYFRGQRIWQAAIDDLMAQGMRSASQALLSGCSAGGASAILHCDEFRGMFPSNTRVKCLADAGMFLDSVDIAGRREMRDLFNGIVRLQGSGRSLPRSCTSRMDKTSCFFPQNVLPNIQTPTFILNTAYDVWQLQESLAPRTADPRGLWQSCKQNYASCNSNQLQFLNGFRNEMLNAVKGFSGSGQNGVFINSCFAHCQSERQDTWYSSKSPRLGNKRIAEAVGDWFFERGNAKYTDCAYPCDGTCHHLVFKGRHL

SEQ ID NO: 10057 - protein, 160 aa, Triticum aestivum
  Clone ID: TRIAE-23APR03-C25089_1.p
MMSITSAAAAAAAGSPVYTPLVSRGGRRSRCSVRAQAAADGAAAADGAASEHKSLEIMRKFSEQYARRSSTFFCSDKSVTAVVIKGLADHKDQLGAPLCPCRHYDDKAAEAAQGFWNCPCVPMRERKECHCMLFLTPDNDFAGEDQAISLEEIKEATSKY

SEQ ID NO: 10058 - protein, 258 aa, Triticum aestivum
  Clone ID: TRIAE-23APR03-C25115_1.p
MAPPLLLLVLFLLPALAAGHQHPSSYGSSALSEWRNAKSSYFAADPGDAIGGACGFGDLGKHGYGMATVGLSTALFERGAACGGCYEVKCVEDLKYCLPGTSIVVTATNFCPPNYGFPADAGGVCNPPNHHFLLPIQAFEKIALWKAGVMPIQYRRVKCLREGGVRFSVSGKSFFFTVLISNVGGAGDVRSVKIKGTESGWLDMGRNWGQIWHINLDLTGQPVSFELTSSDGTTMTNFNVVPKDWEFGKTYTGKQFLL

SEQ ID NO: 10059 - protein, 493 aa, Triticum aestivum
  unsure (1)..(493): unsure at all Xaa locations
  Clone ID: TRIAE-23APR03-C25142_1.p
RRDDQGRGDGGAEAAATAPSPARPTTPLPRRRAGDADVDDDGKQRRTGTVWTASAHIITAVIGSGVLSLAWATAQLGWVVGPITLMLFAAITYYTSGLLADCYRTGDPLTGKRNYTYMXDAVASYLSRWQVWACGVFRYGPLLGSPSRFPPPTVHSAGPASEAHAAVAAAADARRTLRPGVARRCARIRRARHGFAQVPCPVHHRGLRILVPACCLITGRRQCWFVSEGKTSSAGCVGGGSFTWYVLQVVSLRKLWKXESCIDDPTSSKTXNTIRIEIQDTVKAPPAENKTMRKANLMGVSTTTAFYMLCGCLGYSAFGNDAPGNMLTGFGFYEPYWLIDFANVCIVVHLVGAYQVYCQPIYAAVESWAAGRWPNSEFVVRQYHPFSGKFSLNMFRLVWRTAFVIVSTVLAISLPFFNDILGLLGALGFWPLTVYFPVEMYIVQKKIPRWSSQWVCLQLLSLACLIITIAAAAGSIAGIMSDLKVYKPFSTTD

SEQ ID NO: 10060 - protein, 270 aa, Triticum aestivum
  unsure (1)..(270): unsure at all Xaa locations
  Clone ID: TRIAE-23APR03-C251896_1.p
TIQLRPSPGTRDHPASPIAGGKGQSAARLAPTRRGNGSTGRRRGQGERLLAVTAADALSRHRGRRDGRVRPRARRGAPPRRQLPGRPRRGRRPRWRKRGSGWPTVRRHWHDAGYGSGGGQQSVTGFPXIDDSNSYWIVRPTLDSSAKQGDAVETGSIIRLQHMRTRRWLHSHLHASPLSGNLEVSCFGGDGQSDTGDYWRLEIEGKDKVWKRDQKVRLRHVDTGGYLHSHNKKYNRLGGGQQEVCGVRDKRAENIWSTAEGVYLPVDESK

SEQ ID NO: 10061 - protein, 436 aa, Triticum aestivum
  unsure (1)..(436): unsure at all Xaa locations
  Clone ID: TRIAE-23APR03-C252480_1.p
MADRGGKAPAWTSATAVDVDAEMVIVGAGIAGLATALALRRLGVGAAGGGVLVLERHAELRSTGAALTIFPNGWFALRALGVAHKLTSRYDAFETSRVTTLETGATQVFRFAGRKSSSGDVRVRPMHRKALLEALAEELPPGTIRFSSKLASIATEKAQGSPEIAVLRLDDGTVIRSKVLIGCDGVHSVVSQWLGLSEPASSGRSAVRGLAVYPDGHGLKKELRQFLSEGLRAGMVPISDTDVYLXVVNNTVPAWWVAGRDAARLLREVTGDLGRHMRAGDLDVARHFDSGNLSWAPLLYCAPLASLRGPAGRGPVTGGGDAFHPRARDMAQGGCLALEAGVVLARALSRAATPADGVAFYVAERRGRAAWLVAGAYLWGWVQQGGTNVRGVRGYMVRLFRDWIFYRFLFPRLADTMWFDCGDLVEPNAEGKTHSE

SEQ ID NO: 10062 - protein, 192 aa, Triticum aestivum
  Clone ID: TRIAE-23APR03-C25268_1.p
MGLSVIAPPAGDSASPAHRRARRAFLVSNYMILGAASGCGFLTLSLRLVPSVDGFLLILLHALTVAAAVAGCAVIAAPDPPRGRVYTAHMSATVVVSILQGAAAVLAFSRTAEFLAYGLRSYVREEDGAIILRMIGGLGIAIFCLEWVALALAFVLRYYAYVDRECGGNPMRRSAKVGGEDGAGNWPWPFQV

SEQ ID NO: 10063 - protein, 165 aa, Triticum aestivum
  unsure (1)..(165): unsure at all Xaa locations
  Clone ID: TRIAE-23APR03-C2528_3.p
SHQNDESVIPTEGKVQNPHXIKYSGTVQGLKYIWRTEGLRRQFKGNGTNCARIVPNSAVKLFSYEQASRCKLQVNSXDQPEMKTNRRRSVSYTGQKTSRNANPNRALPVADWGXNAQPSPLLRLGAGATAGIIAMSAAYPMDMLGGXELLVQKKKSPRESRPRPA

SEQ ID NO: 10064 - protein, 178 aa, Triticum aestivum
  unsure (1)..(178): unsure at all Xaa locations
  Clone ID: TRIAE-23APR03-C2528_4.p
MRLAAACPFPYSLHQNKLKMDDQDRRRRRRGAPSRWRCRTWSTWRRTWRGRTWCSPCRRAGASCGTPPWSGSSWPTSPPPCWCCCSPPCRRARRSPPSRARRSPTTPTAPCPGRRPAGSPRRRRASSPPTASSPPPRCPSSPPSGRTPAARRAPPPAGPWPPXGGPPARRPAAAPPMA

SEQ ID NO: 10065 - protein, 357 aa, Triticum aestivum
  unsure (1)..(357): unsure at all Xaa locations
  Clone ID: TRIAE-23APR03-C2533_1.p
MAELKSRRVILKDYVEGYPTEEHMELLPAAAVDEATHAEEGSVLVKNLYLSCDPYMRPKMARPQQQSYTAAFVPGAAITGFGVTQVVRSSRPGLAAGDLVXGITGWEDYSVIKPPFAGYXVVRSSRPGLAAGDLVWGMTGWEDYSVMKPPFTAILTKIQPDDGVPAVLLHRHPRLARFHGLRGCHVVGSAGSKEKVDLLINKFGFHDAFNYKEEDGDLAGALKKRFPDGIDVYFENVGGKMLEAVLLNMKVHGRIAVCGLISQYNLTAGEKDADVGVRNLTSLVSKRIKMQGFIEPDHKHLYPEYMAWVLPHIKEGRVVYVEDVADGLDAAPAALIGLYHGRNVGKQVVRLTNPDPK

SEQ ID NO: 10066 - protein, 90 aa, Triticum aestivum
  Clone ID: TRIAE-23APR03-C25350_2.p
TERRRQSPRRGGAHGGTTYKGYTIPHNKRWHTIAGKGLCATMWFWIFYRAKQDGAVLLGMRHPWDGHDDHAHGHGHAHEHEASSSSSPSH

SEQ ID NO: 10067 - protein, 480 aa, Triticum aestivum
  Clone ID: TRIAE-23APR03-C25406_1.p
MAPPRARALLLPLAAATVLVASTIFLFAAAGASRWRPADTGLPVPATPADFSAVPIGVSVTSAAKGKELSFLDENGRPDDPSSGSAAAAEPGRCDPRDAAVRVFVYDMPPEFHFGLLGWAPPPGNGGGVWPDVRGGTVPRYPGGLNQQHSVEYWLTLDLLASSSAAPCGPAARVADSRDADVIFVPFFASLSYNRHSKAVPPEKVSRDMYLQEKLVRYLVAQPEWKRSGGADHVVVAHHPNSLLHARSALFPTVFVLSDFGRYHPRVASLEKDLIAPYRHMAKTFVNDTAGFDDRPTLLYFRGAIYRKEGGNIRQELYNMLKDENDVFFSFGSVQDHGVSKASQGMHSSKFCLNIAGDTPSSNRLFDAIVSHCVPVIISDDIELPYEDILDYSKFSIFVRSSDAIKKGYLMRLIKGINKHRWTRMWKRLKEVDKHFEYQFPSHKDDAVQMIWQALARKVPSIRLKAHRFRRSSRSERGSK

SEQ ID NO: 10068 - protein, 401 aa, Triticum aestivum
  Clone ID: TRIAE-23APR03-C2547_1.p
EGGLFLVCVPAPSSLYRIHESVQDAGIVGPSPRELPAPSAVGNSKFLMYGGWDGKKWLSDVYVMDTMSLEWTELAVTGSAPPPRCGHSATMIEKRLLIFGGRGGTGPIMGDLWALKGITEEDNETPGWTQLKLPGQSPSARCGHSVTSGGPYLLLFGGHGTGGWLSRYDVYYNECVILDRVSVQWKRLPTSNEPPPPRAYHSMTCIGPRFLLFGGFDGKNTFGDLWWLVPEDDPIAKRDLVPSVGSDSNHSTVTGDAQQSALKESESQSDESPMLELAKRLGIPLYVEPSASFVDEINDKELMELSSRLIGESLPTTDQLACIQALRDHWRSSPSSSIQLQELGPLLRDYQRLIIRRFVESPSPAFLEREDRRLFHLKNASQLRMDDIPILLGEYRTLLST

SEQ ID NO: 10069 - protein, 116 aa, Triticum aestivum
  Clone ID: TRIAE-23APR03-C255229_1.p
MKSFKKEFTLEERANESAAMIAKYPGRIPVIVERFSRSNLPEMEKRKYLVPCDMPVGQFIFILRSRLHLSPGTALFVFVRDTLPQTANLMGSVYDSYKDKQDGFLYMCYSSEKTFG

SEQ ID NO: 10070 - protein, 489 aa, Triticum aestivum
  unsure (1)..(489): unsure at all Xaa locations
  Clone ID: TRIAE-23APR03-C25554_1.p
MASSTTSSGSKTLRVLLFPHFATGHIHPFTELAVSLAASSPNAAVEAIVAVTPANVPIVQSLLERHHSAATVKIVTYPFPTVEGLPKGVENLGKAATQADSMRINIAASTETLMRPAHETLVRAQSPDAIITDMLFTWSADIADELGVPCVAFHVTGAFPMLAMRHLMMEDAAIDGDDMVTAPPFPTPQIRVPRTELPDLSIFRYVFGKVHSMQAACFGLAVNTFSGLEQQYCDMYTGQGYVQRSYFVGPQLQSSESPTGDSKSQCIGWLDTKXPDHSVVYVSFGSCALVSDAQLDQLALGLEASGKPFLWAVRAAEKWTPPKGWEKRVEDRGVIIRSWAPQTAILAHPAVGAFLTHCGWNSVLEAVAAGVPMLTWPKVHDQFVNERLIKDVLGIGHRLWPHGAGLRSEDYEKHEVIPADDVARALLTFMHPGGPGDVMRTRVMDLASKSHGGLAEGDSSQQDFHRLLNNHMIANGGETYRLNSPPFMC

SEQ ID NO: 10071 - protein, 347 aa, Triticum aestivum
  unsure (1)..(347): unsure at all Xaa locations
  Clone ID: TRIAE-23APR03-C255642_1.p
RDSPLSSALLNLVPPFGLRPAIAFLIRTRAGPNPFXSRSAFVIGRSSGIGLTPATAAAREGARVSIGARHAPRLDDARDGARLAIGPRDGARLDDARAAPRLAPRRRARGHQACQREGRRVPPALDEGGPVDVLVCNHGVFVPQELEKQDMEEVKWMVDINLMGTFHLIKAALPAMKARTRETSLPASIAIMSSQAGQVGVYGYTAYSASKFALTGLAESLQHEVVSDDIHVSLIFPPDTETPGLVEEKKKRPELTTIIADSSGGMKADDVAMKALTGIKSGRFIIPCNFEGAMLAIATSGLTPQSSPLIAFVEVIGAGLMRFVALCFQWNWFSTIENWCAKNKKHG

SEQ ID NO: 10072 - protein, 232 aa, Triticum aestivum
  Clone ID: TRIAE-23APR03-C2559_1.p
MEPAVERKVPEQEEQLQPSHARAEDAPPAAVEEEDEAEAEESERRNRELKAGLHPLRRKLVLWYTRRTPGTRSQSYEDNIKKIVDFSTVESFWVCYCHLARPSSLPSPTDLHLFKEGVRPLWEDPANRNGGKWIIRFKKAVSGRFWEDLVLVLAGDQLDYSDDVCGIVLSCRFNEDILSVWNRNASDHQAVMTLRDSIKRHLKLPHTYLMEYKPHDASLRDNSSYRNTWLRG

SEQ ID NO: 10073 - protein, 75 aa, Triticum aestivum
  unsure (1)..(75): unsure at all Xaa locations
  Clone ID: TRIAE-23APR03-C2559_2.p
MVSGVLVALVLSCRFXEDILSVWNRNASDHQXAVMTLRDSIKRHLKVPHTYLMEYKPHDASLRDNSSYRNTWVRG

SEQ ID NO: 10074 - protein, 391 aa, Triticum aestivum
  unsure (1)..(391): unsure at all Xaa locations
  Clone ID: TRIAE-23APR03-C25647_1.p
RSIKPPVHCLDRSVHDDDGRRFVGPGDHGAGQSSSWRRRRSAARAFFVFGDSLVDNGNNNXLMTTARADSPPYGIDYPTHXRPPGRFSNGLNIPDIISEQLGAEPTLPVTXPGELHGGRRLLVGANFASAGXSAILNDTGTPIPSNIVRVSRQLHYFGEYHXVKLRALGGAVPAGADREPGAGAHLPSGGNDFVNKFSNLXPFSLRSRQFSLPDYVRYLISEYKKILTRLYDMGARRVLVTGTGPLGCAPAELALRSRDGECDRDLMRAAELFNPQLSQALEELNARYGDGTFIAANSFRVHFDFISDPAAYGFRTAKEACCGQGPHNGVGLCTAVSRLCANRDQYVFWDSYHPTERANRIIVSQFMTGSLDYVSPLNLSTALHIDASLMD

SEQ ID NO: 10075 - protein, 319 aa, Triticum aestivum
  unsure (1)..(319): unsure at all Xaa locations
  Clone ID: TRIAE-23APR03-C256547_1.p
MRGGGNTDRMQQVQHTVQTHGYGLARKHTYDWVVLTLLAAAVVVLHYAPPFNRFVGKDMMADIRYPVKQSTVPAWAVPVISMLCPVLVFVAVYVARRDVYDLHHATLGVIFAVLITAAFTDVIKTAVGRPRPDFFWRCFPDGRQVYDQVTGGVICHGEKGFLTDGRKSFPSGHTSWSFAGLGFLSLYLSGKIKAFDRKGHVAKLCIVILPLLLASLVGVSRIDNYRHHWEDVLVGGLIGYIMAVLCYLHFFPPPYHHQGWGXMRTSTCWKSLRCTIQIMHKTSSLQVSIISDXPANTITGDQEMIWNLEVCNSPLCGTD

SEQ ID NO: 10076 - protein, 199 aa, Triticum aestivum
  Clone ID: TRIAE-23APR03-C25671_1.p
LQRRAEVGPCKSTGRWIFPVGLGGSYLDTDSLVEQAVGMPSVAQIFKVHSEAFFRDSESSVLRDLSSMHRLVVATGGGAVIRPVNWRYMKKGLSIMLDVPLDALAKRIAQVGTASRPLLDQPSADPYTAAFTKLSVLAEQRGDAYANADVRVSLEELAAKKGHDDVSQLTPTDIAVEALQKIKNFVTEHSMASGPFDDL

SEQ ID NO: 10077 - protein, 275 aa, Triticum aestivum
  Clone ID: TRIAE-23APR03-C256813_1.p
MANPRLLLPRILCAAAAAFYACLPAPVSAIRKDIGIAAPIICRRTVQGWHLISNDNGYVCSALSIYPWSRCCPRTGARFSCQGCNLDLQCCNPFEYCVSCCLNPSMTKEADMLMLKVAKPVTAGTYANMFDFCMGRCRHSSASVVHENAYLSDFHHCFLVQQNSSGSTESNFGSRLDGINVILSRQGESCSSACRAKGQSCVPSRLSELNKCQILQKYMRCKNGCFPSLGPDQPAEVVDEAPKNLNPGACLYMQMDDRLTCDGSHQHTRRLCPCA

SEQ ID NO: 10078 - protein, 382 aa, Triticum aestivum
  unsure (1)..(382): unsure at all Xaa locations
  Clone ID: TRIAE-23APR03-C2569_1.p
MTSLNQFDLLGDVDNDDPSQLLAAAAAAAAKKAQANKTEAAPAGKAAQTAAAAKLPTKSAPPAQAGRDARSGGPPSRGGFGRGEPGRGRPLVRAVRAMTTLNQVRSPRRRRQRRPLAAACCGGGRRGKEGPGEQDGGSACWKGGPDCGVGQVDDQIRSPGTGWEGCXSGGPPSRGGFGRGEPGRGRSGRSDXLAQETDEALKIEDNAPIAEKQGEQDDAPPTTVEKKDHKDGAAKEEEENEEDKEMTLEEFEKIREEQRKALLALKTEERKVEVDKDLQSLQPLSTKKANDEVFIKLGSDKEKKKESTERDERAKKSLSINEFLKPAEGERYYGGRGRGRGRGEGRGDRGGFRGGFGGGYQRGQAAAPSIEDQSQFPTLGGK

SEQ ID NO: 10079 - protein, 110 aa, Triticum aestivum
  Clone ID: TRIAE-23APR03-C25774_2.p
MSASSTPVDASGEPIPTSSVLMAASKHIAVRCRPENVAFLNCKKKDPNPEKCLEKGRQVTRCVFNLLKELHQKCPKEMDAYAGCMYYYTNEFDFCRKEQEAFEGACPISE

SEQ ID NO: 10080 - protein, 122 aa, Triticum aestivum
  Clone ID: TRIAE-23APR03-C259_12.p
MADKKGGAPRKEEVVTREYTVNLHKRLHGCTFKKKAPNAIKELRKFAQKAMGTTDVRIDVKLNKLIWSSGIRSVPRRVRVRIARRRNDEEDAKEELYSLVTVAEVPAEGLKGLGTKVVDDTE

SEQ ID NO: 10081 - protein, 108 aa, Triticum aestivum
  Clone ID: TRIAE-23APR03-C26097_1.p
MVNAPKTKKTKCKNNESKKNTLNEDNKYKTGKDTLYKHAKYRKGRDSPGAHGQSEPYDSKAAITYKRTIVAEVCKCQSLQSTTPKRAIKRCKHFEIGGDKKGKGTSLF

SEQ ID NO: 10082 - protein, 374 aa, Triticum aestivum
  Clone ID: TRIAE-23APR03-C2610_1.p
MARSAMSGLVLLLLCATCRLAIGITDGLLSNGNFERGPQPSQLRGTQVMGASSIPSWRTSGFVEYIPSGRKQGDMVLVVPEGAYAVRLGNEASIAQRLRGAVPGARYSLTFSAARTCAQAERLNVSASGQSGVLVMQTMYSSNGCDSYSWAWDANADEVEVVVHNPGVTEDPACGPLIDSVDIKTLTPPRRTNKNLVKNGDFEEGPYIIPGTKWGVLIPSRMVDEHSPLPGWMVESLKAVKYIDSDHFAVPRGRRAVELLSGRESAIAQVIRTVPGKQYALSFSVGDASNTCRGSLMVEAYAGRESTKVPYESAGQGGAAKRAVLPFRATSSRTRVVFFSSLYNTRTDDMSSLCGPVIDDVAVVSVRARPPKRA

SEQ ID NO: 10083 - protein, 193 aa, Triticum aestivum
  unsure (1)..(193): unsure at all Xaa locations
  Clone ID: TRIAE-23APR03-C26154_1.p
NIEQQIINSNCSDCRDRALEACGKNCXSLAGLRRAMHPIDVAGKVCQHDEARAIACSMPKLRHLEIGYMLIATNAVVEIASRCRDLSFLDLRGCWGVDDKLLQDKYPGLKVLGPRVDDCYENSFLEECSDDSDDDSIYSWEEFMDDEDYFAAGSDDDEALWDDGHALEGLEVRFYGGGFGEGAFAGFDWPESP

SEQ ID NO: 10084 - protein, 222 aa, Triticum aestivum
  Clone ID: TRIAE-23APR03-C26240_1.p
MIQLLFVVLVAEAAVATVLLFKTPLRKLAMLGLDRLKRGRRAPVAVKTVAGVVITLLASTLYSMAEISGRAGDPEAGGGAALSPTDQVLFSRHLLEASLMGYTLFLALVIDRLHQYIRELRGLKKNVEAVSKQNKTLEEGKHGRSQEIAKYQEEVATLNEEMKKLKLQVQEKTEEVHVAEDKALAIQKQSESLLLEYDRLLEDNQHLREQLQSIDLRLSNPS

SEQ ID NO: 10085 - protein, 488 aa, Triticum aestivum
  unsure (1)..(488): unsure at all Xaa locations
  Clone ID: TRIAE-23APR03-C2630_1.p
SLRGENRAQQIANSNSTYGENASSICRTSSAIVIGGGFAGIAAGNALRNASFEVVFLESRXDYSFGFPVDLGASCLHGVCEENPLAPIIGRLGLPLYRTSGDDSGLFHHDLESYALYDTNGSQLPQEFVAIMGKMEGFEAIRKEAGKLCEEMKEDISIAKAIAIVLERNPHFRQVVIAHDVLQWYLVLMEGCFSTDADAISLQCWDQEVLLPGGHGLMVRGYRPVINTLAKGLDIRLGHRVVEIVRHWNRVEVTVSNGKTFVADAAVITVPLGVLKSNTIKFEPRLPEWKEEAIRELSVGVENKIVLHFSEVFWPNVEFLGVVSSTTYGCSYFLNLHKATGHAVLVYMPAGRLACDIEKMSDEAAAQFAFSQLKKILPNAAEPLNYLVSHWGSDENTLGSYTFDGVGKPRDLYEKLRIPVDNLFFAGEATSVQYTGTVHGAFSTGEMAAEECRMRVLEKFRELDMLEMCHPMAEQTATVSVPLLISRL

SEQ ID NO: 10086 - protein, 422 aa, Triticum aestivum
  unsure (1)..(422): unsure at all Xaa locations
  Clone ID: TRIAE-23APR03-C2634_1.p
MAATEPPWVLMATGRSPTTIAXVLKYWGKRDETLILPVNDSIXVTLDPEHLSATTTVAXSPSFPSDRMWLNGKXEIALSGGRFQSCLREIRKRARDVEDEKKGIKIKKEDWEKLHVHIASYNNFPTAAGLASSAAGLACLVFTLGKLMNVNEDYGELSSIARQGSGSACRSIYGGFVKWCMGKNDDGSDSMAVQLADESHWDDLVIIIAVVSSKQKETSSTSGMRDTVETSPLLQYRAQTVVPSRILKMEDAIKNRDFESFARLTCADSNQFHAVCLDTSPPIFYMNDTSHRIISLVEKWNHSEGTPQVAYTFDAGPNAVLIARNRKTATLLLQRLLYTFPPQKNDLDSYMLGDKSILSDAGLQSIADVEALPAPPEMKAPNQKFKGDVSYFICSRPGAGPKVLTDESHALIDSATGLAKGV

SEQ ID NO: 10087 - protein, 310 aa, Triticum aestivum
  Clone ID: TRIAE-23APR03-C263865_1.p
RRPAPPTGALCRPPRAGWARERAGGAGEPRACGRPPCSDKEATSRRGPWSPEEDLLRDSYVQEHGPGHWRAVPTSTGLMRCSKSRRLRWTNYLRPGIKRGNFTHQEEKLIVHLQALLGNRWAAIASYLPERTDNDIKNYWNTLSRTTRQVAERVQRMEEEANRRKQEEEKKPAPAAKKDQHPRPKAPQAAAAAAATPEKQEPAIGEKDKAAVDRESLEDRVRLCGDGEEVRAKAAATPTAMDAKAEHEKKAAAATCTAWKERIVGELKGLTDMKWADNTLEIARKNKEVVAVGVAAFSLGFFVSQRLFGK

SEQ ID NO: 10088 - protein, 110 aa, Triticum aestivum
  Clone ID: TRIAE-23APR03-C26415_1.p
MMVLLPVAQETGAGSGEPYSEGDIQKLGANTPRPGIAANVQASGERLVTISDLKSEERKQKLNRYRKKKIQRNFGRKIKYACRKALADSQPRVRGRFAKMDDGDMLKPRK

SEQ ID NO: 10089 - protein, 124 aa, Triticum aestivum
  unsure (1)..(124): unsure at all Xaa locations
  Clone ID: TRIAE-23APR03-C264172_1.p
HDSPRPPRRPSCLTEYYTVLTNPCKGPQYPPTECCDAFKEFACPFAAXINNQSTNCADTMFSYICFHGYPKGLFADECLKGKEGVSCEGIPAVDTGVPSGGRQVQGVSRPLVVFLCGLGALLFP

SEQ ID NO: 10090 - protein, 439 aa, Triticum aestivum
  unsure (1)..(439): unsure at all Xaa locations
  Clone ID: TRIAE-23APR03-C26420_1.p
MAAPNNDPPAASASASTSDAALAAPEDTSIEALARRVQEHMTLANNPTARRHKFWETQPVGQFGDVADVSLPDGAIEPPSPLSEVRADPYPLPAAFEWFTCDLDDDALLADLYALLAHNYVEDDENMFRFNYSPAFLRWALRPPSFFRAWHIGVRAKESKKLVAFISGVPARIRARDDVVRMAEINFLCVHKKXLRSKRLAPVLIREVTLRVHLENIWQAAYTPALARPAPPTTCRYWHRSLNPKKLIDVGFSRLGPRMTMSRTVRLYKLPDAPLTPGFPRVPPRGVAAVTRSLTPFLAAYLVAPRGGARVGGPWWRPLVAPPDSYLVESPETHEVTDFCSFYTLPSSVLNNANYSTLKAAYSYYNVAVKTPLQQLMNDALIVAKQKNYDVFNALDVMENEGFLKELKFGPGDGQLHYYLYNYRIRNGIKPSELGLVLL

SEQ ID NO: 10091 - protein, 280 aa, Triticum aestivum
  Clone ID: TRIAE-23APR03-C26421_1.p
MGRPYAVKGKKKRKLEGGEASRAPPVDAEAVEEEVKENEEVMEGEAAAEEAFAEEVGEGIPIVPRPVDSKRRPGAIFVLERACLEVGKVGKGMQILNSDDHANYLRKQNRNPADYRPDIIHQALLAIFDSPLTKAGRLQAVYVRTEKGVLFEIKPHVRMPRTFKRFCGLMSQLLQKLSITAVGKREKLLNVIKNPVTQYLPVGVRKIGLSYSAEKAVNLFDYVAKSNDDEPLVFVVGAMAHGKVDKEYSDDYIQISGYPLSAACCLNRICSALEQKWNIQ

SEQ ID NO: 10092 - protein, 319 aa, Triticum aestivum
  unsure (1)..(319): unsure at all Xaa locations
  Clone ID: TRIAE-23APR03-C26423_1.p
PAEPAQEGAEHGTEREAHGKESRWRDSRRRGLAHQQVMASILEHDPKTKRKVYTRYSFNDFSVFDINAESPIPPMRYTKRCVNGLELQDTANILTVKIVSSDKGFPIDVYGTIIARDSIDHKCMYLFNRTRDNCQPIXSRDENLILTGPGRGLVLLDFIYLEIDLKIKVGEEPLGEQISKGLLMIDGRVLPRDEKVAVAHQTLESWFSIVDVRYATLLNAVEGTFEIKLLEGRFCGKIMAGIEGIQPRIVIYNSKEDGVVSCEGRTDITLRRRVMTLRLNGMLTVGFAVCGGGGAATRKQKVEFTPQHRGEEKKEICFK

SEQ ID NO: 10093 - protein, 335 aa, Triticum aestivum
  unsure (1)..(335): unsure at all Xaa locations
  Clone ID: TRIAE-23APR03-C264354_1.p
MAPAIAAKPLLSDLVAQSRQVPSSHIRAVGDRPDLANVDHESGAGIPLIDLKHLDGPGRRGVVEAIGAACENDGFFMVTNHGIPEAVVEGMLRVAREFFHLPESERLKCYSDDPKKAIRLSTSFNVRTEKVSNWRDFLRLHCYPXREVVGTYSTEARALALRLLEAISESLGLERGHMEKAMGRHAQHMAVNYYPPCPQPELTYGLPGHKDPNAVTLLLQDGVSGLQVQRDGRWVAVSPVPGALVINIGDQLQALSNDRYKSVLHRVIVNSESERISVPTFYCPSPDAVVAPAKALVDGGHPLAYRPFTYQEYYEEFWNMGLESASCLDRFRPIA

SEQ ID NO: 10094 - protein, 297 aa, Triticum aestivum
  Clone ID: TRIAE-23APR03-C26571_1.p
MTAVRRQAAAKRGGGGAAGKNALLAADGSKRWGEKFFLLYTPFWLTLCLGVVVPFKLYESFTELEYLVLGLVSTVPAFLIPLFLVGKADSIRSLKDRYWVKANVWIIIFSYVGNYFWTHYFFTVLGASYTFPSWRMNNVPHTTFLLTHACFLFYHMASNMTLRRLRHSTAHLPQSIRWLFEAAWILALSYFIAYLETLAIANFPYYEFVDRDIMYKVGSLFYAIYFLISFPMFSRIDEKAEKWALSRVAVDALGAAMLVTIILDLWRIFLGPIVPIPESRRCGQPGLAWFHAQNESV

SEQ ID NO: 10095 - protein, 147 aa, Triticum aestivum
  Clone ID: TRIAE-23APR03-C26589_1.p
RNQSSLSPSRSARVGAVPRSPPQHTYPTPPSAIPKLSLSPNVPVAAVAAAATLRDCSRALARTMGNPKPYVPGSIDGSVRRWFRGTEGPAASGGIMSIGGPAPGSNAKSTAASAATSEANSSTSATRFYVKFDDVQGSNVGFNGTRF

SEQ ID NO: 10096 - protein, 500 aa, Triticum aestivum
  unsure (1)..(500): unsure at all Xaa locations
  Clone ID: TRIAE-23APR03-C26596_1.p
MFAHGSLASQLARRPLRAAGSPLGTGAGELQAMRRNIGKQIHLCRDGGKSQHKHLPQKLPLMTYPIPQGSERWGLPSVIVRIWPRMKTLWRYSISDSENLASDENTMEVMGEKYPSSVEVDVPLMRFLKGKGGSVQKQIEQETGVKIIFPSAKEETLVALEGKSAESIRKASERISKILEEAVQSPMLDYSHFISLPLAIHPALVEKLNNFQRSILGASASNVDSDKDESLSEGSMEEIDEAANPSVSVKLPVKEEISVIVKMDNKGSQPEFGIDKSIFIKPKTFHLTVLMLKLWNKDRIAQASEVLQSISSQVNEALENRPISIQLRGLFXTCMKGSPARARVVYAPVLEVGGEGRLVRACKVITEAFVKSGLVLERDARQELRLHATIMNVRHRKSKKSNRRNDSFDARNIFRQYGEQDWGEYPVPAVHLSQRFKFDKGGYYHCCCSIPLPAARFPCLRWLRRSELRVFSTQCSIESQCKINDIGFRCAILMAHLDVL

SEQ ID NO: 10097 - protein, 191 aa, Triticum aestivum
  Clone ID: TRIAE-23APR03-C266010_1.p
MGTDAPAPAPAAAAGDGDAARKRPGGQDAAAGADSKRRRAEHPSSGSRERHGQQPQPQPQRQQRPGRPGDGGKGKRETMRASHILIKHEGSRRKASWRDPDGVAISATTRDDAADLARALRDQIAAGELQFDAAARDNSDCNSAKRGGDLGPFEKGKMQKPFEKAVIALKVGDMSDVVDTESGVHIILRTG

SEQ ID NO: 10098 - protein, 172 aa, Triticum aestivum
  Clone ID: TRIAE-23APR03-C26608_1.p
FHGGATTPLVGCRSPLARCFFWLNGGRIHSSRRVCLMEARFSWGAAAGVRSFRSPWRSPPALPVGPGYGRQIQLLFGGYGVQVLRPWRFLHAKWFVPGGDEVQSGRWLIGTRSRFLLSVWGPPCKSQGLVCYVFYFGVLVGALYFHRLCVKRKLGVVLDPSSVKKKDGAAHT

SEQ ID NO: 10099 - protein, 268 aa, Triticum aestivum
  unsure (1)..(268): unsure at all Xaa locations
  Clone ID: TRIAE-23APR03-C26620_1.p
YFSSLYYPGSPCFARASRSTPPAAISVRLVASAIWRTTAAWRAWWRPGWCCWSTAFLLVRPRFPKRCCDFRNRPVSTMPALARLALRCLSVQDCASPVSPXPSRSPPSQMRALAVEVAYSIYDGARGHLRGDAPPDHPRQPLISIVGLAAGLAYQRCGTELVACLLVTEISSPLLHLREMLKELGVKDTDLNLLVDILFAVTFSVARMVCGTYVTYRTVTADNPILIKAMATSLLLVSAYWFLRILRMVRHKIGKKRLASKAAGKESM

SEQ ID NO: 10100 - protein, 424 aa, Triticum aestivum
  unsure (1)..(424): unsure at all Xaa locations
  Clone ID: TRIAE-23APR03-C26639_1.p
GFGWIPMEITQVPVLXRGSRGSGISTARIRSNSPPLPTGGDEKFLNAVIDRNLAHLLRRVRKGXWTGDRCGKVFYDHNASVGYEKLKEVETISESAIENVNLMEHMFDDLEMHLFALSSFDKHSSKIDHLLIGKKXKVLRGHFWSTTCKSLACEFILETCFLPAHLSTSSGVDFLDGNNSRHSRWRVDGYWNGYRNNSQSMSWAYXYGIAKFMIARIDRMIVNVQNGEFQRERTDRINAKVLTLLRGALGTEKINEEDLSIEAGIXEFIMEETSSCGAGGMGSYPYDDKRKATPDPEIMTYIQKSRSMAGVTPDAELMKLSDKDIVEMVFFPVINEACRVLDEGIAVKASDLDIASIFGMGFPPYRGGVMLWGDSIGAKYIHGKLAEWAKRYGSFFEPCSYLAERAAKGIPLSAPAASQVKARL

SEQ ID NO: 10101 - protein, 455 aa, Triticum aestivum
  Clone ID: TRIAE-23APR03-C26695_1.p
MRRNNNWKNRPKSNPTAVVMEAMGKQQREEVLLRAASDGNLRLLKKMARWMGSGGQGEAAVLAAVEDGEGGRPLHLAAGAGRVEVCRYLVEDLRLDVNQLNCQGHTPLYLSAYFGRAAAATYLLDHGADPLASKLRSPLYGAAMQGHCEMLEMLLSRGLDVDLNSVQGTALHAAACYKQHGMMKILLEHHADPNKVCYLNNTPLSLAMRQRDMSTELLECAKLLIKAGADVNFIDLDGDSYVTVAAKFGYPGIMKCLLDAGANPDIPDEYGRTPVEFAASNGSRDMVEMLFPLTSPISTLPDWSIDGIISHVKHYGLKPRDKQKCAKRRTELKQKALKAFKEEEYFIAALLYSCAITLDPSPDEYATLLANRSLCCLRTKNGRAALPDATMCRRVRPFWPKACYREGSAFMLLKDYEKACKAFADGLKLDPTNGDLANALREAQEAAKDARRPEN

SEQ ID NO: 10102 - protein, 155 aa, Triticum aestivum
  Clone ID: TRIAE-23APR03-C267021_1.p
MNTLCAKPMGFSGGVKCQRRARVRVSAVAAAPERVTMYDVLAVGNAAGPEEIKAAYRRAARRWHPDACPGGADRFMRAREAYEVLSDPERRRGYDIQLRCGAGAGAAGSRSSPAPRAGFADWEAQLAGLQWRMADTRGETWGSRMRRGAAQPTLF

SEQ ID NO: 10103 - protein, 282 aa, Triticum aestivum
  Clone ID: TRIAE-23APR03-C2671_1.p
MADRVYPAAKPTPPPPMANGGGGPAAPKPQMYQRPIYRPQGQAKSRRGRSCRCSLCCCFCWALLVVVLLALVAAAAGGAFYVLYRPQRPSFTVSSVRLSTFNLSSSTTAPVLTDSIQLTVTAKNPNKKLVYFYDDFSFSAATAANAVPLGDATVPGFAHDAGNTTVFTATITAAGVTVDPSGAGSDLKMSGAFSVAIDADTRAGVKVGSLKTKKMGIQVHCEGIKVTPPSPPPPAPKKVKGKNGTALAPAPALDNAETTAMVSTAAHSCKVRVRVKIWKWTF

SEQ ID NO: 10104 - protein, 344 aa, Triticum aestivum
  unsure (1)..(344): unsure at all Xaa locations
  Clone ID: TRIAE-23APR03-C2673_15.p
MARVLPLDIEPGEAPRAGETVVSMPSSSAVASRNGIERSEQNIKDDECARLVTPAQHATADNNTEILPEQPMSRHFIWWLKVLLVCFLLVLASYIFVKFVVRFAFEKVLLPIMQWEASAFGRPVLALVLVASLALLPLILXPSGPSMWLAGMIFGYGWGFLIIMVGTTLGMVASYWIGSLFRKRLHAWLKRWPQQIALIQLAGEGNWFQQFRVVALFRISPFPYTIFNYAVTVTEIKFNPYLCGSVAGMVPEAFIYIYSGRLIRTLADVKYGKYKMTPVELTYNIISFVVAVILTIAFTVYAKKALSHIKSSDDTCAEDQPGVTALKNGHQECSHAHHVALDVV

SEQ ID NO: 10105 - protein, 341 aa, Triticum aestivum
  Clone ID: TRIAE-23APR03-C2673_26.p
MARVLPLDIEPGEAPRAGETVASTPSSSAVVSCNRIEHSEQNIKDDEYTMLMTPTQHATADNNTEILPQQPKSSHFSWWMTALLVCFLLIMATYIFVKFGAPFAFEKVLFPIMKWEASAFGRPVLALVLVASLAIFPLILVPSGPSMWLAGMIFGYGWGFVIIIVGTTLGMVGAYWIGSLFRERLHAWLKRWPQQIALIKLAGEGSWFHQFRVVALFRVSPFPYSIFNYAVAVTEIKFSPYVCGSVAGMTPEAFIYIYSGRLIRTLADVKYGKHKLTTVEIIYSIISFIAAAALTVAFTVYAKKSLNNIKGPDDISEDHQPAAGSAGVTALKNGHQDVHIL

SEQ ID NO: 10106 - protein, 150 aa, Triticum aestivum
  Clone ID: TRIAE-23APR03-C26742_1.p
MSRQPEVLWAQRSEKVYLTISVPDAEDVVIKTEPQGIFSFSAVAHGESFSLNLELFDSILPEGSKTKTKVGSRNIICSIQKDKKCWWKRLLKSEAKHPYIKVDWNKWCDEDEESENSGSDDDFDGGEENDESDADDGMLYLPDLEKLRGK

SEQ ID NO: 10107 - protein, 272 aa, Triticum aestivum
  Clone ID: TRIAE-23APR03-C26794_1.p
MSIQGLLLEVRVTGCRKLRDTEFFSRQDPYVIVEYANTKLRTRTCTDGGRNPSFDEKFHIPLIEGLRELSINVWNSNTINTDDFIGSCRVPLNKVLTSGYDDASWPLQTRHMKSAGEVKLIMHFDVSAMKNKMAGKTSGQYAPSPYGASSASYPAPSAYAAAPPPHQAYGAPSHAPYPAPSAYSTPPPQQPYPTPPPQQPYPQQGGPPTSHPPQPYGQPYPPQPYGQPYPPQPYGQQPYPPQPYGQPYPPPSAAQSPYPPAPYPGAYPPRPY

SEQ ID NO: 10108 - protein, 104 aa, Triticum aestivum
  Clone ID: TRIAE-23APR03-C26806_1.p
MKPVVGIVVSNKMQKSVVVAVDRLFHNKVYNRYVKRTSKFMAHDEAEGCNIGDRVRLDPSRPLSKNKHWIVAEVLRRAKMYVPPPPAPKASGATTQQSSSKSSV

SEQ ID NO: 10109 - protein, 98 aa, Triticum aestivum
  Clone ID: TRIAE-23APR03-C2680_1.p
MAVSTFSGPGIGLGFGVGCGFGVGWGFGGMPLNVFGLGIGGGCGVGLGLGWGFGNAYGCQYRSSRVQFQGIEFQKKSEGDEAPKLASPGLVEKSRPYG

SEQ ID NO: 10110 - protein, 663 aa, Triticum aestivum
  unsure (1)..(663): unsure at all Xaa locations
  Clone ID: TRIAE-23APR03-C2681_1.p
PSPPVLLSTPPPRHSLTLHPRPRAAAQICERSSSRASRRDREPPPAAGAAGGRGPTPPSAKVLDHHHVVVGGGAGGRWVSGGIGLSEDQFNTCCIASLLQQRQETLTASPGSRTLWENMEVETRRLQIYATMNGSDICGEQYHEVFVWRKKTISGIYLENYERRFXRSEDGRFSMCAFGDQNLYFGNCGEGCRFARGAGKTGQAMLPTQXGRARKLKKKYWVKRLAVXTKLGNENHSLGRIDRKDGSLHRIMVINXRSIIPTRGSYRRFRFYYAKDKTVSTVSSSIVRRVXIELRDLVVGPGLPKPDYECMQHHTLRFRGARGSIREHAREDFKTRRCRQGDESLARXWVEEKMILEIKEDLALGPLKDEVDMFLNQGTPVFIRDRLLGISESSANGSEVDVRMEPISVLPMXPYILCALYRLYNGVRVVIKSDNIDTSIIALVVTRVEACSAVYLVGSRLAHLFLVNIVFVRVCSVRLVAMSTLAETENTLVXKAGEKKITLXKDAGKNTSAWLATLKNPNRSLPISXILLNLQRIMQNNEAVFRSLENLTEVCMMIXEAQKSFHDVKLSDRSLIRNSDLIETIELENLLINACITMHSAEARQESRGAHAREDFKTRDDDKWMKHSLGYWEDEKVRLEYRPVHMNTLDDEVETFPPKARVY

SEQ ID NO: 10111 - protein, 210 aa, Triticum aestivum
  unsure (1)..(210): unsure at all Xaa locations
  Clone ID: TRIAE-23APR03-C26856_1.p
MAAEVEEEVRLEVEAVAAVYGEDCRVYCDFPPHLVVHVRPNTADDSSQQFVELFLGIKASSQYPKEPPHVYAVESKGLDENRQAYLISSIQDKAKEHSYYPMLVILCEEAGEILSNMNHPAGDCPMCLYPLVSENNHDSALPFMKLMSCYHCFHSDCIMRWWGWLQHDDANSKKIDNSIYRRRXRLSNSDKLYNANHHKGFCPDCRKVFD

SEQ ID NO: 10112 - protein, 202 aa, Triticum aestivum
  Clone ID: TRIAE-23APR03-C268690_1.p
MEQAGQGEPEHAAQKKMEQAGQGAQPTKKPAAEVTLRLFGLADVDAMMAWASDPQVAAPCRWEPYESTEPLLAFIHDAVLPHPWFRAICLAGDDDRPVGAISVSPTDDACRAELGYVLARAHWGKGVATAAVRRAVAAVFGEVEGLQRVEALVDVANVASQRVLEKAGFRREAVLRRYCVLKGAVKDMVIFSFISTDTVLVD

SEQ ID NO: 10113 - protein, 186 aa, Triticum aestivum
  unsure (1)..(186): unsure at all Xaa locations
  Clone ID: TRIAE-23APR03-C26932_1.p
VLLLSNDGTFTTSYITTNGINFKIRAIELDGKLIKFPNXDTAGQERFRTITTAYYRGAMGILLVYDVTDESSFNNKXIRNWIRNIEQHASDNVNKILIGNKADMDESKRAVSTAKGQALADEYGIQFFETSAKTNLNVEQVFFSIARDIKQRLAETDSKPEDQTIKINKTEGSENPESQKSACCGS

SEQ ID NO: 10114 - protein, 299 aa, Triticum aestivum
  Clone ID: TRIAE-23APR03-C26941_1.p
MAAAAPLPVLLLLLPVSLLLPAADAIYCDEDDCYDLLGVKQDANASEIKKAYYKLSLKHHPDKNPDPESRALFVKVANAYEILKDEETREKYDYAVAHPEEFFYNTAQYYRAYYGYKTDTRSVLIGLLLIVSAFQYINQLTSYSQAIESVKQTPAYRNRLKALEFERTGGISSKKKGNKPMDKKVEDELRNEVDLQIQGVQKPSVWNLCGVQLILLPYLIGKLLIWQICWFWRYRVKKSPYAWEDACYLTRTSLRMPANTWQNIDEFTKEDLVMKRLWEKANMERHIAEARRGSKQRRR

SEQ ID NO: 10115 - protein, 132 aa, Triticum aestivum
  unsure (1)..(132): unsure at all Xaa locations
  Clone ID: TRIAE-23APR03-C26974_1.p
MVCTKCEKKLGKVIVPDKWKEGASNTYEGGGRKINENKLLSKKXRWTPYGNTKCIICKQQVHQDGKYCHTCAYSKGVCAMXGKQVLDPTLYQQSCAYSKGVCAMFGKQVHVHEAVQAKQCVSRILKWWTWYV

SEQ ID NO: 10116 - protein, 239 aa, Triticum aestivum
  Clone ID: TRIAE-23APR03-C269_69.p
RVELAFLPSAPFSLVPVAPLQIPNEFSPVFNHSWMNGSDESTNNNPPEIEIPTLITWSQGGNEVFVEGSWDNWTSRKVLERSGKDHAVLLVLPSGIYHYRMIVDGVPRYVSELPHVTDERGQVANLLDVHEYIPDSLDSVAEFDAPPSPEHSYNMEFPTDEELTKQDPPALPPQLFMTALGGTDHSDELAPKAKPQHVVLNHLFIEKGWGAQSLLALGLTHRFQSKYVNFVLYKPLVRR

SEQ ID NO: 10117 - protein, 295 aa, Triticum aestivum
  unsure (1)..(295): unsure at all Xaa locations
  Clone ID: TRIAE-23APR03-C269_84.p
MEGKEEDVRLGANRYSEHQPIGTAAQGGGADEKDYKEPPPAPFFEAGELTSWSFYRAGIAEFLATFLFLYISVLTVMGVVGNPSGSKCGTVGIQGIAWSFGGMIFVLVYCTAGISGGHINPAVTFGLFLARKLSLTRAVFYIVMQCLGAICGAXGVVKGFQTTLYQGNGGGANSVAPGYTKGDGLGAEIVGTFVLXVYTVFSATDAKRSARDSHVPILAPLPIGFAVFLVHLXATIPITGTGINPARSLGAAIIYNKKQAWDDHWIFWVGPFIGAALAAIYHVVVIRAIPFKSRD

SEQ ID NO: 10118 - protein, 114 aa, Triticum aestivum
  Clone ID: TRIAE-23APR03-C27064_1.p
MSAMKFCRECNNILYPKEEKERKLLLFACRNCEHQEVAGDNCVYRNIVHHEAGERTQVLQDVASDPTLPRTKDVRCAACGHGEAVFFQATARGEEGMTLFFVCCNPSCGNRWRE

SEQ ID NO: 10119 - protein, 351 aa, Triticum aestivum
  unsure (1)..(351): unsure at all Xaa locations
  Clone ID: TRIAE-23APR03-C27079_1.p
MARRPPIPPPRRDHRDVMSNKATHWCFPCRRPIRCPGQDIFQPQCWHDIIQEVXTRIGGALXNNYGMFGPRFDDRLDGRFGMMDAMSALMRRRMAXEMSSNPVFDPNAAWASTTQGRPSPIGPRLIFGSNMPXRGAKDSGVNVLVRGGRRIGADRPNFSGFLVGGPSLXEALFEQLLLQTGNRQGPAPAPQSVIDSMPVVRITRRHLSDDPVCPVCTERFEIGSEAREMPCKHLYHASCIIPWLVQHNSCPVCRHPLPPQRGSDSNAARPQPLAHAGEAVSRGVAGAGADPAPVTRNGDDDGGSPFSFLWPFGSSSPGPSSYQYGGGGGGRPAVYDDDPGQITYSEWHYDP

SEQ ID NO: 10120 - protein, 309 aa, Triticum aestivum
  Clone ID: TRIAE-23APR03-C27190_1.p
MTPPSPHHDPTAAPIMPPLLLAALALALALSHAAAGGGTGFYDPARVTQISWRPRAFLYSGFLSHAECDHLIKLAKGRLEKSMVADNESGKSVMSQVRTSSGTFLSKREDEIISGIEKRVAAWTFLPEENAESMQVLHYEVGQKYDAHFDYFSDKKNVKRGGHRVATVLMYLTDVKKGGETVFPIAEGRDLQHKDETWSERARHGLAVKPRKGDALLFFSLHVNATTDPSSLHASCPVVEGEKWSATKWIHVRSFDNPPDVMTDARCSDDNEQCPRWAALGECYKNAKYMVGTKDTLGSCRKSCGVCDA

SEQ ID NO: 10121 - protein, 237 aa, Triticum aestivum
  unsure (1)..(237): unsure at all Xaa locations
  Clone ID: TRIAE-23APR03-C27191_1.p
MAGSSGAAAASSRSQLKGDRFYYPPHRRQSQQHQQQGLQSRRPPTSPSLSPSPSPRRKTAAAAAAAVASVDADGRADSDDSSSTSSKPSLASTAAEVNVVSSAPPAEEEEEAGNLDRFLASTTPSVPVRNMPETSLRMRRSGDAMDSSXPYFCLDDLWESFREWSAYGAGVPLVLNGGDSVIQYYVPYLSAIQLYADPSGRPRFKDTQKLRLGALQMDVLLMLPHIENPNMTDAERL

SEQ ID NO: 10122 - protein, 122 aa, Triticum aestivum
  Clone ID: TRIAE-23APR03-C27244_1.p
DEWRRHAKQVHPQSAAAKDTHSKLQHAITTAISLLGSLPHLSALPLQPPHALLLPLGPHGRSPARVISFSRLLLLLLLLRRRRVLVVGSGRHCPPFFSWLLFLNSSRTTKCQLTSPTKLRPS

SEQ ID NO: 10123 - protein, 478 aa, Triticum aestivum
  Clone ID: TRIAE-23APR03-C27252_1.p
MQTIVTTGTIMRCALVTLVLTGIIANCVRMWDMQMSWCISTVNGDLRAMTCVAFSKKSKNLFVSGSSDRTIKVWTWDDTLIDAGGEVPLKAKAGVAAHDKDINSLSVSPNDGLVCSGSEDRTASIWKLPNLVSSVVLKGHKRGIWSVEFSPVEQCVITSDNKLTVKIWHVADGSCLKTFEGHTSSVLRASFLSRGTQFVSCGSDGLVKLWTIKTNECIATYDKHDGKIWALAVGKRTEMLATGGTDSDLNLWHDCTMEDKQEDFLKKEEEVLRGQELENAVSDSDYTRAIQLAFELRRPRRLLELFSQLCRKADPEDPIEKALLGLPKEGLRVLLEYIREWNTKPKFCHVAQFVLFRVLRSLPPTDILEIKGISELLEGLIPYSQRHFSRVDRLVRSTFLLDYTLTRMSVVDPDVDAGTTKDVTNDSSMDNVEITPAEPALETPEKPGKKRKSSKTSQSSKKSSKKVKASSNAVSVEA

SEQ ID NO: 10124 - protein, 606 aa, Triticum aestivum
  unsure (1)..(606): unsure at all Xaa locations
  Clone ID: TRIAE-23APR03-C27263_1.p
MLRRCVRDLYPLRSLRRIPRPISSEVQSPTFGQLRRNSTKASQQGSAQKSVPGPKEEPSKSGSKVPKVLLGTLVVGAAGMAAYRADYIDLHFQFMDEKLPSTIREPHLAVWYADRPLPFQQDDQKQXMLDPKNGIVQDTPKGLPPEGIPTAGEQPTPAEEKETETVTQGTXPVQDEHGADTKLPSQDTLSVDIKPNVVNKAAGEVPLGQADKISSTVSPVESSQTTAEVQKDPLGADVGEQKSLAETYLLQEEHDIPKDVSAKETKSDGIVGGVKASDDGKIMLDIIDAIHAAEKKQADTDAYTYSEEKRKLKERYEKELKXPVPGSSCTLKRQQXSDKELKKEKMKAAAAVKELQEKTEQKLMDELQRKDEEASQQVEKVQELAKAELAAALAKEKASQIEQIAEADLNIDALCMAFYARSEEARQSHSVHKLALGTLALEEALSSGSPIRTEVDQLRKSLEGIDKDSLLELALSSLPEDVLKYGSDTRMELKQKFNSLKATIRHFGLIPSGGGGILTHAVAHVASNIKVEEDPSGDGVESLISRVEDLIVGGDLTAATEALTGGLQGTAAEEAAAEWVKQARKRAIAEQTLTLLHSYASSITFT

SEQ ID NO: 10125 - protein, 406 aa, Triticum aestivum
  unsure (1)..(406): unsure at all Xaa locations
  Clone ID: TRIAE-23APR03-C27267_1.p
MVRLTLEQTAREAAPAGCLATFLDLSHRSFTDVSCLGSFKNLEELDHGRNCLVTLEGLSACSNLKWLPVIENKLVSLKGAEVLSKLQVLNAGKNKLTRIDEVKSMTSLGALILNDNNITSIXAKLDPHHQLNTLVLSKXQCTPIDAPDLKQCSFAPEICNLTLKCFLGFRDSRGDPIAAQGTLAKKVMKIVPNLRIFNAKPIEAISQNENSGKGSKLKKDEEMPDRDPIDSNTKKEKRKRSKQQVQSPEEPAAKDTPPAATIAAPVKSALSDSKKKKKEKVVTEQDKSSKTKIKDYKASFDDTELKAKKESKKKKSANKEDKDAGGIDDTEVSFAELMFSGDGAVPEPTAKDKAQATAVDGKFVGGLVIDHSKKRKKAKGTPIDASDLKQLCSAPEVGAGGLSGWD

SEQ ID NO: 10126 - protein, 425 aa, Triticum aestivum
  Clone ID: TRIAE-23APR03-C27291_1.p
MGLPHGAPLALSVLVLLCVHGGREAEAAGGGFVRAQGTRFVINGSPYYANGFNAYWLMTMAADPAQRGKVTSALSQAAARGLSVARTWAFSDGGSNALQYAPGSYNENTFKGLDFVMSEARKNGIKVILSLVNNYDTFGGKSGQAGGGRGRGQAVGSEHDFFTNSVVKGFYKNHVKTVLTRLNTVTGVAYKNDPTILAWELMNEPRCQSDLSGRTIQSWITEMAAHVKSIDGNHMLEAGLEGFYGASSSRAASVNPAGRQVGTDFIANNQVPGIDFATVHSYPDQWLSSSDDQAQRSFLGRWLDAHIADAQGTLRKPLLIAEFGKSQRDPGFSSAQRDAQFGMVYAKIYESARRGGPTVGGLFWQLMADGMDSYGDGYQVIFAEAPASTTGVITAESRKLKMLGKAFARAERAKRDAGGKVTGGN

SEQ ID NO: 10127 - protein, 208 aa, Triticum aestivum
  Clone ID: TRIAE-23APR03-C272_3.p
MGPIGGLEAARRRMYARTDGDPGDLPSPVLVPCYRHGRAEQPAMPQGRFLGAGPLADGGLSDIAELNLPKTTKISFPNGKDDLMNFEATLRPDEGYYVGGTFTFTFQVSPSYPHEAPKVKCKTKVYHPNIDLEGNVCLNILREDWKPVLNINTIIYGLNLLFSQPNDEDPLNHEAAAVLRDNPQKFQRNVQTAMSGGYVDNTHFPRCK

SEQ ID NO: 10128 - protein, 425 aa, Triticum aestivum
  unsure (1)..(425): unsure at all Xaa locations
  Clone ID: TRIAE-23APR03-C2734_1.p
SLTHRPPTPPPTLSVLLLTHPHADHPSSPPHPGKPYPSPDSPPPVEEDAGDGDGGGGRRDWAGVPSDGLFAEFGRLDVAGILTGGGRACRAWRRLGDGDPALWRRLDMTHHGDILETEEAEAMARAAVDRAAGTLQSFCADTFVTDALLSYISGRAPSLKSLQLSLCDEVSNEALAEAVXAFLSLEELEITFCSLNSNVCESVGRACPQLKSFRLNERWTILQRGFAAFEGMDDDTGALGIASSMPELRDLQLIGNNLTNQPTGXAILDHCPRLESLDVRRCCNLQMDDALRSKCARIGNLRLPRDPISDFKYRAYLTISDDYPGGALLDVVTDEDDAEFVAMADYVDCVGSDDYMYDDVFDDVMYDCVQDPGCNVCDQDRVLSSNDRSLGSEAMWAWPELRFLKLGSRTLLSKVDSRMFVSPMC

SEQ ID NO: 10129 - protein, 254 aa, Triticum aestivum
  Clone ID: TRIAE-23APR03-C2741_1.p
MNAWSGSGCEEWSMSNSTMLQALFSSQGLVWNYKPYFYEAGSAGTPYHDGLFFFDVCFPPEYPRCPPKVHFHSSGLRLNPNLYESGKVCLSLLNTWLGSGSEKWGKSNSTMLQVLVSIQGLVLNDKPYFNEPVIFSSKEKHSLGYNQTAFVLTCKLMLYLLHKPPKHFETLIVCHFHERERAILEACRAYASGMVVGSSVMDGRTYLRNKCFAGFKKSLDAQTELLAKELSANRLHALQLKREVDAADKTMSTS

SEQ ID NO: 10130 - protein, 249 aa, Triticum aestivum
  Clone ID: TRIAE-23APR03-C27427_1.p
MRLHSPSLQQAAAGAGAGATNAPFAAALGKVRTSTHRSLLLSNHFLFPCCTDRSYLCCCAQSSSSSLIHGRLSFGHASLQTPNHRTKRAGWAVRVLPLTEENVERVLDEVRPSLMRDGGNVALHEIDGLVVVLMLQGACGSCPSSTMTLKMGIESRLRDKIPEILEVEQIHDTETGLELNTENVEKVLDEIRPYLSGTGGGSLELVQIDGFIVKIEISGPAAGVMTVRVAVTQKLREKIPSILAVQLTE

SEQ ID NO: 10131 - protein, 52 aa, Triticum aestivum
  Clone ID: TRIAE-23APR03-C27440_1.p
MAVMDTAFKALTAGLGVATLYLAGSFSFNVYRGLAWHSEQSKLEKEKEKSED

SEQ ID NO: 10132 - protein, 225 aa, Triticum aestivum
  unsure (1)..(225): unsure at all Xaa locations
  Clone ID: TRIAE-23APR03-C27459_1.p
TSRRRRRVVMKAFGAXLVLTDPXKGMGGTVRKATQLYENHPSAFMLQQFENPANVQVHYETTGPEIWEDTLGQVDIFVMGIGSGGTVTGVGKYLKEKNPNAKIYGVEPAEANVLNGGKPGPHLITGNGVGFKPDILDMDIMEKVLEVKSEDAVTMAQQLALQEGLLVGISSGANTVAAIELAKRPENKGKLIVTVHPSAGERYLSSALFEGLRKEAEAMQPVPVD

SEQ ID NO: 10133 - protein, 216 aa, Triticum aestivum
  Clone ID: TRIAE-23APR03-C2745_1.p
MSKLQSDAVKDAITQIVGEAREKKRKFTETVELQIGLKNYDPQKDKRFSGSVKLPHIPRPKMRVCMLGDAQHVDQAEKMGLDYMDVESLKKMNKNKKLVKKLAKKYHAFLASEAIIKQIPRLLGPGLNKAGKFPTLVSHQESLEAKVNETKATVKFQLKKVLCMGVAVGNLSMDEKQIQQNIQMSVNFLVSLLKKNWQNVRCLYVKSTMGKRVRVF

SEQ ID NO: 10134 - protein, 366 aa, Triticum aestivum
  unsure (1)..(366): unsure at all Xaa locations
  Clone ID: TRIAE-23APR03-C2754_1.p
MGTETQCYWSTTPTGHLTSMQTLTDXGIRLPRRPQHLSVVDPPVILFGGSYGGMLASWLTLKYPHVPMGAGASSAPSLQFDDITPWSSFYDAVSQDFKSESLNCFSVIKAVWDVLDNRGSTHAGLLELSKTFRACKTVRFPDSLSNWLWTAFTYTAMVDYPTPANFMMNLPAYPVKEMCKIIDSFPAGADVVDKAFAAASLHYNYSGDQKCFEMEGGDDPHGLDGWGWQACTEMVMPMIVSNMSMFPPFSFSYENNSEGCLANYGVRPRMHWITTEYGGHKIDKVLKRFGSNIIFSNGMRDPWSRGGVLKNISSSIIALVTEKGAHHLDFRSATKDDPEWVVEQRRQEVEIIHGWIDQYNKDIAQM

SEQ ID NO: 10135 - protein, 221 aa, Triticum aestivum
  Clone ID: TRIAE-23APR03-C27576_1.p
MARRSGMLLLLAAAALLALGAGAAVPPSCERIECPAYDVVDSANGFEIRRYKDAMWVSTAPIEDISLVDATRSGFLQLFKYIQGKNAYNETIEMTAPVLTRVAPSDGPFCVSSFVVSFYVPAKNQADPPPAEGLHVQRWAGARYAAVRRFGGFVADADVGKQAALLDASLQGTRWAAAVSDGRKADPASEYTVAQYNSPFEFSGRVNEIWMLFDTMAASDM

SEQ ID NO: 10136 - protein, 88 aa, Triticum aestivum
  Clone ID: TRIAE-23APR03-C27589_1.p
MASTKVQRIMTQPINLIFRFLQSKARIQIWLFEQKDARIEGRIIGFDEYMNLVLEDAEEINIKKNTRKSLGRILLKGDNITLMMNTGK

SEQ ID NO: 10137 - protein, 190 aa, Triticum aestivum
  unsure (1)..(190): unsure at all Xaa locations
  Clone ID: TRIAE-23APR03-C27599_1.p
PTAPPPLPPPLPSAPPPKPRRRNAHTEGREVGTGRHRGAGRGSRRPPPGLSKPPTSRPARRGRVQGSSGPAADDTRSRRTNNLENRRRVAAPSAGRVPARAGAKRHALLRPDPTQGSTKPAIRXLAPRRGVKLISGRIYEETRGVLKIFLVNVVGDALTYIVHARRKTVTAMDVVXVLKGQGRTLYGFGG

SEQ ID NO: 10138 - protein, 123 aa, Triticum aestivum
  Clone ID: TRIAE-23APR03-C27599_5.p
PRHHTAATTTTTSSTHSEAKMSGRGKGGKGLGKGGAKRHRKVLRDNIQGITKPAIRRLARRGGVKRISGLIYEETRGVLKIFLENVIRDAVTYTEHARRKTVTAMDVVYALKRQGRTLYGFGG

SEQ ID NO: 10139 - protein, 383 aa, Triticum aestivum
  Clone ID: TRIAE-23APR03-C27632_1.p
MAARKQTAAQHKFLAAASSRAPEASKMAAAAVAARAYEAAARSALAALERNLLPDAVTRRLTRLLLAQRLRLGYLPSAPLQLQDLILFAHSLEGMPIAIETDTAKTQHYELPTTFFKLVLGKNLKYSSCYFPDDSSTLEDAEVAMLELYCERAQLQDGQSVLDVGCGWGSLSVYIAKKYRNCNITGICNSTTQKAFIEEQCRENELSNVEIIVADISKFEMERSFDRIISIEMFEHMKNYKALLKKISRWMKEDSLLFVHYFCHKTFAYHFEDKNDDDWITRYFFTGGTMPSANLLLYFQEDVSVVNHWLVSGTHYARTSEEWLKRMDKNIAAIRPIFEKTYGRESATKWIAYWRTFFISVAELFGYNNGDEWMVAHHLFRKK

SEQ ID NO: 10140 - protein, 265 aa, Triticum aestivum
  Clone ID: TRIAE-23APR03-C27637_1.p
FLLRHLKSASASAQDHAFSYLRYPACQSTLSSFLQLHQVDPPPSWGRSLRFRLALLQGHHCRRHQHLRRPPPPHRPFPHPPPPPPPAPPHLLAAARLGHLPPPVDPAHPAPLPPPAAAAAASAQSCPLLLLPLGPDAAADPRPPPAPPPTATGPAAPSSGRELGELGRGAPARRGTARDRRSRRRRNWDAESVGGGTGQRRAASSPPRWRLPRYIEIATISAWTARAEWGLRVRAPAAAPGFGEPPLGLHGGSIFRVLSLRNSSR

SEQ ID NO: 10141 - protein, 160 aa, Triticum aestivum
  unsure (1)..(160): unsure at all Xaa locations
  Clone ID: TRIAE-23APR03-C27660_1.p
NTRLWENMXWHNSDPATDLRPGGFMSLENLIYFARNYPDSFHRLLHKADGERAEWEYPFAVTGVKINVIKAGILGLQSENRRSSKARVGFAQLLEDDEMAFDNLFCLAFQMLDAQWLARRASYMEFNEVLKSTLGQLEQELTIGGVSRVQNLPSFRMLRR

SEQ ID NO: 10142 - protein, 156 aa, Triticum aestivum
  unsure (1)..(156): unsure at all Xaa locations
  Clone ID: TRIAE-23APR03-C2769_2.p
AVHNVFRVQIHGVLDGSTGIIGLEEVVDSHPAQLRTSSAWYAAEFDDYLIGPPAXFFRGLLCLELAFLWPLSVATVYGVLARRRWAATTSLXVGVTTLTXSLSAIFGEMLGSGKATTKLLQMYVPYAVFAVIAILRGLCSCSAPASPASSARKKRV

SEQ ID NO: 10143 - protein, 376 aa, Triticum aestivum
  unsure (1)..(376): unsure at all Xaa locations
  Clone ID: TRIAE-23APR03-C27721_1.p
CANGLYKVHVAPKAPNVAGPANSRGKAVLPTFGPPSEAAALEGSKDFMKRLCDKYNIPTAQYRTFTDPAKAKEYIKDQGAPIGGQADGLAAGKGVVVAMTLDEAFEAXDSMMVDESFGSAWFPGRXFEEYXXGEGASFFALVDGENALPLESAQDHKRVGDGDTGPNTGGMGAYSPAPIVTEELKSVIMETIITPTVKGMAAEGCKFVGVLYAGLMIEKKSGLPKLIEYNVRFGDPECQVLMMRLESDLAQVLLSACRGELGKVSLTWSPEIAMVVVMASEGYPSSYKKGTVIKNIDKAEQVSPAVKIFHAGTALDGDGNLVAVGGRVLGVTAKGKDIEEARSRAYDAVDVVDWPEGFFRRDIGWRALKQEQTANY

SEQ ID NO: 10144 - protein, 220 aa, Triticum aestivum
  unsure (1)..(220): unsure at all Xaa locations
  Clone ID: TRIAE-23APR03-C27737_1.p
MGVSPVSPGGSAGYECSFKILLIGDSGVGKSSLLVSFVAAANLDDDIAPTIGVDFKIKFLTVGGKKLKLTIWDTAGQERFRTITSSYYRGAQGIILVFXVYDVAKRESFTNLGDVWTKEIDSNSSNKDCIKMLVGNKVDKDDERTVTREEGLAFAQESGCLFLESSAKTRENVENCFEELVLKILEVPSLLEEGSSSVVKRNILKKQQESHAKYGGRCCQ

SEQ ID NO: 10145 - protein, 300 aa, Triticum aestivum
  Clone ID: TRIAE-23APR03-C2777_2.p
MAARRRSLLMLLPLLLSHFLSLAAAFQSDELLLHDDDEFEGTRVSSTPSPRPPSTPPVVSSRRRSADATQAAGASESDTVQFTLEHDLGAGLGFAPAGSFSARLKSSAHGSQTLTKLRFTRNELTEDEKNAFKKLLEEDSFYTIRLPSNVLDPTRNDYIYSSIKARCIPRDSLDEHIVIHMDGVNILAVNYGSVGGCQYPRPMKVPSKWTFNSYTILKTADQAPRTPSFVEQLIETESGLGEVMKPPEKSFWAKYWMYIIPLGLIVMNAVTAAANIPEEQAGGQGQAPAQRAPIAAPRRR

SEQ ID NO: 10146 - protein, 267 aa, Triticum aestivum
  Clone ID: TRIAE-23APR03-C27804_1.p
HPAGSLFFSALPSFAMINANAPPELTGDTTITDRIFMDFSICPSFFSNDRTLGAELASCPDSEPLGRVVFGLYGRLLPITTANFKTTCTTSAYRGTLVHKVLQGQFFAAGRQGSRRDKGVVQPPSKLVRNVETVDPKAYQLRHARPGTLSLCLEQNDDDDSIKLSPDYHNVEFLVTTGPGPCPELDDQNIVFGTVLEGMDVITSIATIPTYKPGERIQFFNDFAQLIGDERAQSARAMWDRPQKTVYISGCGELKVTKPSLSPPSLP

SEQ ID NO: 10147 - protein, 305 aa, Triticum aestivum
  Clone ID: TRIAE-23APR03-C27851_1.p
MVLLAVASSLKTLNPTLSPSPSRRRLLLGSSHLRLPPLLSRSGRLRCSAGYGDAAAPQQAAPTTQRPDEIPWSRELCNSVRLIGTVGTDIELRQLPSGASVARGRIAVWKSATETTWVTLAFWDDLAVMASEHVKQGDRIFVSGRLVSDTVEEGPEKRQVYYKVVVQQFNFIESFHPVRLYSTPSQSSGSYRYYVGNDFTCSTTESKKGDYMSSSSRSTEALWQAFFANPLDWWDNRKDKKNPRYPDFKHKSTGEALWVEGRNNPNWVVSQLAILDSRMGSLQDKQRKPVSYMYADDFMTSDASD

SEQ ID NO: 10148 - protein, 388 aa, Triticum aestivum
  Clone ID: TRIAE-23APR03-C278600_1.p
MAITTASASPAMQEAAKTPSASPPRATAASPARYRPSPLVIFSACLVLIGSSGPLLLRVYFVHGGQRLWLSALVQISGWPLLLPPLCVSIFRGRRHGIVNLLLPPRLVGAAVVLGSLYAVSCFVYAMGSQALPLSTSSLLLATQLAFTAVFAFLFVGLRFTPFSANAVLLLTIGPAVLGVGPGSGKPAGEPSKTYWTGFGEAIAAAALAGLVLPLVEVAMERFGRRRGPAASAPPPYSTVMQMQAMMGLAGTMVCLLGMAIKSDFNALPIEAAAFGLGETKYYLVLVWGAVAWQLLNLGVVGLVTCASSLLAGIMVAVLLPLSEVLAVIFLHEKFDGPKGIALVLCLWGFASYMYGEKVQQKKAAAQKNQLLQQQMARKTGDLELANP

SEQ ID NO: 10149 - protein, 104 aa, Triticum aestivum
  Clone ID: TRIAE-23APR03-C2791_1.p
MDEQEFRRMLDLFPVVRSRDYCKDEVESSSEGTTQQTRAQEIKGTKKKAAEALFLRKLKTAAEKKVGATKAELFCKTFEEAHEKLVYKELDLDAAQRFLNAYKS

SEQ ID NO: 10150 - protein, 215 aa, Triticum aestivum
  Clone ID: TRIAE-23APR03-C27928_1.p
MNLFRLAGDMTHLVSVVVLLLKIHTIKSCAGISLKTQELYALVFAARYLDLFVHFVSLYNTVMKLVFLASSFSIVWYMRKHKIVRRTYDKEHDTFRHHFIVLPCLVLAFLINERFTFREVMWAFSIYLEAVAILPQLVLLQRTRNIDNLTGQYVFFLGAYRVLYILNWIYRYFTEPHFVHWISWIAGIVQTMLYADFFYYYIISWKNNVKLELPA

SEQ ID NO: 10151 - protein, 208 aa, Triticum aestivum
  Clone ID: TRIAE-23APR03-C2795_1.p
PPPARRKRSREGAPGGRAAELQDPPPLPRARSHFPTTDRPVNHGLPPVHRVPISSPPTDQSIMEFPHRHGHGHGRRDDDDEDRRAPAPYGRHEPDAYGAPPPSYGRRPDDDAGDAYGRHPPAAYGAPPPSYGAPPPAYGGGREDDYGGRAPAVRVVPGPRPTVEAARTTTDATRPRRRGTAVVTTGAASVLRPTAEGRDEGHGVHEEW

SEQ ID NO: 10152 - protein, 257 aa, Triticum aestivum
  Clone ID: TRIAE-23APR03-C2798_2.p
FWFDIDTESGPHRQPSLPGNASESSTGNSENGNFSTNGTQLLVSAMKGSRAKRGIVTKLIVSWAPDVYDPPVTSDSHTVKPHQRSSRKSHYKYKPPKGSSSSSSSRTSSGSKKDKKHSHHSSSSSKRDKKPSHRSSNGGSSRIDTSDPQHRKAYGSITSSRTDTSVPEYHKLSPWQPPASAAVEEAIPTVPVLKAMEQIKRSSSCCKEPPISMKAMEQIKRSSSCCKEPPISMLSRQFVAAKYKGMFSFLSQNQLAS

SEQ ID NO: 10153 - protein, 366 aa, Triticum aestivum
  unsure (1)..(366): unsure at all Xaa locations
  Clone ID: TRIAE-23APR03-C27994_1.p
MASPRHLMKLSAALLLLCVGVCVARNSDFSIVGYSEEDLSSNDRLVELFEKWLAKHQKAYASFEEKLHKFEVFKDNLKHLDKINREVASYWLXAADEVGRPHPPFASNVCLAIGPPLLLRPVGGSSRPSRDEDGSVKRGAPVCGRDARASTRRQTRLKCAGTASSTSTTSRXAVTRIVDRAPTHSPTPRRTELKLRRPSASPQSFSGSAGQQPRASGTNIASSGGLHTEEAYPYLMEEGSCGDGKKAESKAVTISGFEDVPANDEQALIKALAHQPVSVAIEASGRHFQFYSGGVFDGPCGAQLDHGVAAVGYGSDKGKGHDYIIVRNSWGADWGEKGYIRMKRGTSNGEGLCGINKMASYPTKDK

SEQ ID NO: 10154 - protein, 269 aa, Triticum aestivum
  unsure (1)..(269): unsure at all Xaa locations
  Clone ID: TRIAE-23APR03-C2808_1.p
IKRKKNLEKTVAHCSNQAASNVSYLWYRQCIGACTIQSARCFXMENLFQTKEKYEEIREHIIQEPFDCERAREWKPDVTCDDQEDISQDGSRLWAIDKXPNIAQPPAGWERQIRIRGEGGTKFADVYYTSPTARKLRSLVEVDRYLQENPEYGAQGVTLAQFSFQIPRPLRQNYVKKRPKNASPSDEATTKPLQPVEVNSISWAAPLASEAKASEPASHADEKPVGSADVELVRKRKAEPGESDANNHVSDGPETKLEDAQNGDATTTA

SEQ ID NO: 10155 - protein, 207 aa, Triticum aestivum
  unsure (1)..(207): unsure at all Xaa locations
  Clone ID: TRIAE-23APR03-C28111_1.p
MRRGYSYSPSPPPRGYKGTAQSPSPRGRYDCRGGDRPTSLLXVWNLVLSPQPMTTFSRPFDLFGRLLSLYXNSYEVQGSHGGFGLVQYFDPNHAADAKYYMDGQVILGREVAVVFAQENRKKPAEMRTRESSRGRSYDRRHSPSPRGRPSYRGRSYSRSPSPRPARRRFRDESPSRSRSPSGSRSASPLDGKYGRSSRRERSISVSG

SEQ ID NO: 10156 - protein, 492 aa, Triticum aestivum
  unsure (1)..(492): unsure at all Xaa locations
  Clone ID: TRIAE-23APR03-C2813_1.p
PERAATRRPQELARSRRPGAGRGRAVVTPTRAPRRPASSSSSMSPTMTTKKILPPGSERPSLEPGENVGVDDVRALVAQHLRAPGTMGILEQEFGEDAEVWDREKVVIIXPHYISSPDERANRNVDILSGFXRGAQQLKYFYDIKDLSDFRANPDYKGVCHIALAQEGHCRPGEVLLGTYSHTCYAGAFGQFASRSGNSDTFCVMGSGKALLKVPPTIRFILYGEMPPYLLAKDLILQIIGEISVSGATYRSMEFVGSTIESLTMEERMTLCNMVIEAGGKNGVVPADETTFKSRGXDISVKYEPVYSCSGQIFYSDYRFDVSKLEPVVAKPHSPDNRALARECKDVKIDRVYIGSCTGGKTEDFIAAAKVFLASGKKVKVPTFLVPATQKVWMDVYSLPVXPGSGGKTXCSQIFEEAGCDTPASPNCGACLGGPRDTYARMNEPTVCVSTTNRNFPGRMGHKEGQIYLASPFTAAASALTGYVTDPRDFLS

SEQ ID NO: 10157 - protein, 135 aa, Triticum aestivum
  Clone ID: TRIAE-23APR03-C28174_1.p
MPTLTKLYSMKEAALHNTPDDCWIVVDGKIYDVTAYLDDHPGGADVLLAVTGMDGTDEFEDAGHSKDAKALMKDYFIGELDLDEAPDMPEMEVFRKEQDKDFASKLVDYAVQYWAIPVAAAGISAVVAILYARRK

SEQ ID NO: 10158 - protein, 295 aa, Triticum aestivum
  unsure (1)..(295): unsure at all Xaa locations
  Clone ID: TRIAE-23APR03-C28240_1.p
SGGGRGGRGRVALARPGRGGRPGGGGGGDVEYGAGEGGFFAVYDGHGGSRVAEACRLRMHLVLAEEGRTEDGEDGARWKEAMTACFARVDGEVGVDDGTDAGEQTVGSTALVAVVGLRRIVVANCGDSRAVLSRGGVPVPLSADHKPDRPDEMERVEAAGGKVINWNGYRILXVLATSRSIGDYYLKPYVIAEPEVTVMDRTDKDEFLILASDGLWDVVSNDVACKIARNCLSGRAASKYPESVSGSTAADAAALLVELAIARGSKDNISVVVVELRRLKSRAAAVIKENRTRWH

SEQ ID NO: 10159 - protein, 335 aa, Triticum aestivum
  unsure (1)..(335): unsure at all Xaa locations
  Clone ID: TRIAE-23APR03-C28244_1.p
MVPSGYDCAASVLLCAEDNAAILGLDDDEEDCSWAAAAATPPRMTVASPPPPEAPLVDPPSQAQECVVVLFWTDIQNMPDVWYFLLDWIWKVIXHLNFAPLTAVLSVNYLDRFFSVYPLPEGKAWVTQLLAVACLSLASKMEETYVPLPVDLQVVEATSAFEGRTIKRMELLVLSTLKWRMQAVTACSFIDYFLRKFNDHDAPSMLAFSRSTDLILSTAKGADFLVFRPSEIAASVALAAFGERNTSVVERATTTCKYINKERVLRCYELIQDKIAMGTIVLKSAGSSMFSVPQSPIGVLDAAACLSQQSDDTAVGSPATCYQASSASKRRRIGR

SEQ ID NO: 10160 - protein, 171 aa, Triticum aestivum
  unsure (1)..(171): unsure at all Xaa locations
  Clone ID: TRIAE-23APR03-C28306_1.p
MSSHRVKWNEDNPVXELNQTKPGEARRITEAQDNQYHPMMXREDGSLSPTRPFDKCLDETVSAEAILTALNGVASSSKNDSKDDEWASSDDDADAMEQDGDSEADRSSVSFKEHRRNHYDEFRKVKELMRTGSLVEDEARANERAANNVEDKTAGEKATGDKSESSASPQV

SEQ ID NO: 10161 - protein, 297 aa, Triticum aestivum
  unsure (1)..(297): unsure at all Xaa locations
  Clone ID: TRIAE-23APR03-C28335_1.p
MARVSNSKKRMLQTNTSSRNKKEEATAASANASAAGSADGSAVRVIAHVIFSLFRFGHAHGRGKNKLLVTNTYVMVGCGKDDGPRSRKGVDVMYQLFRFGPVRDFEWVDVLIPDTHWVLGPGFCSEKHQIDYVAHDALPYADTSGAANDVYEFVKKIGKFKETKRTDGVSTSDLIMRIVKDYNQYVMRNLARGYSRKDMGVSYVKEKXLQVNMKINKLRETVKAQQEKLQTVAKTAGINHEEWLANADRWVAGFLEKFEEHCHVMETAIKDRIQERLGRQAGKGIAGGLMRQPVAAA

SEQ ID NO: 10162 - protein, 230 aa, Triticum aestivum
  Clone ID: TRIAE-23APR03-C28355_1.p
MEDWENDDFQPIAPVVKAQPLKSNWEDEDVDEDDVKESWEEEEEKPKPQPVEKPAPKPSAKAAVKKGKQPSTSTEVVDDDVLDDPISEKLRQQRLVEEADFKATAELFAKKDGSEKSLETFIPKSESDFAEYAELIANKIRPYEKSFHYMGLLKNVMRLSMASLKGADAKEISSSVTAIANEKIKAEKEAAAGKKKGGAKKKQLHIEKGEEDFVARPGASFDDPDEFDFM

SEQ ID NO: 10163 - protein, 266 aa, Triticum aestivum
  unsure (1)..(266): unsure at all Xaa locations
  Clone ID: TRIAE-23APR03-C283646_1.p
MAIDHESPFKELRLKNRRIMGGGAPEPDEEEAEAQVAAAAGEEEQWPQWLRPLLSARFFAQCKTHTESHRSGECNMFCLDCAAGAAAXAAALCSLCLAHAHAXHHTIQIRRSLYHDVIRVSDIQRFMDIAGVQTYVINSARVVFLNERPQQKQPGKAGGGAGGANLCEVCSRSLLDNFRFCSLGCKVAGCSSDGGGNDKARMMRASRPGRAKGSSDSEAASSSSPLRNAARQSFTPSTPPPPPPPAAKRRKGIPHRAPFGNLIIDC

SEQ ID NO: 10164 - protein, 502 aa, Triticum aestivum
  unsure (1)..(502): unsure at all Xaa locations
  Clone ID: TRIAE-23APR03-C28412_1.p
MVSQHDILLAAGLISDHFGPLVAKVCDCLLRHGALQLTEIVRRLKLPQGQVKNSLLVLIQHNCVQAFSSPRGDRTITLYLAIFDNVLHRLRFSKFISVIRADIPESEALIEGLLQNGRLTFDQLVGRTISKVPEGTIRPAREEXRMNFNRLVYARYVERCPKAEPYFNPQEDEQSTGARRRVPKTAEEVLSLEQKVVNTATLSDPERFSEIPYSMEDASKTNDCPHNAVAGAKRKHGAFEVDEELNSTIAENEVLWRVNFEKFIFCLKKKFCADRKKPKLKVGTHPIWESFFEANLPDKDTNSVTSSINGILEKLGQKEGGAAMSIGDIKPVLLDLQCTTSDGEEFTFDLRKMVEACRNEEIESLVKKKYGQEAFTIFRLLVTQGCAVETDQIIDTTILDKQIVHSTLYKLWNDGYIDTEKIASAAGTGYAQFFVWRAKNTFREQFIDNLYHAALNLRQMVNYIAELLLEGSKDETKLRNRKNILILALTRHDDSLMLFHDF

SEQ ID NO: 10165 - protein, 182 aa, Triticum aestivum
  unsure (1)..(182): unsure at all Xaa locations
  Clone ID: TRIAE-23APR03-C28431_2.p
MAAMKVVRNLDLERYMGRWYEIACFPSRFQPKDGANTRATYTLGPDGAVKVLNETWTDGRRGHIEGTAFRADDAGDEAKLKVRFYVPPFLPVFPVTGDYWVLHVDDXYQVALVGQPSRNYLWILCRQPQMDEGVYEELVERAKGEGYDVSKLRRTPHPEPTPESQDAPKDGGLWWIKSLFGK

SEQ ID NO: 10166 - protein, 474 aa, Triticum aestivum
  unsure (1)..(474): unsure at all Xaa locations
  Clone ID: TRIAE-23APR03-C28456_1.p
MPTVCIKWQKQVFPGIEIDTSQPPMVFKTQLYTLTGVPPERQKXIMVKGGILKDETDWSTLGLKDGQKLMXGTADEIVKAPEKGPVFVEDLPEEEQAAALGHTAGLYNLGNTCYMNSTLQCLHSVPEIKSALLSYSDNVRGNGVDQASHSLTVATRNTFGELDQSVRPVAPLHFLQMLRKKYPQFAQQQNNVYMQQDAEECWTQLIYTLSQTLTSEASEPTAAQMKELFGIDLVSRVHCAESGEESSEAESVYSLKCHISHDVNHLHEGLKHGLKTELEKVSPSLGRTAIYTRESRINELPRYLTVQFVRFFWKRESNQKAKILRKVDYPLELDVYDFCSDELKLKLQTPRQVLRDAESARFGLKVEVKTSSSQNIEGSSTSAGESSSMDIDKADSSVPKKQLTGIYDLIAVLTHKGRSADSGHYVGWVKQDDGKWIEFDDDNPSIRKEEEILKLSGGGDWHMAYICLYKARVI

SEQ ID NO: 10167 - protein, 545 aa, Triticum aestivum
  unsure (1)..(545): unsure at all Xaa locations
  Clone ID: TRIAE-23APR03-C28494_1.p
MAATAVVGAASRSRLLLHHHRLPQVPAGGGGSLRVGALGAGRDWRRRVRVGVRVFARYSSQPQDFSSRLQDRAGELPKLVEDLLQTSISTGPRGAFRMAQGIQALLGVGGEWLNDFSKTANTSEGIPAQMRLGLLSPLYLRRLFERMGATYIKLGQFIASAPTSFPAEYVEEFQNCFDRAPPVPYSEIESILREELQRPLDSVYEYIDPVPIASASIAQVHGARLKSSQKDVVIKVLKPGIEDTLVADLNFIYLVARVLEFLSPELERTSLVAIIKDIKESMLEEVDFRKEAVNMEAFQRYIEAMGFDRQAKSPFVYQHCSTKRVLTMERLYGVSLTDLDSIRSLVPDPELTLVTALNVWFGSLDLMXSFHADVHAGNLWLLRDGRVGFIDFGIVGRISPRTWAAMEIFLASFATEDYNAMASALSEMGATGNDLDVDSFAKDLQNIFSSLQELDTEIIVAAARSSDAAAVSANVVVDERQMNALFLDLVRVSESYGLKFPREFALLMKQLLYFDRYTRLLAPSMNMLRDERINITSNKHTRTMN

SEQ ID NO: 10168 - protein, 392 aa, Triticum aestivum
  Clone ID: TRIAE-23APR03-C284_26.p
ITRTFQKFSVACALTLGRVGSASPAASLLPPFRSPLHSPTYPSSPSESPPIPSRRRRKEHGEMSSGMGKVVCVTGGSGYIASWLVKLLLHRGYTVRATVRDTADPKKTLHLQALDGAKDRLHLFKASLLEEGSFDAAIAGSDCVFHTASPFYHNVKDPKAELLDPAVNGTLNVLRSCKKASIKRVIITSSMAAVAYNGKPRTPDVVVDETWFSSAEVCEKNEQWYVLSKTLAEEAAWKFANDNGFEIVTINPAMVIGPLLQPTLNTSAEAILKFINGSSSTYPNFSFGWINVKDVALAHILAYEVPSANGRYCMVERVAHHSEIVKIIHEMYPNFPVPEKCADDAPFVPIYQVSKDKIRSLGMELIPLETSLKETIESLREKGFVTSESSHL

SEQ ID NO: 10169 - protein, 187 aa, Triticum aestivum
  unsure (1)..(187): unsure at all Xaa locations
  Clone ID: TRIAE-23APR03-C284_34.p
MIISKKNRNEICKYLFQEGVLYAKKDYNLAKHPQIDVPNLQVIKLMQSFKSKEYVRETFSWQHYYWYLTNDGIEFLRNFLNLPSEIVPATLKKSARPPGXRPLGSGPPGDRPXRGPPRFEGDRPRYGDRDGYRGGPRGAPGDFGGEKGGAPAEFQPSFRSSGGGGFGXRGGGGGFGPWWRRWWWLWR

SEQ ID NO: 10170 - protein, 233 aa, Triticum aestivum
  Clone ID: TRIAE-23APR03-C284_5.p
MAGDGELKLLGVWTSPFVIRVRVVLNLKSLPYEYVEENLGSKSALLLGSNPVHQSVPVLLHGGRPVNESQVIVQYIDEVWAGAGPSVLPADPYERATARFWAAYVDDKVGSAWTGMLFSCKTEEERAEAVSRAVAALETLEGAFAECSKGKAFFGGDAIGFVDVVLGGYLGWFGAIDKIIGRRLIDPARTPLLARWEERFRAADAAKGVVPDDADKMLEFLPTVLAWIAGKAK

SEQ ID NO: 10171 - protein, 97 aa, Triticum aestivum
  Clone ID: TRIAE-23APR03-C2852_1.p
MDREAKKEGFRKYLESSGVLDTLTKALVALYEENDKPSSAVEFVQQKLGGPSISDYEKLKAEKLDLQLKYNELLEIHKETSRQLEELKNLKIDAPWN

SEQ ID NO: 10172 - protein, 404 aa, Triticum aestivum
  Clone ID: TRIAE-23APR03-C28533_1.p
MGMLSRPEEVPALLRLKLAAGRIRRQIPPQEHWAFAYDMLQRVSRSFALVIQQLGPELRNAVCVFYLVLRALDTVEDDTAIPNEVKLPILRDFYRHIYNPDWLFSCGANDYRVLMDNFRQVSTAFLELGEGYQKAIEEITRRMGEGMAKFICTEVETIDDYDEYCHYVAGLVGYGLSRLFHATGTEDLAPDHLSNSMGLFLQKTNIIRDYLEDINEIPRCRMFWPREIWSKYVDKLEDLKYEENSEKAVQCLNDMVTNALIHAQDCLQYMSALKDNSNFRFCAIPQIMAIGTCAICYNNVKVFRGVVKMRRGLTARVIDETKSISDVYSAFYEFSSLLESKIDDNDPNAALTRRRVDAIKKTCKSSGLLKRRGYDLEKSKYRMPMLIMIMLLLVAIILGVLYGK

SEQ ID NO: 10173 - protein, 360 aa, Triticum aestivum
  Clone ID: TRIAE-23APR03-C28593_1.p
MADSAGKRPPTPAPASGGGGMAWKLSLALFVLLAAFLYKQIQPPAPEIVGSPGGPPVTASRTKLKDGRHLAYLESGVPKEKAKYKIIFVHGFDSCRYDVLQVSPELAQELGIYLLSFDRPGYGESDPDPAPSEKSIALDIEELADNLQLGPKFHLIGFSMGGEIMWSCLKYIPHRLSGVAVLGPVGNYWWSGLPSNVSWDAWYQQLPQDQWAVWVSHHLPWLTYWWNTQKLFPASSVIAYNPALLSEEDAKLMEKFGMRTYMPMIRQQGEYYCLHRDMMVGFGKWGWSPLDLKDPFAGGEGKVHLWHGAEDRIVPVILSRYISERLPWVVYHELPKSGHLFPVAQEMADAIVKSLLLGEQ

SEQ ID NO: 10174 - protein, 349 aa, Triticum aestivum
  unsure (1)..(349): unsure at all Xaa locations
  Clone ID: TRIAE-23APR03-C28594_1.p
MASTSSSPLSLVLLRPLPCRSLLLSKHRKPFPTPRTGRLAASAAAGAQQRLLRPPETGRWSRSSRSGRDFACLSYNNPPPPSDKDSNEWPILRRWDVPWEWQTVVLSMVGCGVSFALTGLVEQSILQYVGFSAAGATIDEKAEILFLGQLSVTAVVLGVIFSITNTFRPFPDDVFRYDVKEPFKLQNGWLLWAGIGLFGAVISIALVGAAMTYLNGAPPEREKDSLVPLLPLIGSSTLSTAYLVGITGVLAPXLEETVFRGFLMVSLTKWFPTPVCVILSAAVFAFAHLTPDQFPQLFVLGVALGFTYAQTRNLLAPITIHAFWNSGVILLLTFLQLQGYDIKELLGAS

SEQ ID NO: 10175 - protein, 244 aa, Triticum aestivum
  Clone ID: TRIAE-23APR03-C285_6.p
MAGGEELKLAGGGGRPGVSPFVLRAQMALAVKGLSYEYLPEDRGCKSDLLIASNPVYKKVPVLIHDGRPVCESLLILEYLDDAVGLVGNGKPILPTDPYSRAVARFWAAYVNDKLFPSCIGSLKTTKQEERAGKVEETLSGLRHLEGVLAECSKGEVEAPFFGGDSIGFLDIALGCYLPWFEAVGRLAGLGPLIDPARTPKLAAWAERFRVAEPVKALLPGVDELEEYITTVLYPKWNVAVTGN

SEQ ID NO: 10176 - protein, 239 aa, Triticum aestivum
  unsure (1)..(239): unsure at all Xaa locations
  Clone ID: TRIAE-23APR03-C28621_1.p
MGRGKVVLQRIENKISRQVTFAKRRNGLLKKAYELSLLCDAEVALVLFSHAGRLYQFSSSSNMLKTLEKYQXRYIFASQDAAVPTTDEMRNNYLEYMXLKSRVDASQRSQSLPLGEDLAPLSTIELEQLEGQVGKTLRPIWSRRTQVLLEDACHLTRKEQILQDADMTLRRKLGETALEAAPDPPPHPQQQQTWQGHRGVPPHTPPQPEHFCQALERYPSRLPVFRALEVNPPPPAWRA

SEQ ID NO: 10177 - protein, 421 aa, Triticum aestivum
  Clone ID: TRIAE-23APR03-C28749_1.p
MDSHNSTSPHVPEVTMDISSASGAAGNKACRGAACDFSDASNTSKDSKERSASMKKLLIAVILCVIFMAVEVVGGIKANSLAILTDAAHLLSDVAAFAISLFSLWAAGWEATPQQSYGFFRIEILGALVSIQLIWLLAGILVYEAIMRLINESGEVQGSLMFAVSAFGLFVNIIMAVLLGHDHGHGGHGHSHGHGHGHSHDHDHGNSEDDHSHHGDHEQGHVHHHEHSHGTSITVTTNHHSHSSTGQHQDVEQPLLKHDGDCESAQPGAKPAKKPRRNINVHSAYLHVIGDSIQSIGVMIGGALIWYKPEWKVIDLICTLIFSVIVLFTTIKMIRNILEVLMESTPREIDATRLESGLREMEGVIAVHELHIWAITVGKVLLACHVTITQDADADKMLDKVIGYIKAEYNISHVTIQIERE

SEQ ID NO: 10178 - protein, 271 aa, Triticum aestivum
  Clone ID: TRIAE-23APR03-C28771_1.p
MERRSTTRFSPSEIARMEKLVSSDRKEQVLVDSFCQKLVEEFNRSPARVGSRALQATQVRGWFLDKLPASTPKPASLPTTSEEKPLASEPDALISEIKTSASDEEKVLALDTSISNNEDALSADLPKETTDKVPEFEDLQFEAKSSKDSAWYDVALFLAHRKTSLGEVEVRVRFIGYGAEEDEWVNVRKAVRQQSIPLESSECRSIVKGDLVLCFKESNDEALHFDAHVVDVQRKQHDIRGCRCLFHVEYDHDQSQEMVNLKRISRRPRYL

SEQ ID NO: 10179 - protein, 184 aa, Triticum aestivum
  Clone ID: TRIAE-23APR03-C2883_2.p
MEGWDKGTKSVVGEIPLLSTRAGPRDGDPWRQRLKEEYRALIAYTSVNKAKDNDWFRISAANPEGTRWEGTCWYVHNLRRYEFPLQFDIPVAYPQVAPEIELPTLDGKTHKMYRGGKICLTVHFKPLWAKNCPRFGLAHALCLGLAPWLAAEVPILVDSGMVKHKDDEAAPADAAAASGSAAAS

SEQ ID NO: 10180 - protein, 162 aa, Triticum aestivum
  unsure (1)..(162): unsure at all Xaa locations
  Clone ID: TRIAE-23APR03-C28865_1.p
MGVGGTLEYLSGLLGGGGGHGHGHGHGNRRRRKQMQTVELKVSMDCEGCERKVKNALSSMKGVRSVNINXKQQKVTVAGYADASKVLRKAQSTGKKAEIWPYVPYSQVSQPYVAGTYDKRAPAGYVRSQEPGYGNVSGQVSRQDDQLTDMFNDDNANSCAVM

SEQ ID NO: 10181 - protein, 546 aa, Triticum aestivum
  unsure (1)..(546): unsure at all Xaa locations
  Clone ID: TRIAE-23APR03-C288_1.p
AGARAGERHARPSGLPRRGGNGGVQVSXVGVGGGGGGAPGRAGSTPXVDITPRHGTSLAAMVSRRACSTEWALQPLPVLNPYVPLLWGLSHALTSFMWXLCGPIAGLVVQPGVGLYCDSXTSRWGRRKPXFLTGCILICIADAVVGFXSDDIEAEQGESKEDCRFYXGHGATVENSIFCSWMALGNILGYSSGSTNNWHKWFPFLRTRACREACANLKGAFLVAVLFLAFCLVRTVFFPIVRTRACCEACANLKGAFLVAVLFLAFCLVITVIFAKEIPYKAIAPLPTKANGQVEVEPTGPLAVFKGFKNLPPGMPSVLLVTGLTWLSWFPFILYDTDWMGREIYHGDPKGTPDEANAFQAGVRAGAFGLLLNSVVLGFSSFLIEPLCKRLGPRVVWVSSNFLVCLSMAAICIISWWATQDLHGYIQHAITASKEIKXIVSLALFAFLGIPLAILYSVPFAVTAXQLAAKRGGGQGLCTGVLNIAIVIPQVFIAVGAGPWNELFGKGNIPAFGMASAFALIGGIVGIFLLPKISRRQFRAVGGGGH

SEQ ID NO: 10182 - protein, 247 aa, Triticum aestivum
  Clone ID: TRIAE-23APR03-C289183_1.p
MAALPPPPPSLEPEIGPDGLARDSPVLAYTEKVIAEEQLQLKKYIQENYSKIRDVEKELENLTLEVKLTAGPKKAALEHLRKKIEMSTERIRLAKVKEDEAKKAWEAAAQVVKEEEEAKQRLCDDLNRLVQESAASQYSRLEELKKRLECLNPIRASVDVSGINIVQQAATNSVPQQPTSQNLANAIAPASNIHKPATSGSQQQRTAEAERKQRSSNSGGRGRGGVMVLPKGRGSSGSGWTGAGFET

SEQ ID NO: 10183 - protein, 705 aa, Triticum aestivum
  unsure (1)..(705): unsure at all Xaa locations
  Clone ID: TRIAE-23APR03-C28928_1.p
MAWRLALSKAGRRSSSVVYNELVSTSAFRTPANGTGGVLKALXERYRSSYVGSFARRLRDFDTPSDASHLKEIXRSNPERVEQTFESHPSLHTSPWALSQYVKALAALAGQEERRLMQKVLAGHGNSATXQTDLSKMTFFYGQQGKALAAAEESSRTXVIELVGSTIYMCSWSVGMMQPEQEEDPFMAREPXFMSIRICNRCIXDRFSFDRCGAYSYVCRNAWLSXVTCRLYNIVHYLRDPKRFTRLGGKLPKGVLLVGPPGTGKTMLARAIAGEAGVPFFSCSGSEFEEMFVGVGARRVRDLFSAAKKRSPCIIFIDEIDAIGGSRNPKDQQYMKMTLNQLLVELDGFKQNDGIIVIAATNFPQSLDKALVRPGRFDRHIVVPNPDVEGRRQILETHMSKGLKADDVDLMTIARGTPGFSGADLANLVNVAALKAAMDGAKSVSMTDLEFAKDRIMMGSERKSAVISDESRKMTAYHEGGHALVAIHTAGAHPVHKATIVPRGMSLGMVTQLPEKDXTSVSRKQMLARLDVCMGGRVAEELIFGESEVTSGASSDLSQATRLAKAMVTKYGMSKRVGLVAYNYDDDGKTMSTQTRGLVEQEVKELLETAYNNAKTILTTHNKELHALANALIERETLTGAQIKNLLSQVNSSSDTQQPQAAEVPQQTPAAPASPQSPAAAAAAAAAAAAQQAAAQAKGVAGIGS

SEQ ID NO: 10184 - protein, 91 aa, Triticum aestivum
  Clone ID: TRIAE-23APR03-C2902_1.p
MELEMVSQHGALLKVGLFVLVQALVYLILAQSSSVFSTTKTLCLPPARSLSARRMVALLSDLPLPLGGEPSPRAAFVEPPSPVPLAHQKKD

SEQ ID NO: 10185 - protein, 450 aa, Triticum aestivum
  Clone ID: TRIAE-23APR03-C2904_1.p
MNHLARFAREAPDSEGCVSFSEPLHAALRSARRNHGIRFSSGDAGGSSSSANPSRNDHVLKRNQSALAPARSGSLFRNRFKKQFPFNGEAREGPVWWDGFPESSDLQSSERHLTALTSASSASPFSETSQLASSGKRPASHLPRNHLGRRSFMSTPVYPLVFRNPVSEAEASGVAEASNAGRTTPSDDSLASPVWRRSLASPELKFHDTLSELRKMEASPEPNTSSRREGFRWSSASSYDFGYDGDAIDISDHISIDSQRSPTSSTSFLKCGLCERFLRQKSPWSSNRIVRNTNMPVAAVLPCRHVFHADCLEESTPKSEAHEPPCPLCTRAPDSEGCVSFSEPLHAALRSARRNHGIRFSSGDAGGSSSSANPSRSDHVLKRNQSALAPARSGSLFRNRFKKQFPFKGRLGKDLFGGRVFRKVGSSSSSGGQKDDRQPPAANKPDRSME

SEQ ID NO: 10186 - protein, 321 aa, Triticum aestivum
  Clone ID: TRIAE-23APR03-C2913_1.p
MASPRGLAGLLCFALAAAAASAAQYRVGEQRGWSVPAAGAEPLNTWSSRMRFIIGDQLLFVYPKDTDSVLLVDQAAYNACNTTTYVSKFQGGSTVFTLDRSGPFFFISGNEASCKAEQKLIVVVLSVDHTPPGLLPPPPPPSMPPSSAPPMPSPTSPPSMTPPSAAPMPSPMSPPSMTPPSAAPMPSPMSPPSMMPPSAAPMPSPMFPPSMTPPAAAPMPTPMFPPSMTPPSAAPMPSPMSPAAAPGATPDSPQSPTGPAPSPGTPGGGSSPGTPGSDASSPPAPGADGANSTTPGSAAAPVTAGLIGTLAAGIGYAMLAI

SEQ ID NO: 10187 - protein, 477 aa, Triticum aestivum
  unsure (1)..(477): unsure at all Xaa locations
  Clone ID: TRIAE-23APR03-C29141_1.p
MEVALQAGDAADWVYKGEGAANLILSYTGNSPSMFGKVLRAKKVLNDKAQPAPNCVNFSSYEHLVWGDLPELIESVKQGSVAQAYAVHVMSQHLGHDHVDGGVRVSVSTDFLEMGGKNLLLARPVWRLNAITIDIKADSVLRRSSCFVCPXGHPELTPXTDAAIKTPAWSLLSSQYISKGCAILKQVSRYKMHQHLEFHQWGRYRKTSEYDPLDLFSGXIHRGRTAITTVYSTLEHYSGPLVNICMAVKPFCSTPQKTSGNSSQDSLGPKRMGGGPHLALANETEKCLEDLRKVSGLQLSDFIELLSEAISKSGVLDKLLATQKLDDHDIEGAIHLYYNIISQPCLVCKNITDAELLHKYSVLHSLPLDKSCKIVRDFLISATAKDCSLMMCFRPRECERTDPEYDSVFLQSVNRAYDYKAYFVDLDVKPLDKMTHYFKLDQKIVNFYTKSGEVGRVPCDSQKGVGTSDDTAVQPQH

SEQ ID NO: 10188 - protein, 197 aa, Triticum aestivum
  unsure (1)..(197): unsure at all Xaa locations
  Clone ID: TRIAE-23APR03-C29157_1.p
MSVPEAGQSAGRDEQEMDDYEQHQTRVLMALMQGLCAARYRKADNTPCLVDQGLYLGSVGAALNNEALKSLNITHILVVARSLNPAFPAEFTYKKIEVLDSPDTDLGKHFGECFTFIDEGICTGGNVLVHCFAGRSRSVTVVLAYLMKXHQMSLQSAMSLVRSIRPPIAPNAGFISQLVNFEKSMQVEQGQRTLQSN

SEQ ID NO: 10189 - protein, 485 aa, Triticum aestivum
  Clone ID: TRIAE-23APR03-C29167_1.p
MERVVVVSEDAAASVSSAPSSSFAETRVICRVCQKQFAQYTCPRCNSRYCSLTCYKGHSVQCTESFMRENVTEELKQIQPEDESKRKMLDILRRFHLEEEMESDGEDESMLSEELIQNARSGALTCLEGLSVHGTEPFRRALASGELSQMLPPDESKRKMLDILRRFHLEEEMESDGEDKSMLSEELIQKAISGDEIKLEDLSDDEIKRFRQALASGELSKMIEPWTPWWKNPSAKSISLSHASGQLIRQISTDDTTLSDPMTASESIINEIPEGPEYPLPSLKQLTRAEPSPLLTVHLVDILYSYCFTLRLYNGDWQSDPLGASTVALSMSKVMGDGAKPETVSEALTTCIEETCSPAYRHTGGFRFAIGLVDDIVTILSLGGNAVVCALCDFHRLIQAGESILKEDKMGETEKAQSFKKLHAAGRKLFFMTCWAHEQPSEAWPSLARIVEVQKVAFEELDSGSGLRKAGRKNNPQSKVLIEEV

SEQ ID NO: 10190 - protein, 478 aa, Triticum aestivum
  unsure (1)..(478): unsure at all Xaa locations
  Clone ID: TRIAE-23APR03-C2918_1.p
FHWRCCFFSAGGDRRHAHCGGARAADAFFFLEWRRQQRRRGAVPARAPSRTGGGGLTGYVDVPVGGGGDTQNICIYHKQDVYARLXSLPGEGAPAAASQVGHRWGRPPPCVQSGRCGLGRAGGXDVDAPVRWEVWMLSRVKNSLQDQVLGFAVVPLPLPXSVVAAEGGTLAREFPLSTNDLFHSPAGFLELELSYIGVVPDVIPVSPTPKPALADPDECENAGGGAGAGAGKDYENMEFPDMNLVEENQIMLSEYVGLPCTAMETQSSESLLTSEDVDGAATESHDAGVRVVQSFSTDYSTADSAGAFRSETAASSVSTTESPAAAVPATPQSNPSEPSGNALSSAGQKEKASDAAEVDSSPTVQESPAVNSPSTVSENAVDKPPPAMSFNFAEEVQVNQKEIMDMYMKSMQQFTESLAKMKLPLDMDNGSDKSGSGPAAASPTDSSGTDSSAATKKPTAGAAQEKSPKVFYGSRAFF

SEQ ID NO: 10191 - protein, 235 aa, Triticum aestivum
  unsure (1)..(235): unsure at all Xaa locations
  Clone ID: TRIAE-23APR03-C291_2.p
MASTRVLHLIIALVLAVAAAADAATITVVNRCSYTVWPGALPGGGARLDPGQSWPLNMPAGTAGARVWPRTGCTFDGSGRGRCITGDCGGALACSVSGQQXPTTLAEYTLXGQGGSWDFFDLSVIDGXNAPMSFKHVWRSCRAARCATDITDECLKNLLVPVRCYYACDKFSDYTYGCRGQSRTLPRDNYSXFFXAECPDAYRYPRTTKPAPQCPAVANYYXVLCPARNDLHMDQ

SEQ ID NO: 10192 - protein, 290 aa, Triticum aestivum
  unsure (1)..(290): unsure at all Xaa locations
  Clone ID: TRIAE-23APR03-C2932_1.p
QWRWRGCARQPRRRRPGSRPALAGRRLPRGLGAAAEAPEAVVEAGSARWGPMGAREYYDYRRAIYGDITHKAILVDAAGTLLAPTEPMAQVYRTVGEKYGVKYSEDEILMRYLHAYAQXRGRSWLRYVDDGRPFWQYRVSPSXNLKRLLIFRXLYHYYTTEKAWLLIDPDAEXVFEAFRWACVRTGVVSILDTRLRRPLHELSCDQWFXAVAVSAEIEAQQAKPXIFLKACELLDVXPEAAVHIGDERXRNDLWGARDAGCDAWLWGSDVHSFKEVAERIGVSVGMGNNM

SEQ ID NO: 10193 - protein, 105 aa, Triticum aestivum
  Clone ID: TRIAE-23APR03-C293512_1.p
MWASPGRLPAMEEEEEECEADAGRRAPMASCWGRFGLAALWHRLRHLFLARRRARHGRSILGAGGLNYDPLSYAQNFDDSSLELHEPDFTARFAPARNACSPRRA

SEQ ID NO: 10194 - protein, 222 aa, Triticum aestivum
  unsure (1)..(222): unsure at all Xaa locations
  Clone ID: TRIAE-23APR03-C2935_1.p
MADEDEYRCFVGNLSWSTTDESLKDAFSKYGKVTEAKVVMDKFSGRSRGFAFVTFDEKKAMEEAIEDMNGLDLEGRAITVDKAQPQGAGRDRNGDRDXDRDRGSRGGRDYGGGRAPRGGGGGDCFKCGKPGHFARECPDGDGGRGDRYGGRDDRYGGGRSDRGGDRSDRGGDRSDRDRSDRGGDRSDRDGDRSERGSDRYSSRSRDGGSGGDRYSRDRSGPY

SEQ ID NO: 10195 - protein, 134 aa, Triticum aestivum
  unsure (1)..(134): unsure at all Xaa locations
  Clone ID: TRIAE-23APR03-C29379_1.p
MGRGRGRGRKDXAIARSHEDKGSSGEEVVRQRKKRRGRPQKHFADKIEQVDVENFVEDVDGGDEDGKDVKLNASAGVKRGRPLKESPNIVLEENSNSSVRSSSDESARTNGFRQIGNRRKSTPRRAAEAGLECK

SEQ ID NO: 10196 - protein, 545 aa, Triticum aestivum
  Clone ID: TRIAE-23APR03-C29419_1.p
MRKGPSRSGSARHQQFRARAKTRVDDLQDMFSGLQYARKEARSTDAVLLEAQLHQMLREWRAELSVPSPASSLQAGNNNRDPSDPPSETPRPPQLAPAEEEDDATSKLVEQKPRPSANQTHKHPRGDPDSKPERPEGAETEPVTAARLPPSLGPGVITTPASAGFHDQMYYVNQELSVEDFLYDDDYKINLPGSNPEILNNLEGIGHQEYLQFNLPQELPPNAYLDMNNYGQNAGDGFLHMSDLLTTMSPAPASFLRPKCALWDCPRPAQGSESWQDYCSMYHAELAVKEEGPPGTMPVIRPRGIDLKDGPLFAALSAKIQGKHVGVPVCEGAATTKSPWNAPELFDLYIFEGESMREWLFFDKPRRAFDSGNRKQRSLPDYNGRGWHESRKQVMKDFGGLKRSYYMDPQPSSSYEWHLYEYEINDRDAFALYRLEFKSSEAKKSAKSKFTCSPLIEIQQQMVRLSADGHVENKRTARVRTQDVSTNIYPVQNNTAQASAPDAYQAASQVDQMTFLNGSVVYGPHLPYGYSTEGGDFYWNSNDGA

SEQ ID NO: 10197 - protein, 436 aa, Triticum aestivum
  unsure (1)..(436): unsure at all Xaa locations
  Clone ID: TRIAE-23APR03-C29430_1.p
MEIQTSGKPIDMLMEKVLCMNILSSDYFKELYRMKTYHEVIDEIYNQVDHVEPWMTGNCRGPSTAFCLLYKFFTMKLTVILLLGLLXHPESPCISAIGFLYLRYVADPLILSTWHDPYLLVDEAFSPGSIARMTTMGVYVRDLILGQKLCQXLDKFLSQYYFDSLLPRVPSPVFRHVTTDLEKMKLPTKLSGVTGESTRHGSEDTARRPPSVKASLSVSFGRRAPLRASTPVSAPVRRSLSQEVLRXPPSPFRRSVSREGPYNDRSSHDREGNRSSRDRDTDRSSRDRDTDHSSRDRDTGRSSRHRERDRSSHDRKRDYDRDSRDCDYYRSRHSEERRDYRSERDNSRHRRSSSCHRSRSRSRSRSRSRSRSRNEHRSSPFGDTSKEKAAAASSNLAKLKDLYGDVTEKKDDSDARWLHHDSCAEEVIRLGGPRWR

SEQ ID NO: 10198 - protein, 268 aa, Triticum aestivum
  unsure (1)..(268): unsure at all Xaa locations
  Clone ID: TRIAE-23APR03-C2950_1.p
MAMARRRALALVSQLLQRRVLPAPRFLSSAAGGALDRLNSPPFARQAAHRNPAPPSPWDRLGGQKRTMFIQTQSTPNPQSLMFHPGKPVMEVGSSDFPHARTAMTSPLAKALFAIEGVTRVFFGSDFVTVTKSDETSWDYLKPEVFAAIMDFYSSGQPLFLDSNTAAAMDTAIHEDDSEIVAMIKELLETRIRPAVQDDGGDIEYRXFEPGTGIVKLKIHGACSGCRCCSVTLSCGIENMLMPYGAEVKGVKQEMDGHEGADRADKMD

SEQ ID NO: 10199 - protein, 293 aa, Triticum aestivum
  unsure (1)..(293): unsure at all Xaa locations
  Clone ID: TRIAE-23APR03-C295137_1.p
IPQRKHGTPRSEDPVPAVVVPGGRPAVVPHPVSRFPFLWDTKARQGKISRAAEQRAALITLGATTTSTTEEKQRLPGEAGSVDLLLPLAYEVTRRLVLRQLGATWLALTRRRWAKVVEAVIHQGIVRCQSFTLIGVAGSLLGSVPCFXEGCGIVLQSFSLQFRAMSQTIDAAEIIKLLIEALDMLLIGTALLTFGMGMHGMFYGSQRVQEPIYERLKKGARIRSVTQAKSRFGHAVILLLQAGVLEKFKSVPLVTGLDMACFAGAVLASSAGLFLLSKLSAHPQTRNKQASFA

SEQ ID NO: 10200 - protein, 176 aa, Triticum aestivum
  Clone ID: TRIAE-23APR03-C29514_1.p
MGAGEGEAAGSKEKSSGVARTSLDGLRDKNVMQLKKLNMALFPVRYNDKYYQDAIASKDFSKLAYYSDICVGAIACRLEKKEGGVVRVYIMTLGVLAPYRGLGLGTKLLNHVFDLCAKQNISEIYLHVQTNNDDAIAFYKKFGFEITETIHNYYTNITPPDCYVLTKFIGQAATKK

SEQ ID NO: 10201 - protein, 81 aa, Triticum aestivum
  Clone ID: TRIAE-23APR03-C29568_1.p
MGGEGASSSGGGFRARIDHYLYSGEKKHVVAGIAIFAAIFGVPWYFMTRGAKHDSHQDYMERANKARSDRLSSGQPSSLKE

SEQ ID NO: 10202 - protein, 342 aa, Triticum aestivum
  Clone ID: TRIAE-23APR03-C29572_1.p
MTSVGDLDANYATCSRLTKEAAAAGVKFLLVMALASFAVSPPIAACAAVLRRAMSFSSVSAASQTRVGVVQMTSVGDLDANYATCSRLTKEAAAAGVKFLCFPEVFSFIGSKDGESVKLAEPLDGPIMQRYCSLANESSIWLSLGGFQERGPDDSHQYNTHVLIDESGKVRSSYRKIHLFDVDVPGNMVYKESRFTTAGDTVVAVDSPFGRLGLTVCYDLRFPELYQCLRFKHQAQVLLVPSAFTKVTGEAHWEILLRARAIETQCYVIAAAQAGKHNEKRESYGDSIIIDPWGTVIARLPDRLSTGFAVADIDLSKVEAVRTKMPISVHRKFESIWKSSSL

SEQ ID NO: 10203 - protein, 243 aa, Triticum aestivum
  Clone ID: TRIAE-23APR03-C29601_1.p
MWQCVGIFSVTQGFGILEVMCTVMRHGMGSMNREVDVIGRPNILSELEREFGSGPWLLFRGQLPGHLSEANSGFDVFVNGRRGVGMRRADVADYFVGPGLEDLIEQLTHNDRRGPPPASQSSIDAMPSVRITARHLTGDSHCPVCKDKFELGSEAREMPCKHLYHSDCILPWLEQHNSCPVCRYELPTQSSSGASCSRSRSTNQNDSSSSSSSSGRTSGRQRRRNPFSFLWPFRSSSSSTGSR

SEQ ID NO: 10204 - protein, 472 aa, Triticum aestivum
  unsure (1)..(472): unsure at all Xaa locations
  Clone ID: TRIAE-23APR03-C29631_1.p
MSFSTGFGCAGAHPARHLDPPAAGMTFRGVTPTQSLRQMPCSACPGRFDCSAHSCQSGPRRNPKKSMYDLQTAISLLYGEDNGAVAPPRKEQGNAKDIETLPLAYASGNYVETREIIMVXCGGAGPNAVKRMIEISMKGVEFXIVNTDFQAMRMSPIDPANRLPIGQELTRGLGAGGNPEIGMNAAKESQELVEKAVSGADMVFVTAGMGGGTGTGGAPVIAGIAKSMGILTVGIVTTPFSFEGRRRALQAQEGIAALRSNVDTLIVIPNDKLLTAVSPNTPVTEAFNLADDILRQGVRGISDIITVPGLVNVDFADVRSVMSDAGSSLMGIGTATGKTRARDAALNAIQSPLLDIGIERATGIVWNITGGSDLTLTEVNAAAEVIYDLVDPGANLIFGSVIDPSYTGQVSITLIATGFKRQEESEVRPAQAGGDVNRGRSSRFSSSSQDEGPKLQVPEFLQRKGRPGFSRG

SEQ ID NO: 10205 - protein, 351 aa, Triticum aestivum
  Clone ID: TRIAE-23APR03-C29685_1.p
MAPLESGSSQLFFDSSAIDGPFDVYECGTLAGTRVVPDPPPPGTSYGKQRSSRNAKKARRVHGSEEVEDCWNRLFLEGYQADVRVSTGDGSQILSHSCILGIRSPVLRSMLEEARIEHGFRNILISGVPSEVVRVFIRFLYSSRFEQGEMKKYALHLLVLSHVFSVQSLKIVCTDQLERFFLAPDNVVDVLQLARLCDAPRLSLICTRMIVGDFKTISLSEGWKVMRRANPSLEQELLEFLVEVDTRRQERAKRMEEKKVYLQLYEAMEALVHICRDGCRTIGPWDQKLKGSQVVCKFPACKGIELLVRHFSACKKRVPRGCANCKRMWQLLELHSRMCSTPDTCRVPLCR

SEQ ID NO: 10206 - protein, 215 aa, Triticum aestivum
  Clone ID: TRIAE-23APR03-C29727_1.p
MNCETCHLNELELEPLEIKDVLRCILHTIFFHRTLTLVRPKDVDCDLFEITYVQCGLAELEKEVDEKINQFIAWAEKHPNRKSQVCLSFFDEKNKHPGWFSSKTERVYWEQWFINLHVTSPKGQGKSRGSKAPANTKGQALEETSSRRDALSLLIQEVLFQIINYANEKKDHIPPISDRIFNHEILVPSSSDSVFGWNADVLRRALSSGHSYSLN

SEQ ID NO: 10207 - protein, 170 aa, Triticum aestivum
  unsure (1)..(170): unsure at all Xaa locations
  Clone ID: TRIAE-23APR03-C29744_1.p
MGNSLRCCLACVLPCGALDLIRIVHLSGRVEEYGRPVAAGEILSANPNHVLSKPCSQGVVRRILIVSPESELERGQIYFLIPASSVPAERKKKTGSSAGSQGAAGGRAVKDXNPGHGGKARSHVKSKPSSGHGSGRDVQSEKRSLHRRRVSTGGRTAVWRPHLECIVEGT

SEQ ID NO: 10208 - protein, 175 aa, Triticum aestivum
  Clone ID: TRIAE-23APR03-C298160_1.p
SGDVRHPWIHLPRAALASTTPTCAVLLWQAAASTSHRVAPASSRIHLPPRCYGERLASTCPHFAPVSDAPPPALERRLHRGLADEMLETALAGAAVGDIFCYIRLLFLLESATFFCYDPHFRVLFAGNRSQILLPWFFCYNRCIPCLLIFLLDPSICWNDSKFCYHGFLFLLLPS

SEQ ID NO: 10209 - protein, 203 aa, Triticum aestivum
  Clone ID: TRIAE-23APR03-C299496_1.p
MGFPVGYSELLLPKQLLHLLLLLGYLRRFLLWAFDAVGLGDLLDLGDEHLPQDHARADHAAAAAQLLQHRRPEFRPVTAMVIEEVLPVVRFDELEAAACVDGDCAVCLSGIGGGDEVRRLSNCRHAFHRGCLDRWMEHDQRTCPLCRAPLIPDEMAGALWAAAAGVPDASDFDFFYLGAASAPATPTLLRPHELLLTGLGGYQ

SEQ ID NO: 10210 - protein, 315 aa, Triticum aestivum
  Clone ID: TRIAE-23APR03-C3008_1.p
MAGRASSVERVKERATGLDKFVLREARGSSAEVYLYGGQVTSWKNNSGEQQLFLSKKASFKPPKAIRGGIQICFPQLGNHGVVEQHGFARNRLWSVDESPPLPDTTSDCHIDLILKQSEEDMKTWPHSYELRLQVALSPRGDLILTSRIKNKNADGKPFQFTFAYHTYFSVSDISEVPARAAAPSGVRPCLPANLPCTVQGDAVVFESEVDRIYLSAPPKIVTIDHEKKRTFVLRKKELPDVVVWNPWDRKAKAMPDFGAEEYKCMLCVGAARIEKPITLRPGEEWQGRQEISPVPSSYSSGLLDPEMIQQMQRI

SEQ ID NO: 10211 - protein, 219 aa, Triticum aestivum
  unsure (1)..(219): unsure at all Xaa locations
  Clone ID: TRIAE-23APR03-C301_22.p
MAGGGGRGRGEEEYDYLFKVVLIGDSGVGKSNLLSRFTRNEFCLESKSTIGVEFATRTLHVEEKIIKAQIWDTAGQERYRAITSAYYRGALGAVLVYDVTKPTTFENISRWLKELRDHADANIRIMLVGNKTDLKDLRXAVPADDAGGYAEAEGLSYIETSALEAMNVEEAFQLILGDIYRAVSKKAVASEEDRAGAAGVKEGKTINVAAAADNGGEKK

SEQ ID NO: 10212 - protein, 216 aa, Triticum aestivum
  Clone ID: TRIAE-23APR03-C301_28.p
MAYRAEDDYDYLFKVVLIGDSGVGKSNLLSRFTRNEFSLESKSTIGVEFATRSIRVDDKVVKAQIWDTAGQERYRAITSAYYRGAVGALVVYDVTRHVTFENVERWLKELRDHTDANIVIMLVGNKADLRHLRAVSVEDAKAFAERESTFFMETSALEAMNVENAFTEVLTQIYRVVSKKALDIGDDPAAPPRGQTINVGGKDDVSAVKKAGCCSS

SEQ ID NO: 10213 - protein, 217 aa, Triticum aestivum
  unsure (1)..(217): unsure at all Xaa locations
  Clone ID: TRIAE-23APR03-C301_29.p
MAHRVDNEYDYLFKIVLIGDSGVGKSNILSRFTRNEFCLESKSTIGVEFATRTLXVEGKTIKAQIWDTAXGQERYRAITSAYYRGXAVGALLVYDITKKLSFENINRWLSELRNHADSNIVIMMVGNKSDLNHLRSVQEEEGQALAEKEGLSFLETSALEALNVEKAFQTILSDIHQIISKKALAAQEAAGSGPPTQGTTINVADSSGNTKKGCCST

SEQ ID NO: 10214 - protein, 137 aa, Triticum aestivum
  Clone ID: TRIAE-23APR03-C3024_4.p
MSAMVASSLNPEAPLFIPAAFQQVEDFSPQCGWDLVKSTAWFRDHWYHQHQQLDDMVDSLIAFEAEDAIAVEASHPQPPAALNIDGVLKALRLASPSPKGGDALRGFSEKPRYTEKPTKYAGSPRSGGAPRFIHQPR

SEQ ID NO: 10215 - protein, 308 aa, Triticum aestivum
  Clone ID: TRIAE-23APR03-C30250_1.p
SVDDGALRLAHLDAEPRAVAAAVLQQLVAPDGADAEAVVGSDPVLSAVRLLAGPFRRLPPVALPDPGGPLLPANPLHLPVLLRDPVRLAELHRHVQVLLLLGAQVALPQRHGEPTRRGAASAAMDVAVAAAASTPWQRRWRRLLLFGAVVFLLALAAVSPALGVVEHLDGEQGGAVVAEDEELPQLYAVGADELLPAPAEVHVAVLVGDDLHVPRARPSAVDPQLHAPELTPSRTCQAAARPPRLLPGHSACRTRNQPGQGCPAAAAPSPPSPCPCESAESPWSTRARPLAGLSLTLTDGRRRRLRIL

SEQ ID NO: 10216 - protein, 289 aa, Triticum aestivum
  Clone ID: TRIAE-23APR03-C302_3.p
MGSLLEDGLSYKESFIVRCYEVGINKTATVETIANLLQEVGCNHAQSVGFSTDGFATTTTMRELGLIWVTNRMHIEIYKYPAWGDVVEIETWCQADGKIGTRRDWILKDLANGEVIGRATSKWVMMNQNTRRLQRVSDEVRDEVFIHCPKSPRLAFPEENNGSLKKIPVLTDPAQHSRLGLVPRRADLDMNQHVNNVTYIGWVLESIPQDIIDTHELQTITLDYRRECQHDDIVDSLTYIEEGEEINSNGSLFSAPHPEEQRQFLHCLRFAGAGDEINRGRTVWRKLAR

SEQ ID NO: 10217 - protein, 381 aa, Triticum aestivum
  unsure (1)..(381): unsure at all Xaa locations
  Clone ID: TRIAE-23APR03-C3033_1.p
MAAAAAEEFVKGRVFPNGVAVITLDRPKALNAMNLEMDLRYKTFLDDWETNPNVKCILVXESSSPRAFSAGMDIKGVAAEIQKDKSTSLVQKVFTAEYSLICKIHEYAKPYICLMDGVTMGFGIGLSGHGRYRIITERTLLAMPENGIGLFPDVGFAYIGAKAPGGGAVGAYLGMTGKRISSPADALFIGLGTHYVPSGDLGSLKESLLSANFTADPHKDVESLLTGYKKEPESVPQLEKLLPDIVSSFGPDKSATESVEELKKRTQNGDATVSEWANDALAGLKKGAPFSLCLTQKHFSRVASSYGNNENYLSKLAGVMKLEYRIALRSSVRNDFAEGVRAVLVDKDQNPKWSPATLEEVNMDEVESVFEPLAADAELNV

SEQ ID NO: 10218 - protein, 170 aa, Triticum aestivum
  unsure (1)..(170): unsure at all Xaa locations
  Clone ID: TRIAE-23APR03-C304_5.p
MANAMLLPVLISFLVLPFSALALTQDFCVADLSCSDTPAGYPCKAGVGAGDFYYHGLAAAGNTSNLXELLFVTEGTILAGFISSSSNTVYTKTLYKGDIMVFPQGLLHYQYNGGSSPAVALVAFSGPNPGLQITEYALFANNLPSAVFETVTFLDDAQVKKLKSVLAGTG

SEQ ID NO: 10219 - protein, 528 aa, Triticum aestivum
  unsure (1)..(528): unsure at all Xaa locations
  Clone ID: TRIAE-23APR03-C3050_1.p
MATEGLPMLLADASRSPWGVAGAAAAGALLWFAAWVLEWASGAPGPLGRALRAYGIMGRRYRLFTGDIPAMARSNPMARSRPMPLRCHATTPXVPPMVPNAVXDHGKVPYARFGTTPGVVIPEAELVKEVWSHQYRSVGKELXTLLANGLANQEGXKWAKQRRILNRTFLHDRIKRMLTVFSAXAKNMITRWXNTMSADGFYVGIDFCPCSCLNLTXGDVISVEQQFGSNFQEGMKIFQLQGEMGERLIQAFRTFFIPGYWFFPTKNNRRMRAIDREIRMILRGIIGKKERAIKNGEASSDDLLGLLLESNMQQSNGKAKLGLSIEDIIQECKLFYFAGMETTSVLLTWTLIVLSMHPEWQEQAREEVLHHFGRTTPDFENLGRLKIVTMIFYEVLRLYPPITFLTRRTYKAMELGGIKYPAGVNLMLPILFIHHDPDIWGKDAREFNPQRFADGISNAAKHPAAFFPFGGGPRICIGQNFALLEAKMALSIILQRFSFELSPSYVHAPYTVITLQPQHGAQIRLKKI

SEQ ID NO: 10220 - protein, 296 aa, Triticum aestivum
  Clone ID: TRIAE-23APR03-C305_55.p
MHPAAAEMQPPVGSPTAAPQSETQHPLSTPDPSSPPAPAPAPAPAPEAAADPPSSAPALAPVQLQPQQQHKTVTWSEKLTSESPTYVPTAASAEASQYVSRGPAASSSKGAVEAMKDTLSRWGKSMAETTSMVESLSRDTWQHFKTGPSFTEAAMGRLAQGTKVLAEGGYEKIFKQTFEILPDEQLKMSYACYLSTSAGPVMGVMYISTAKIAFCSDNPLSYKAGNKTEWSYYKVVIPLHQLRTANPSVSKVNPAEKYIQVVSVEGHEFWFMGFLMYDKAVSSLQEALDGARELQP

SEQ ID NO: 10221 - protein, 258 aa, Triticum aestivum
  Clone ID: TRIAE-23APR03-C305_58.p
MAMEARMKGTVKWFNDTKGFGFISPDDGSEDLFVHQSSIKADGFRSLAEGEVVEFAVSEGDDGRTKAVDVTGPDGSFVQGGAGGGGGGGGFGSRGGGGSRGGGGFGGRGGDGSGGYRGGYGGDGGGGWGGQRRSGGGGAGGACFKCGEPGHMARDCSVNGPAGGGGGGGCYKCGEQGHIARDCFNGGAGGGGGGYGGGGGGNCYNCGEPGHIARDCPTSSGFGGGGGGGRFGGGGGGGNDRSCYNCGEPGHISRDCTK

SEQ ID NO: 10222 - protein, 139 aa, Triticum aestivum
  Clone ID: TRIAE-23APR03-C305_82.p
MRSKANGDTAFKASGKNKTATGGVAKPKRAPTPFFAFLAEFRPQYMEKHPEAKGVAAVTKAAGEKWRSMSDEEKAKYGGKKADAPASKVVNKKESTSSKKAKTDADEEGSDVEDDAEEDEEMFRCVLLGCGMLEMSLFD

SEQ ID NO: 10223 - protein, 251 aa, Triticum aestivum
  Clone ID: TRIAE-23APR03-C3072_1.p
MLGPFLQGLPFCNGLLNQEILRAPSLPPNPDPGDPRRPELHTMKLYRGGVRLPGSSCHAFLFTARPRRLGLPRAPSLGWNGGPGVVGGPVVKKLVRMDVPAEKYPNFNFVGRLLGPRGNSLKRVEATTQCRVYIRGRGSVKDTVKENKLRAKPGYEHLNEPLHVLIEAEFPADIVDARLNQAVVILEDLLKPVDESMDYFKKQQLRELAILNGTLREEESPSPSPHLSPSVSPFNSTGMKRAKTGRYRSCF

SEQ ID NO: 10224 - protein, 130 aa, Triticum aestivum
  Clone ID: TRIAE-23APR03-C3072_2.p
MLGAMDERIPPPPFFQYSPSGVHSSPHHHNPIRSSASERERYIAELLAERQKLVPFLQVLPFCNRLLNQEILRASSLPPNPNFVEPERFDYGSPLRLAGHPMNGQPMDMEGWTGMHAEHMGIHHSPSMGW

SEQ ID NO: 10225 - protein, 423 aa, Triticum aestivum
  unsure (1)..(423): unsure at all Xaa locations
  Clone ID: TRIAE-23APR03-C3078_1.p
NFPRRLRLHLLPPSHLPAPKPGKPSPPLPARRPLPAARTPPQSELKKEEEQNKIPQKKAAASKADEAKKEKVVDDMPXGIKKKNKRKNVKKYVQWLHPSGPNQTQPTTTAAKKKKEEKKARKKXLNVLFRXPVSQVHVLVDPKSISLLCLLGKAGAXQNDMKCLMSLGLYVLWRGEWIDVYTHKRDGEEEGTMDDWDQETLEKVIASKNAEYQQNKPTDIVCKHLLDAVEKKRCGWVGVCSSGGLECPCRHALPPGYVLKSQMKALLEEESKKVAIEDEIEDQRRKVQTTTPMTTELFMEWKRRKAEEKEAGLAALRADRAKNDRMSGRELFMADASVFIDDAEAYEVYERREEPQANQEQGKKSQDEGPSSSTSNGKEADEELDDEDLDDDDDLDLDELNELEASLSRTSIQIQEPGEGTSS

SEQ ID NO: 10226 - protein, 579 aa, Triticum aestivum
  unsure (1)..(579): unsure at all Xaa locations
  Clone ID: TRIAE-23APR03-C3080_1.p
MAKSSSATATATASCTTRRKSHSGGLTYAEVQTLSMAPLSSRSYPNQAPTLLALLSPTASLSIALASFLPSPSFPEPPLPSMPSASAPAAAAGGASDDPEIVLGAWLRRCFDEFVAALVELSVSPQSDEAIREVAQGAFIPLVKLPHDGRXVVHATNSIDDVLELLGSKYAKYADVCFFTYTSLDKIANSLGSQTTGSGKDVLQNGDDGAEDRSAVCVRNVYNILVHIPALDFKKESKFDMWSTVGLSSKGEKDTSEGSSATRISKKLKLKFTKAWLAFLKLPLPLDVYKEVLATLHQNVIPSMSNPAILCDFLTTSYDIGGVISVMALSGLFILMTQHQLEYPKFYDKLYALLTPAVFMAKHRSVFLQLLDACLKSSYLQAYLVASFAKRLSRLALSVPPAGALIIIALIHNLLRRHPSINFLVHWEVAQDDGVASLPKKIGADPFNNEETDPAKSGAMRSSLWEIDTLRHHYTPAVSRFVASLETDLTVRAKTMEMKITDFSSGSYATVFRDEARRRIKQVPLAXYRSTPTSLFQESDFPGWTFGCQSNMGAQASVEGNAVHTLETVDASLAKRSRV

SEQ ID NO: 10227 - protein, 469 aa, Triticum aestivum
  unsure (1)..(469): unsure at all Xaa locations
  Clone ID: TRIAE-23APR03-C3089_1.p
MRRYSQLPGAGRQDPLADRVHRYRGVLLVVLAPLALVSLVLLLMPRAPAGHSQRPLAAGAAAAGAKKYAVIFDAGSSGSRVHVFCFDGNLDLVHIRAGLLLRAPPSPGRPAYALRPRGAARPLAALIEKAREVVPAELRDQTPVRVGATAGLRALGXRKSEEILQAVRDLLREKSSFKNQPDWVTVLDGTQEGAYEWVTINYLLGNLGKTYADTVGVVDLGGGSVQMAYAIPEKDAEKAPKPADGEESYVKKLFLKGTTYHLYVHSYLRYGLLAARAEILKAGNANGYSNCVLAGHQGQYKYGGNTFEASAAPSGSSFSECRADVVKALKVDEACTHMKCSFGGIWNGGGGAGQKNLFVASFFFDRAAEAGFINSNAAVAKVKPSDFEEAAKRACKLNVNDAQSSYPGVQKDNVPYICMDLVYQYTLLVDGFGVDPQQEMTLVKKVPYSDAFVEAAWPLGSAIEVASSS

SEQ ID NO: 10228 - protein, 290 aa, Triticum aestivum
  Clone ID: TRIAE-23APR03-C309079_1.p
MEPQQESTVDGRKRRRRGGVGKRQKDSSCSQQAPPPAPPVDAASPLEKRRRKAGEAAAIPKGRKPASLLEKMRARLSGGHFRMLNEKLYTCSGQDAFDYFKNEPELFDVYHAGYQEQMSHWPEQPVNVIIKWLKSHNKSWTVADFGCGNAAVAKNVKNKVFSIDLVSDDPSVIACDMAHTPLEPSSVDVAIFCLSLMGTNFPSYLQEANRVLKPSGWLLIAEVRSRLDPNTGGADPDKFSEAISQLGFSLVSKDEKNKMFVLFYFRKKEKSKVAKNIEWPQLKPCLYKRR

SEQ ID NO: 10229 - protein, 108 aa, Triticum aestivum
  Clone ID: TRIAE-23APR03-C30927_1.p
MAVASMVHAPSLLAVQTFRGQKNAAANRSPRAAAFRVRAAKLPAGVRVPRAQPKLSEPFLGFTKTAEVWNSRACMMGLIGTFIVELILHKGVLEIIGFEVGKGLDIPL

SEQ ID NO: 10230 - protein, 192 aa, Triticum aestivum
  unsure (1)..(192): unsure at all Xaa locations
  Clone ID: TRIAE-23APR03-C309596_1.p
MAGPAERKMKVWELVLRCLVGGFGAVAAALVVTDSQTRTFFSLERRAKYTDMKALVLLVAANGAAVVYSLLQAARCAVAMARGGGALVMSRRVLAWSVFSGDQLLAYAMLAATAXAALQSSLLGKLGQPELQWMGICGLYGAFCRQVGAGIACAVVAGLAAVLLASFSAFNLFRLYGGNKGSNSTRNGATWY

SEQ ID NO: 10231 - protein, 328 aa, Triticum aestivum
  Clone ID: TRIAE-23APR03-C31066_1.p
MAANGHQIQPAEEAMKLIIDTDPGIDDSVAIMMAFQAPGVEVLGLTTIFGNCTTAYATRNALILCEKAGRPDVPVAEGSAEPLKGGKPQVADFVHGSDGLGNVSVPEPTTKKAEQTAAEFLVDKVSQFPGEVSVLALGPLTNLALAIKMDPSFVSKVKKIVVLGGAFFAAGNATPSAEANIHSDPEAADMVFTSGADIAVVGLNITTQVSFTEADLSELRRSGGKQAQFLCDICKFYSDWHLHSYGDPAVFLHDPVSLAALVRPELFTFRKGVVRVETQGICRGHTSMDMGLKKFKSENAWSGYTPISVAWTVDKAKVVAFVKELLKN

SEQ ID NO: 10232 - protein, 364 aa, Triticum aestivum
  Clone ID: TRIAE-23APR03-C3106_1.p
PRSNISPMVSFLLGAAVATVCVLFFMSASPGRSLVDVAAWSHNNGTAAQHHHHLRSVADDADAARNLSVVVAAPAPAPVQASPYGDLEEVLARAATADRTVIMTQINAAWTKPGSLLDLFFESFRTGEGGVARLLDHLVIVTMDPAAYAGCQLVHPHCYFLRTTGVDYRGEKFFMSKDYLEMMWGRNKFQQTILQLGYNFLFTDVDVMWFRDPFKHISMGADIAISSDVFMGDPYSLGNFPNGGFLFVRSCNKTIEFYRHWQAGRYRFFGKHEQDVFNLIKHDMTDRLGVAIQFLDTTYISGFCQLSRDLNKICTLHANCCVGLGAKLHDLRNVLDVWRNYTAAPVPDKRAGKFQWKVPGICIH

SEQ ID NO: 10233 - protein, 200 aa, Triticum aestivum
  Clone ID: TRIAE-23APR03-C31151_1.p
MSAKKGLSSTLRNLKFMQRAAVAQKIEDKADVEVEEAAAEVVMTPAANGGGVGSSVQVARKCVVVMEGNPLPGAVKGRMSFQNFNPSIDKLNDEASGRPTQSASPSNSQQDSANTSRVDDISASRFRSFNVDSSESISLNELKRKEPELEMETPPSRKLPKTAGQSVDGQPSSQSNGRGSGKSNKHEKLDFNLLRKRKSK

SEQ ID NO: 10234 - protein, 496 aa, Triticum aestivum
  unsure (1)..(496): unsure at all Xaa locations
  Clone ID: TRIAE-23APR03-C31197_1.p
MRKRKRKNSRRGWRGERSKRGRGRTRGAGPGAQRGKRPRGASRKCSCPWIFPSLFPRRLNQFTLSHRFAIAGPNGKRRNSAERPTATSPAVATKTVQQQQRPVNKEGGTLPEHXMSTREATTCGLAGGHRGIRIHGSTHTVLVPPTIESGGSNPNPQEWRVLPYSRKHMSGIKEITVRELPTAADAPRCAVTSQVPALVFAMGGLTGNYWHDFSDVMIPLYLQASRFDGEVQLVVTNIQPWYAGKYRHIIARLSRYDVVDMDKDDQVRCFPSAVVGIRMHKEFSIDPTKEPTGHSMPVRPRVRPRVRALPRAAPMRVTARLISDKKPRMMIISRRHPRKLVNIAEVVALAKRIGFEVVIGDPPFNVDVGDFAREVNAADVLMGVHGAGLTNSLFLPTGAVFIQVNPFGKMEHIGEVDFGTPAVDMGLKYMAYSCGMEESTLVDTLGRDHPAVKDPESIHRSGWSKVAEYYLGKQDVKLDLQRFEPVLIKAMAMLRE

SEQ ID NO: 10235 - protein, 551 aa, Triticum aestivum
  Clone ID: TRIAE-23APR03-C31204_1.p
MVMNLDEPLAAEKGEVALQQLRRADPSVYLSPSADLAAAARAALKHFHSSLAVVAAVQPPPLPNLLAGPNFDAEQIWSQSELLSRPLLPHLHRQLRRLEHQPPAQPLATPPPSKPAEAVEGPSDEEEDGEGDESEEEDEGGLEDTDDELESEEGEDEETEELGAKKGNGVEDRFLKMKDLEKFMEEGEEQEYGGGSKGGEKKKASVNLMEDDSDEEDVDEDDGGDDEDDDLDLEDFESDDEEGVGKSGGDIRYEDFFEESSKQQVKKRNGFTKKVHFKDELHEMEVDDIEKDDVNDGPALEDEQGLSTHEKGLLKMRNQIDLMEKASLEPSKWIMQGEVDASRRPKNSALEVDLDFEHNVRPAPVITEEVTASLEEMIKKRIAEGHFDDVEKPSTLPYKVPKQQKEMDENKSKKGLAEQYEDEFKEKTGIAPATLAISDELKNEANDLFKRICLKLDALSHFHFAPKPVIEDMSIQVNIPALAMEEVAPVAVSDAAMLAPEEVFEGKGDIKEDVELTQAERKRRRANKKRRYAESHKERPAKLRKENSSNI

SEQ ID NO: 10236 - protein, 323 aa, Triticum aestivum
  Clone ID: TRIAE-23APR03-C3136_1.p
MADQKVAQLGPGAACCGWNHCGRRLAAGAVDGSVSVYDSQPSPSSKWQAHEHAIVAVVWLPPDYGDAIACVCADGTLSLWEEIAEDDQLPIWRKCKVFEGGSSHILNVQFGLLLSSLKMVIAYSDGQVKVYELLDSLELDKWQLQAELQNITDPVSRIGKPACISASIAWSPRRGEGQQASFAIGFNSDSPNFNSCKIWEFEEAHQRWLPLIELGSPEDKGERVHALAWAPNIGRPYEMIAVATCKGIAVWHVGFNPESDGRLSTENVAVLPSHNGEVWQLEWDMGGMTLASTGVDGMVRLWQANLNGVWHEQAVLDCNGSHQ

SEQ ID NO: 10237 - protein, 136 aa, Triticum aestivum
  unsure (1)..(136): unsure at all Xaa locations
  Clone ID: TRIAE-23APR03-C3146_1.p
MAAAALRPAILRHIRLSPATAVPLAAAAAAGRPLALAPWLAPPMSSHDAHLTPRRGRRPRSCDVLKCHPKVGPLQGDPRRLTCEKDLGLDSLGHXVRVVMAIEEXEFKLEIPDLEADKINSLPLAIEYVANHPMAG

SEQ ID NO: 10238 - protein, 132 aa, Triticum aestivum
  Clone ID: TRIAE-23APR03-C3146_2.p
MAAAALRPAILRHIRLSPATAAPLAAAAAAGRPLALAPWLARPMSSHDAHLTRDEVVGRVLDVLKCHPKVEPSKVTPEAHFEKDLGLDSLDTVEVVMAIEEEFKLEIPDLEADKINSLPLAIEYVANHPMAG

SEQ ID NO: 10239 - protein, 357 aa, Triticum aestivum
  unsure (1)..(357): unsure at all Xaa locations
  Clone ID: TRIAE-23APR03-C314704_1.p
MNRRFVNLLVSKSGDCRPAFNLHRINPASLFCPTRSLKPADPAATKKKTLSRLPPAAISFELPCPWKKFGWMDFMARKNDIIAVDHEGHTLLYNGTXWRPLRHEQDGRPLSQLNLRRCWGRAVCHGHQPWPAPKVDYFKALTYGRSFGHCQPEDWHWRPLQPPPLEYDHEKDQRYNPTAAPVTHPCAIGAYTVVRDSQIWISTTGAGTYSFDTTSGVWRKIGEWALPFKGHAKYVPEHGLWFGFSDSDGQLCASDLEQMPPVQQNACEDLVLPVLEGWNPTGSHLLPLGSGKLCIVSFFQRIKRVRPRPSTCYWSFKIENAAVLAGVEVVAAGPGILRMVKLKSKCYHFGDDNVKLL

SEQ ID NO: 10240 - protein, 148 aa, Triticum aestivum
  Clone ID: TRIAE-23APR03-C3149_1.p
SQVAGAEIWSASPDLSSAPLPAASGSASLLAVSPRQAHRPVRVAHSRSPCARAPPGEDEPLALAPTTSPIGTVPRPEPSGPSGCSGPEAARPAATTSPIDPPASRPRKQLPINQKGIWARRVNSPEDAGASHVTIEHWPDCIIVLLVS

SEQ ID NO: 10241 - protein, 268 aa, Triticum aestivum
  unsure (1)..(268): unsure at all Xaa locations
  Clone ID: TRIAE-23APR03-C3150_1.p
WLFPVAPPPPPRPLPPPKAAAAPSDKAGASGAARSGAGGASRAGQAGAAGGRRAGGAGYGEEHQKVVRASLLDGPRPGWRVRATMAGARDASVSPHREEAVAXVEFFMDDSPPQPLDRIDAGEESFWYLLLTGRLSSLVRMRHEMETPYISKWPQALSIQSQPANVSTSLKQRAVLVDEIWHAAGDAGSDIDWYVKRTVLGGIYSASEVYMLTDNSPEFHDTWTFVNRRIKDALDLQKSYKEVAYLTETLGAGIGGSIQGVLNKVFQK

SEQ ID NO: 10242 - protein, 145 aa, Triticum aestivum
  unsure (1)..(145): unsure at all Xaa locations
  Clone ID: TRIAE-23APR03-C31570_1.p
MSTAAATVFRGCRALMSPAAAAAKGGKKTASAAAAAAKGGKKPAPAAREAHXAAKKPVDPNNLRGIMRPVPVSDALRKFGGAAHISRSGVLKIVWDYIKANDLQNPLNKREIICDEKLKTIFPGRDTVHMMEVTKLLSPHFVKSI

SEQ ID NO: 10243 - protein, 224 aa, Triticum aestivum
  Clone ID: TRIAE-23APR03-C315_3.p
MASNQNQASYHAGETKARNEEKTGQVMGATKDKAGQTTEATKQKAGETTEATKQKAAETTEAAKQKASETAEATKQKAAEAKDKTAQTAQAAKEKTYETAQSAKERAAQGKDQTASTLGEKTEAAKQKAAETTEAARQKAAEATEAAKQKASETAQYTKESAVAGKDKTGSVLQQAGETVVNAVVGAKDAVANTLGMGGDNTITTKDNTTGATTKDTTTTTRNH

SEQ ID NO: 10244 - protein, 336 aa, Triticum aestivum
  Clone ID: TRIAE-23APR03-C31601_1.p
MGGRCFLNLLPCSTTPCKDSVGVGVGTPGSSSCRHSVHHHRARVRGPRRNAAARVSCSAAAAQAPPSQSTIKVVIVGATKEMGRAAIAAVSRARGMELAGAIDTQCIGMDAGELSGMEEALEIPVLNDLTMVLGSIAQTRATVVVVDFSEPSSVYDNVKQAAAFGLSSVVYVPKIEMDTVTELSAFCDKASMGCLVAPTLSIGLLMIRHPANHTAGHSTHQKPRPLWPSPSPPRSPAPIRGAPSPSALGQIYPRQDMDSDESQQGGQVLGEDGVRVHSMVLPGLASSTSVVLSGPGEVYTLKHDVTDIQSLMPGLILAIRKVIRLKNLIYGLEKFL

SEQ ID NO: 10245 - protein, 281 aa, Triticum aestivum
  unsure (1)..(281): unsure at all Xaa locations
  Clone ID: TRIAE-23APR03-C3163_1.p
MAAGAAASFGLMDKAYFGGRGEILSWVNATLQLSLNKVEEAASGAVQCRFWQYVSPGLVRCTRWNFDAKTEYELSRTYKILQDVFNKLRIGKNIEVNKLVKGFPLASFDFSQVLKCYTSSKMGESLMENQIPCYTCTWAAKSGAPKGPTKSSNSLQANRSSSANSADGGSLNSNTDLASPVGKVDNAVKDEHYMEQNSRITAKVAXLKVVVASLDKXRDFYFAKIRGIGVLCQRPXFEALPMTKGIRKILYAADAKDSSLPEANEIITRSPGMFSGSDEAE

SEQ ID NO: 10246 - protein, 341 aa, Triticum aestivum
  unsure (1)..(341): unsure at all Xaa locations
  Clone ID: TRIAE-23APR03-C31658_1.p
QSRRRGERHGGARARTSRRARRRDPGSEAKEAAVGCVALPKVVLHSHVNGSVLNPPLLVHATELGDKRVIVFEDLKDKVMKNVRSLPDCFRLFDLFHILCTTDHDTVTRLAKELVGDLAAENVVYLEIRTEPDVYEENRTTKRSYMNAVVKSIKSVEDVDVVLLDANYRNDVLFSSTSITXLGWRQNXRRIYVRLLLSIDRRETTSAALDTVNLAMEMKDQGVIGIDLSGNPVVGEWETYLPALEYAKELGIPTTIHCGEVPNRKEIQAMLDFCPQRLGHVCCLXTSLSNEYYLVASTFGLSKAELFRLAQGAVEFVFAGDEVKKSLRAVFERAAAERIES

SEQ ID NO: 10247 - protein, 388 aa, Triticum aestivum
  Clone ID: TRIAE-23APR03-C3175_1.p
MASADEANAAAEGTEGKNWQRKGKHKKEKPWDDDPNIDRWTVEKFDPSWNEGGLLEVSSFSTLFPQYREKYLQETWPIVKGALKEFGVSCELNLVEGSMTVSTTRKTRDPYIILKARDLIKLLSRSVPAPQAIKVLNDEMNCDIVKIGSIIRNKERFVKRRERLLGPNLSTLKAIEILTGCYILVQGNTVAAMGSFKGLKQVRKIVEDCIKNIKHPVYHIKELLIKRELAKNPALATESWDRFLPNFKKKNVKQKKPNTKEKKQYTPFPPPQQPSKIDLELESGEYFMSDKKKSAKKWQEKLDKQSEKSEEKKRKREAAFVPPKENTAGLSESAKSTNDNEIADITKSLKKKAKKFRNSEAEENVKIESYVASNEESRSKKKRRSSSK

SEQ ID NO: 10248 - protein, 314 aa, Triticum aestivum
  unsure (1)..(314): unsure at all Xaa locations
  Clone ID: TRIAE-23APR03-C3179_1.p
MPGRLLWATTKHVVCTAHTQSMTHWSSLNQISTELINGDDCIIPKQRGHGSQSVSMVQFTTMAVDNDFLXVVGGFHGELICKRLEDDGIVFSTRVTDDENAITNSLEIYQDPNGSRRLVVANNDCSVRIFDTKYFDLLNHYVFPWSVNSVSVNPDATLFAVLGDHEDGLVVDPKCGKPIGKVRGHLDYSFSSAWHPDGNILATGSQDTTCRLWDIRNLSQSLAVLGGRLGSIRCIKFSSDGRFLATAEPIDFVHIYDCFADYGKSHEIDFFGEIAGLSFSPDTEAFYIGVADQTYGGLMEFKRRHQHHYLNCLW

SEQ ID NO: 10249 - protein, 289 aa, Triticum aestivum
  Clone ID: TRIAE-23APR03-C3187_4.p
MGSRYEVEVTVGSARDLKNVNWRNGDLQPYAVLWVDDGPKCSSRVDLDNGESPVWDEKLTVPLPPSTARLEDAVLRIDVVHANAGGGTKPLVGSARLPLRDVLDDAGLGGRASRTLRLKRPSGRPQGRLDVRVAVREAAARYYDPAYPPPYGQSQPQSRDPYAAPAPYGSGGYGYGQQQPYAAPPSGYPAAYGAAAPPQPAGYPAAYGGGAQPAYGAAPAPAYGSVSDPAAKKKGMGMGAGLAVGAAAGVLGGLALAEGASYLEDKIEDDVAEKVEDDLAGGGYDDDDY

SEQ ID NO: 10250 - protein, 341 aa, Triticum aestivum
  unsure (1)..(341): unsure at all Xaa locations
  Clone ID: TRIAE-23APR03-C31992_1.p
MEQSQMARVKLGTQGLEVSKXGFGCMGLTGVYNDPVPEDAGVAVIRRAFDAGVTFFDTADAYGPHTNEVLLGKDGTHINQELLEMALRHVLRGWVQGGTNGGSAPEYVRASCEASLVRLGVDYIDLYFQHRIDQSVPIEFQLRIVQSVPIEETIGYVNMFEASADAIRRAHAVHPITAVQMEWSLWTRDIEEDIIPLCRELGIGVVPYSPLGRGFFAGRAAVESLPSGSLLSKHPRYTGENLEKNKVLYTRLEILSTKYGCTPAQLALAWVLHQGDDVVPIPGTTKLKNLDDNIEAVKVKLSKEDLKEISAAVPAGEVAGSRIIGILEPYSWRVANTPPQK

SEQ ID NO: 10251 - protein, 312 aa, Triticum aestivum
  Clone ID: TRIAE-23APR03-C32041_1.p
RTSYRSFRSVSATTWAGAPTSSFPEVSPPPPLRVATNRPDPVPLAAGARVGGCRAGLGCRFPLYSSRCRFRCRAWHGLVFAHVAYGVMPLWSLSSAPVSGAEVWKTSLACRRSWRAAAEVEAGRSSFPNKLAVVVPDLEDRQSLVLFFPCYCGGGKEEGMRWTSRSCRFGLEQILTGGWCGLMAPAKLGCGGRRPVLEPAFSGRWPGSRASPVTFLVEGQPTISSWPGCRMGGSCTFVSEFMACCCSHEGFVAPSGPSPVTAKLDLRGSCLGPNCSSILESGVLLVKVRDLCVISLSFESLSELCTVMTRNQ

SEQ ID NO: 10252 - protein, 235 aa, Triticum aestivum
  Clone ID: TRIAE-23APR03-C32065_1.p
MRHRSPHRPECDDQAKGSRHRAVELAPCRNLVQSSILGGGIAMDEQFILRVPPSIERLMNESAAGSSSNPDDASLDLSFSEDGRSGTFMIGNQRFPASLLDLPTVVESYKTYDDSFLVKTADIGQMVMVREEDDPAPEGAEYEHGLTPPMRDARRRRFRREPDLNAELVHRVEKDLISIMQGVPVNQNASVAGGGEGGDRKKAAPAPAPKPDVQEPAANGEEAEADRSDSDESDS

SEQ ID NO: 10253 - protein, 524 aa, Triticum aestivum
  Clone ID: TRIAE-23APR03-C32125_1.p
MADGNAPGSPASSLQSHRYAIKSSVHNTAASRRREQAIAIGKERREALMRAKRVCRAPLSGSDEATIEDGDMVIDEKADLETRTAQAVEELKSALSSQGKGAQKKKIEALRAVRRVLSQSEVPPIQVAIKAGAVPLLVQYMSFGSSDEQLLEAAWCLTNIAAGEPEETKSVLPALPLLVAHLGEKSSTLVAEQCAWAIGNVAGEGADLRSTLIAQGALWPLARLMLSSKGSTARTAAWALSNLIKGPDPKAAYELINIDGVLNAIIRNLEKADEELATEVAWVVVYLSALSEKAISLIVRSHVPQLLIGRLLASENLQLLIPVLRGLGNLVAGDEYMVDSILIVGNSITDQALSSLIKCLKSDNRVLRKEASWALSNIAAGSFEHKKLIFTSEATPSLIHLLTSAQFDIRKEAAYTLGNLCVVPAGSTEPPNIITEHLVSIINGGALPGFINLVRSADIESARLGLQFLELVMRGYPNGQGPQLVERGDGIEAMERFQFHENEAMRNMANGLVDKYFGEDYGLE

SEQ ID NO: 10254 - protein, 382 aa, Triticum aestivum
  unsure (1)..(382): unsure at all Xaa locations
  Clone ID: TRIAE-23APR03-C32163_1.p
MASPSPSPSPLHPHQLQQHPLPPHQHPHPQYQAPPPSMPPPPGAPPKAMDLEVTVVSGKHLKNVNWRRGDLRAYAVAYLDPSRRTATRPDDAGGCKPAWNERITLQLPPHLSPHDPSLLLSLDVFHSKPSDSPKPLVGSARSPKGRLLAQYRRRRIXIGSSKCVRLPCEFALLQYLLMSEYVAALISVGLLFIRQYCLDDTXTYYTACFSCPPPHNFSAPLPYGSXMYFRPSGYYSAPPTXPPSQYEYNTGPSAPVEYGRQYEQRGRTEGVTGQYDPRRTEGVTGQYEPKGRTEGVTGQYEPKGRTEGVTGQYEQRGRTEGGTPSERYGLGAGLAVGAVAGGVGALAIDEGVKYKEEKAAERVGEKVAPAARDDYSEYRREY

SEQ ID NO: 10255 - protein, 258 aa, Triticum aestivum
  unsure (1)..(258): unsure at all Xaa locations
  Clone ID: TRIAE-23APR03-C3217_1.p
ARYWLHRELIDCDRSYNAGCGGGLMTYAYKFVIKNGGIDTEDDYPFREADGTCNKNKLKKHVVTIDGYKEVPPSKEDLLLQAVAQQPISVGICGSARAFQLYSQGIFDGPCPTSLDHAVLIVGYGSEGGKDYWIVKNSWGERWGMKGYMHMHRNTGSSSGICGINMMASFPTKTSPNPPPLPGPGPTKCSVVTSCPEGSTCCSSWRALGFSHDYPICDTARXRCXKGNGNFSSIEGIKRKQAFSKVPSWNGLLELLDQ

SEQ ID NO: 10256 - protein, 100 aa, Triticum aestivum
  Clone ID: TRIAE-23APR03-C322150_1.p
RRRGRRRSRGAGAGGTGPRRGGQPRSKLARTSARRSRRGGRRHGRAGRAALGRSPGAPVGDPARRTAPRPAAAGGDCTVRPSHFHTLFRPAGDFLPPLSV

SEQ ID NO: 10257 - protein, 177 aa, Triticum aestivum
  Clone ID: TRIAE-23APR03-C3223_1.p
MAATLLRRALQLRRALPSPASSRALLPAASSRLLSVTASTQQNTAGTAIDLSNDESRRRLVNSLMYRSKQRGFLELDLVLGTWVEQHVRSMDEANIRSLLQILDLENPDLWKWLTGQEQPPETVNSNPVFAAIKSKVTDNLSKHSSPETRSAPGQPWVRGWDDKDKRGLDGPKYGNQ

SEQ ID NO: 10258 - protein, 177 aa, Triticum aestivum
  unsure (1)..(177): unsure at all Xaa locations
  Clone ID: TRIAE-23APR03-C3223_2.p
MAATLLRRALQLRRALPSPASLRALLPAASSRLLSVTASTQQNTAGTAIDLSNDESRRRLVNSLMYRSKQRGFLELDLVLGNWVEQHVRSMDEANIRSLLQILDLENPDLWKWLTGQEQPPETVNSNPVFXAIKSKVTDNLSKHSSPETRSAPGQPWVRGWDDXTKRGLDGPRYGNQ

SEQ ID NO: 10259 - protein, 298 aa, Triticum aestivum
  Clone ID: TRIAE-23APR03-C32371_1.p
MARNEEKAQSMLNRFITMKQEEKRKPRERRPYLASECRDLADADRWRGEILREIGVKVAEIQNEGLGEHRLRDLNDEINKLLRERSHWERRILELGGRDYSRSSNAALMTDLDGNIVAIPNPSGRGPGYRYFGAAKKLPGVRELFDKPPEVRKRRTRYEIHKRINAGYYGYYDDEDGVLEPLEAAAEKRMRDEVVTEWHRVERVRREAMKKFRFSFFFFLQGENLVHRTEERLEEERMEREKGEEAGREFVAHVPLPDEKEIERMVLEKKKKELLSKYTSDTLQGEQKEAKEMLNVQR

SEQ ID NO: 10260 - protein, 244 aa, Triticum aestivum
  unsure (1)..(244): unsure at all Xaa locations
  Clone ID: TRIAE-23APR03-C32442_1.p
PPPPPSLPPSPQPPAPHSPAEIPRSGAIPAPGAFALAGCLLPGAACCSAEAVWPHMPQTATKCGSGEIAAKRGXHSPTVLFCECAPTSHSPPISDTITSVKWTSPYRYALHENLDVSDAQSANITSESGNFLACFWIDSAEKGSGVSVNLEWKTRIGTKDWDAIAKKEKIEGVELELRKLEVAVQSIHHNMVYLKAREAEMRXVSEKTNGRVAWFSIMSLGVCVVVSVLQLWHLQGYFRKKKLI

SEQ ID NO: 10261 - protein, 359 aa, Triticum aestivum
  Clone ID: TRIAE-23APR03-C3245_2.p
MGRPPSSGGPAFRFTHAEVAEMEEHLRHLNNAIAQRNVIQGLAEKFTASAARAGKIPVQYKQVWNWFQNRRYSQRARTPRGAPPPQGKMLPTGAEEHHPASFRAQGSSSSYPGSHSGKSASDGGQAEFEAKSARDGAWYDVAAFLSHRLFETGDPEVKVRFSGFGPEEDEWINVRKCVRLRSLPCESAECVAVLPGDLILCFQEGKEQALYFDARVLDAQRRRHDVRGCRCRFLVRYDHDHSEEIVPLRKVCRRPETDFRLQILHASRAAASADAQNVSPVEQKPQKAHKMMDVNTAEVTVVRNPDQGGPSDKPAAPLPAAPAGTHGDSVSDVQMGNVEVIPKVEAANEAHDDNMNVGA

SEQ ID NO: 10262 - protein, 234 aa, Triticum aestivum
  unsure (1)..(234): unsure at all Xaa locations
  Clone ID: TRIAE-23APR03-C3258_1.p
MESSTTDAGDKHLESYLTLGLTVSQSKKGNTKFPKVLSLLATYLGRSVQKNEELLGSNGIKEAATIFHGQKVPDLSIQLYAERIFKYAECSPSCFVXALVYMERYLQQPNVYMTPFSVHRLLITSVVVAAKFTDDAFFNNAFYARVGGIRTIEMNRLELDLLFNLDFRLKVNLETFGSYCLQLEKHAPVSPERLPVQVHRVNGSKDLSYSNSSADEFCQSKLVSYSSQALQGCS

SEQ ID NO: 10263 - protein, 267 aa, Triticum aestivum
  unsure (1)..(267): unsure at all Xaa locations
  Clone ID: TRIAE-23APR03-C326235_1.p
MTFSVSPATGASQEYMIRFDGHFEDPSSAAASAEPPLPFAGRAFSPQQEQSAMVAALLHVVSGYTTPAPDLFFPARKEACTACGMDGCLGCEFFGAEAGRAVAASDAPRAPAAGGPQRRRRNKKNQYRGVRQRPWGKWAAEIRDPRRAVRVWLGTFDTAEDGAXRAYDRAAVEFRGPRAKLNFSFPEQQQQQLGGSGNAAAKSDACSPSPSPRSADEDETGDLLWDGLVDLMKLDESDLCLLLPVDNTDKFHIEGKRRSGSGVPLCY

SEQ ID NO: 10264 - protein, 221 aa, Triticum aestivum
  Clone ID: TRIAE-23APR03-C327256_1.p
MAALASRMALQSRAALASRMAQLQSKAAEATRFAAKHGGALQSEAASFAAKHGATLQSKASEAASFAAKHGGALQSKASEAASIAAKHGATLQSKASKAASFAAKQGSAMQSKAAEAASSAAKQGREYHKTLMERNRQYVVDPPTVEKCQELSKQLFYTRLASIPGRYEAFWKEVDAVKLLLKNRKDLKAEQAGVAALFGIELYAWLRAGEFIGRGFTLTG

SEQ ID NO: 10265 - protein, 265 aa, Triticum aestivum
  Clone ID: TRIAE-23APR03-C327274_1.p
MPPRKRPLEPSSGMPVQPDAKPVISPASKSTSAPAPAPAPASAPEILPASILNNLPGPEREVYKRIYEAGNKGMWSQDIRYAMKLAAPTLTKLTRALVQRGILKEVTDVRHRGKKVFMDARIEPSPEITGGTWYHNGQLDTDAVAAVRRRCLDQIDRLGAATPDMVHKGVEREDPRAGYAIDQIRDILQTMALDRVLEECRSTGEGEFSAVRAGRVCYRRGGAPQGGMIEGIPCGVCPRIDECSPDGVISPTTCVYYKKWLQMDF

SEQ ID NO: 10266 - protein, 129 aa, Triticum aestivum
  Clone ID: TRIAE-23APR03-C329381_1.p
MAGDDEDEGEMAALREALRQQSLAVEMLKAELEEERQAASSGADEALAMILRLQGEKAAVRMEADQFRRVAEERILHDEDSLAFLKAVVFNQGDGHHLPQEPPAGRLPEQMVPTRRPPGPGGVIQPPPG

SEQ ID NO: 10267 - protein, 357 aa, Triticum aestivum
  Clone ID: TRIAE-23APR03-C329_23.p
MARYLLPSTTTAASSFPRNARASPAPILAPRALASRSKHARAIMAVASDQPAAPSKYPKMAAPTTGPVPADELLGVIQAAAKAGAEVVMEAVNKPRNIQYKGVADLVTDTDKLSESVILEVVTKNFKDHLILGEEGGLIGDSLSEYLWCIDPLDGTTNFAHGYPSFSVSIGVLFRGKPAAATVVEFCGGPMCWNTRTISASSGKGAYCNGQKIHVSPTEKVEQSLLVTGFGYEHDDAWLTNINLFKEFTDVSRGVRRLGSAAADMSHVGLGITEAYWEYRLKPWDMAAGVLIVEEAGGVVTRMDGGEFTVFDRSVLVSNGTVHDQLLERIRPATEALKKKGIDFSRWFKPDNYPTDF

SEQ ID NO: 10268 - protein, 302 aa, Triticum aestivum
  Clone ID: TRIAE-23APR03-C329_37.p
MVYIKNQKTRAYSKRFQVKFKRRRQGKTDYRARLRLTNQDKNKYNTPKYRFVVRFTNKDVTAQIVYATIAGDIVMAAAYSHELPRYGLEVGLTNYAAAYCTGLLLARRVLKNRDLDEEYEGNVEATGEDFSVEPSDERRPFRALLDVGLIRTTTGNRVFGALKGALDGGLDIPHSDKRFAGFKKDEKSLDAEIHRKYIFGGHVADYMRSLADEEPEKFQTHFSEYIKRGISADDMEAVYKKVHAAIRADPTMAKSTKAPPKTHKRYNPKKLTYEQRKASLVERLNALNNSAGAADDDEEDDE

SEQ ID NO: 10269 - protein, 153 aa, Triticum aestivum
  Clone ID: TRIAE-23APR03-C330290_1.p
MTVGMINANPVVHERPERAAHPAHAALDALDVFDTVRDIKDPEHPYSLEQLSVLSQESVSVDDKLGHIQITFTPTVQHCTMATVIGLCLRLKLMQNFPPHFKIDIKVAPGSLANEESVNKQLNDKERVAAALENPNLRQLVDDCLCSDHPSSY

SEQ ID NO: 10270 - protein, 326 aa, Triticum aestivum
  Clone ID: TRIAE-23APR03-C3303_1.p
MLSLRAPPRTLSPSPWRRRGRLDGFAAPRCVSAAPPATTLETATARPAGVSFPILVNGCTGKMGVSVAEAATSRGLHLVPVSFSSRENLDKTIQIGDIDVEIYGPSAREDVLSSVIDEFPDVIVVDYTAPNSVNSNAELYCKLGVPFVMGTTGGDQQLLYKSVQDSNNYALISPQMGKQVVAFLAAMETIAEQFPGAFSGYRLEVLESHQAGKLDTSGTAKAVIACFEKLGAVFDMDRMVKIRDPEQQLYMVGVPEEHIEGHAFHLYHLTSPDDSVSFEFQHNVCGRSIYAEGSVDAAVFLYKKVQSMDPKRIYNMIDVLQEGDMR

SEQ ID NO: 10271 - protein, 178 aa, Triticum aestivum
  unsure (1)..(178): unsure at all Xaa locations
  Clone ID: TRIAE-23APR03-C330442_1.p
MSEIRRDVPEGTGAGAEGKGADSHVGSRAARRRRMEIRRHRLVAEHGAEEVSRKRRKLDGESSTDEEEIEPAKYGVTSVCGRRRDMEDAVSVRPEFLPGHHFFGVFDGHGCSHVATSCXERVHEIVAEARAGAPSLAAGDADRWMGVMYXSSHRLYARAVSSRSRASGAPTCRCELQL

SEQ ID NO: 10272 - protein, 297 aa, Triticum aestivum
  Clone ID: TRIAE-23APR03-C3304_1.p
MKLQGFSCTRTAHQINIADLLRLRSSSQFTLCRCRPLLLRRRSQRRQRCTQTPRDPEPSTSRSGRKKVQDPRGREAMAGSGGGAYRAEDDYDYLFKAVIIGDSGVGKSNLLSRFTKNEFCLESKSTIGVEFATRSLQVDGKVVKAQIWDTAGQERYRAITSAYYRGAVGALLVYDVTRRATFDNVARWLKELRDHTDSSIVVMLVGNKSDLRHLVAVSTEDGQEYAEAESLYFMETSALDATNVDNAFSEVLTQIYRIASRKTVDAGDDGSSAPSKGENINVKDDVSSLKKAGCCSS

SEQ ID NO: 10273 - protein, 200 aa, Triticum aestivum
  unsure (1)..(200): unsure at all Xaa locations
  Clone ID: TRIAE-23APR03-C333210_1.p
MEHLIREPAVYWELEGNSVDMAIESLLNAEKQCCLAGDVASTRKDIVELSFKDGAWKTLNCQIVVLSKRRRASSKNGVTGEDGSGVPVFAEYNLDELRASTDGFATDHIVFEHCEKEPNTIYHGXLFSSGTTVAIKLFYRSAWPDTRQFMEEARAVGLLQSVRLSNLIGXCYKGGERLLVAEFMTHDTLAAVIHSVVRVC

SEQ ID NO: 10274 - protein, 397 aa, Triticum aestivum
  Clone ID: TRIAE-23APR03-C333_22.p
MANLPPSLAAGPSFGAPSPPPLPPPSGSSAAAPPAGGRDRKMVSAEQLVLDLCDPELRENALLELSKKREIFQDLAPLLWHSFGTVAALLQEIVSIYPSLSPPTLSPVASNRVCNALALLQCVASHPDTRIPFLNAHIPLYLYPFLNTTSKTRPFEYLRLTSLGVIGALVKVDDSEVIGFLLQTEIIPLCLRTMEMGSELSKTVATFIVQKILLDDIGLRYICATAERFFAVATVLAQMVQALAEQPSARLLKHIIRCYLRLTENQRACAALNSCLPTVLKDGTFNNFLLDDNVTRRWLQQLLSNMSIAGMGGGSSHTGMGGGGSLSGMGGGGSLGGMGGGGSLGGMGGGGSLGGGMGGGGSLGGMGGGGSLGGGMGGGGSLGGMGGGGPSRGPRPP

SEQ ID NO: 10275 - protein, 79 aa, Triticum aestivum
  Clone ID: TRIAE-23APR03-C334_36.p
MERKNSFGSSWADQWDYGSDPAPRAGGKKQGGVEKTKAAAATGLKKVKEGTAHGFQWIKGKVQKKKQGGAAGDDATAGY

SEQ ID NO: 10276 - protein, 207 aa, Triticum aestivum
  Clone ID: TRIAE-23APR03-C3352_4.p
MDAMAALARTGPSLAAAGHRSSATFRPSASLSSFASASSRNRGRVGLSTAGCNRWATRVARATPNRIVASSEVEQTYIMIKPDGVQRGLVGEIISRFEKKGFLLKGLKLFQCPKDLAQEHYKDLKERPFFPNLIDYITSGPVVCMAWEGDGVVASARKLIGATNPLQAEPGTIRGDLAVQTGRNVVHGSDSPDNGKREIGKFCQWRI

SEQ ID NO: 10277 - protein, 192 aa, Triticum aestivum
  unsure (1)..(192): unsure at all Xaa locations
  Clone ID: TRIAE-23APR03-C3378_14.p
KPTAATPASTHPSISHLLLLATKREHLAYSELKIRTMAVLVARQGRELQRYSASTRGRIVVGCIPYRVRGGGGEGEGELEVLVISSQKGHGMMFPKGGWELDESMDDARPAXEALEEAGVRGEMGKVLGCWALXRARRYQTTYEGIMYPLRVTDELQQWPEMASRKRTWVSTASSPLHFLLRSRIRSQEHAF

SEQ ID NO: 10278 - protein, 170 aa, Triticum aestivum
  Clone ID: TRIAE-23APR03-C3378_16.p
LKIRTMAVLVARQGRELQRYSTSTGGRIVVGCIPYRMRDGGDSDGEGELEVLVISSQKGHGMMFPKGGWELDESMDDAARREALEEAGVRGEMGKVLGCWHYQSRRYQTTYEGIMYPLRVTDELQQWPEMAYRKRTWATVQQVMEGCQHCWMREALEELVARHAKPQSAL

SEQ ID NO: 10279 - protein, 360 aa, Triticum aestivum
  Clone ID: TRIAE-23APR03-C33800_1.p
MTAVRGAAVEGAWSNPALMEPPAAAADGPQVSEVDSFRRQVDDLLSKTDVLEKRVNEVVGFYNSKKHSSGGRKAGGRYAANGARDSHGNGMPDLMRQFAGIIRQITSHEWAQPFLQPVDVVGLQLDDYHQIITKPMDFSTIRNKMEGKESTTYNSVREIYSDVRLVFTNAMKYNVEGHPVNIMAKFLLERFEEKWLHLLPKVENEEREREEPNDAPTISISPEAAIAKLAEDTGNELNEINKQLEELQKMVVQRCRKMTTDEKRKLGAGLCQLSPEDLNKALELVAQDNPSFQTTAEEVDLDMDAQSETTLWRLKFFVREALEQQANVGVVACGKIDENTKRSRDMYNALAKTVSKRIKR

SEQ ID NO: 10280 - protein, 258 aa, Triticum aestivum
  Clone ID: TRIAE-23APR03-C33928_1.p
MAIARTGVYVDDYLEYSSTLAGDLQRILSTMHELDERAHGILGQTKGQIKYLLGVPSHGFDRPNVVHDENASEKMTRDIENSQDNALSLCTEKVLLARQAYDLIESHIKRLDEDLGQFAEDLKQEGKIPPDEPHILPPMPVGGRDERRRSSFSTPQAARKFVREKEWDRDRERGMDFDLMPPPGSSNKKAVASMDVDQMIDPNEPTYCICHQVSYGDMIACDNENCEGGEWFHYSCVGLTPETRFKGKWFCPTCRNLQ

SEQ ID NO: 10281 - protein, 143 aa, Triticum aestivum
  Clone ID: TRIAE-23APR03-C340_18.p
MGLPVPYNPYAGYPVPAVPMASPSPLPGPTAYAPVQNMKDNPPCNTLFIGNLGETVVEEELRGLFSVQPGFKQMKVLRQDRNTVCFIEFDDVSAASAVHHTLQGAIVPSSGRGGMRIQFSKNPFGRRKDLVGGMVGTLNGAPV

SEQ ID NO: 10282 - protein, 503 aa, Triticum aestivum
  Clone ID: TRIAE-23APR03-C340_31.p
MVATAKIPQRQLFIDGDWRAPALGRRLPVINPTTEASIGEIPAGTSEDVDAAVAAARAALRRNRGRDWARAPGAVRAKYLRAIAAKMIERKSDLARLEALDCGKPLDEAAWDMDDVAGCFEFFAGHAEALDKRQNAAVALPENFKCHLKKEPIGVVALITPWNYPLLMAVWKVAPALAAGCTAVLKPSELASVTCLELGDVCKEIGLPSGVLNIVTGLGHEAGAPLSSHPDVDKVAFTGSYATGQKIMVAAAPTVKPVTLELGGKSPIVVFDDVDIDKAVEWTLFGCFWTNGQICSATSRLLIHKNIAKEFVDRMVAWSKNIKVSDPLEEGCRLGPVVSEGQYEKIKKFVANAKSEGATILTGGVRPKHLEKGFFIEPTIITDINTSMEIWREEVFGPVLCVKEFSTEEEAIELANDTHYGLAGAVISGDRDRCQRLAEEIDAGCIWVNCSQPCFCQAPWGGNKRSGFGRELGEGGIDNYLSIKQVTEYTSDAPWGWYKAPAN

SEQ ID NO: 10283 - protein, 502 aa, Triticum aestivum
  unsure (1)..(502): unsure at all Xaa locations
  Clone ID: TRIAE-23APR03-C340_33.p
MVATAKIPQRQLFIDGDWRAPALGRRLPVINPTTEASIGEIPAGTSEDMDAAVAAARAALKRNRGRDWSRAPGAVRAKYLRAIAAKMIERKSDLARLEALDCGKPLDEAAWDMDDVAGCFXFFAGHAEALDKRQNAAVALPENFKCHLKKEPIGVVALITPWNYPLLMAVWKVAPALAAGCTAVLKPSELASVTCLELGDVCKEIGLPSGVLNIVTGLGNEAGAPLSSHPDVDKVAFTGSYATGQKIMVAAAPTVKPVTLELGGKSPIVVFDDVDIDKAVEWTLFGCFWTNGQICSATSRLLIHKNIAKEFVDRMVAWSKNIKVSDPLEEGCRLGPVVSEGQYEKIKKFVANAKSEGATILTGGVRPKHLEKGFFIEPTIITDINTSMEIWREEVFGPVLCVKEFSTEEEAIELANDTHYGLAGAVISGDRERCQRLAEEIDAGCIWVNCSQPCFCQAPWGGNKRSGFGRELGEGGIDNYLSIKQVTEYTSDAPWGWYKAPA

SEQ ID NO: 10284 - protein, 319 aa, Triticum aestivum
  unsure (1)..(319): unsure at all Xaa locations
  Clone ID: TRIAE-23APR03-C340_35.p
MAGAGIHPFHQQWPPQAAVPAPPAVPPPPPVPGAPDAAARPGSDEVRTIFITGLPVDVKERELHNLLRWLPGFEASQINFKGDQPMGFALFSYAHHAIAAKAALQDLVFDAETKSALHIEMAKKNLFIKRGVGTDANAMDQSKRLRTGGDYTHSAYAPPPFHPPPPAVSMWGTAGYMAAPPPYNPYAGYPVPTVPMTSPSPVPGPTAYAPVQNMKDNPPCNTLFIGNLGETVVEEELRGLFSVQPGFKQMKVLRQDRNTVXFIEFDDVSAASAVHHTLQGAIVPSSGRGGMRIQFSKNPFGRRKDLVGGMVGTLNGAPV

SEQ ID NO: 10285 - protein, 746 aa, Triticum aestivum
  unsure (1)..(746): unsure at all Xaa locations
  Clone ID: TRIAE-23APR03-C3419_1.p
MAWLSREPRHSKPYLXRRRGSASCRWICPTPAAGSPEXGVVLVPFLPGFSPPVEPERGCRSRXQPNRMQAPWWCVKGLALRIPFAITVLLPTGNAADPTRRYSIQTTLTITGXCRLLPKRVPSFWLAHSQRVEAPMASARIQRTXTSSANNAGEGVMEFLFEPSPLDCPICDQGGVCDPQAADHLFGXDGGRIDDMKRSVVENNLGPLVKTVMTRCIQCTRCVRFAYEVAGVQDLGMLRRGSGENVGTYVGKLMTSELSGNVVDICPVGALTSKPFAFKARNWEMKGTETIDVTDAVGSNIRVDSRGPEVMRIVPRXNEEINAEWXISDKTRFCYDGLKRQSLNAHVTRGPERRFKAVTWRDAIAVCCEVLYRVTRREISGGSRTLXGAESKMAVRDFVNKRCSYRALXGGNAPTPRAHIRXLHQMNTSIAGXENSYLLLVGDTHKRVEAVLVNARIQKTVRATQAKVGYIGPPADFNYDTWHLGTGPDTLVEIAEGRHPFCSILKSSKKPGILARAGLFXREDRRAVFCSQETVNRNLNVKIRQRPDXNSHNSILLHAXALDLGRAANPTESVKSAKFLYLMGPDXADDVNLHNDAFVVYXGHHGDKAVXTRANVILPSSSFXSEKEGTYENTEGCTQWTIPAVPTVGDARDDWKIVRALSEVAGAPLPYDSVAAVRSRISMVAPNLVRVDEREPSVISAEVKPPVKQQVSPAPFKAAVENFYMTDAITRASKIMAQCSATLLKK

SEQ ID NO: 10286 - protein, 345 aa, Triticum aestivum
  unsure (1)..(345): unsure at all Xaa locations
  Clone ID: TRIAE-23APR03-C34246_1.p
MAVDLTPRQPAKAYGGDGGAYYEWSPAELPMLGVASIGAAKLSLAAGGMSLPSYSDSAKVAYVLQGKGTVGIVLPEATKEKVVAVKEGDALALPFGVVTWWHNTPESATELVVLFLGDTSKGHRPGQFTNFQLTGASGIFTGFSTEFVGRAWDLKEDDAAKLVSSQPASGIVKLTAGQKLPVPVDADRKDMALNCLEAKLDVDIPNGGRVVVLNTANLPLVKEVGLGADLVRIDAHSMCSPGFSCDSAYQVTYIVRGSGRVQVVGPDGKRVLETPIEGGSLFMVPRVHVVXSKIAVALGRVLEPFNSTPVPSSSDLSLKDHGWEADFVPTCWTQCFRHGAIGGNA

SEQ ID NO: 10287 - protein, 327 aa, Triticum aestivum
  Clone ID: TRIAE-23APR03-C3426_1.p
MQAAISHLKEELRGCWIRCSPAPRLVTNATRRCLRKSPGFRRRRTASQTSWLSGMHQRTKAPKKQEEMLALHTVRTSLPSPRRCAPRRHALQLSKRRFSICDCSSEDAGSDDPLPHGGDQRQQEVLAKIAMLQTQKVRITNFLDERSAYLTKFTKDADTEFDMIGQNAMKELDQIGDQIMERLDSKMQSYEETAEMQRQEIEMNERVLEDFEDWIEEEKNEGMFFKSLGKVKKPQNNEEIKVKAKIEAQKVREIAEESAGSKARMNIYLALTAILGLTIANAVFATPEVEWRKVAALGLIFIGLVAQVIYEQDISPPVADKDEKREE

SEQ ID NO: 10288 - protein, 247 aa, Triticum aestivum
  Clone ID: TRIAE-23APR03-C3447_2.p
MGRSPCCEKEHTNKGAWTKEEDQRLIAYIRANGEGCWRSLPKAAGLLRCGKSCRLRWMNYLRPDLKRGNFTDDEDELIIRLHSLLGNKWSLIAGQLPGRTDNEIKNYWNTHIKRKLLSRGMDPHTHRPLTPVDGAAASRPAHIAVPARAAPPTMFAPLTTKQPPMESSSDDGSSGATSTGEPRCPDLNLDLSVGPPAADTPTSHPVCLCRHLGLRGGAVCSCRQADSPGSQGGGFRYFRPLEEGQYI

SEQ ID NO: 10289 - protein, 358 aa, Triticum aestivum
  unsure (1)..(358): unsure at all Xaa locations
  Clone ID: TRIAE-23APR03-C345_1.p
MLRDRQRGQHPGQGQQPGQGQPGYYPTSLQPSGQEQLPGQWQQTGHGRPAYYTTSSMQPEQGQQGYDTRTHQQPGQGAATGRRKQPGQGQRGYDPTAPQQSGQGQQPGQWLQPGQWLQSGYYLTSPQQLGQGQQPRQWLQPRQGQQGYYPTSAKKSGQGQQXDLGQLLLLNQGHGKQQEQGQKAXQRHQPXDKAQPGYYLSSPLQLGQGQQGYDPTSLQQPGQGQQPGQWQQSGQGQHGYYPTSPQLSGQGQRPGQWLQPGQGQQGYYPTSPQQPGQGQQLGQWLQPGQGQQGYYPTSLQQTGQGQQSGQGQQGYYSSYHVSVEHQAASLKVAKAQQLAAQLPAMCRLEGGDALSASQ

SEQ ID NO: 10290 - protein, 320 aa, Triticum aestivum
  Clone ID: TRIAE-23APR03-C3465_2.p
MAMATHTGVAASKVLILVGAGLTGSIVLRNGRLSDVLAELQELMKGVNQGEGSSAYDMALIQAQIRHLAQEVRDLTLSKPITILSGKSDSGGSLSSYILPAAAVGALGYCYMWCKGWSLSDVMFVTKRNMASAVDSMSKQLEQVSSALAATKRHLTKRLENLDGKMDEQVEVSKQIRNEVTDVKTDLSQIGFDVEAIQQMVAGLEEKIELLDNKQDAANAGIWYLCRMAGGIKEGINAKFFQEADEKLKLLDLAQTEKKPVKGLELFLESTKEVKALDSKPKTIMQNDVKKPTKTFDVPIKSAAVHRSNRFLIRKEGLAL

SEQ ID NO: 10291 - protein, 294 aa, Triticum aestivum
  Clone ID: TRIAE-23APR03-C34679_1.p
MTDVFQGYERQYCEISASLSRKCTAAASQEGEKLKQKASEIKSGIDGAEALIRKMDLEARNLQPSVRAGQLAKLREFKSDLNNLKGALKRITAGSSALEFHAPALDLVARRTRGEEDQRGRVHQIRKMDLEARNLPPTVRAGQLAKLREYKSDLNNLKGVLKRITAGNGQQGAREELLESGMADTLVVSADQRSRLLRTTERQNQTTDRIRDSHRTMLETEELGVSIMHDLHQQRQSLLHANDTLHDVDDNIGKSRKIMGAMVRRMDRNKWIIGLLIALLVLAILVVLYFKFVH

SEQ ID NO: 10292 - protein, 73 aa, Triticum aestivum
  Clone ID: TRIAE-23APR03-C347_13.p
MASRSCTFLEILLAVILPPLGVFLRYGCCSMEFLICLLLTILGYIPGIIYAVYVLVAHGSASEESGRDYDALA

SEQ ID NO: 10293 - protein, 439 aa, Triticum aestivum
  Clone ID: TRIAE-23APR03-C348_10.p
TSLDQPAAPLHPPLRHALPAMSWLARSIAATLSSAPDDDDDDDDHHSEAATGDETPDHAASADAEEDEQPDTPGRGVKGDISELTESLTRRFWGVASFLAPPPPPAGAEAETSTAAAEAEAEAEGEYGPQSPRVAGIRNDLAEIGGRVRSGISMLSNANAVAEISKIASSFLPFVPEEEEEDVDAVGLTEEVVVFVRHISTSPETWLDSPLFVNDRHADDFELSDTQYEHALAIERIVPSLSYLRTELCSTNMSEACFWKIYFVLLHSKLNKENAEVLSTTQILEAREELLQSSPRMKNVASEGPGGSSESSNVPSTQAEDIEFSPSSIQDKSGIAEATSFQEPTPDPLPGAEADKHPISTSEPEIIDKSVIEEELVVKTEIKNPGDKPNLYTPEDDDDKEVEDWLEDMDHADNKTGNITSVGQDEDVSFSDLEDDDDD

SEQ ID NO: 10294 - protein, 293 aa, Triticum aestivum
  Clone ID: TRIAE-23APR03-C349181_1.p
MPICPAPSESSGSGSRVWIFHGLALGAAAAATAAAYVYRRPRGFRSLAVGIIPARYASSRFDGKPLALILGKPMIQRTWERVMLASSLNHVVVATDDEKIAECCRGFGADNGSERCCEALQKLRKHYDIVVLRQHYDIVVNIQGVDPLIEPDIIDGVVMALQRAPDAVFSTAATALKPEDAFDTNRVKCVVDNQGYAIYFSRGLIPFNKSGKVNPHFPYLLHLGISGFDSKFLKIYPQLAPTPLQLEEDLEQLKVLENGYKMKVIKVDHDAHGVDAPEDVEKIEALMRARNIQ

SEQ ID NO: 10295 - protein, 151 aa, Triticum aestivum
  Clone ID: TRIAE-23APR03-C349_24.p
MSIVRWSNVFDPFADLWADPFDTFRSIVPAISGGTSETAAFANARVDWKETPEAHVFKADLPGVKKEEVKVEVEDGNVLVVSGERTKEKEDKNDKWHRVERSSGKFVRRFRLPEDAKVEEVKAGLENGVLTVTVPKAEVKKPEVKAIEISG

SEQ ID NO: 10296 - protein, 278 aa, Triticum aestivum
  unsure (1)..(278): unsure at all Xaa locations
  Clone ID: TRIAE-23APR03-C349_32.p
MFLAKSKESMQYQVMEGRKDMQESDTAPVVQVPREPAIVINGVPDFPPDFASGSQLAVRDAPRSRADHRFGEWLVERKVRKWFGDKYYAGIVVRYDSGNNWYTVVYEDGDQEDLEWHELEEILLPLDITIPLNTLVMDKFKHQNVVPDYRTNVASNQMVVRAVNGQQSNNLPLPGWLQASASAGENALVCXKPSDQPXKRGRPXKDRSASGDIQPKXRGRPXKDISTSGDIQPKKRGRPPKEPGEKSIDRSKLETVRAEKLKRESMLXRGPPPGSQSF

SEQ ID NO: 10297 - protein, 294 aa, Triticum aestivum
  Clone ID: TRIAE-23APR03-C349_36.p
MDGEWWRKKWVAWAAAAAIFVVLMLVTPAIPQDEDYHDFADQRVLFLGIPNTLNVLSNIPFLFVGLAGLILCHYKNYFRLCSQGELWSWTLFYAGVTTVGVGSSYYHLYPNDATLVWDRLPMTIAFTSIVAIFIIERVDDRAGTKSLAPLVIAGALSILYWSFFDDLRPYAIIQFVPCIVIPVMAIVIPPMYTHSSYWLWAAGFYLLAKVEEAADKPIYRWTHDIVSGHTLKHLCAAMVPVFLTLMLAKRTIEPDRVSLLQMWKISWRERGSQDSNTVDVKYDYAAVSTTSEQQ

SEQ ID NO: 10298 - protein, 250 aa, Triticum aestivum
  unsure (1)..(250): unsure at all Xaa locations
  Clone ID: TRIAE-23APR03-C3509_1.p
AISSRRRHAKPSPASPPPPPAIGFPPMEQPSTSSPAAPPPPPRRPPTKVRLRRQRLEALLQELRQTLDGMGDADLGASLSDADAGSEAPEYGDGEGGGDDDDDGDSAASMASDSDRATDQVFDLLKSRFESPEFLQEFHEIQKSVCQNGAVELDKSWDVIKAGDVWEDDDDNGYVLVKPEDAAEGIAFFVATYLSTLTKTKELSPDRLQKALKKTFSAEKRKGKLRKAWDGTKVIYNVASWXCHSCWHLQ

SEQ ID NO: 10299 - protein, 217 aa, Triticum aestivum
  Clone ID: TRIAE-23APR03-C3526_7.p
MEASSWDALRKQARRLEAQLDDQMIAYRKLVSMKSDGSENDIETDIERSLKQLQQVNSQMQTWVSSGGSEVLSHTLTRHMEILQDLTQEFYRLRSSLRVKQQHASLLDLRDFDRAKFDVEESGDSEQALLREQAAISRNSGQVDTVISQAQATLGALMSQRSTFGGITTKISNVSSRIPTINHILASIRRKKSMDTIILSLVASVCAFLMFIYWLSK

SEQ ID NO: 10300 - protein, 510 aa, Triticum aestivum
  unsure (1)..(510): unsure at all Xaa locations
  Clone ID: TRIAE-23APR03-C3534_1.p
FEEVKQEGLRVHVERMSRGRFRGRGSGGRTRGTARGFSRGGRYHSYHEDSDNQNHSENQNRPQKIVRGRGPRRYDTIAKNNRDVVGFQRKQPTRSREPAAHSAAAREPGQISNAHSEAVPAKKNVVNSSLNSASPPFYPSGASNQVGAQRRDIQPGGSNKVHPSSMKMDDNMKLQSGPVVRGKGTTDYGGRDRFHAEGPVRPSPARSVGGSSYSSGFASSSINSGQSPNNRAQGGNASIGVPSHNRPTPSFQQTSRVSTQQQNHTSIMHQKSGQAPSQASMRIPTQQLSHRTGNASPSAQHLPARSTESDENGSYPSSNQSKTSEVEKTNKETGRGSFMYGGAQVIGAAGLAQGEQNFPGTPALLPVMQFGGQHPGGLGVPTVGMALPGYVAQQQLGMGNNEMAWLPLLAGAAGAFGGSYPPYITLDPSFYSRSSGQTSSSVPSREGNVNHGAKSPPQNDIVTEELDQRQNKHRXILRDELQSVKHPVRPCCRPFVISGYDLSTLGGLVS

SEQ ID NO: 10301 - protein, 144 aa, Triticum aestivum
  Clone ID: TRIAE-23APR03-C3545_1.p
LDPEIGPLVNARSLPGLISRPTAATTHSRHLELRRSHIPRSGLQLQLARSMSSSCLATSGRSKPSYTCPAPRTLKPVSHDTVKSTNLSTTVIIATRTLQHYKQRFRNFRFFRRMARKQCSTCRCQCATFFPRDSYLSPNAQLKL

SEQ ID NO: 10302 - protein, 302 aa, Triticum aestivum
  unsure (1)..(302): unsure at all Xaa locations
  Clone ID: TRIAE-23APR03-C35472_1.p
GHDDLDPAQVTNPTTPITVPSTNPAPTIITVPSTTPTITIPSLNPLPTPITTPSNDPSTTFTIXPTPSTSAPNTPVPIPVPTPSTSPPSAPLTNPATNPMVPTVGTTPPTAPTTTPVTAPVVSGQQAWCVAKAGSSETALQDALDYACGIGGADCSPIQPSGSCYYPNTLEAHASYAFNSYYQKNPAPSSCDFRGAAVLANANPSSGTCILASSMSSPTSSTAGSTAPTTSSTSPVTSSSDSDPGSSVLNSSGSGISGSSDFGSDFPGEANTGNGWHSILPSGWSWAGLFSTLALPYVGGIF

SEQ ID NO: 10303 - protein, 265 aa, Triticum aestivum
  Clone ID: TRIAE-23APR03-C35532_1.p
MEASLSAAEQRDTRPHTANHGGVADRGRRRYLVSATPPHTANNRGLPDRGRRRYLDRFRRKSVAESSNSTRPVLPRRPQFRDSKIWTANFRGHLAAASASTPPPPGGGLYSAVTYELTPGNVDRVLDDVRPYLISDGGDVAVVSVEDGVVSLRLEGACSSCPSSTTTMNMGIERVLKEKFGDAIKDIRQVFDGDQQPEETTPEAVNRHLDILRPAIANYGGSVKVLAVDGEDCLVKYDGPESIGSGVKAAIKEKFPDITNVVFTQ

SEQ ID NO: 10304 - protein, 559 aa, Triticum aestivum
  unsure (1)..(559): unsure at all Xaa locations
  Clone ID: TRIAE-23APR03-C3553_1.p
KEGERVPPYVNEVGRFLNPSETYRXMIYPFVRAPEHPKDKRLARGEVLNGDRLVHPPCWTFXEGRYAHHLCLKAKTIQPASRPAPARGSQGYFPPYGVHLPAWGGLPWLARNKEHGGGKCLLFKHIHFDIMYNNDRVIEINVQTDPNVAVDITEDKEVPVEFSYSVTWKKTDIPFEKRMEKYSKSSSMPQHLEIHWFSIINSCVTVLLLTGFLATILMRVLKNDFIKYSHEDESLEDQEETGWKYIHGDVFRFPQKKSLFAAIIGSGSQLLALAIFIFLLAIVGVFYPYNRGALFTALVVIYALTSGIAGYTSTSFYLQLEGTNWVRNLILTGCLFCGPLFLTFSFLNTVAIAYSATAALPFGTIIVIILIWALVTSPLLVLGGVAGKNSNTEFQAPCRTTKYPREIPQLPWYRSTIPQMAMAGFLPFSAIYIELYYIFASIWGHKIYTIYSILFIVFIILIIVTAFVTVALTYFQLAVEDHKWWWRSVLCGGSTGIFIFFYCIYYYHARSDMSGFMQTSFFFGYMTCVCYGFFLMLGTVGFRASLLFVRHIYRSIKCE

SEQ ID NO: 10305 - protein, 323 aa, Triticum aestivum
  Clone ID: TRIAE-23APR03-C3561_1.p
MAPTGGPDEEMRFGFFPLVRPSTSRRRAGLRKSPRHPQRRQAGTARVQRRVARQPPNGAAARDCVRPAGAGPLGVLLDFRAAAAAFDSATFPVTQYCINGLATAVPVLALARSRSIARSPVIVSPHDGAYVYLLTYDAETKLYWVGRDAALNVLAESSDFCLAPEHPLPAVYDDSWEGLKWVASHATAGRGRSIRVHPYFSGAAEIGKEATTGKAEKAKADAFWRFLYPGSPGLDDPLSNPFSEAAGGSAARIAGERVLVCVAQKDGLRDRGVWYYESLKASGYGGEVELLESMDEDHVFYCMKPRSEKAIELQERILSFLRK

SEQ ID NO: 10306 - protein, 339 aa, Triticum aestivum
  Clone ID: TRIAE-23APR03-C3565_1.p
MLALTSLSPRPARPSPSPATPPHRRPPPPRGRIRPTYAVATAASDGGGAADDYHSTIRSLNSHGRRHVPRKSLGQNYMLNARVNEELVAAAGVEEGDVVLEIGPGTGSLTAALLAAGATIVAVEKDKHMATLVRDRFGSTEQLKVIEEDITKFHVHSHFLPILEEKSHGKKKYAKVVSNLPFNVSTEVVKQILPMGDVFSVMVLMLQDEAALRLANASIQTPEYRPINVFVNFYSEPEYKFKVERANFFPQPTVDGGVIRFKIKDAGEYPLVSSNKSFFSMVNSAFNGKRKMLRKSLQHLYSSADIEAALTNIGLPPTARPSELGMDDFVRLHNHLGKV

SEQ ID NO: 10307 - protein, 369 aa, Triticum aestivum
  unsure (1)..(369): unsure at all Xaa locations
  Clone ID: TRIAE-23APR03-C35666_1.p
MRRWFCCSQFHASYREHEHEFPSSPDEKEGNGFDSKSDPTKAPPPIEIPELSLDELERKXLTNFKGSKXLLMRMMDRYGIEVYYCXLDSGKHLAVKKLDTSADPEPDNEFLTQLSIVSRLKHENFVEMLGYCVEGNQRLVAYEFATMGSLHDILHGRKGVPGAQPGPALDWMQRVKIAIDAAKGLAYLHEKVQPSIVHRDIRSSNVLLFEDYRAKVADFNLSNQSPDMAARLHSTRVLGTFGYHAPEYAMTGQLTQKSDVYSFGVVLLELLTGRKPVDHTMPRGQQSLVTWATPRLTEDTVKQCIDPRLKGECPPKGVAKLAAVAALCVQYESEFRPSMSIVVKALSPLLQQKPQAPPAAAPNTTTSEA

SEQ ID NO: 10308 - protein, 307 aa, Triticum aestivum
  unsure (1)..(307): unsure at all Xaa locations
  Clone ID: TRIAE-23APR03-C356_1.p
MAASASCISLVVLVALATAASAQLSPTFYDSSCPGALAAIKSAVTAAVSSDPRMGASLLRLHFHDCFVQGCDASVLLSGNEQNAGPKRGXSLRGFGVIDGIKAQVEAVCKQTVSCADILXTVAARDSXVVALGGSSWTVPPGEKGLLHGLHALAGSDLELANSGNKGLLTIXDWWSLSGAHTIGQAQCGTFKDRIYNETNIDTAFATSLRANCPRSNGDGSLANLDTTTANTFDNAYYTNLVSQKGLLHSDQVLFNNDTTDNTVRNFASNPAAFSSAFTTAMIKMGNIAPKTGTQGQIRLSCSRVNS

SEQ ID NO: 10309 - protein, 312 aa, Triticum aestivum
  Clone ID: TRIAE-23APR03-C356_2.p
MAASASCLSLVVLVALATAASAQLSPTFYDTSCPRALAIIKSGVMAAVSSDPRMGASLLRLHFHDCFVQGCDASVLLSGMEQNAIPNAGSLRGFGVIDSIKTQIEAICNQTVSCADILTVAARDSVVALGGPSWTVPLGRRDSTDANEAAANSDLPGFTSSRSDLELAFRNKGLLTIDMVALSGAHTIGQAQCGTFKDRIYNETNIDTAFATSLRANCPRSNGDGSLANLDTTTANTFDNAYYTNLMSQKGLLHSDQVLFNNDTTDNTVRNFASNPAAFSSAFTTAMIKMGNIAPKTGTQGQIRLSCSRVNS

SEQ ID NO: 10310 - protein, 246 aa, Triticum aestivum
  Clone ID: TRIAE-23APR03-C35724_1.p
QIQVSDEQNNTVHSGNRESATEASEVTKPSTLRTIFSHAAVNILHPQHSVTECHPLHTLKHQCKPTLQLLASSFHPHPDANATGSTSIPCYSSSSSSSSSSSSSSSSSSESSSSSSSSSSESWPSSSPSSSESSSSSPSSSESSSSSSSESSSSSSSSSSSSAPSPPSVPPDPDAARLASAPSPAGEAGAGASGGASPPTISSSEASSTSTSSMAGGGSCGGEGGMERRRSRPRFRFQGERRQNGR

SEQ ID NO: 10311 - protein, 314 aa, Triticum aestivum
  Clone ID: TRIAE-23APR03-C357_1.p
PPVPVGATSCSSLVVLVALATAASGQLSSTFYDTSCPRALVAIKSGVAAAVSSDPRMGASLLRLHFHDCFGCDASVLLTGMEQNAGPNVGSLRGFGVIDNIKTQLESVCKQTVSCADILTVAARDSVVALGGPSWTVPLGRRDSTTASASLANSDLPGPSSSRSQLEAAFLKKNLNTVDMVALSGAHTIGKAQCSNFRTRIYGGDTNINTAFATSLKANCPQSGGNTNLANLDTMTPNAFDNAYYTNLLSQKGLLHSDQVLFNNDTTDNTVRNFASNAAAFSSAFTTAMIKMGNIAPLTGTQGQIRLSCSKVNS

SEQ ID NO: 10312 - protein, 511 aa, Triticum aestivum
  unsure (1)..(511): unsure at all Xaa locations
  Clone ID: TRIAE-23APR03-C35827_1.p
PGKKTSCSCHPPPSSTQPPPPSTPFPRLTLPRPPTTPAGAPRPDPGAEPGGGAPGKGGGARGAGPRPGDAEAIHVATLPVDVLNIRVDNLRGGVHMNRLYRNDVGXEKRVDSFRMQIMQTKVLGTYEVRQLLGCAFRYVYIVIVVIIIAVVCNAYVSCAFKLVVEAVALFKSYFGGAIRNNFVLIYELLDEIMDFGYPQNLSPEILKLYITQEGVRSPFSSKPSDKPVPNATLQVTGAVGWRREGLVYKKNEVFLDIVESVNLLMSSKGSVLRCDVTGKILMKCFLSGMPDLKLGLNDKIGLEKEAQLKSRPSKSGKTIELDDVTFHQCVNLTRFNSEKTVSFVPPDGEFELMKYRITEGVNLPFRVLPTIKELGRTRMEINVKVKSVFGAKMFALGVVVKVPVPKQTAKTSFQTTSGKAKYNASIDSLVWKIRKFPGQTEATMSAEVELISTMGEKKLANRPPIQMEFQVPMFTASGLRVRFLKVWEKSGYNTVEWVRYITRAGSYEIRC

SEQ ID NO: 10313 - protein, 121 aa, Triticum aestivum
  Clone ID: TRIAE-23APR03-C35851_1.p
ERHNRPDQSARGNPRTRRRRARSHPARERQAERDTTEPTKAPGETLGRGEGLARSHGQGPQQEQGQEWRRRRRHGRLRGRARCIHRSRSPTTDGYGRGEAAVLFIGCPQFDQQENKKGRAT

SEQ ID NO: 10314 - protein, 110 aa, Triticum aestivum
  Clone ID: TRIAE-23APR03-C35880_3.p
MSGSGSGSGVWVFKNGVMQLQPEQPAAGRKALLYVPTGERMTSLELLERRLGAHGWERYYENRDIVQLHRRDGGIDLISLPRDFTKFRSTHMYDVVLKNRDSFKVVDVPS

SEQ ID NO: 10315 - protein, 585 aa, Triticum aestivum
  Clone ID: TRIAE-23APR03-C35924_1.p
MHASARLLRRLSSSYSARSLRRLPLHPSPSPPPHPSRLPPLRTVTRALLPHLAAPRFSTISCASTPSLRLGECGALGTPAIPSAEVSEEEEEVESVAARHDTDAFAAVELALDSVVKVFTVSSGPNYFLPWQNKAQRESMGSGFVISGKRIVTNAHVVADHTFVLVRKHGSPAKYKAEVQAIGHECDLALLTVESEEFWEGMNSLDLGDIPFLQEAVAVVGYPQGGDNISVTKGVVSRVEPTQYAHGATQLMAIQIDAAINPGNSGGPAIMGDKVAGVAFQNLSGAENIGYIIPVPVIKRFISGVEESGKYSGFCSLGISCQATENIQIRECFGMRPEMTGVLVSRINPLSGAYEILRKDDILLEFDGVPIANDGTVPFRNRERITFDHLVSMKKPEETAVIKVLRDGKEHELNVTLRPLQPLVPVHQFDKLPSYYIFAGFVFIPLTQPYLHEFGEDWYNTSPRRLCERALRELPKKAGQQLVILSQVLMDDINVGYERLAELQVKKVNGVEVENLKHLCSIVENCTEENLRIDLDDERVIVLKFQNARLATSRILKRHRIPSAMSNDLVDEQASKGETEASCTN

SEQ ID NO: 10316 - protein, 396 aa, Triticum aestivum
  Clone ID: TRIAE-23APR03-C35925_1.p
MAPLRGAKRRKRHPEKALPAGVMAPLPPPDAADWWDSFSRRLAAGHYSKDCQNFESVFKMSRKTFDYICTLITGDFSRKTQGFRNFRFGDKMILALEDQVAVALLRLTTGESLLSIGNRFGMNHSAISNITWKFIESLEDHAISHLKWPDPEEMATIKAKFEKLQGLPNCCGAIDTTHILMCSSAQPNSNVWLDCENRNSMVLQAVVDPDMRFRDVVSGWPGSMDDSCILRTSGFYKLCEKGGRLDGQMELPGEPAGSVVREYIIGDTGYPLLPWLMTPYQERDLSPAKAAFNKQHATARMVVQGAMARLKERWQVLKGELWRPDKHRLPRIIYACCLLTNIMIDLGDTHRERAPASHDHDDGYYQQFSNVADDGAVAQRDVLCQYVSRLGGKLPE

SEQ ID NO: 10317 - protein, 207 aa, Triticum aestivum
  Clone ID: TRIAE-23APR03-C359_5.p
MATAKPILYGAWISSCSHRVRIALNLKGVDYEYKAVNPRTDPDYEKINPIKYIPALVDGDLFYLILSLSCYPQHPLVPKDIKTKGLDLQIANIVCSSIQPLQGYGVIGLHEGRLSPDESLEVVQRYIDKGFRAIEKLLDGCDSKYCVGDEIHLGDVFLAPQIHAAINRFQIDMTKYPILSRLHDAYMEIPAFQAALPQNQPDAPSAK

SEQ ID NO: 10318 - protein, 366 aa, Triticum aestivum
  unsure (1)..(366): unsure at all Xaa locations
  Clone ID: TRIAE-23APR03-C3611_1.p
QKKNNALLPYIRKRSKIIEIVAARDIVFALSQXSGVCAAFSRVKNKRICFLNGSADEVVRSLFYNKNNDSLITVSVYGSDNYSAXRCMTARIEYYLEMLLMIKGWQXFNEQKKTWKFQNTITEALEDITALYYDEERDEIYTGNRHGLVHXVGELRAEKANFRDKQGVVRLQADQFNNQASGGAGRQEVLGLQPLXFVDVEYCGVELLFTDRRFVVELVLVMCFTIACSSLGDVSMLTFRQYLVAGSNFRGELVTSFEDHLLWHPDCNTNNIYITIDQDLIISYCKADSTDSSSEENAGSINISNILTGKCLAKIKAGNFNEQKKTWKFQNTITEALEDITALYYDEERDEIYTGNRHGLVHVWAN

SEQ ID NO: 10319 - protein, 179 aa, Triticum aestivum
  Clone ID: TRIAE-23APR03-C361533_1.p
MLSRISRLGVHALNRARLGQKSVTSRNQEEPIRACMNYVGNHSLCSATEAKVSDRSEQPKAKISVTFVDKDGDETVINVPIGMSMLEAAHENDIELEGACEGSLACSTCHVIVTDVDYYNKLEDPEDEENDMLDLAFGLTETSRLGCQVIASPELDGIRLALPAATRNFAVDGHVPKPH

SEQ ID NO: 10320 - protein, 157 aa, Triticum aestivum
  unsure (1)..(157): unsure at all Xaa locations
  Clone ID: TRIAE-23APR03-C3641_2.p
MQASRARLFKEYKEVQREKSADPDIQLICDDSNIFKWTAVIKGPSETPFEGGVFQLVFSIPEQYPLLPPQVXFITKIFHPNVHFKTGEICLDILKNAWSPAWTLQSVCRAIIALMAHPEADSPLNCDSGNLLRSGDIRGYQSMARMYTRLAAMPKKE

SEQ ID NO: 10321 - protein, 325 aa, Triticum aestivum
  Clone ID: TRIAE-23APR03-C3645_1.p
MPPPPRKAAQQPEPSQRHGGGRRRSAPASDADGGSSREASGDGDSDSSPECSSSDDDDASQEMETVQADFAFFDPKPADFHGVRLLLKTYLDSKPWDLTGFVDLVLEQTTVGTVVKMAEDEDEDGEANGGDKSDDDGDLFGLITVLNLGRYGENRCIKDLKEYLLAVCGDKDTKEKLKSLLEDKASTVGLLVCRRFVNFPYEMVPKMYDSLFDEVSWATEDEPTQELQDSFRFKQYLLLVRILERKTPPKQKAKNNKDEDEPVIYPKLEDEIFRELSSWSFTFPIRAEQSAQQELKNYKEMGLVMCVKADVIPKFRKKLEALVSE

SEQ ID NO: 10322 - protein, 316 aa, Triticum aestivum
  Clone ID: TRIAE-23APR03-C36510_1.p
MASLSVPPVLTPPRDDAVALHKAFKGFGCDSTTVTNILAHRDSAQRALILHEYKAIYHQDLYHRLATELSGNHKNAMLLWVLDPVGRDATILNQALNSDITDLRAATEVICSRTPSQLQIMKQTYRARFGCYLEHDITERTYGDHQKLLLAYLGVRRNEGPEVDPSAVTDDARELYQAGEKRVGTDERAFIRIFSERNWAHMVSVANAYQHMYARSLEKAVKSETTGNFQFGLLTILRCADTPAKYFAKVLHKAMKGLGTSNAALTRVAVTRTEVDMKYIKAEYHNKYKGSLAEAIHSETSGNYRTFLLSLVGWDR

SEQ ID NO: 10323 - protein, 140 aa, Triticum aestivum
  Clone ID: TRIAE-23APR03-C365_8.p
MARHRLLAVLMLLVGVVAASTFHQAAAAGRGLAVLEKFADLEPKPKPKPEPMPKQMPKPEPESKPKPKPMPKPEPKPKPMPKPEPKPEPKHKPMPKPEPKRKPMPKPEPKPEPMPKPEPKPKPEPKPKPPPKHKPPTAYN

SEQ ID NO: 10324 - protein, 194 aa, Triticum aestivum
  Clone ID: TRIAE-23APR03-C36799_1.p
MGGSRRKFKRTRTKVRVGLPRKKPREFKPAFDLPEALAAAAAAEAGGHVPSWDAEGSVVKNYSAFGVVANPNLLGAHSRGTRGLVQSASLQAPDVDALRAPVDEFGPVDTGSDLECDDLKSALGKKRRDGKSAPLEPLTKIQRLCIGRLIEKYGDNYKAMFMDTKLNSMQHSVGTLKKLCERYHVGGKTILYPM

SEQ ID NO: 10325 - protein, 425 aa, Triticum aestivum
  unsure (1)..(425): unsure at all Xaa locations
  Clone ID: TRIAE-23APR03-C3685_1.p
SKSRTQPETSKQPLPSLLLLCSSSLQSTLLASHRPIRWTAPXPARGRLAVLSSHLLAAGADPAAALERSPASAAAPGTRAGVLAVVDSRTGKRYEVKVSEDGTVRATDFKKITAGKDDKGLKTYDPGYLNTAPVRSSICYIDGDEGILRYRGYPIEEVAESSSFVEVAYLLMYGNLPSQSQLAAWEFAISQHSAVPQGLLDIIQSMPHDAHPMGVLASAMSTLSVFHPDANPALRGQDLXPSQTTRRALRALHNRGKMAAGDYQGLLVSSFVXLPSITIAFLVNFVYMLDDMXDINYQLNRLLESLLDLLVEHEANRETTCARALVRHLVSGGXVDVFTALXLAVGALFGALQRGSIECLMRLELVGVRVYTNYVHGVKVRRQKMSDVGHRVCRDSLTGATVIRKLAEEVVSIVRRDPLNEDAVS

SEQ ID NO: 10326 - protein, 480 aa, Triticum aestivum
  unsure (1)..(480): unsure at all Xaa locations
  Clone ID: TRIAE-23APR03-C3685_2.p
MDRADPARGRLAVLSSHLLAGVLAVVDSRTGKRYEVKVSEDGTVRATDFKKITTGKDDKGLKTYDPGYLNTAPVRSSICYIDGDEGILRYRGYPIEEVAESSSFVEVAYLLMYGNLPTQSQLAGWESAISQHSAVPXGLLDIIQSMPXDAHPXGVLASAMSTLSVFHPDANPALRGQDLYKSKQVRDKQIVRVLGKAPAIAAAAYLRLAGRPAVLPSNNLSYSENFLYMLDSLGDKEYKPNPRLARVLDILFILHAEHEMNCSTAAVRHLASSGVDVFTALSGAVGALYGPLHGGANEAVLKMLNEIGAVENIPDFIEGVKNRKRKMSGFGHRVYKNYDPRAKVIRKLAEEVFSIVGRDPLIEVAVALEKAALSDDYFIKRKLYPNVDFYSGLIYRAMGFPTEFFPVLFAIPRMAGWLAHWKESLDDPDNKIMRPQQVYTGVWLRHYTPVRERVASNQGEELGQIATSNATRRRRAGSSL

SEQ ID NO: 10327 - protein, 164 aa, Triticum aestivum
  unsure (1)..(164): unsure at all Xaa locations
  Clone ID: TRIAE-23APR03-C36888_1.p
MATADGQSQPAATEPSPSPAKRKTDTDSEISPLDPPAKAARPGADEEAAAEAKARVADKGKGKMVVDEEEEGDEESDEEEDDEEVEGDGDESDGLCEDPLSEVDLNNILPSRTRRCAPAQPGAYLVPPEEAAEDDEDDEDADVDMAPGEESGDGXGERLGSQLD

SEQ ID NO: 10328 - protein, 453 aa, Triticum aestivum
  unsure (1)..(453): unsure at all Xaa locations
  Clone ID: TRIAE-23APR03-C36890_1.p
MASGPNGGGNGGGAGGGLMKNMSLLRLQYYCVLGAVAGAVLFATLRYMPAASSGAALSTTSALATAAAPAGAGSGAGEHRKIKGTAPAPAKAAAKVVTKPKEVVVFNFGDSNSDTGGVAAIMGIRIAAPEGRAQYAVVLLHVFGGVXCDDDEGETLNTHHLSPYMKPLGSDYSNGVNFAIAGATATPGDTPFSLDVQIDQFIFYRDRCNDSITRDEPAPLNMLDFERALYTMDIGQNDITSILYLPYDEVLAKLPHFVAEIRKAIEILHKNGARKFWIHGTGALGCLPAKLAMPRASDGDLDEHGCIAKFNXAAKRFNTLLSEACDDLRLLLKKSSIIFVDMFAIKYDLVANHTKHGIEKPLMTCCGHGGPPYNYDPKRSCMGDSKDRWELGDQCVNWVGGDFIDFTDAANSIVASMAISGVHSVHRTNLISLAKPAKSKASIRRINPVNPMI

SEQ ID NO: 10329 - protein, 337 aa, Triticum aestivum
  Clone ID: TRIAE-23APR03-C36953_1.p
MAPRAAAAVAVVALVCAVQSSLSGAAVPGLSPGFYKTTCPGLEQIVNAQVTATFNKDQGVAPALLRVLFHDCFTQGCDASVLIKGRGTEQIPGGANGTLRRVALDLIDRIHREAQAACGRVVSCADVTVLATRDALFKAGGPRFNVDLGRLDSFAPAPDRVKDLPSPFDGADRHIEAFKARKLSADDLVSLSGAHTFGVAHCGVIPPRGTHSMDPQLAKQLQEKCTKPTATTTQDLDVLTPHVFDNKYYVGLTQKKGMFLSDQSLIDHPLTKNLALAFSKNQTAFFIEFGKSMTKMTEMGVITSKLQGEVRADCTVAGKPPRIEAATAADQGFTADM

SEQ ID NO: 10330 - protein, 357 aa, Triticum aestivum
  unsure (1)..(357): unsure at all Xaa locations
  Clone ID: TRIAE-23APR03-C37013_1.p
KKYATAIRRRWPTTDPVVIRSRRERSILRRAPAASSLTFPWRRRFAVAAVSSSSPLFSSSSSPLFSSSSSRPILRGHPSLGYISVRPRHRSAVASAAATESAGKLLLEVHGLTASVKETGQQILKGVDLTIREGEVHAIMGKNGSGKSTLTKVLVGHPHYEVTGGTILFKGENLIDMEPEERSLAGLFMSFQAPIEIPGVSNYDFLLMAINARREKDGLPAFGTXEFYSVVSQKVEALKMEPKILDRNVNEGFRFSGGERKRNEILQLSVLGADLALLDEIDSGLDVDALEDVAHAVNGLLTPQNSVLMITHYQRLLDLIKPSYVHIMESGKIVKTGDSSLASHINEGGYKSIASFV

SEQ ID NO: 10331 - protein, 357 aa, Triticum aestivum
  unsure (1)..(357): unsure at all Xaa locations
  Clone ID: TRIAE-23APR03-C3716_1.p
TPSSSPAPPPLPAHPFSPSSASPRPLIAAPTAAATAAAVSSPAVPAASSPAARCAVRCGCVAASRAAARPSALRSAPPRAASAGFSSGVRTHVAGCVNKQVDAKMLHEVESATLLIVXESACIGGLGRCLAVASELGACKVLVKYARSSEEADGVSEEFEAAGGQAITFGGDVSKEADVESMMKAALDKWGTIDILVNNAGITRDTLLMRMKKSQWQDVIDLNLTGVFLCTQAATKVMMKKKKGRVINIASVVGLTGNAGQANYSAAKAGVIGFTKTVAREYASRNINVNAIAPGFIASDMTAELGEEVEKRILSTIPLGRYGQPEEVAGLVEFLALNPAASYITGQVLTIDGGMVM

SEQ ID NO: 10332 - protein, 187 aa, Triticum aestivum
  unsure (1)..(187): unsure at all Xaa locations
  Clone ID: TRIAE-23APR03-C371_20.p
MAGGGGGFLNLERHFAFYXGAYHSNPVNVFIHALFVWPIFLTALLLLHLTAPFPRAAAVFTAVYGAFYVSLDRRSGALAAVLCLLCWAASSALAARLGFSLGWKVVLVAQLFCWTMQFIGHGVFXKQXPAXVDNLVQALMMAPYFVLXEILHKFVAYEPYPGFHANVXKLIDAKRKEWAXKKAKKMS

SEQ ID NO: 10333 - protein, 533 aa, Triticum aestivum
  Clone ID: TRIAE-23APR03-C371_35.p
MTGGGRAVLLLPVLLISALFAQIRASDPLFHESFNESFDGSWIVSGKEEYKGVWKHAKSDGHEDYGLLVSEPARKYAIIKELDYPVTMKDETVVLQFEVRLQNGLECGGAYIKYIRPQATGWNAKDFDNDTPYTIMFGPDKCGSTNKVHFILKHKNPKTGKYVEHHLKSPPSVPYDKLSHVYTAILKPDNEVRILVDGVEKSKANFLSAADFEPALIPSKTIPDPDDKKPEDWDERAKIPDPVAVKPDDWDEDAPMEIVDEEATKPEGWLDDEPEEIDDPEAAKPEDWDDEEDGEWEAPKMDNPKCEVAPGCGEWKKPMKDNPAYKGKWHAPLIDNPNYKGIWKPQEISNPEYFELDKPDFDPIAAIGIEIWTMQDGILFDNILIADNEKVATSILEKTWKPKFDVEKEKQKAEEAAAGASEGLSEFQKKIFDILYKVADIPFLEPYKTKIIDVIEKGETQPNITISILASVIVVIVTVLFRALFGGKKPVAPVKPAAETKKPSAVVPDAAAGSSGDMEDDKDAPRRRSRRDA

SEQ ID NO: 10334 - protein, 530 aa, Triticum aestivum
  Clone ID: TRIAE-23APR03-C371_36.p
MMGGRAVLLLLVISALFAQIHASDPLFHESFNESFDGSWIVSGKEEYKGVWKHAKSDGHEDYGLLVSEPARKYAIIKELDYLVTLKGETVVLQFEVRLQNGLECGGAYIKYIRPQATGWNAKDFDNDTPYTIMFGPDKCGSTNKVHFILKHKNPKTGKYVEHHIKSPPSVPYDKLSHVYTAILKPDNEVRILVDGVEKSKANFLSADDFEPALVPSKTIPDPDDKKPEDWDERAKIPDPVAVKPDDWDEDAPMEIVDEEATKPEGWLDDDPEEIDDPEAAKPEDWDDEEDGEWEAPKMDNPKCEVAPGCGEWKKPMKDNPAYKGKWHAPLIDNPNYKGIWKPQEIPNPEYFELDKPDFDPIAAIGIEIWTMQDGILFDNILIADNEKVATSVREKTWKPKFDAEKEKQKAEEAAAGASEGLSEIQKKIFDILYKVADIPFLEPYKTKIIDVIEKGETQPNITISILASVIVVIVTVLFKALFGGKKPVAPVKPTAETKKPSAVVPDAAAGSSGDKEDDKDAPRRRSRRDA

SEQ ID NO: 10335 - protein, 531 aa, Triticum aestivum
  Clone ID: TRIAE-23APR03-C371_41.p
MTGGRAVLLLVVSALFAQIYASDPLFHESFDEGFQGSWIVSGKEEYSGVWKHEKSDGHEDYGLLVSEPARKYAIVKELDSPVTLKDGTVVLQFEVRLQNGLECGGAYLKYIRPQEAGWDAKEFDNDTPYTIMFGPDKCGSTNKVHFILKHKNPKTGKYVEHHLKSPPSVPYDKLSHVYTAILKPDNEVRILVDGEEKSKANFLSADDFEPALIPSKTIPDPDDKKPEDWDERAKIPDPAAVKPDDWDEDAPTEILDEEATKPEGWLDDEPEEVDDPEAAKPEDWDDEEDGEWEAPKIDNPKCEEAPGCGEWKRPMKQNPAYKGKWHAPMIDNPAYKGIWKPQEIPNPEYFELDKPDFDPIAAIGIEIWTMQDGILFDNILIADDEKVATAILEKTWKPKFDVEKEKQKAEEAAAADSEDLSEFQKKIFSVLYKIADIPFLEPYKIKIIDVIEKGEKQPNITISILASAAVILVTVLFRTLFGGKKPVAPVKPIAEVKKPSATEADAAGSSGDKEEKEDDTTAPRRRSRRET

SEQ ID NO: 10336 - protein, 231 aa, Triticum aestivum
  Clone ID: TRIAE-23APR03-C371_43.p
MEYQGQQQRGRVDEYGNPVAGHGVGTGMETHGGVGTGAAAGGHFQPMRDEHQTGRGILHRSGSSSSSSSEDDGMGGRRKKGIKEKIKEKLPGGHGDQQHTGGTYRQQGTGMVGTGGTYGQKGHTGMTGTGGTYGQQGHTGMTGTGGTYGQQGHTGMTGTGGTYGQQGHTGMAGTGAHGTTATGGTYGQPGHTGMTGTGAHGTGGTYGQHGTDTGEKKGIMDKIKEKLPGQH

SEQ ID NO: 10337 - protein, 536 aa, Triticum aestivum
  unsure (1)..(536): unsure at all Xaa locations
  Clone ID: TRIAE-23APR03-C371_45.p
MTTGGRAVLLLPLLVASALFAQIRASDPLFHESFDEGFEGSWVVSGKEEYSGVWKHEKSDGHEDYGLLVSEPARKYAIVKELDSPVTLKDGTVVLQFEVRLQNGLECGGAYLKYIRPQEAGWDAKEFDNDTPYTIMFGPDKCGSTNKVHFILKHKNPKTGKYVEHHLKSPPSVPYDKLSHVYTAILKPDNEVRILVDGEEKSKANFLSADDFEPALIPSKTIPDPDDKKPEDWDERAKIPDPAAVKPDDWDEDAPTEILDEEATEPEGWLDDEPEEVDDPEAAKPEDWDDEEDGEWEAPKIDNPKCEEAPGCGEWKRPMKQNPAYKGKWHAPLIDNPAYKGIWKPQEIPNPEYFEXLDKPDFDPIAAIGIEIWTMQDGILFDNILIADDEKVATAILEKTWKPKFDVEKEKQKAEEAAAAXSEDLSEFQKKIFSVLYKIADIPFLEPYKIKIIDIIEKGEKQPNITISILASVAVILVTVLFRTIFGGKKPVAPVKPVAEVKKPNATEADAAGSSGDKEEKEDDTTAPRRRSRRET

SEQ ID NO: 10338 - protein, 391 aa, Triticum aestivum
  Clone ID: TRIAE-23APR03-C3738_3.p
EGPSEERMRVPPGFQQEGAGKSPRQAKEAPKGERKRSYRLPKSPAKGGAAVKKGPAMKVSRKRVGDLTRFTFFKVLKRVHSDIGISSKAMSIMTSCISDILEKLAGEAAKLARVQQEAHHHVQGNPGLRPPRPPRRARQAGRLRGHQGRHQVHQQLGFRRGVHQRKVSLATTRPFPSTASPTPQAQSRSMAPHQRKDLRRNEAGPLPSGNRPDDPRRCDADRGRPRPRKKPAAERSRTTEARREGRGETRPRQEAHGGRRGLCGLQVGPTSDGRTQNGLQEEQGKRLENLQDETSPRGLKQVQPRTSASPPRQCAITELLHQPAILRLSSPGRTAAQDVGTKLRTKNALPITLPRANFQLLPFSPSSVPGELANPRRLQRAPSPSPSSPCN

SEQ ID NO: 10339 - protein, 580 aa, Triticum aestivum
  unsure (1)..(580): unsure at all Xaa locations
  Clone ID: TRIAE-23APR03-C373_4.p
MASANAISTASLLRSFSSQGRLRRSKNGRSSRLVVRADAKEIAFDQKSRAALQAGVEKLANAVGVTLGPRGRNVVLDEYGNPKVVNDGVTIARAIELANPMENAGAALIREVASKTNDSAGDGTTTACVLAREIIKLGILSVTSGANPVSLKKGIDKTVQGLIEELERKPRPVKGSGDIKAVASISAGNDELIGAMIADAIDKVGPGXDGVLSIESSSSFETTVDVEEGMEIDRGYISPQFVTNLEKSIVEFENARVLITDQKITSIKEIIPLLEQTTQLRCPLFIVAEDITGEALATLVVNKLRGIINVAAIKAPSFGERRKAVLQDIAIVTGAEYLAKDLGLLVENATVDQLGTARKITIHQTTTTLIADAASKDEIQARVAQLKKELSETDSIYDSEKLAERIAKLSGGVAVIKVGATTETELEDRQLRIEDAKNATFAAIEEGIVPGGGAAYVHLSTYVPAIKETIEDHDERLGADIIQKALQAPASLIANNAGVEGEVVIEKIKESEWEMGYNAMTDKYENLIESGVIDPAKVTRCALQNAASVSGMVLTTQAIVVEKPKPKPKVAEPAEGQLSV

SEQ ID NO: 10340 - protein, 92 aa, Triticum aestivum
  Clone ID: TRIAE-23APR03-C373_5.p
MYWLCIGMIGTGLGRNLIQLTHVIFYEGDGTEIQSALAEWTGQRTVPNVFINGKHIGGCDDTIALNKGGKLVALLTEAGAISGSSSKTTVTA

SEQ ID NO: 10341 - protein, 203 aa, Triticum aestivum
  Clone ID: TRIAE-23APR03-C3757_9.p
MSSRRVGLLFISLLAIALSCSADPPPVHDTDGNELRADANYYVLPANRAHGGGLTMAPGHGRRCPLFVSQEADGQRDGLPVRIAPHGGGAPSDKIIRLSTDVRISFRAYTTCVQSTEWHIDSELVSGRRHVITGPVRDPSPSGRENAFRIEKYSGAEVHEYKLMACGDSCQDLGVFRDLKGGAWFLGATEPYHVVVFKKAPPA

SEQ ID NO: 10342 - protein, 252 aa, Triticum aestivum
  Clone ID: TRIAE-23APR03-C375916_1.p
EVYSEVDKCIEGLTESSHKSLHTLFLILNTDFPKLEVSLTNASEGQTLPFTHDENSSQLIFERLPEVDVESPQWSEALATDAISLIYENLQKLDSFVSSQLSSHKKPRNMTIYWLPYTCGAIGLSACSLWLLRHSSLMGSSDMDNWIQDAKESVAGFWDEHVERPIISIRDELFETFKRTDKRVMEREEVQLTEESLHRMLITFCEQTSKEKPAQDASLQELLEIVMKRCEKESMHSIQNLVSGELARAMLI

SEQ ID NO: 10343 - protein, 456 aa, Triticum aestivum
  unsure (1)..(456): unsure at all Xaa locations
  Clone ID: TRIAE-23APR03-C3770_1.p
MAAVSDARDRRRARPGLGCTRDDLQATWFHFSMELDAVTTGKAVVQKAKYSGEEVYSSNKTKRTXDDGVIYKKLKAVTCYDFLWLEVIEESLXITLRLKFPLYSKLLKFLMVQCSKYIKNQRPLELDPYVVCAVVRGRTIDXVRYNSNLDLQDKRHIKIFEVGDVVSLDTSRDVGASNNRRLAALYCNNNSGFEEMMGLVDRSVNALMEFYRSXDMKLKKFLHIIENSPVYPVIYDSNRTVLCWLLIIXHAHLLSKFGIPDPCTFVEIDIEALLXDAMYMNQGIRXWFCSIEFEAVWQACGISTRSTANYSLHSCYTMEVPLSDIAGPIGISLDETQVISLRNNMQLQAXLCSSNWEPCISVSVPPTRSDVLHARDLTEDVAIAYGYNNVPKSKPKSMTIGGRQPLNRFSDKIRAEVARAGYMEVLTFVLTSHEENFDMLNRTDDGINIIIANPVL

SEQ ID NO: 10344 - protein, 646 aa, Triticum aestivum
  unsure (1)..(646): unsure at all Xaa locations
  Clone ID: TRIAE-23APR03-C3793_1.p
MTSSSAARNQHLDELRALMASHSPPIHALLIPSEDAHQSEYVSERDKRRQFISGFTGSAGLALITTKEALLWTDGRYFLQATNQLSDRWRLMRMGEDPPVEVWIADNLSDEAVIGIDSWCISVDSAQRYEQPFWKEXTTLPVRVMLSRAAKARMSAQETVRGQLRSSAALAASITSKPRRLGLFGGATRSVLPPPGLVASRTEASXAPDEAVVEMEPDEAGGDASVLGEGGRHGLPDKRLRVGAAPLVEPHPELRRGQTRQQAHGAERRDEGYTGSALHSHGVLLVQSRXVLFWIDSKSCCLALYSKLRPDQALMLQXTILLPKAVKNPMELTGLRKAHIQDGAAVVQYLDWLNNHMQENDGASGYFSYHNEXQKKLELYLNVHEXGMAEEGHRTYNCEQLSQPLHGYCCCAPNVDRWLPEYLINFNKCXSIKSDPVFFMYFVSPNLEANIRIQRYVHFGKPSEHQKSCYTAVLKGHIALDAAVFPNGTTGHALDILARTPLWKSGLDYRHGTGHGIGSYLNVHEGPHLISFRPSARNVPLQASMTVTDEPGYYEDGNFGIRLENVLIVKEADTKFNFGEKGYLSFEHITWAPYQTKLINTALLTPAEIEWVNLYHSDCQKILESYLNVQEKEWLRKATEPITASS

SEQ ID NO: 10345 - protein, 138 aa, Triticum aestivum
  unsure (1)..(138): unsure at all Xaa locations
  Clone ID: TRIAE-23APR03-C380395_2.p
MSAASGAACRVCGGGAEDCSCLLQRGRGAAGVRCGVADLNRGFPGMFGQAAEEPAVDVVAGGGGAAAVGLQEFQFFGQEDHESVGWXCSTTTYLFRGRTAELAAHFXKKKMQRRMDIDAYAEYQPGHGLTFDVPVPLS

SEQ ID NO: 10346 - protein, 266 aa, Triticum aestivum
  Clone ID: TRIAE-23APR03-C38144_1.p
MRAGSYAQRKKNRSLGGSIWKVRWHFSKDGNLVTFFEYVKIAMASIQLTFFNRDRTDVEAEDEDTVQETVIGAKPLAVGAAPGQRERRSEKCVASTRELILEAIKKLKESSGSNKTAIASYIEEQYWPPADFQRLLSTKLKALVVTGKLMKSNQKYRIAPSSVSLGGRSTKVHSTEDDKQNICIRQLTKPQVDAELDMMTHMNKEEAAAFAAKAVAEAEVANAEAEEAARAAEAAEAEAEAAKAFLDAVMLTVQNKNAASAILRAC

SEQ ID NO: 10347 - protein, 437 aa, Triticum aestivum
  unsure (1)..(437): unsure at all Xaa locations
  Clone ID: TRIAE-23APR03-C38307_1.p
LHPSYISRLTRHSPKTPPPTPASPASRGATTRPRRPPTSRLSIGHHTRFXLRLASAISSPRHANGSAGNXAAFPPLSPHVAPSLVAAGAGGAHPRPRSPPRLGPRRKRRSEGLHALAXEQVVQVXYADASGAGGPRVAFANXVFVDASLKLKPSFQXISLVGKYKAETQSVDFQTKAAEVAXGQVNSWVEKITTGLIKEILPAGSVDNTTRLVLGNALYFKGAWTEKFDASKTKDEKFHLLDGSSVQTPFMSSTKKQYISSSDSLKVLKLPYQQGEDKRQFSMYILLPEAQDGLWNLANKLSTEPEFLENHIPMQKVPVGQFKLPKFKISFGFEASDMLKGLGLQLPFSAEADLSEMVDSPAGLYVSSVFHKSFVEVNEEGTEAAAATASVVTLRSLPVEPVKVDFVADHPFLFLIREDLTGVVLFVGHVFNPLVSA

SEQ ID NO: 10348 - protein, 473 aa, Triticum aestivum
  Clone ID: TRIAE-23APR03-C38311_1.p
MQRRRAQTWAGVGKTAQAAAAHAALFCFTLLLALRVDGRTDSSWWIIFIPLWLFHGVAARGRFSMPAPSLPHGRHWAPCHSVVAAPLLIAFELLLCIYLESLRVKNHPAVDMKIVFLPLLTFEVIILVDNFRMCKALMPGDEESMSDEAIWETLSHFWVAISMVFLIAATTFTLLKLSGDVGALGWWDLFINYGIAECFAFLVCTRWFNPMIHRPPTHGEASSSSSAIRYRDWESGLVLPSLEDHEQERICGLPDIGGHLMKIPLVVFQVLLCMRLEGTPPSARYIPIFALFSPLFILQGAGVLFSIGRLVEKVVLLLRNGPVSPNYLTVSSKVRDCFAFLHHGSRLLGWWSIDEGSKEEQARLFYTESNGYNTFSGYPPEVVKKMPKKDLAEEVWRLQAALGEQSEITKSTQQEYERLQNEKVLCRICYEGEICMVILPCRHRTLCKSCAEKCKRCPICRNPIEERMAVYDV

SEQ ID NO: 10349 - protein, 266 aa, Triticum aestivum; identical to SEQ ID NO: 7174
  Clone ID: TRIAE-23APR03-C383186_2.p

SEQ ID NO: 10350 - protein, 265 aa, Triticum aestivum
  Clone ID: TRIAE-23APR03-C383186_3.p
MASSTMALSSPAFAGKAVKPAASDVLGSGRVTMRKTVAKPKGPSGSPWYGSDRVKYLGPFSGEPPSYLTGEFPGDYGWDTAGLSADPETFARNRELEVIHSRWAMLGALGCVFPELLARNGVKFGEAVWFKAGSQIFSEGGLDYLGNPSLVHAQSILAIWATQVILMGAVEGYRVAGDGPLGEAEDLLYPGGSFDPLGLAADPEAFAELKVKEIKNGRLAMFSMFGFFVQAIVTGKGPLENLADHLADPVNNNAWAFATNFVPGK

SEQ ID NO: 10351 - protein, 417 aa, Triticum aestivum
  Clone ID: TRIAE-23APR03-C383887_1.p
MGSLFPPWPLPSTVRPLPAARRRPREHHHAPLAVPSSSSHHVRLPPPSSSRSELRLTQTDLARAHTPASRRAVLRPRTAPEADAAAALMVVRAEAGDFARAQSIWAQLLLSSAAPCLAAAAPSLLPAYARLGRYDEVLLAARELSARDPAAARDLYPLAVSCLGAAGELALMEDAVQEMARAGLRVDSATGNAFVRHYAASGTVPEMEAAVGRLKKSGLLISVDAIRAVASAYIANRKYYKLGEFVRGVGLGRRDAGNLLWNLYLLSFAANFKMKSLQRAFLEMTAAGCRPDLTTFNIRAAAFSKMCMFWDLHLTAEHMRRDGVAPDLVTHGCFVDAYMERRLARNLSFAFRRLDGSGEPVVATDGVVFEAFGKGGFHTTSEGLLEAAGGKRRWTYHDLLGVYLRKQHRRNQIFWNY

SEQ ID NO: 10352 - protein, 109 aa, Triticum aestivum
  unsure (1)..(109): unsure at all Xaa locations
  Clone ID: TRIAE-23APR03-C3843_1.p
GWLRARRSGTTWWRWTSPETRWLPTKLGLKEMATYVIYGTGAFFAGWVLSAVVSAIDSIPLLPRILEMVGLXGYTVWFSSRYLLFKDNREELFAKAYDLKMRIVGSGDA

SEQ ID NO: 10353 - protein, 365 aa, Triticum aestivum
  Clone ID: TRIAE-23APR03-C384564_1.p
MASTTISSCAYQAVQGAHRLKICQFSHGIVGMDVNADGFIRSSTFRVGGFDWAILYYPEGYGDDSEGFISVFVEFMSKYGKAPAVVDIRLIDQVTGKPKSLLSSVFFEEDEEPFRFKSDSFAEATWGKERCIRREALEDSVYVRDDCLVIECVITVLGQLRVSETKPLCEIDVPPPNALQHFRKMLEDTSAADVTFDVQQETFAAHRAVLAARSPVFRKQFSEPMKEKMSRITINSVEPAVFKALLHFIYTDSLPVMDDFTRAESNAVFQHLLAAADQYGLERLKLMCAGTLVMNLNVENVASALWLADKYNCQKLKEACVNFMAPSNRVDAVVASQGYQLLKRGSPSPLADVWEKRSRARQSFL

SEQ ID NO: 10354 - protein, 129 aa, Triticum aestivum
  Clone ID: TRIAE-23APR03-C384_2.p
PWTTPTGLPCTRGPRQWLRGKTEEEKSEGKKQAFAAVEVLEGALRECFKGGGFFGGDGVGLVDVALGGVLSWMKVTEALSGDKIFDAAKTPLLAAWVERFIELDAAKAALPDVGRLLEFAKAREAAASK

SEQ ID NO: 10355 - protein, 524 aa, Triticum aestivum
  unsure (1)..(524): unsure at all Xaa locations
  Clone ID: TRIAE-23APR03-C38536_1.p
MAGGRPGGRSRPATQPRRGFGYCIASNPPWGEASILGFQHYILALGTAVMIPAVLVPMMGGSDGDRVRVGRSRRRGSASPAPPRSRCRSRLPTVIGGSYAFVIPVMAIVQDSSLAAISDDHERFLQSMRAIQGALIVSSSIQIILGYSQLWGIFSRFFSPLGMAPVVALLGFGLFERGFPVXGRCVEVGLPMLILFVVLSQYLKNVQIREIPILERFSLFICIALVWAYAQILTPGGAYNHSTEVTQINCRTDRANLISSAPWIKIPYPLQWGAPTFSAGQSFGMVSAVLVSLIESTASYSAAARLASATPPPAHILSRGIGWQGIGILLCGLFGTGTGSTVSVENVGLLGSTRIGSRRVIQICAGFMIFFSMLGKFGALFASIPFTIFAAVYCVLFGLVAAVGLSFLQFTNMNSMRNLFIVGVSIFLGLSVPEYFFRYSMAAQRGPAHTKAGWFNDYINTIFSSPPTVGLMVAVFLDNTLEVKDAGRDRGMPWWVPFRSFKGDSRNEEFYSLPFNLNRFFPPS

SEQ ID NO: 10356 - protein, 177 aa, Triticum aestivum
  Clone ID: TRIAE-23APR03-C3854_3.p
MEKGKGLARRWAVELHDASSSSSSPAFPDPPGFTRSAPEAEDAASARQRKETEAAWKGQKAWEVAQAPFKNLMMMGFMMWMAGSTVHLFSIGIVFSALWQPFNALRSVGKVFEPFKDPRVDTLAPKLLFTALNLAAMGLGVWKLNTLGLLPTNASDWVSSLSPAREVEYAGGGIPLM

SEQ ID NO: 10357 - protein, 361 aa, Triticum aestivum
  unsure (1)..(361): unsure at all Xaa locations
  Clone ID: TRIAE-23APR03-C385_1.p
MARAPLLAALVVAVVVASSLGHGASAAEPPVARGLSFDFYRRTCPRAESIVRAFVQDAVRKDIGLAAGLLRLHVHDCFVQGGDASVLLDGSATGPGEQQAPPNLTLRPSAFKAVNDIRDRLXRECRGAVVSCADVLALAARDSLVAAPGPHYPVPLGRRDCRRSATRQEVLSDLPAPSSNVPSLPALLRPLGLPATDLRTISGGHTIGQAHWSSFEDPLFPRPELTLNPPFLARLKRTRPAKGTDRRTVLDVRTPNVFGQPVLCKTWMNRXGVFISNRALFTQTTSPGPSVXRFARNQRGNFFEQFGVSIXKMGQMXVRTSDLGKVRRNCSARNPGPAAADELQWPSVVQTIVDAAAERLG

SEQ ID NO: 10358 - protein, 277 aa, Triticum aestivum
  Clone ID: TRIAE-23APR03-C3871_1.p
NLHMLGMIYGNLKPENVLVREDGHIMLSDFDLSLRCDVTTKLLKCSHPGLDPRQKRNQPYCVQPVCIEPACIQPACVTTTTCFSPRFFSSKSKREKKEKKAKADMATQVRPLPELVAEPTDARSMSFVGTHEYLAPEIIKGEGHGSAVDWWTFGIFLYELLFGKTPFKGSGNRATLFNVVGQPLRFPESPVVGFAARDLIRGLLIKEPQHRLAYKRGATEIKQHPFFEGVNWALIRCATPPDIPKPVEIPRPGASTSQKATPSAEKGPDNYLEFDFF

SEQ ID NO: 10359 - protein, 262 aa, Triticum aestivum
  Clone ID: TRIAE-23APR03-C388860_1.p
MAFSRLLPSRRLLSALLHTPTPIPAARVTGAAAATATLSAHTLHPARFFSATRRLGPGAPRQRAADIGARARQLQSRRLWTYALTFGCAAGFVVTVLATFQDQLVFYLTPTDALARFATDPSKTRCRLGGLVLEGSVAHPSSSSSEIEFVVTDLVTDVLVRYEGALPDLFREGHSVVVEGFLKPLTDDLRRDWAGRKVSDKALEGQCFLRGTEVLAKHDEKYMPKEVGEAIERNKKQIEADAAAAAAEENAAVAVDGAKANS

SEQ ID NO: 10360 - protein, 118 aa, Triticum aestivum
  Clone ID: TRIAE-23APR03-C3888_1.p
MGCAGSTPKGAAAAGGEATKKVRKPKPWKHPQPITIAQLRQMRDEFWDTAPHYGGRKEIWDALRAASEADVALAQAIVESAGVIVSNADLTLCYDERGAKYELPKYVLSEPTNLVQDS

SEQ ID NO: 10361 - protein, 328 aa, Triticum aestivum
  Clone ID: TRIAE-23APR03-C38958_1.p
MSEDKGRSRGGARVKVREAVCNAVAGGSAGVISATVLCPLDVLKTRLQVYGPPSSRSPGPAPPARALPPPGQHIPLTDGLPGLHRGQALPGVSLGPSPAVAAPVPTCAGAFSVYNYVRGLLRSQDTKNGELSIQENILAASCAGIATAVATNPLWVVKTRLQTQGMRPGVVPYTSVLSALRRIAAEEGLRGLYSGLLPSLAGVTHVAIQFPVYEKAKLYIAKRDNTTVDKLGPGQVAICSSGSKIAASLITYPHEVVRSKLQEQGRVPHGAIRYIGVTDCIKQVLQKEGIAGFYRGCATNLLRTTPNAVITFTSYEMINRLMHQLLSS

SEQ ID NO: 10362 - protein, 335 aa, Triticum aestivum
  unsure (1)..(335): unsure at all Xaa locations
  Clone ID: TRIAE-23APR03-C38979_1.p
IPPSSSALLSLSLSTSVSDPPLPTSSLGSATRCRSSGCGAAESEQEPQGGGAPGGVDEDLTLIIRRGDWTEDGDHALARAAAQSRAGRWSPLPRAAGLRRTGKSCRLRGLNYLRPDVLRGNCTAHELLRILDYYSRWGXRWSKIAXQHLPGRTDNEIKNYWRTRVQKHAKQLNCDVGSATFKDAMRYLWMPRLVERIHAAAGDPTIGDTSCASGVRSMATTPPPPHIPTTTLPPARSPPAGRHRRVRSRRSSAARRRTCKSMAAARRQRAAGTGCRTRTKSSGPCICRSSLMTVVFSTSTTSLADGCRASPTSAFRRTISGASRTYGRCNEFSSY

SEQ ID NO: 10363 - protein, 453 aa, Triticum aestivum
  unsure (1)..(453): unsure at all Xaa locations
  Clone ID: TRIAE-23APR03-C39020_1.p
MARPEENAKFPSCDAYFDTIQSKKKLPLALQESLTAAFAQIPVASFPDVPSGRVTEIPGETSVLDAVRILSEHNIRAAPVLNPEPGVPADWQGRYLGIIEYSAIILWVLDNAXLAAVALSAGSATAAGVGMGAVGAVGVAALGATGPAAVAGLTAAAVGAAVAGGLTAEKGVAKDGVTAADHLGEDFYKVLLQQEPFKSTTVRSIVESYPWSPFVPVTLDSSMLAVLLLLSKYRLRNVPVIEPDKPVIKNFITQTGVVKGLQQCKGRDWFDYISALPLSDLGLPFMSLDEVITVNSDDLILEAFKCMKDNKIGGVPVVEGPKRKLVGSVSIRDIRFLLLRPDLFSDFRHLTVLEFMNALGSTLPDSGGNGXVKPPLTCAPDASMGSVIDSIGSRITHRIYVVDGDFEVVGVVTLRDVISCFIHEPPGFCDSYLASAMEKLEDKGDADSSVENS

SEQ ID NO: 10364 - protein, 217 aa, Triticum aestivum
  Clone ID: TRIAE-23APR03-C39030_1.p
MAPKNALPVAVAAAADAGMEPRFRGVRKRPWGRYAAEIRDPARKARVWLGTFDTAEAAARAYDAAALHYRGPKAKTNFPVGTVAAFAHVPLPPPKALAVSPSSSTVESSSRDTPAAAPAAPAAAAPAPPPALDLSLAMPVMVAPHPPARPSNQRRTATTAAAHAPAPCRSAAISGMNKVASREEEQSDTGSSSSVVDASPAVGVGFDLNLPPPVEMA

SEQ ID NO: 10365 - protein, 171 aa, Triticum aestivum
  Clone ID: TRIAE-23APR03-C390460_1.p
MASGGIKTMASGLLFLNLIMYVVVAVIAGWAVNYSIEDSAHSLRGASPPVRLFPVYFPMGNLATGFFVIFALLAGAVGISTSLTGLRDVTEGYPASMMSAAASALVTWTLTLLAMGLACKEISIGLRPPSLRALETFTIILAGTQLLCVGSLHAGANAAIVQTPMGVRARV

SEQ ID NO: 10366 - protein, 340 aa, Triticum aestivum
  Clone ID: TRIAE-23APR03-C390554_1.p
MAAPPDSKSDKSPEELLCAAAEAGNDDAIAEIISSGADPTYFDASGMTPLMRAASGGHAAAARLLLDAGAPWNALSPEGLSAGDLTSDPATYDLLLDHALRSELILGTVARRQAASANSSDGVPAETYLDSRVSFSEDRVMDAESKAVMMEWERPLMEAHARAVCAAGGGKVLNVGFGMGLVDQAIQRYEPEEHTIIEAHPEVYARMLKLGWGEKKNVRILFGRWQDVIPQLGSYDGIFFDTYGEYYEDMREFHEHLPKLLNPGGVYSYFNGLCGDNAFFHVVYCQLVAMELASLGYSTQFVPLPVRDCLKAEVWEGVKQKYWQLDTYHLPVCQAESESE

SEQ ID NO: 10367 - protein, 390 aa, Triticum aestivum
  Clone ID: TRIAE-23APR03-C390674_1.p
MALPNMAGDALRVVDLPGRGRALLAARDILEGEVLLSESPILLYPSSLASLSSYCSACFRSLPPPPHTPCPSCRAAAFCSPACAAASHPRLLCAALSSGLAAAPEAQQEPLLFLLSAYSLQEPSLSAILSLSSAPSPTQQQDAAGLHAAVASVAPPHTLPAGFSLDLTVALLSKDRTNSFSILEPYRPDVPLEVRKARCCAVYPRASLLNHDCLPNACHFDYADRPGPGNTDIVVRSLHGITEGKEVCISYFAANWRYADRQRRLLEDYGFRCECDRCQIESKWKFDDDNDGADGDDTMEEEHGKEVAEDGGDEGMEQEEGSDDDDDDFPHAFFFVRYLCDREDCYGMLAPLPPLPNGELSHVFECNACGQLKKEEDEDEPDAGDCSMDQ

SEQ ID NO: 10368 - protein, 414 aa, Triticum aestivum
  unsure (1)..(414): unsure at all Xaa locations
  Clone ID: TRIAE-23APR03-C390860_1.p
CCSDQVAGGGPRPVGARDATRHLPPLLLRQGSLSYPHGAPPHLRRVDPPPRRDKSRWPGRGRWCPMAGRLVAAADDDVYLNISCTGEGVPFVAASASCALEQAMTAPWRWRLREFSVRHPGAXRALATPWLLMQVTEDGVGLRRVGVTWNHVMADGAGIAQFLQSVGGLARGMGAPSVAPVRSGATIPPIPTPVVAALRSQMQVLTEELASLDVMIPSSLISRVKAECSGGSTTFEVVAAALWRSRTRAIFSGSGNGDPDAPAMLCFPKNVREKVGAEHGYYGNCLSSQLVLATNGTVASSEIKDLVKLIKGHADILDLLKNGGAASGVDLGRLMSSPRYHTIAVSSWRNLGMEATDFGGGKPARAMWQPENSAGFLCVVCPPCKGKDGVNVLSRCVTPEHAEAFLRELAALDM

SEQ ID NO: 10369 - protein, 233 aa, Triticum aestivum
  Clone ID: TRIAE-23APR03-C390_1.p
MAGEGDIKLLGMVVSPFVVRVRMALHMKGVSYEYIEQDLFNKSELLLRSNPVNKKVPVLIHGGKPIYESLVIMQYADEVWSGKGASILPADPHERAVARFWAAYVDDKMFPAYIDIMKAATEEARAEKAKEALVGLANLEEAFAQCSKGKPFFAGDSVGYLDLAVGCNLFWLEAIRKMFGVTFFDVGKTPLLAAWAERFAGTEMAREVVPDADSAVVFAKKLQARFGSNTSAK

SEQ ID NO: 10370 - protein, 269 aa, Triticum aestivum
  Clone ID: TRIAE-23APR03-C391301_1.p
MADGKRSVAETFSRLRERGKTAFIPFITAGDPDLATTSKALRILDSCGSNVIELGVPYSDPLADGPVIQAAASRALKKGTKLGSVLAMLTEVIPELSCPIVLFTYYNPILKNGVRNFMAKIKQAGVHGLVVPDLPLEETTLLRSEATMHNIELVLLTTPTTPTERMKEITKASEGFVYLVSAVGVTGARSNVNLRVEHLLKEIKQVTDKPVAVGFGISTPEHAKQIAGWGADGVIIGSAIVRQLGEAASPEEGLRRIEEYAKSIKAAIP

SEQ ID NO: 10371 - protein, 429 aa, Triticum aestivum
  Clone ID: TRIAE-23APR03-C391506_1.p
MTSTPTVTKSPPALIPPAGPTPCGTLPFSSIDKTVAGSGFVNLMQVFPPPSISAARKDQGAVAAVAAMRNGFARALVPYYPVAGRIASSGLAVDCTGEGIWFVEAAASCTLADVDGLDSCPLLIPGELLLPRPPPGEKLSDLILIAQATRFTCGGFAVGIRFSHAVFDGHGAAQFLTAVGELARGLKAPSVAPVWDRDAIPEAPSPLPGQLTEFRLVTQVVDISAESIARVKDEFKQAAATSTGEVCSTFDAVTAVVFKCRALALASALPDETEVRMAFAASTRHLLRGVLPTVEGYYGNCVFLACATRTGKAVREATLAEVVGAVREAKEAVPARFAGWMRGVEQYDVPPLDYSTVTLSDWSRLGFDEVDYGFGAPGYVFPLNDHVNFVAALNYVRPPAPRRGGIRVVLRCVEEPHAAAFAVELAKFA

SEQ ID NO: 10372 - protein, 219 aa, Triticum aestivum
  Clone ID: TRIAE-23APR03-C391_3.p
MAPVKVFGPAMSTNVARVLVCLEEVGAEYEVVDIDFKAMEHKSPEHLVRNPFGQIPAFQDGDLLLFESRAIAKYVLRKYKTNGVDLLREGDLKEAAMVDVWTEVDAHTYNPAISPIVYECLINPLMRGLPTNQTVVDESLEKLKKVLEVYEARLSRHEYLAGDFVSFADLNHFPYTFYFMATPHAALFDSYPHVKAWWERLMARPAVKKLAAQMVPKKP

SEQ ID NO: 10373 - protein, 526 aa, Triticum aestivum
  unsure (1)..(526): unsure at all Xaa locations
  Clone ID: TRIAE-23APR03-C392577_1.p
MVLCLLVSSPATLRCCLLGLALRWQVRRLVYXTWRRRRRLQPARRAERRGATPRRPARRXDLGDYGRQGKEASSRALPLRCXDARXRDVALVPLPQASGDDGKTCVSWFGPXPKVTIADPXVTREVMSNKFGHFEKLQFPTLTRLLAGGVAVYEGEKWVKHRRILNPAFHIEKLKFMMPAFSACCEELVSRWTQSLGSDGWCEVDVCPEFQTLTGDVISRTAFGSSYLEGRRIFELQSVQADRIVAEVKKIFIPGYMSLPTKKNRLMRQTNNEIEPILRGLIEKRMQSMQQGESTKDDLLGLMLESNMRGTDDKGQPILGMTIEEVIEECKLFYFAGSETTSVLLTWTMIVLAMHPEWQDRAREEVLGLFEKKKPEYDGFSKLKTVTMILYEVLRLYPPAVAFMRKTYKEIEIESITYPAGVIIELPVLLIHHDPDIWGSDVHEFKPERFADGIAKASKDPGAFLPFGWGPRICIGQNFALLEAKMALCMILQHFEFDLGPTYSHMLHNQKMLRPMHGAQIKLRAI

SEQ ID NO: 10374 - protein, 511 aa, Triticum aestivum
  Clone ID: TRIAE-23APR03-C393780_1.p
MASSSLFAAGRRLLHLGRGRLLQGRVRPHNPTPLLLPVRAASSPPSNSAERPPRRPPGLQSTLWPLGHPDTLLVPEIERWAEKPRNRLRPVELERIVKELRKRRRHRQALEVSEWMSAKGHVRFLPKDHAVHLDLIGQVRGIGAAEAYFNQLPDKDKTEKPYGALLNCYTRELMVDESLAHFQKMKELGFVFCSLPYNNLMGLYTNIGQHEKVPSVIAEMKRSGIMPDNFSYRICINSYGTRADFFGMENTLEDMECEPQIVVDWNTYAVAASNYIKGNLREKAISALKKAEAKIDIKDSDTYNHLMSLYGQLGDKSEVKRLWALQMSNCKRHINKDYTTMLAMLVRLDEIEEAEALLKEWESSENTFDFHVPNVLITGYRQKDMLDKAEALLDDFLKKGKMPPSSSWAIVAIGYAEKGDAAKAYELTKNALCVYAPRSGWIPRPAMIEMILKYLGDEGDLKDVETFIQLLQAAMPMNLDMTDVLSRARMREEKKAGDAEKEALSSTKASG

SEQ ID NO: 10375 - protein, 359 aa, Triticum aestivum
  unsure (1)..(359): unsure at all Xaa locations
  Clone ID: TRIAE-23APR03-C39466_1.p
MHHHHLPVAAAAAPDAAAGPEPPPSDPNHPRSLLAPLSTVAAFTXALVLMLCLSLASTPFPLPFHLPLRRPRRSPILWSIGSSPSASASAPTTGHFVQVYSNGDVYEGQFNRGRCTGRGVYYYYMSGRYEGDWIDGMYGGFAVQTWARRCRCTPSVVRDQFLPRFKHVYXNGDVRSGGWSLGQLEGYGVHTCEDGSRYIGEFKRGVKHGLGHYHFRNGDTYAGEYFADRMHGFGVYSFANGHRYEGAWHEGRRQGLGMYTFRNGETQAGHWQNGVLDTLSTQNIVPGSAIAVNHSKVLNAVQEARRATEKAYDVPRVDDKVNRAVAAANKAANAARVAAVKAAQKRIPNNNDDLPLSIV

SEQ ID NO: 10376 - protein, 249 aa, Triticum aestivum
  unsure (1)..(249): unsure at all Xaa locations
  Clone ID: TRIAE-23APR03-C3950_1.p
MLPLRGDLGYGGGSRRCASAGPSADVSTKETKALEMARLLSGATIVASXVVNHNLSPEDYIYIPVNEQQLMVNEVTSTAPTADLEQPTEANASPTSVYASKAXHDVMTTVIXARGSAIRQDAVNKAKSFDERHQLRANASARISSFDRRVGLSEKLNTGISAVNEKVKTVDQRLHVSDKTMAALLVAERKLNNTGSAVKTNRYVSAGTSWLNGAFSKVAKAGHVAGSRTREKFQIAVSNISAKGPAVVA

SEQ ID NO: 10377 - protein, 427 aa, Triticum aestivum
  unsure (1)..(427): unsure at all Xaa locations
  Clone ID: TRIAE-23APR03-C395_217.p
MSLTEVRIGEEPSSRGGSTAVIWGASPQMRCERKKDRVEVNPELLAAASAQAEVMTTTIGKTTRVIGWYHSHPHITVLPSHVDVRTQAMFQLLDPGFVGLIFSCFSEDAQKVGKIQVIAFQSLDGTQNTQRAIVPVITNPVINPEPSWGSSDNSLALIEGIEQDTGDSRASNGSKVWGRSQDMDLYSPLDTNHSARLPIENAIVPFEPDNSAGPSVDQDGSDLSPSIQEALHRSTMDISGAEYKRKEVPLKVFPTRHLLKLDTTLSSYCDMQRVLFEEEQSAYNQAMLQNICDGKMHPLTSMHHTSTYNASLCKLMEYCLTPAITVLQXDRFERKRTSGWAMLVEEHKQLEAEQSTKTGLLTVRCPEGLPMGITSPKGPRTITFKQDKGAYNPNTTEEVPDALLPILHGGYPILGLPDLLERKLSSG

SEQ ID NO: 10378 - protein, 374 aa, Triticum aestivum
  unsure (1)..(374): unsure at all Xaa locations
  Clone ID: TRIAE-23APR03-C395_237.p
MEQHVLVALALSFVGGLSTSLGALLVIVNPSPDLKRLGLLQGFAAGLMLSISFLDLAHNALNSIGFLKANLWFFAGVLFFGFVVKFIPEPTFVPTTDASKKKTDDDGSGKDMMKKHRRQVLFSGIITXAVGISLHNFPEGMAVFLGSVKGLRVGVNLAFAIALHNIPEGVAVALPLYFATKSVSFFLAYKSKWQAFKYATLSGLAEPLGSIXVAVLFPSNLNPEILEGLLASVGGVMAFLTLHELLPLAFDYAGQKQAVKAVFVGMAVMSASLYFLEISLXKEISLHTAPQLYQLFIVYEARELCHTSTFLCAKARTKKQDGIAFAMCSIHYYSSSLCTVVYYSLRKLLVLKMDVSRKHLDTSIFATSNSERRE

SEQ ID NO: 10379 - protein, 258 aa, Triticum aestivum
  Clone ID: TRIAE-23APR03-C395_254.p
PNSNPNPRTHRRWRAAGRSEKSGGGCGRCCLGFLLKLLAFLQAFAALSAVLYAASILSRWARHHELHIHHLLPDLWFACAVMAAGLLYCAILLAGYVAAEVSSGCCLCFYTGLAMVMMLLEAAVAGRILLNEHWIQDLPHDRTGELENLVSFVNANLDLCKWAALATVATQALSLFLAMVLRAMVSPTSGDYDSDEDFVVIRRPLLIARGAPSYLPTTADPRGGHPNLWSSSMRQKYGLNSSGDYTYNTLGQNAVPPQ

SEQ ID NO: 10380 - protein, 241 aa, Triticum aestivum
  Clone ID: TRIAE-23APR03-C395_255.p
MSKLFHSACKAARSLIASSSAPAPRAASSLLADGRNAALATLANLGRNSTLPAAYAHHLHTNASSHGYAWIAAIPAAAYMLQDQDVHAAEMERTFIAIKPDGVQRGLISEIVSRFERKGYKLVAIKLVVPSKQFAEKHYHDLKERPFFSGLCDFLSSGPVLAMVWEGEGVIKYGRKLIGATDPSKSEPGTIRGDLAVVVGRNIIHGSDGPETAKDEIALWFQPKELVSYTSNEEKWIYGVN

SEQ ID NO: 10381 - protein, 215 aa, Triticum aestivum
  unsure (1)..(215): unsure at all Xaa locations
  Clone ID: TRIAE-23APR03-C395_261.p
MAAATSSSLLGRRFLLSRRFVSSPFRPLSSTAPPSSHSAAVSDAEPDPEPPADQGNQYRSQPRPPNTTRTLENGLDHGIYKAIMVGKVGQEPMQKRLRSGKTVVLLSLGTGGIRNNRRPLDNEEPHQYAERSSVQWHRVCIYPDRLGXSLALKHVKTGSLLYLEGNIETKVFSDPITGLVRRIREIAVRGNGRLLFLGNDGNGPKIGEVKGVGYF

SEQ ID NO: 10382 - protein, 210 aa, Triticum aestivum
  Clone ID: TRIAE-23APR03-C395_266.p
MAAPRALALAVLLAIAVTNAEAASVVVGLAKCADCTRRNIKAEEAFKGLQVAIKCKNVHGDYESKAVGTLDRTGAFSVPLAADLHGADCVAQLHSAASSAPCPGQEPSKIVPVSEGTTFGVVAGDNITTPSAAASPECASMTLCGPIKKHIIEHFHHKKPVPPKPEPKPQPHPDYGPVPKPEPKPQPHPDYHPVPPTPTYGGGGGYHGHH

SEQ ID NO: 10383 - protein, 309 aa, Triticum aestivum
  unsure (1)..(309): unsure at all Xaa locations
  Clone ID: TRIAE-23APR03-C395_299.p
KESTALVTANPHRLAVGRPVPHPPDSSPLPRRGQNPTPRSSQLPRSRNPRRRRGHGEGAPLLPSPGGPQPLHTGPPPPPYPWARRLPATXFAPPRPSTSSAANPLPFMSFDIPAQSNSTPPIFTGPIGGSSASFEDEPPLLEELGINTRQIWRKTLSILHPLRSADPSLHADADLSGPFLFLLSFGLFQLLAGKFHFGIVLGWVTVASLFLYFVFSMLSGGRRGDLDLYRCVSLVGYCMLPMVIFSAVSLFLPRGGGLIFGMGMGFVLWSTRVCTRLLAELASSGDEHRGLIAYACWLVYMLFSLLVIF

SEQ ID NO: 10384 - protein, 338 aa, Triticum aestivum
  Clone ID: TRIAE-23APR03-C395_315.p
MGMQSVCGGAGRWRRAVAWWGAVLVLAHLLSCGSAGLLDTNPGLAYNFYATTCPSAEATVRSITWAQVAANQALPGQLLRLHFHDCFVKGCDASILLDNAQSEKTAPPNGSLGGYPVIDAIKAQLEKACPGVVSCADIVALAARDAVSYQFKASLWQVETGRRDGPVSLASNTGALPSPSAGFNGLLQSFAAKGLDVNDLVALSGAHTIGKASCSSVTPRLYQGNATSIDPLLDSTYAKTLMNACPNTPASTSTVDLDGATPFKFDGNYYTNLQNKRGVLASDAALTQNAAAATIVNDLTNPIKFYAAFSMSMKKMGRVDVLTLKNGQGKIRTKCNVP

SEQ ID NO: 10385 - protein, 210 aa, Triticum aestivum
  Clone ID: TRIAE-23APR03-C395_316.p
MAAPRALVLGFLLVIAIANAEAASIVVGLAKCADCTRKNIKAEEAFKGLQVAIKCKNVNGEYESKAVGTLDGTGAFSVPVAADLHSADCVAQLHSAASNAPCSGQEPSKIVPVSEGTTFGVVAGAKTNVLASPECASATLCGPIKKHIIEHFHHKKPVPPKPEPKPQPHPDYGPVPKPEPKPQPHPDYHPVPPTPTYGGGSGGGGYHGHH

SEQ ID NO: 10386 - protein, 368 aa, Triticum aestivum
  Clone ID: TRIAE-23APR03-C395_322.p
MAHERRGAAASSAAAHDAAGEALFVDVVHEAPLSGRRQPRSIVGGTLYCILLAGYAGIVIAAPWIFVLIPEMILPLLCSCNGLLLIITGIFQQYWVHQVTKVRLQGYYDLSQKLKRIARVPFAAIACGTALLLLILVWQPRVEVLSISVLLRIALVVEVISAGCFMSLYIGHIHKYNSLNEQPDILRPLYSALQPSSSLEEIRYYDSRLSDQQMALLQYQRENIHYLSEEVLRLQESLSKYHRSVAASTPQVDLTHLLASRDQELRALSAEMNQVHSELRVARGLIAEKDSEIQLIRGKNNQYVEENERLRAILGEWSTRAAKLERALEAERVSNMELQKNRAKLRRQSTREKIPDIPQSDSSSIGVL

SEQ ID NO: 10387 - protein, 309 aa, Triticum aestivum
  unsure (1)..(309): unsure at all Xaa locations
  Clone ID: TRIAE-23APR03-C395_324.p
SISIRICIARLPHCSLSKQPNRTPKARQETQKRAKQTKQQQQQQRKKEKRGAEPASNXADLGFEATELRLGLPGGGGEGEARSSSGKRGFAETIDLKLKLEPAGEEAPAEEDRADVAVVAAAAAENQEETATDAGAGKMKRSPSQSSVVTSAALPDPAEKPRAPKAQVVGWPPVRSFRKNILAEKSSPAAAAAFVKVSMDGAPYLRKVDLNMYKTYQDLSKALEKMFSSFTIGNCGTPGMNGMNESKLMDLLNGSEYVPTYEDKDGDWMLVGDVPWEMFVESCKRLRIMKGSEAIGLAPRAMEKCKNRS

SEQ ID NO: 10388 - protein, 359 aa, Triticum aestivum
  Clone ID: TRIAE-23APR03-C395_331.p
MAAASFLPLHLPASPRPATVAARAASGVASTVPAATQTSQLEETFGRKGLRFGTDATGAPTAELSVRNGSSLQLRLNDGLVTSYRPKVSWEGGDGCRELLHTVAAAGAVKGGVGLVLNEASSSSSLLGASEWSVADVDSDSYDAVQVELGCGVGGAKLEVSYVVTLYPLSMATAVIVKNNGAKPVELTGAVLSHIKFDKRRGTAVEGLRGCPYCSHPPPAAGFALLTPAEAMKREESGWFGGGGGEEPRQGAWTVEENLYTILKKKVSRVYAAPPEERKKRIYSTAPSKFTTIDQSSGLGFRLVRMGFEDLYLSSPGGLYEKFGNDYFLCTGPASILVPVVVGPGEEWRGAQVIEHDNL

SEQ ID NO: 10389 - protein, 235 aa, Triticum aestivum
  unsure (1)..(235): unsure at all Xaa locations
  Clone ID: TRIAE-23APR03-C395_332.p
MAGADVDVGTELRLXGLPGGGAEAAKAGKRGYEDTIDLKLTLPTGGGMQEDSAGKPEPAADKAKRPAEAAAADPEKPPAPKAQAVGWPPVRSYRRNAMTVQSVKIKKEEETEKQQPAAGAAAGANGSNFVKVSMDGAPYLRKVDLKMYNTYKDLSIALQKMFSTFTATGNEGKMVEAVNGSDVVTTYEDKDGDWMLVGDVPWEMFAASCKRLRIMKGSEAIGLAPRAKDKYKNKS

SEQ ID NO: 10390 - protein, 223 aa, Triticum aestivum
  unsure (1)..(223): unsure at all Xaa locations
  Clone ID: TRIAE-23APR03-C395_337.p
MAAPRALVLCVLLAIAVAHAEAASVVVGLAKCADCTRKNMKAGEAFKAVQVVIKCKNSAGEYESKAVGGLDGTGAFSVPLVADLHGAXCVAQLHSXASNAPCXGQEPSXIVPLSXGTTFGFVAGENTARPSAASXECASMTLCGPIKKHIIEHFHHKKPVPPKPELKPQPHPDYGPMPKPEPKPQPHPDYHPVPPTPTYGSGGGGGGYHGHPLSQFYPRPAQR

SEQ ID NO: 10391 - protein, 325 aa, Triticum aestivum
  Clone ID: TRIAE-23APR03-C395_351.p
MAGYPPPPGSGYPYGAAGGYGAPPPSGQKPPKEGKTSSSSGPDPYHGAPPPQQPYGGGGGGYGAPPSYGQKPPKEGKTSYSSGSDPYHGAPPPQQPYGGGGGGGYGQQPYGAQPPSSAAPYGGPPAAQPYAGGGAGGYGSPFAALVPSTFLPGTDPNVVACFQAADRDGSGMIDDKELQSALSGFSSQSFSLRTVHLLMYLFTNTNVRKIGPKEFTSVFYSLQNWRGIFERFDRDQSGRIDAPELRDALLDLGYSVSPTVLDLLVSKFDKTGGKNKAVEYDNFIECCLTVKGLTEKFKEKDPAYSGFATFGYEAFMLTVLPFLIA

SEQ ID NO: 10392 - protein, 248 aa, Triticum aestivum
  Clone ID: TRIAE-23APR03-C395_356.p
MSSSSKLFQSACKAARSFLASSSAPAAAPRAASSVLADGRNAALATLANLGRNSTLPAAYAHHLHTNAASSQGYAWIAAIPAAVYMLQDQEVHAAEMERTFIAIKPERASREDLISEIVSRFERKGYKLVAIKLVVPSKQFAEKHYHDLKERPFFNGLCDFLSSGPVLAMVWEGEGVIKYGRKLIGATDPSKSEPGTIRGDLAVVVGRNIIHGSDGPETAKDEIALWFQPKELVSYTSNEEKWIYGVN

SEQ ID NO: 10393 - protein, 405 aa, Triticum aestivum
  unsure (1)..(405): unsure at all Xaa locations
  Clone ID: TRIAE-23APR03-C395_358.p
MEHPAPAPEPMLLDEQPPTAVACEKKQQDGEAPYAEGNDAMTGHIISTTIGGKNGEPKQTISYMAERVVGTGSFGIVFQAKCLETGEMVAIKKVLXSQDRRSKNRELQLMRSMIHSNVVSLKHCFFSTTSRDELFLNLVMEYVPETLYRVLKHYSNAKQGMPLIYVKLYTYQLFRGLXAYIHTVPGVCHRDVKPQNVLVDPLTHQVKICDFGSAKVLVXGEPNISYICSRYYRAPELIFGATEYTISIDIWSAGCVLAELLLGQPLFPGESAVDQLVEIIKVLGTPTREEIRCMNPNYTEFRFPQIKAHPWHKVFHKKMPPEAIDLASRLLQYSPSLRCTALDACAHPFFDELREPNARLPNGRPFPPLFNFKHELANASQDLINRLVPEHVRRQAGLAFVHAGS

SEQ ID NO: 10394 - protein, 177 aa, Triticum aestivum
  Clone ID: TRIAE-23APR03-C395_359.p
MASCPSVKNILVLDAEGKRVAVKYYADDWPSASSKLAFEKSLFVKTQKTSARAEADVVMFDGYIIVYKFIQDLHFFVTGGDEENELILASVLQGFSDAVGILLRNNVDKRTALENLDLIFLCLDEVVDGGIVLETDGNVIAEKVSGHGLEGAGSFTEQTISQALATAREHFARSLLK

SEQ ID NO: 10395 - protein, 246 aa, Triticum aestivum
  Clone ID: TRIAE-23APR03-C395_360.p
MARGGRSEKGGGGCGRCCLGFLLKLLAFLQAFAALSAVLYAASILSRWARHHELHIHHLLPDLWFACAVMAAGLLYCAILLAGYVAAEISSGCCLCFYTGLAMVMMLLEAAVAGRILLNEHWIQDLPYDRTGELQNLVSFVHDNLDLCKWAALATVATQALSLLLAMVLRAMVSPTSSDYDSDEDFVVIRRPLLIAQGAPSYLPTTADPRGVHPNLWSSSMRQKYGLNSSGDYTYNTLGQNAAPPQ

SEQ ID NO: 10396 - protein, 445 aa, Triticum aestivum
  Clone ID: TRIAE-23APR03-C395_363.p
MASRIASRLLRRSSPTLGLLRSYTHVRNYSSQLSGLIPVGPQSSKLTRRNNYFPNASPYQLWSRSFASDNGDKFEAVVPFMGESVTDGTLANFLKKPGDRVEADEAIAQIETDKVTIDVSSPEAGVIEKFIASEGDTVTPGTIVAIVSKSAAPAETHVAPSEEAPQKESPPVKAEEKSPKAEEKPTKVEPPKKQAPKPTPSKTSPTEPQLPPKERERRVPMPRLRKRIANRLKDSQNTFAMLTTFNEVDMTNLMKLRSDYKDEFVKKHGVKLGLMSCFVKAAVSGLQNQPIVNAVIDGDDIIYRDYVDVSVAVGTSKGLVVPVIRDADTMNFADIEKGINNLAKKATEGALSIDEMAGGTFTISNGGVYGSLISTPIINPPQSAILGMHSIVQRPVVVDGSILARPMMYLALTYDHRLIDGREAVYFLRRIKDVVEDPRRLLLDI

SEQ ID NO: 10397 - protein, 214 aa, Triticum aestivum
  Clone ID: TRIAE-23APR03-C395_364.p
MAAATSSLLGRRLLLLSRRFVSSPLRPLSTTGPPSSHSAAGSDVEPDPEPPADQGNQYRSQPRPPITTRPLENGLDHGIYKAIMVGKVGQEPVQKRLRSGKTVVLFSLGTGGIRNNRRPLDNEEPHQYAERSSVQWHRVCIYPDRLGSLALKHVKTGSVLYLEGNIETKVFSDPITGLVRRIREIAVRGNGRFLFLGNDGNGPKIGEVKGVGYF

SEQ ID NO: 10398 - protein, 273 aa, Triticum aestivum
  Clone ID: TRIAE-23APR03-C395_369.p
HEALAKVIFCIGGVEGLQTCLVALLSRWFKPAARSFVKVPFFGAVSYLTLAVCPFCIVFAVLWAVYRRMPYAWIGQDVLGIALIVTVIQIVRIPNLKVGSVLLGCSFLYDIFWVFISKMLFHESVMIVVARGDNTDEDGVPMLLKIPRMFDPWGGYSIIGFGDILLPGLLVAFALRYDWAARKTLQSGYFLWSMVAYGSGLLITYVALNLMDGHGQPALLYIVPFTLGTFISLGKKRGELRNLWMKGQPPRVCTHSHHPLKDSADSASHVISS

SEQ ID NO: 10399 - protein, 252 aa, Triticum aestivum
  Clone ID: TRIAE-23APR03-C395_373.p
MSNTSGARRAARRQSLDGSADKVVVDLDASSPVAGNHHGLSVFPGARTSPIDVEALDDEVQALSPSQVPPPGVNRRTRGQPVTQFSLDEDAVLEENWRIIRQCATPFYLDEDAAMEENRRTRSQFLTPLYLDEDAALEDNAAMPSHNTWNKRQRVAPLICLSPEREEGSSLQSNNAVQISQEPAKVVVPKEPNFTCPVCLNKLVEPSTTKCGHIFCAECIKQAIQFQKKCPTCRKALRKNNFHRIYLPNSDG

SEQ ID NO: 10400 - protein, 330 aa, Triticum aestivum
  Clone ID: TRIAE-23APR03-C395_380.p
MALSLRAAASLASPPSGARPGRRPASVVRAAASPAALGKRNRRREQNVSGEFFVDHRCIDCATCRWMAPEVFKRVDGMSAVAAQPSSEEQRTKAPQALLSCPTASIHTDKPAKDILQVQNTFPLPIDDDLPGVYLCGYHSESSYGATSYLIVHPEGNIMVDSPRYTPKLVDKIEKLGGARYMFLTHIDDVADHRKWAERLKCERIIHSGDVVDITADVEWKLTGSGPWNIGNDFELIHTPGHTEGSVCLLYKPLKALFTGDHVAKSEYSDELNLFRMYSKQSVNLQLDSMRKLLDLDFEWYLPGHGYRIRYEDVQAKNAAIESLLANYKN

SEQ ID NO: 10401 - protein, 399 aa, Triticum aestivum
  unsure (1)..(399): unsure at all Xaa locations
  Clone ID: TRIAE-23APR03-C39629_1.p
PTEWRPVALAAPPPXGAAALLSLVFLWLLQASAGAAAAAACPLLPLFNFGHSNSATGGASAAFGAAATPNTGAFFSMPAGLXCDSGVATAGIADNFGVLFLCGYLQSGRWRSFGRLRLPTAAPRLNRLRHARRPLLRRPPRLRLHRCPKTWEYITEVRTSTHKGGIYRELLPKAEYFSQALYTFDIGQNDITAGYFANMTTDQVIASIPELMERLTSIIKNVHELGGRNFWIHSTGPIGCLPYALIHRPDIAAVKDKVGCSVTYNKVAQLFNQRLKETVARLRKTYPDAAFTYVDVYAAKYKLISQASKLGFDDALLTCYGHDAGPYNFDPKVGCGGKVLVKGKWVVLGKSCDDPSRRVSWDGVHFTEAANKFVFDQIVGGGLSDPPVPLRQACRSKGQ

SEQ ID NO: 10402 - protein, 377 aa, Triticum aestivum
  Clone ID: TRIAE-23APR03-C396_1.p
MAAAAASDLESKAKEAFVDDDFELAAELYTQAIEAGPATAELYADRAQAHIKLGSYTEAVADANKAIELDPSMHKAYLRKGSACIKLEEYQTAKAALEVGSSYASGDSRFTRLMKECDDRIAEEASQVPVKNAAAAVASATSSGASSGATTVATEAEDQDGANMENAQPTIEVPSKPKYRHDYYNTPTEVVLTIFAKGVPADSVVVDFGEQMLSVSIELPGEEPYHFQPRLFSKIVPDKCKYTVLSTKVEMRLAKAEPVTWTSLDYTGKPKAPQKINVPAESAQRPSYPSSKSKKDWDKLEAEVKKQEKDEKLDGDAALNKFFREIYSDADEDMRRAMMKSFVESNGTVLSTNWKDVGKKTVEGSPPDGMELKKWEY

SEQ ID NO: 10403 - protein, 108 aa, Triticum aestivum
  unsure (1)..(108): unsure at all Xaa locations
  Clone ID: TRIAE-23APR03-C3970_2.p
MFSTAAADSIKDVPRGGPMVEYEKRIASGDLVDGDSFQVDTIQQLQRLYEDLVENEEACQLDRYQSSEKSGRRRWLWSRLIAQPSTQSPVKGLYLYGGXGTGKTCHIG

SEQ ID NO: 10404 - protein, 167 aa, Triticum aestivum
  Clone ID: TRIAE-23APR03-C397_31.p
MGNINSCWATHPQPPVSMTSSVCTTEATTAVHKFVVNYSLLDGMGADKYVTSSTFRVGGYDWWIDFYPDGDSRAPGYVAAFLHLVGEEAAPAGVTVKFTLSLLKQDGKVHRDSNAPIITRTFETTGTGWGNMMIIKKSKLRGDCFTIRCDLTVIAVSPELLASTRVH

SEQ ID NO: 10405 - protein, 159 aa, Triticum aestivum
  unsure (1)..(159): unsure at all Xaa locations
  Clone ID: TRIAE-23APR03-C397_35.p
WFPGSSCPHQQRGRXCSMPTKMVAIHTGSDAQRDILGEPAGRSQHCEIKKDERGVRATQTMRRLTSQRRHLVAFGSGNHATRSGSWKQAPSTRLRRRLLGQTLSRRHACSGSSSKYFARKYWACRQHAAPAAAVKEERSYFSCRNLVAKQMLDVSSDVS

SEQ ID NO: 10406 - protein, 93 aa, Triticum aestivum
  Clone ID: TRIAE-23APR03-C39871_1.p
MLFFSYFKELVGKEVTVELKNDLAIRGTLHSVDQYLNIKLENTRVVDQDKYPHMLSVRNCFIRGSVVRYVLLPQDGVDIDILHDATRREARGG

SEQ ID NO: 10407 - protein, 164 aa, Triticum aestivum
  unsure (1)..(164): unsure at all Xaa locations
  Clone ID: TRIAE-23APR03-C39926_1.p
MEIRPKSVPRRGMDTRPRSAPPSQPNQADYSSWSLETLKQLVDCTPQEITQAISATELNRCLASILIAFIVVVSNWGLDVGXGTITRVLVCTRPLLFLIITNVTIVMSLLMENRDPNARGRQAGISLGSDGLGLMLELGMLLQKASEAMLMDFSICAVIMICFL

SEQ ID NO: 10408 - protein, 367 aa, Triticum aestivum
  unsure (1)..(367): unsure at all Xaa locations
  Clone ID: TRIAE-23APR03-C39941_1.p
MAPTAAEQHTRKAVGLAARDASGHLXSPLAITRRSTGDDDVVIKILYCGICHSDLHSIKNXWKNARYPMIPGHEIAGEVTEVGKNVTKFKAGDRVGVGCMVNSCQSCESCNKGFENHCPGIIPTYNTVDRDGTITYGGYSSMVVVHERFVVRFPDAMPLDKGAPLLCAGITVYTPMKYHGLNAPGMHLGVLGLGGLGHVAVKFGKAFGMKVTVISSSPGKKQEALERLGADAFVVSKNADEMKAAMSTMDGIINTVSANIPMAPLLGLLKPNGKMIMVGLPEKPMEISPFALVAMNKTLAGSCIGGMRDTQEMLDLAAKHDVTADIEVIGAEYVNTAMERLAKADVRYRFVIDIGNTLDKAAATASE

SEQ ID NO: 10409 - protein, 240 aa, Triticum aestivum
  Clone ID: TRIAE-23APR03-C3995_1.p
DTGGCGDDLLGLLLEAWTPHRQGSGGDTMTTDEVIDECKTFFAAGQETTATLLIWTMFLLAVHPQWQDKVREEVLREFPGGDGDDVIPNADILAKLKLLHMVLLETSRLYPPVVYIQRKAASDTVLGGIKVPQGTIISIPIGMLHRDKEVWGPDANEFNPMRFEQGVTKAAKDSKALLTFSLGPRVCTGQNFGIVQVQVVMAMILTNFSISLSPEYVHKPKYLLSLTPRLGMPLILRNLL

SEQ ID NO: 10410 - protein, 346 aa, Triticum aestivum
  unsure (1)..(346): unsure at all Xaa locations
  Clone ID: TRIAE-23APR03-C3_1.p
ENSLPRSRRRLRTPQPSAPAPLPSCRLPPPHPALLSLRAHPFQLPASRPLHTRLRSRPLCSPTSSAPTVSSSSAPPSLRFRFGFPRRGCAADRSRRATTMAAVVSPGDGGLVHDLVSSGVTAGIALGLLRFFEELAKRGVCDQXKLNRKLVHITIGMVFLLFWPLFSSGRYAPFFAALAPGINIIRMLLLGLGIMKNEAMVKSMSRSGDHRELLKGPLYYATTITLATSVLWRTSPIAIALVCNLCAGDGIADVVGRRLGKEKLPYNPNKSYAGSIAMAVAGFLASIGYMHYFHSFGLMEKSWYMTLGFLVVSVAAALVESHPISTELDDNLTVPLTSFLVGSLIL

SEQ ID NO: 10411 - protein, 315 aa, Triticum aestivum
  unsure (1)..(315): unsure at all Xaa locations
  Clone ID: TRIAE-23APR03-C40020_1.p
MQAAASYRGAAGHRRAGHPSRRPPGPSLLLPVSVAGVGRFSDAAVPLRVGSLPLPRARGGGDFARLDARDGEAWQLTRALGLILPGHQKMVHANLLKTAVLSTMSMLIMPLEASAEXCQPTSSFANMPIFIAVALIGAAVGGLLARQRKDELKRLNNQLRQINTALRRQAQIESFAPGLTYAPVGRAGEIEVIVDPRKQQLVVNLKNGKNYMRNQDLDKAVMEFKTALELAESIGDRFEEKKAARGLGASLQRLGQYREAMSWYYKVLALSKETGEDSGCTEAYGAIADCCVDLGDLEGAAKLYDEYISRLQPRD

SEQ ID NO: 10412 - protein, 424 aa, Triticum aestivum
  unsure (1)..(424): unsure at all Xaa locations
  Clone ID: TRIAE-23APR03-C40071_1.p
MGVGRTSRGGPSTAGRPYFPPISAPPASSSPSPPSPPAPPVETASTSVTKTVNGSHHFKIAGYSLAKGIGVGKYIASESFTVGGFEWAIYFYPDGKSAEDGAAYVSLFIALASEGTDVRALFELTLVDQSGKGQDKVHTHFGRSLEGGPYWSKYDLGFHFDGSAFACSXDRYALERLKLLSELKLLXDVAINTVANTLYRIPVPQSDMSQHIGHLLTSGKRTDITFEVDEEMFPAHKVVLAARSPVFRAQLFGPMKDKNMKCIKIEDMEAPVFKALLHFMYWDELPNIEELTGLNTTWVSTLMAQHLLAAADRYALERLKLLSELKLCEDVAINTVANTLALAEQHHCHQLKTVCLKFVASPENLKAVMQTEGFDYLQQSCPSLLTELLEYVAKVGDHAVPPCLYSNEVLDGGDANGRRVKPRL

SEQ ID NO: 10413 - protein, 256 aa, Triticum aestivum
  Clone ID: TRIAE-23APR03-C40128_1.p
MAPRKFFVGGNWKCNGTGDDVKKIVTFLNEAEVPSEDAVEVVVSPPFVFLQQAKGLLRPDFAVAAQNCWVRKGGAFTGEISAEMLVNLQVPWVILGHSERRALLNESNDFVADKVAYALAQGLKVIACIGETLEQREAGTTMEVVSAQTKAIAEKTSDWTNVVLAYEPVWAIGTGKVASPAQAQEVHDGLRKWLHANVGPAVAESTRIIYGGSVNGANCKELAAQPDLDGFLVGGASLKPEFVDIIKSATVKSSSA

SEQ ID NO: 10414 - protein, 286 aa, Triticum aestivum
  unsure (1)..(286): unsure at all Xaa locations
  Clone ID: TRIAE-23APR03-C40294_1.p
TGISRRVQNPPGGWASRRPSPPGDACTAAVAEARTGTEALLSSPDRACLRGWTMDLGTENRLAALLLEEARRLRMQAEKEGVHAYLQKPNVTLRPHSRFRXVNEMWRAREKELELESKMKTRTNGRIDSRSHKRKNDSRDQSPVSKTQRDRPYGASFSSRDSHSSSYSDWEDGLGDDEIEEFLRSRVKRGRGAIGSRMDEPGPYLKPPSGGQDNSISPDARVKEERKRQVYGPEKPLFLRSKSSDEEPPASPLLLSSEASDEGPSPARHEHIRRSKHHHREHKSRK

SEQ ID NO: 10415 - protein, 367 aa, Triticum aestivum
  Clone ID: TRIAE-23APR03-C40341_1.p
MRVHGPHAYDPSFGSRQEQEHVHEHDDEHGHEHLEDFSLFPFDSSLAPTLTSNCGKQPIQQPVPPRRAARMAGGSGEGAAMSPPSSSGVGGGSGGGKRGRDPEEDVYVDNLHSHKRYLSEIMASSLNGLSVGDSLADNIMESPARSESSSCIRDEIISQYSPMSEDSDDYRYFDTQLNPNGSQGDAMVSPSTSPMSSPHRFQKPQAGFLPSSPYPLPSCSLSSVACSHPRRGSENEGRFPSSPNDMCHGADLRRTALLRSVQMRVHGPHAYDPSFGSRQEQEHVHEHDDEHGHEHLEDLGGPERPSCRKSIDNEASGYQGAENSYGRQEHDIDYIHGCTADDVLSGPKFKQEDDNQGNSDASMDKTR

SEQ ID NO: 10416 - protein, 102 aa, Triticum aestivum
  Clone ID: TRIAE-23APR03-C40432_1.p
MMGSRGTSVVLSRAARMRQKLQSALEASALDIEDVSYQHAGHAAVKDNANETHFNIKVISPKFEGQNLVKRHRMVYDLLTDELNSGLHAISIVAKTPTESGS

SEQ ID NO: 10417 - protein, 170 aa, Triticum aestivum
  unsure (1)..(170): unsure at all Xaa locations
  Clone ID: TRIAE-23APR03-C4052_1.p
GCWWRRGRCALPEERGISLVTVCPAVTVGXAPAATDLTCLSIILSRLSADDAYAXALEHIERATGSIPILHIDDLCRAEILVAEEEAASGRYIVCGLNPTAVEIARFLAANYPQYKVNTDRFRDLPEKPRVCISSAKLVKEGFEYKYKNLDXEIYGSVVEYGRALGILPY

SEQ ID NO: 10418 - protein, 365 aa, Triticum aestivum
  Clone ID: TRIAE-23APR03-C40668_1.p
MGEERKAGEQAAEAAARAAEQARELQDAAAALLSRTWAEEEALRRRAAALREDLARLRKAAANAQTEKVHEDLDRASCLISDGDIAAILPSKAHGTFLKLLLGPVNLRARKEVQLKVKEEYNSYRDRTAIVFLGFPMILLFLRSWLWNGCFPALPVQLYQAWLLLLYTTLALRENILRVNGSDIRPWWVCHHYCAMLMALVSLTWGIKGQPDCARKQRGVELFLCWAVMQGFAMMLQNRYQRQRLYTRIALGKAKRMDVVWGETAGVEGQLLLLCPILFLLQVFEGYVGFLLLRTAHKGIIPEWQVVVCGILLIAMAIGNFANTVDTLMVKSRFKAKMKKSKSKRDLAACTSPTRSSLTNSAAGA

SEQ ID NO: 10419 - protein, 186 aa, Triticum aestivum
  Clone ID: TRIAE-23APR03-C40842_1.p
NPPRWRAQRRARAPLDLHGAQVGPLLLAARLVVSSPGLEGCCRCGTRWRHARFRRRAESETVAARGGGLAGCLGARCSSVRYTLVSLASRFIRCLALGLCDCPGVMPELWREPPAGQRGEGASVPGPEPERDAMQCGDRLDFPLPLSLCVLGFCCWASTLIRYFAAAGRAGRGTHCCFVGLGGVLA

SEQ ID NO: 10420 - protein, 311 aa, Triticum aestivum
  Clone ID: TRIAE-23APR03-C40944_1.p
MADSPAQPAPAAAAAAAGNPHKRKNKGKGNPNKKNKKLKGPDDTTRRRRKPSAKFLKLLEKRARDYNSDDDDDAAQVRPRRSQPRPPPKQRDAAPDVGDDLKEAPSSEEEASSSGGESDGEKAVTMFQEGCRAFQAAFTKIMEKKLADNPLGPILSADKKLVAAKLAEEADEHKSKGEARKEKRLAAQKGHKIPENAIDNKEKMLIKVATQGVVRLFNEVSKRQTRKGLNPSRSKDVKSLAKHSVPSNEGQQGQGSSKFSKNIGKGEDEPGWAPLRDTYMLGSKLKDWDKAQDSDVAKPSEVPLDNFSDDE

SEQ ID NO: 10421 - protein, 262 aa, Triticum aestivum
  unsure (1)..(262): unsure at all Xaa locations
  Clone ID: TRIAE-23APR03-C4095_5.p
MASMQAPAPAPAGYPTHGGQAARPQSTAVAVTAASNGAGNPYVQVTPASASPSTCQSIMKALGRYGKLLEDGTRKAADTTGNIWNHREYYSSLLRIMMHAHXHRTFCPGAVRTAPNMADAAVARLAQGTKVYAEGGHERVFHQVFGGVPGEQLRKAYACYLSTSSGPVIGTLYLSTARLAFCSDSPVSYHAPSPTQPPEPMYYKVVLPLNQVRTVSPSASMWRPSERYIQVATTDSHEFWFMGFVSYDKALKHLSDALQRRP

SEQ ID NO: 10422 - protein, 120 aa, Triticum aestivum
  Clone ID: TRIAE-23APR03-C409822_1.p
MACDECRGPNHKQKDCPTLPCHNCGGTLHTRGTCCYTDPVYRVGERCPRCGGFQHGVPGKPPCPVQEAHARPPMCPRCQVPHRPRDCPHRGAEYSGWTSSDRCTQCNETGHFFPDCPNKY

SEQ ID NO: 10423 - protein, 162 aa, Triticum aestivum
  Clone ID: TRIAE-23APR03-C4098_1.p
QKPISIRRRRRRRPRALRPPSTTAAAIANPRPLPTNPRSRPPHRPPPLEQGSLIAGPCREGPAGRRPTSPSRTRRGSAAAGPRKKNQHSRRFVIAVRRLPPEARRPPLTPREERAHDNARALGKALHFAWYFPHVLGGGRGHNPDRVKLCFGLGYLATRRME

SEQ ID NO: 10424 - protein, 141 aa, Triticum aestivum
  Clone ID: TRIAE-23APR03-C409946_1.p
MCTDKAREFFMEGKLDEAEKLFKAALQEAKEGFGLRDPHAASALNNLAEFYRLRKEYEKAEPLYLEAIEILEQSFGPDDIRVGAAFRNLGQYYYIQRRFDQAQTCFERALKIEGRVMGLGNPDYANTMYLLAKVLSQQKKK

SEQ ID NO: 10425 - protein, 103 aa, Triticum aestivum
  Clone ID: TRIAE-23APR03-C409950_1.p
MSGRVKGGKGLGKGGAKRHRKVLRDNIQGITKPAIRRLARRGGVKRISGLIYEETRGVLKIFLENVIRDAVTYTEHARRKTVTAMDVVYALKRQGRTLYGFGG

SEQ ID NO: 10426 - protein, 341 aa, Triticum aestivum
  unsure (1)..(341): unsure at all Xaa locations
  Clone ID: TRIAE-23APR03-C410380_1.p
MDLSVTLALNSPTEHGEQLRRRQHSLSELSYARDEDATKLETTRARLLNVLKRHEDLKERLSRDSDKLIFERLQKEFEAARVAQTEEISIDDEQWNDGLLATIREKTXVHIEAERKAMINLANVPTDSQFQSRTTYRIRNKVIYCLDGARIGIQYETFFAGEPCEIYHCVLESKSFLEKMTVTEHTLPFFLPIREVETDHLSSNAIKFIDHLEEILQSYIDRREQVRLIKELYGNQIGELFYSLPYTLIEFTLEDFECKVTVSIRYSDLILTLPSQARVLAWPLRSAKRISAADRRAQPVPSRLSYAESALKTLSLPEAYAEIVLELPRALKQMFYSQESD

SEQ ID NO: 10427 - protein, 147 aa, Triticum aestivum
  Clone ID: TRIAE-23APR03-C4104_1.p
MQLPGGKPILVSLVAGVAMLSPLLAMSGVFNRHSRIWCAIFLAAKFLKVKLPADGEKVWWQEFDVTPWQLEEVSNQMMELYGPPPSQGNNTKSSSASLADQHAAEKAPGVPRSLLRIKLIQHPDNRACQAVTGMTTITLKGKTQTRG

SEQ ID NO: 10428 - protein, 454 aa, Triticum aestivum
  Clone ID: TRIAE-23APR03-C410_104.p
MEVFYYLVFGGLAAVVAALELGKSGKDRVATPTAFNSFKNNYVLVYSLMMSGDWLQGPYVYYLYSQYGFDKGDIGRLFIAGFGSSMLFGTIVGSLADKQGRKRACITYCITYILSCITKHSPQYRILMIGRVLGGIATSLLFSAFESWLVAEHNKRGFDPQWLSITFSKAIFLGNGLVAIVAGLFANLLADNLGFGPVAPFDATACFLAIGMAIILSSWGENYGDASEGKDLMAQFKVAAKAIASDEKIALLGAIQSLFEGSMYTFVFLWTPALSPNEEDIPHGFIFATFMLSSMLGSSIASRLLARKMKVEGYMQIVFSISAFTLFLPVVTNFIVPPSEKGGSISFGGCVQLLGFCIFESCVGIFWPSIMKMRSQYIPEEARSTIMNFFRIPLNLFVCVVLYNVNAFPIAVMFGMCSIFLFIAAILQRRLMSVSDLHRSTTAEMTAEDEPLNP

SEQ ID NO: 10429 - protein, 95 aa, Triticum aestivum
  unsure (1)..(95): unsure at all Xaa locations
  Clone ID: TRIAE-23APR03-C410_65.p
SWKRWCSELYLGKYFLVIPLNFGVLARSLDMEELDMDGEXAARPEFAYPYCYEDHEVASLCAHVEEEHPLEWRYSLHNVXVQQSILDVQKSSVLG

SEQ ID NO: 10430 - protein, 165 aa, Triticum aestivum
  Clone ID: TRIAE-23APR03-C410_70.p
APASSRLPTPPVHLELLARRGVEAEVAPHDAEETTTRWRDKSTRRPPAGARGLTLPLTPTRCCLTSSPASSFPLSLHPTPHLHRDDPAGAAPPRRYVRSGSTATWKRTGGGKQRRRSAVDQRRRGRGEEEASGETRPAAAGEERMRERGRGVAACGDGGEGERAL

SEQ ID NO: 10431 - protein, 377 aa, Triticum aestivum
  unsure (1)..(377): unsure at all Xaa locations
  Clone ID: TRIAE-23APR03-C410_86.p
MSSSRGDALLDSAPLLGGGASGGAGGGQRRGNGLRRPSLRGAARLLRRSGRRAMREPSMLVREAAAEHLEERQADWAYSRPVVALDLLWNISFITVAAVVLVLSRNEKSPMPLRTWVAGYALQCVVHMVCVAVEYRMRRSQRGGAPAPADEERGSDGSSSSSDEDASEHHLRGRDTDYVSLAKHLESANTMFSFIWWIIGFYWISAGGEEVIRDAPQLYWLCIVFLAFDVFFVVFCVALACIIGIAVCCCLPCIIAILYAVSDQEGASEDDIRQIPKYKFRRXDEPEKDSADATESSGGIMIECGTNQPIEKALAAEDAECCICISAYDDGAELRELPCGHHFHCACIDKWLHINATCPLCKFSIRKGGSSSGSEEV

SEQ ID NO: 10432 - protein, 374 aa, Triticum aestivum
  Clone ID: TRIAE-23APR03-C410_91.p
MSSSRGDALLDSAPLLGGGAGSGGQRRGNALRRPSLRGTARLLRRSGRRAMREPSMLVREAAAEHLEERQADWAYSRPVVALDLLWNISFITVAAVVLVLSRNEKSPMPLRTWVAGYALQCIVHMVCVAVEYRMRRSQRGGAPAPADEERGSDGSSSSSDGDASEHHLRGRDTDYVSLAKHLESANTMFSFIWWIIGFYWISAGGEEVIRDAPQLYWLCIVFLAFDVFFVVFCVALACIIGIAVCCCLPCIIAILYAVSDQEGASEDDIRQIPKYKFRRMDEPEKDSADATESSGGIMIECGTNQPIEKALAAEDAECCICISAYDDGAELRELPCGHHFHCACIDKWLHINATCPLCKFSIRKGGSSSGSEEV

SEQ ID NO: 10433 - protein, 270 aa, Triticum aestivum
  Clone ID: TRIAE-23APR03-C411_3.p
MADEEQMERKEEATEIAPFDPTKKKKKKKVVIQDPADEVDKLAEKTEGLSVTESGEASFVGLKKKKKKLVELDPSLVEAGDGEDTLDDQVGEDEQGEGIVLGGATQYPWEGTDRDYKYDELLGRVFNILRENNPDLAGDRRRTVMRPPQVLREGTKKTVFVNFMDLCKTMHRQPEHVMMFLLAEMGTSGSLDGQQRLVIKGRFAPKNFEAILRRYINEYVICNGCKSPDTILSKENRLFFLRCEQCGSSRSVAPIKAGFVAQVGRRKAGT

SEQ ID NO: 10434 - protein, 432 aa, Triticum aestivum
  Clone ID: TRIAE-23APR03-C41231_1.p
MEDAAVEEAEVSGAGEFAPALVAAHPLGHSVAVAVGPELRVFDLKGGCAVSLSDDSGGCSHSDAIRAISFSADGALFASAGDDKLVKIWKTDSWRCIQTITSEKRVSAVAISKDGLYVTFADKFGVIWLVTVGGHGEGQASDDNKPVSIYGHYCSIITSMKFSPDGRFIATADRDFKIRVTSFPKDPVKGAPQIQSFCLGHTEFVSSIAFTSLSGGSSFLLSGGGDSTVRLWDYINGCLLDTYEVKDKVGEQPDETEDSNLAIADLCVTNDDSLVAVAIQSLNGIMLLACDLVAKKLSFLKVITTEKSYIPTSLAYSSSADLLWTVMGASNMPNQAASQLLTRVRIIPRSQKDLSASADHDPAVLEDSEVPHGEKLLLALQGSLDASKQEEVLAAVLAALRVSMHKMLVKKNYSEERREQRKRGRNDKKIKK

SEQ ID NO: 10435 - protein, 456 aa, Triticum aestivum
  Clone ID: TRIAE-23APR03-C412802_1.p
MCSYIGASLPCYALVKYTSSRDFPIDRLDLASTTRSIETMVKTRAGAVRPWALLALALLLIAGSCVEAADEQAANGGGRRRRTHRRSAAAVADMMVPITFLNASVEKGAVCMDGTPAAYDLDPGSGAGSKSWIVNLEGGGWCNNARTCRFRTRTHHGSSNFMERQIAFTGIMSASPAENPDFYNWNRVKIRYCDSASFAGDTFDKGTGLYFRGQRIWEEAIQHLLSIGMASADRALLTGCSAGGLAAILHCDQFGAFFAGRSTTVKCLADAGLFLDAVDVSGGRSLRSYYGDIVAMQGVAPNLPPTCTDHLDATSCFFPQNIIDSIKTPIFLLNAAYDVWQIEESLAPSKADPSRAWRACKFNRSACNASQINFLQGFRDQMVASVRGFSGSKSNGLFINSCFAHCQSELPATWNGTPAIQNKRIAKSVGDWYFGRAEVKAIDCPYPCDNTCRNII

SEQ ID NO: 10436 - protein, 281 aa, Triticum aestivum
  Clone ID: TRIAE-23APR03-C413810_1.p
MASLGVSEMLGKPLNFRAVSRPSAPLASSPATFKTVALFSKKKPAPPPKAKTVSAANDELAKWYGPDRRIFLPDGLLDRSEIPEYLNGEVAGDYGYDPFGLGKKPENFAKYQAFELIHARWAMLGAAGCIIPEALNKYGANCGPEAVWFKTGALLLDGNTLSYFGKNIPINLVLAVVAEVVLLGGAEYYRITNGLDFEDKLHPGGPFDPLGLAKDPEQGALLKVKEIKNGRLAMFSMFAFFIQAYVTGEGPVENLSKHLSDPFGNNLLTVIAGTAERAPTL

SEQ ID NO: 10437 - protein, 390 aa, Triticum aestivum
  unsure (1)..(390): unsure at all Xaa locations
  Clone ID: TRIAE-23APR03-C413820_1.p
MQIFVKTLTGKTITLEVESSDTIDNVKAKIQDKEGIPPDQQRLIFAGKQLEDGRTLADYNIQGPLXFESTLHLVLRLRGGMQIFVKTLTGKTITLEVESSDTIDNVKAKIQDKEGIPPDQQRLIFAGKQLEDGRTLADYNIQKESTLHLVLRLRGGMQIFVKTLTGKTITLDVESSDTIDNVKAKIQDKEGIPPDXQRLIFAGKQLEDERTLADYNIQKESTLHLVLRLRGGMQIFVKTLTGKTITLEVESSDTIDNVEAKIQDKEGIPPDQQRLIFAGKQLEDGRTLADYNIXKESTLHLVLRLRGGIQIFVKTLTGKTITLEVESSDTIDNVKSKIQDKEGIPPDQQRLIFAGKQLEDGRTLADYNIQKESTLHLVLRLRGGLWWPFN

SEQ ID NO: 10438 - protein, 869 aa, Triticum aestivum
  Clone ID: TRIAE-23APR03-C413830_1.p
MERNGNANAGPPLEENKGADGKSGSRRSTRFKEENEYVEVTLDVGADDAVAVQGVRAAGETPEAALLPRSGGLSSRLKAELRRIASAKRGGGDNAPASQPRLDRSMTGAARALRGLHFLNQSVVTRGSWPEVDKRFDRLAVDGLLLRSRFGQCIGMVGSEEFAAQMYDALARRRGVVAQVLTKDELREFWEQLSDPGFDAKLQTFFDMVDKNADGRITEEELKEVLTLTASANKLTKILERVDEYTALIMEELDPDQLGYIELATLESLLLLPPSQAPTSLVAHSSNISQLISQRLVPARDANPLRRGLTAARYFLEDNWKRVWVMSLWLSINAGLFAWKFYAYRRHPTFDVMGYCVCVAKGGAETTKFNMALILLPVCRNTLTWLRSRTSLGAAVPFNDNINFHKVVAGGVAVGVALHGVTHLTCDFPRLLHASDEAYEPMKRYFGQTRVPDYWWFVRGVEGVTGVLMVVLMAVAYTLAHPRFRRSKLGAGNPLKRLSGFNMFWYSHHLFVVVYVALVVHGVCLYINRTWYKQTTWMYLAVPVLLYAGERLLRALRSHGLTTVRIEKVAVYPGNVIAIHMSKPHGFRYRSGQYIYVNCGEVSPFEWHPFTITSAPGDDYLSMHIRCRGDWTSRFRAIFSQICRPPLAGQSGLLRADFTSMVEHNANAKFPRLLIDGPYGAPAQDYRKYDVLLLIGLGIGATPLISIVKDVLNNVHRQGQEQEGDEGFMTKRVYFYWCTREEGSFEWFRGVMNEVAERDAAGEESVVELHNHCTSVYEEGDARSAMVVMLQALHHAKSGVDVVSGTRVRTHFARPCWRDVFKRVACDHQGQRVGVFYCGDQKLTPELRRLSQDFSHRTTTKFVFHKENF

SEQ ID NO: 10439 - protein, 118 aa, Triticum aestivum
  Clone ID: TRIAE-23APR03-C414301_1.p
SYCFAATSTSTIRPFSYVQYNLCRPTPFWHGTIESQTQNQKRNLRFRVQTPSMERKEGGSQSVVPPQEHDDAALDDVEPGPVLLQGPAQAASTPLAPGKLHLLFNTRTLSPCAWRGDG

SEQ ID NO: 10440 - protein, 172 aa, Triticum aestivum
  unsure (1)..(172): unsure at all Xaa locations
  Clone ID: TRIAE-23APR03-C4148_1.p
TLAAWSLFIDTYTVRVNGVVTQVNNXDIAWKSDKNNKFGKNIYPSNFQKGRLIGGATLNESIPLSEQEDLIVWMRTAALPTFRKLYGRIEKDINANDNVTVVIQNNYNTYSFGGSKALVLSTASWIGGKNNFIGIAYLTIGGLCLSLAMGFLVLYMVKRRNFADPSNLSWNR

SEQ ID NO: 10441 - protein, 89 aa, Triticum aestivum
  Clone ID: TRIAE-23APR03-C41538_1.p
INKAHNLGSVPNIVLDNKHEHGGSRPTPTRSHERFRTGQKKHAAVQLQGLKPEHRACRLARALDKSATSWSRSGGWLPSQNVDLALLFE

SEQ ID NO: 10442 - protein, 165 aa, Triticum aestivum
  unsure (1)..(165): unsure at all Xaa locations
  Clone ID: TRIAE-23APR03-C4157_1.p
YKAEIQNLMACLIWXLTGLEQPPYAEFVPSTHWEKLTQELIHQFCSLLGQSSNSPLSVAISAGFQGLPTLLKLTTVMAAKKQEWQTMKQLPVPIDIGPEFQYHSVFVCLVLRAQSSDEYHPMLMPCTHAVXDQSIMKLSKSSSRPFKKPFCPSNRHASQFKQPNF

SEQ ID NO: 10443 - protein, 243 aa, Triticum aestivum
  Clone ID: TRIAE-23APR03-C416486_1.p
MSMSVSMSGKASDPGSAWFGGGSRSPQPGPTHNVRLIAMAVAAFVSVLGLSLLLHLYICRVRRRNRRQAEAAAAALEAGSAAPKPAKVGLDPSAIAALPTAAYKETGEPGSGASECTICLGAMQEGEAVRVLPACAHVFHVPCVDTWLASSSSCPVCRALVEPPPSPAAPAWVQEKQGLEKECAASGSSAPPCGLGASLMRMLNRERPLARRLTQGDHAHPMEMHVEDLESQHPQQHHSVDTN

SEQ ID NO: 10444 - protein, 392 aa, Triticum aestivum
  Clone ID: TRIAE-23APR03-C417289_1.p
MKPLYLRGSGSFKRLLLSLSPHRAKRVHAPPGDAHAESPQSPPPTERRPEWECFSYEEVRRATDGFRAANLVGRGGSSEVYRGELADGRAVAVKRLMGASACERRERDFLAELGTVGHARHPNVCPLLGCCVDRDLYLVFAFSARGSVSANLHDGEEGAPAMGWEARYGVAVGTARGLEYLHKGCRRRIIHRDIKASNVLLTDDFQPQISDFGLAKWLPTEWTHRAIAPIEGTFGCLAPEYYTRGIVDEKTDVFAFGVFLLELMAGRKPVDGTHRSLLGWARPLLNEGKTEALLDPRIVAGGDGGYDAEQARRLAFVASLCVRASATWRPSMTEVLELLEGVEIKEERWAMPEPAAGDDEGEEMWGFDDLDDDDDEESGTPSPLSTSSALST

SEQ ID NO: 10445 - protein, 357 aa, Triticum aestivum
  unsure (1)..(357): unsure at all Xaa locations
  Clone ID: TRIAE-23APR03-C4185_1.p
SAASPTESPTARVTLDGKTYRLVPNDGSVTVHGGDQWSMKVTNWGATLMSVILPDSRGNLGDVILGYDTVAEYVNGTAYFGGLIGRVANRIANARFTLDGKAYRLVPNDGNNTLHGGHRGFDKVVWTVKEHVAGGSSPFITLYYHSFDGEQGFPGDVDVHVKYQLSGPHELSVRMNATARGKATPVNLAHHAYWNLGGHGSGGVLSRXVRLLGSRYTPVDSALIRTGHLAPVAGTPYDCRTPAAVGSRIGGILSRGVNGYDINYVVDGGGLRPVAVVRDGASGRAMELWADQPGVQFYTANGLKXVRGKGGKVYGRYGALCLETQGFPDAVNRPSFPSQIVRPGKVYMHHMVFKFSF

SEQ ID NO: 10446 - protein, 432 aa, Triticum aestivum
  unsure (1)..(432): unsure at all Xaa locations
  Clone ID: TRIAE-23APR03-C4197_1.p
MKVEVVDTTLVTPSEPTPRHTLWLSNLDLAVPKTHTXPLVYYYPAPPAGDGGEKQEEFFAPERLREALARALVPFYPLAGRMATGPEGRLEIDCNGEGALFVVARADFTGDEMFRDFEPSPEARRLLVPFAASGDPPCLLAMVQVTFLKCGGVAVGTGMHHVTMDGAGAIQFIRTWTTLARGLDAASVHPTPPVHDRTVLRARSPPHATFEHPVYSPSNLNGLPRPFVTRVYAVSPKLLAGIKSSCAPGVSTYCALTAHLWRAMCVARGLAPDAESRLRVPANIRQRLRPQLPANYFGNAIVRDLVTVRVGDVLSQPLGFVAERIKRTVARVDDAFVRSVIDYLEVESEXAARRRARRRLPETDLWVVSWLGMPIHDADFGWGCPKFVAPAQMFGSGTAYVTQAPDKDDGVSVLFALEPEYLQCFEKAFYGE

SEQ ID NO: 10447 - protein, 239 aa, Triticum aestivum
  Clone ID: TRIAE-23APR03-C4202_1.p
MAQLPPRAPSAGEQDWPVAGEFLGFAAARRGVHRRSASDPAAFLEAVPMDHILSGGGGDDEFDRFDDEQLMSMFSNVDGGCDRPGFMDTGEAEEGAASAGAMAAADGFGDPKRVKRILANRQSAQRSRVRKLQYISELERSVTGLQMEVSALSPRVAFLDHQRSLLTVGNSHLRQRIAALAQDKIFKDAPQPAPPAEIERLRQLSHHQKIKATGGTDMATAASMQAKQELLMCEGAAMR

SEQ ID NO: 10448 - protein, 202 aa, Triticum aestivum
  unsure (1)..(202): unsure at all Xaa locations
  Clone ID: TRIAE-23APR03-C4217_1.p
LPIPKTVSKRRTWLARKCAAELLQPTLSRPEPALPDGSSADVPGSSLTVTGEEVTEKSPAPGRKTAYRGIRRRPWGRWAAEIRDPXKGARVWLGTYASAEEAARAYDVAARDIRGPKAKLNFPPAVGAPQEAAAVAGAGAPKKRRIVAAEESSASWSPLPAPASGGGGGTDSLRERMSGLEAFLGLEDGNVEPWEAVNLIME

SEQ ID NO: 10449 - protein, 266 aa, Triticum aestivum
  unsure (1)..(266): unsure at all Xaa locations
  Clone ID: TRIAE-23APR03-C422_1.p
RCTAGRCRHGWRGSSTQRKKKKQREKEEEGVEPMKVYGWAGSPXMARRLVSLEGGGAGHELVPTSRNGGDRRRPRHLGXPNPYAEIAVLEDGGLRLYQSRATARHILRKHQPGLLGAGSRXESPRVEAWVDVDASHXLEPAHSRPIVWNXIINPXFVGRDVDHRLVDGSVEKLKKLLGVXRRARLSSKEGVGRGLSISISADLTHFSFXMRYFXMATEHAVVLXDAYPHVKAWWXRALLARPSVKEVXIAGMPXPDFGXFGSGRIP

SEQ ID NO: 10450 - protein, 338 aa, Triticum aestivum
  Clone ID: TRIAE-23APR03-C4248_1.p
MAQKASMLAATSLAFMSLLVILQRFLEAPVSVPFSLYGHSCGPARAVFHLVMDQNCYVSIHSWFALHPVSPAVVEVKGLHQFDWRDGDAIASVMRTIDEVQKSSLDYHQLCDGSVEREYRRLEATKPSTFSILNYLKIHLPEFFPELPRVILLDDDVLVRKDLAGLWEQDLDGNIMGAVGAHRPGADGGICIERTLSEHLNFSDPAVSSLGLDGSNCTWSWGATIVDLDAWRGANVTETYQLWLQKNRESGFRLWKMGSLPPALIAFDGRVQAIEPLWHLPDLGWRMPDAELLQLSAVLHFSGPRKPWLEVAFPELRELWLGHLNNSDSFLRGCGVVE

SEQ ID NO: 10451 - protein, 344 aa, Triticum aestivum
  Clone ID: TRIAE-23APR03-C4258_1.p
MADGRESEDAAVGEDGTHPQQSERATNKLLTPDRPEARKAERKAGEKERRRADIERRRREWEESLAAAPSQEAREAMLAARRETRLERVGKRVEERGARAERLRRAAEGGQKVVLDLEFADLMRPNEIHSLTQQIMYCYAVNGRSATPAHLWLTGCSGEMGTQVQRIPGFDKWIIEKEAKSYLEAFADCKENLVYLTADAETVLDELDMSKIYIIGGLVDRNRWKGITQKKAVDQGIQSAKLPIGSYLKMSSSQVLTVNQVFEIMQKFVETKDWKTAFFHVIPPRKRGEAGAANDDDSPEGAANGDLDKCLEEEVDDDDDDGDGDEEADVANKRHCFRSENGKS

SEQ ID NO: 10452 - protein, 358 aa, Triticum aestivum
  unsure (1)..(358): unsure at all Xaa locations
  Clone ID: TRIAE-23APR03-C42_23.p
MVTEAASLPYAPGACRRLAVGDGEAAGGEGVAGVGAADVLPVGGVLGVLAEAPLLRPQVAAALAARLGPAQDRRRAHRQLRCLARRVRPARRRRQHHQRQHQRRHHLLLPHARHGSRSRSCRCVRVCDGSGVPRAESGTRPGTGKTLLXARAVAHHTDCTFIXRVSGSELVQKYIGEGSRMVRELFVMAREHAPSIIFMDEIDSIGSARMESGTGNGDSEVQRTMLELLNQLDGFEASNKIKVLMATNRIDILDQALLRPGRIDRKIEFPNPNEDSRGDILKIHSRRMNLMRGIDLKKIAGKMNGASGAELKAVCTEAGMFALRERRVHVTQEDFEMAVAKVMKKXNEKNMSLRKLWK

SEQ ID NO: 10453 - protein, 479 aa, Triticum aestivum
  Clone ID: TRIAE-23APR03-C42_34.p
MAMAAAAAGGEPVEPQSLKKLSLKSLKRSLDLFAPTHSLPFAPDAESKRIRVSCKVNAEYGSVKNLPTEQGRAQVKGAAAPSNALALLGTQDTKDAPREGTSNAIIPSPLMLPKAPESAVPGKNTTVLSIPGSSDRFSTSALMERLPSRWPKPVWHAPWKNYRVISGHLGWVRSIAFDPGNEWFCTGSADRTIKIWDLASGTLKLTLTGHIEQVRGLAVSQRHTYLFSAGDDKQVKCWDLEQNKVIRSYHGHLSGVYCLAPHPTIDVLLTGGRDSVCRVWDIRTKAHVSALTGHDNTVCSVFARPTDPQVVTGSHDTTIKFWDLVAGKTMCTLTHHKKSVRAMALHPKEKSFASASADNIKKWSLPKGEFLHNMLSQQKTILNAMAVNEDGVLATAGDNGSMWFWDWKSGHNFQQEQTIVQPGSLESEACIYALSYDNSGSRLVTCEADKTIKMWKEDLTATPETHPVNFKPPKDIRRY

SEQ ID NO: 10454 - protein, 367 aa, Triticum aestivum
  Clone ID: TRIAE-23APR03-C430158_1.p
MGLRTCGAMEGEHVVASPFFEWLKPPPASPSSSRSSSTFSSSSSSMASGHQEDRSSVACLPLLRMLEEGKGAGGDHDHPAPPVKEEIMGSGAAEVLGPGVDLNIGLPVGGSCDDDIMEEESQEEDDDHDCDEEEEEEMDELEPNHGGCKVEAEEKEKHGEPVVSVEGSNSVSMPEFGVLGAESGVPMSCGYWIPTPAQILVGPVQFVCHVCNKSFNRYNNMQMHMWGHGREYRKGPESLKGTQTLALLKLPCYCCAAGCRNSVAHPRARPLKDFRTLQTHYKRKHGARPFRCRRCAKPFAVKGDWRTHEKNCGKRWFCACGSDFKHKRSLNDHVRSFGGDHLPVALDGAPAPAPAPVEDRRIIRFQR

SEQ ID NO: 10455 - protein, 269 aa, Triticum aestivum
  Clone ID: TRIAE-23APR03-C430182_1.p
MPETRNDLPMEPSFGSNSASTEEASTRRVANRIIRALQHHLQLLHRAGADFFVLGATGNVYTVTLATTPACTCPDPGAPCKHILFVLLRVLGLSLDEACVWRQSLRPCQVARLVAAPTYPEVLAGPRARERFHQQWAAHAAAAAAKAADQRRQESAGPSLGRLDGAAWPVCLEEMAPSAEAQGGAAATGPAPLLTCGTCRNSVHAECFARWKRSRARRAATCVVCRARWRKPSRDREQDQQQYMNLSAYMNEENDVVDMQVEDGAPCGG

SEQ ID NO: 10456 - protein, 233 aa, Triticum aestivum
  Clone ID: TRIAE-23APR03-C430472_1.p
MAFHLRSISLPSRPQANQTEVEQEVLSLEASISSSTTTIGTMCAGLRRLGDIYNGVEEIIGLPSNQAGKMLDSEMEVSLELLDLCSTMQEIFVKMKAIIQELQVALRKGDDVTAQAKIQSYARLVKTAKKHFKKSAKKANAVSAGCKMVMLLTKAREISVSLLESTVHLLSKEIGMPKQSLVSKAFHKKKAVVCQEEQLQELECSIGDLENGVGHLFRKLVQIRVSLLNILSS

SEQ ID NO: 10457 - protein, 511 aa, Triticum aestivum
  unsure (1)..(511): unsure at all Xaa locations
  Clone ID: TRIAE-23APR03-C4315_1.p
SPPLPPACSTGANPPPLSPASSAPPPRLLVPARGSAANPSRLGSEGERAAAAHPPLRIEQVQSPSKKQRIATHTHIKRLGLDANGTAIAMSAGFVGQAAAREAGGLEVDMIRQENMAGRALLLAGPPATGKTALALGISQELGSILPFCPAGGSXEVYSSDVKSTEGLMVISRRGIGLRMKENEVVYEGEVTELSPEESESSRGGYGKSMRRVVIGLKTAKGTKLLKLDPTIEVVLIVEKGAAGEVIYIEANSGAVKRVGRCDAFATEYDLEAEEYVPIPKGEVHKKKEIVQDVTLHDLDAANAQPQGGQDILSLMGQMMKSRKTEITEKLRQEINKVVNRYIDEGIAELVPGVLFIDEVHMLDIECFSYLNRALESPLSPFVILATNIWICTVRGTDMTSPYGIPVDLLDRLVIVRTQIYGPIEMIQILAIRAQVEEIEIDEDSLAFLGEVGQQTSLRHAIQLLSPASVVAKANGREKICKADLEEVRVLYLDAKSSAQLLHKQQGSYIT

SEQ ID NO: 10458 - protein, 487 aa, Triticum aestivum
  Clone ID: TRIAE-23APR03-C431_24.p
MVISNASSSAGEAVYSTFSSRYVREELPRYRMPSGSIPKEAAYQIISDELMLDGNPRLNLASFVTTWMEPECGKLMMDSVNKNYVDMDEYPVTTELQNRCVNMIAHLFNAPIGEDETAIGVSTVGSSEAIMLAGLAFKRKWANKMKEQGKPCDKPNIVTGANVQVCWEKFARYFEVELKEVKLTEGYYVMDPKKAVEMVDENTICVAAILGSTLTGEYEDVKLLNDLLVAKNKETGWDVPIHVDAASGGFIAPFLQPELEWDFRLPLVKSINVSGHKYGLVYPGVGWVIWRSKADLPDELIFHINYLGTDQPTFTLNFSKGASQIIAQYYQLIRLGFEGYKHIMENCKLNAAVLKEGIDATGRFDVLSKADGVPLVAIRLKDSTNFSVFDISENLRRFGWIVPAYTMPADAEHVAVLRIVIREDFNRSLAQRLLTDINKIVGELDAHAVHAIKLSTAAAAEGASKSTVDAVTEAFKGLAGNKKAGVC

SEQ ID NO: 10459 - protein, 487 aa, Triticum aestivum
  unsure (1)..(487): unsure at all Xaa locations
  Clone ID: TRIAE-23APR03-C431_27.p
MVISHASSSAGEAVYSTFSSRYVREELPRYRMPEGSIPKEAAYQIISDELMLDGNPRLNLASFVTTWMEPECGKLMMDSVNKNYVDMDEYPVTTELQNXXVNMXAHLXNAPIGEDETAIGVSTVGSSEAIMLAGLAFKRKWANKMKEQGKPCDKPNIVTGANVQVCWEKFARYFEVELKEVKLTEGYYVMDPKKAIEMVDENTICVAAILGSTLTGEYEDVKLLNDLLVEKNKKTGWNVPIHVDAASGGFIAPFLQPELEWDFRLPLVKSINVSGHKYGLVYPGVGWVIWRSKDDLPDELIFHINYLGTDQPTFTLNFSKGASQIIAQYYQLIRLGFEGYKHIMENCKLNAAVLKEGIDATGRFDVLSKADGVPLVAIRLKDSTNFSVFDISENLRRFGWIVPAYTMPADAEHVAVLRIVIREDFNRSLAQRLLADINKIVRELDAHAVHAIKLSNAAAAEGASKSTVDAVTEAFKGLAGNKKAGVC

SEQ ID NO: 10460 - protein, 495 aa, Triticum aestivum
  Clone ID: TRIAE-23APR03-C431_28.p
MVLSHAASAGSSDESVHSTFASRYVRASLPRFRMPENSIPKEAAYQIINDELMLDGNPRLNLASFVTTWMEPECNKLMMDSINKNYVDMDEYPVTTELQNRCVNMIAHLFNAPLGETETAVGVGTVGSSEAIMLAGLAFKRRWQNKMKAAGKPCDKPNIVTGANVQVCWEKFARYFEVELKEVKLSEGYYVMDPEKAVEMVDENTICVAAILGSTLNGEFEDVKMLNDLLVKKNEETGWDTPIHVDAASGGFIAPFLYPELEWDFRLPLVKSINVSGHKYGLVYAGIGWCIWRSKEDLPDELIFHINYLGADQPTFTLNFSKGSSQVIAQYYQLIRLGFEGYRNIMDNCQENAMVLKEGLERTGRFNIVSKDQGVPLVAFSLKDSSRHDEFEISEFLRRFGWIVPAYTMPPDAQHVTVLRVVIREDFSRTFAERLVIDIEKVLHELDALPSRSSGPALQHPNGDTVSEKDLARQREVVSVWKRAVAARKKTQGVC

SEQ ID NO: 10461 - protein, 488 aa, Triticum aestivum
  unsure (1)..(488): unsure at all Xaa locations
  Clone ID: TRIAE-23APR03-C431_29.p
MVISHASSSAGEAVYSTFSSRYVREELPRYRMPEGSIPKEAAYQIISDELMLDGNPRLNLASFVTTWMEPECGKLMMDSVNKNYVDMDEYPVTTELQNRCVNMIAHLFNAPIGEDETAIGVSTVGSSEAIMLAGLAFKRKWANKMKEQGKPCDKPNIVTGANVQVCWEKFARYFEVELKEVKLTEGYYVMDPKKAVEMVDENTICVAAILGSTLTGEYEDVKLLNDLLVAKNKETGWDVPIHVDAASGGFIAPFLQPELEWDFRLPLVKSINVSGHKYGLVYPGVGWVIXWRSKADLPDELIFHINYLGTDQPTFTLNFSKGASQIIAQYYQLIRLGFEGYKHIMENCKLNAAVLKEGIDATGRFDVLSKADGVPLVAIRLKDSTNFSVFDISENLRRFGWIXPAYXMPADAEHVXVLRIVIREDFNRSLAQRLLADINKIVGELDAHAIHAIKLSTAAAAEGASKSTVDAVTEAFKGLAGNKKAGVC

SEQ ID NO: 10462 - protein, 125 aa, Triticum aestivum
  Clone ID: TRIAE-23APR03-C431_30.p
PTAAARIKVHELRGKNKAELQGQLKDLKAELSLLRVAKVTGGAPNKLSKIKVVRTSIARVLTVISQKQKSALREAYKNKRLPLDLRPKKTRAIRRRLTKHQLSLKTEREKKREKYFPMRKYAIKA

SEQ ID NO: 10463 - protein, 102 aa, Triticum aestivum
  Clone ID: TRIAE-23APR03-C431_9.p
MARIKVHELRGKNKADLQGQLKDLKAELSLLRVAKVTGGAPNKLSKIKVVRTSIARVLTVISQKQKAALREAYVCQAPRTQEAEDNSDEDGKVVEVVFVGAR

SEQ ID NO: 10464 - protein, 483 aa, Triticum aestivum
  unsure (1)..(483): unsure at all Xaa locations
  Clone ID: TRIAE-23APR03-C4320_1.p
MVEGAGTAPSASPPIRPVAALRPGADFPREPNEILGSTSARRREGVTNEDKRGCREGNKARGQLVAAXIPPVGCLQGLRSREILGVVFNKGMKGCRTRNNLIEFEKGSKXDFVMRKVEDTNDELQEQLIRLENGEVIADKVIDDLKRRKLVTKEKSIWYSLKKGPEFVAKRKTLATDVTREHLKSGDWKDLEFKDYNYGAQGQPIAIGYSQPLLEVREAIQNIFLEMGFSEMPTNMYVESSFWNFDALFQPQQHPARDSHDTFFLKAPATTTQLPDDYLEKVKQVHQSGGHGSKGYGYNWKRDEAEKNLLRTHTTAVSTRMLYKLAQEKTFAPKRYYSIDRVFRNEAVDRTHLAEFHQIEGLICDYGLTLGDLIGVLEDFFSRLGMSKLRFKPAYNPYTEPSMEIFSYHDGLKKWVEIGNSGMFRPEMLLPMGLPEGVNVIAWGLSLERPTMILYGIDNIRDLFGPKVDFNLIKSSPICRLGL

SEQ ID NO: 10465 - protein, 353 aa, Triticum aestivum
  Clone ID: TRIAE-23APR03-C43481_1.p
MRVDDADKPDSADAGAEKPAELPSPHMESVCENTTTADFKQSNFGNFLPNVRSGGWSDIGSRQYMEDTHVCIADLAKNFGYPTVDKEVVSFYGVFDGHGGKDAAHFVRDNLPRVIVEDADFPLELEKVVSRSFVQIDSQFADKCSHQRTLSSGTTALTAMIFGRSLLVANAGDCRAVLSRCGIAMEMSMDHRPCSLSEKLRVESLGGYVDDGYLNGLLGVTRALGDWHLEGMKEASRPGGGPLSAEPEIKLTTLTKDDEFLVIGSDGLWDVFSNQNAVDFARRRLQEHNDVKRCCREIVEEAIRRGATDNLTAVLVSFHLVAPPQIRVNQPRRVARSISADGLNSLRILLGSQ

SEQ ID NO: 10466 - protein, 276 aa, Triticum aestivum
  unsure (1)..(276): unsure at all Xaa locations
  Clone ID: TRIAE-23APR03-C4359_1.p
PFGYLQRVFRVFRPSPPTNLLPNLQWRPRPPPSPRSPSPPPSPRPRPRRAPSSPASPPCRPPPSAPAASRGRAAPSALHASARFVASVSADACAAAFPSKVTTKVNFEICIGNPIGKXLGRIVRRALWGYDVPQTPLQVSSVALSALGREGSRIKGFKFPTGSHEGLHQGQGGDFDKGNGTGGKSIYGRTFKDENFQLVHTGPGVLSMANAGPNTNGSQFFICTVKTPWLDGRHVVFGQVLEGMDIVRTIESSETDRGDRPKKKVVISECGELPVV

SEQ ID NO: 10467 - protein, 617 aa, Triticum aestivum
  Clone ID: TRIAE-23APR03-C435_1.p
MYAVLCFRGCYQVATAEVVDAAMHAPKPPEPKPRVLVAGGGIGGLTFALAARRKGFQVLVLEKDMSAVRGEGKYRGPIQLQSNALAVLEAVDMPAADQIMDAGCITGDRVNGIVDGISGSWYIKFDTFTPAADRGLPVTRVISRMTLQQILARAVGDDAIMNDCHVVDFTDNGNKVTAILEDGRKFEGDLLVGADGIWSKVRKSLFGETDASYSEYTCYTGIADFVPPDIDTVGYRVFLGHKQYFVSSDVGGGKMQWYAFHKEPAGGTYPENGKKKRLLEIFSGWCDNVIDLLNATEEEAILRRDIYDRPPTINWGKGRVTLLGDSVHAMQPNLGQGGCMAIEDGYQLAVELEKAWEESVKSRTPVDVISSLRSYEKERKLRVAIIHGLARMAAIMATTYRPYLGVGLGPLSFLTKLRIPHPGRVGGRFFIKVGMPLMLSWILGGNSSKLEGRPLSCRLSDKASNQLGRWFQDDDALEQAMGGEWYLFPMSSGDDSALQPIRLIRDEQRTLSIGSKPDPSNSDSSLSFPLPQVSEIHATITCKNKGFYLTDLGSEHGTWFNDNEGRRYRLPPNFPVRFHPSDAIEFGSDKKAMFRVKVLSTLPYDSARGGGEVLQAA

SEQ ID NO: 10468 - protein, 327 aa, Triticum aestivum
  Clone ID: TRIAE-23APR03-C4363_1.p
RGRPLRRERTRRRPPPPPLQRRRSPSPPPLLPPQGLGFAATGPHHVHRRRPLRRERRRRRQPPPASFSGGAFMPSQSTNTPGGSGGIRKTRGAQTLLPLTVKQIMDASQTNDDKSSFAVNGTEVSTVRLVGRMMNKAERMTDVQFILDDGTGRIEVNRWENETSDTTEMGLVKDGDYVIVNGGLKSFQGKRHIVAYSVRLVTNYNDITHHFLYCIYVHLDLAKAKKSGTQPQVTANASWNQAPPPNNQAPTLSASGNAGGQDLTDMVMNVFHDPVLVNLEHGVSIEQVASRLNISDALARSTVTHLIDVGNLYPTIDDNHYKSTLNG

SEQ ID NO: 10469 - protein, 248 aa, Triticum aestivum
  Clone ID: TRIAE-23APR03-C4365_1.p
MMDGGGGVGDPVEEFLIGGAGDGGEDSLAAFCDGGLGIEDVRGGDSGLGHSNLGKRGRDEPSPSGPKSKACREKMRRDKLNDRFLELCSVMNSGKHTGVEECSASNPGKNAKLDKASILSDATRMLTQLRGETEKLKESNVNLRETIKDLKAEKNELRDEKLSLKAEKERLEQQLKAASAAPTGFAPHMPYPAAFHPAVFPPFAPPYQVPANKGAPVPAAFPGMAMWHWLPPTAMDTTQDPKLWPPNA

SEQ ID NO: 10470 - protein, 272 aa, Triticum aestivum
  Clone ID: TRIAE-23APR03-C4382_1.p
MAAAATAVRFHTAAARRAAPRRPARFAVRADAAQAATALTQDDLKRLAAVRAVEQVQSGMVLGLGTGSTAAFAVAEIGALLANGKLSGIVGVPTSKRTFEQAMSLGIPLSTLDDHPVIDLAIDGADEVDPDLNLVKGRGGALLREKMVEAASGKFVVVVDETKLVTGLGGSGLAMPVEVVQFCWKYNQVSLQGLFNEEGCEAKLRLNEDGKPYVTDNSNYIVDLYFKTPIKDALGAGKEIAALEGVVEHGLFLNMASSVIIAGSDGVSVKTK

SEQ ID NO: 10471 - protein, 263 aa, Triticum aestivum
  Clone ID: TRIAE-23APR03-C43877_1.p
MPRVVSRSPPSHRRRRSPSPRYGSRRRSPSPRYGSRRIRRDRSRSPYSSRRKSRSPSPRWDRSQSPIPRRRKSPPSPRRHRRRRSRSSSSSLVNNSSPSHGSEQNSLIEKQRKEEEKKRRQKEAELKLLEEELARRVEEAVRKNVEECLNSEEVKDEIKRRVEEGIKKLFDEVDAQLQKEKQAALHEARQKVEQERKEREELDRMIEENRRKVEESQRREAQEQHQKEMERYLELERIQKQREEALRRKKIEEEEERAKQMRY

SEQ ID NO: 10472 - protein, 589 aa, Triticum aestivum
  unsure (1)..(589): unsure at all Xaa locations
  Clone ID: TRIAE-23APR03-C4410_1.p
YFWCPRGYPSPPYYYPSGYYGSTNEWDTRYVGHEGMEVPHSLYGDMYHGYGYAPYGXPYPSGSPVPTVGHDGQSYGTQQYQYPGQYYQQPAPTNAMHGVNSANPQSELPSAAAHQTRATVVSAKVTTGTASGIANAASSLPRKQTHHHVSVTNSGSYGRGPSQGGPSASNFGHTGHRSPAQWYDGSLLXHAVVHCATTRASYETRGSYMGQLNLGRATWFSWAFRSLIYLVTPGCYMAPFPIPIFVSESFWYNNYNGNTLKAGLXGFGSNVYNSRNNGQWGVVDTVKYKPRNRATFGFGSENQDGFTELNRGPRSGGFRHQKPFGPTVTIAVKGQVLPSAGKQDNSVLPDKSQFNQEGFSATYKDAKFFVIKSYSEDDVHKSIKYNVWASTPNGNKKLDAGYREAQEKSSECPVFLFFSVNTSGQFVGVAEMVGPVDFDKTVDYWQQDKWNGCFSIKWHIVKDIPNNILKHITLDNNDNKPVTNSRDTQEVKLEQGLQMLKIFKEHVSKTSILDDFAFYENRQKLMQEKRAKQQPLQGQGVDEKEKSAVNGNSAAQKQTPSKESTTPAAGEEPNASKPTTAESGGASAN

SEQ ID NO: 10473 - protein, 467 aa, Triticum aestivum
  unsure (1)..(467): unsure at all Xaa locations
  Clone ID: TRIAE-23APR03-C44121_1.p
APLVRPTISTAPPRPPLPRSPQPARGALRPPPSPALARRGALGLRARPPPSLPPAPPPPRPPARSFHRAARAGPAAPCCGARRRLAASRGCTPEEAAGVHPAIPPHHRIPPTIIAGFIESDKTTLLNHTLTSHYGKLSASIENXYVEVDIDGSLVAAQTAEAWYTMMLIXCSLRGDLVRMIGELVDKKKGKDDEXFDHLVIETTGLANPAPIIQTFYAEDTVFNDVKLDGVVTLVDSKHARLHLDEVKPKGIVNEAVQQIAYADRIIINKTDLVSEPEVSSLVERIRSINRMANLKRAQYGKVDLDYVLGIGGFDLERIESAVTEEPHDEHEHEHEHKHEHEHDHDHDHHHHDHDHKHDHHAHDHTHDPGVSSVSIVCEGEMDLEKADMWLGNLLLERSDDIYRMKGLLSVSGMPQRFVFQGVHDIFQGSPDRMWEPNEPRINKIVFIGRNLNREELETGFKDCLLK

SEQ ID NO: 10474 - protein, 99 aa, Triticum aestivum
  Clone ID: TRIAE-23APR03-C4412_1.p
RGSSHRRYSRGTARSCSGGGCCPAPGRCRWRACPPRASFGRPRLGGAVFKHTVLSGSTFDEANMKDVDFEDTLIGYIDLQKLCRNTSINEDTRLELGCR

SEQ ID NO: 10475 - protein, 187 aa, Triticum aestivum
  Clone ID: TRIAE-23APR03-C4413_2.p
MRPPRGGGGFRGRGGDQGGRFGGGGRGRGRFGGGGGGFRDEGPPAEVVEVSTFLHACEGDAVTKLTNEKVPYFNAPIYLQNKTQIGKVDEIFGPINESYFSVKMFEGVIATSYNEGDKFFIDPMKLLPLSRFLPQPKGSTPRGGGRGGRGGGRGGFGGRGGFRGRGAPRGRGPPRGGGRGFRGRGRF

SEQ ID NO: 10476 - protein, 112 aa, Triticum aestivum
  Clone ID: TRIAE-23APR03-C44148_2.p
MATPLIAGLAVAATAFAGRYGIQAWQAYKARPIVPRMRKFYEGGFQATMTKREAGLILGIRENVRPDKVKEAHKRVMVANHPDAGGSHYLASKINEAKDVLLGKTKGGGSAF

SEQ ID NO: 10477 - protein, 535 aa, Triticum aestivum
  unsure (1)..(535): unsure at all Xaa locations
  Clone ID: TRIAE-23APR03-C44167_1.p
MASPAKAMVAAAAMLLLLSTATVAQHNYGDALHKSILFFEGQRSGRLPPDQRVRWRRDSALNDGATAGVDLTGGYYDAGDNVKFGFPMAFTTTLMSWGLIDFGKNFGSHGGEARAAVRWATDYLMKATATPNTVYVQVGDAFHDHSCWERPEDMDTPRTVYKVDPQHPGSDVAAETAAALAAGSIVFREADPAYSKRLLDRAISVFEFADKYRGAYSSSLYSAVCPCYCDYDGYQDELLWGAAWLHKASRQRVYRDYIKKNEVALGASDSINEFGWDNKHAGINILISKEVLMGKDSFFKSFRVNADNFICTLLPGISNHPQIEYSPGGLLFKVGNSNMQHVTSLSFLLLAYANYASHANARVPCGGSSASPVVLRRVAKRQVDYILTDNPLRMSYMVGYGPAFPRRRRQRPVSLLSQVDYILGDNPLRMSYMVGYGERFPRRIHXRGSSLPSVSAHPARIGCKAGTAYYGSSAPNPNLLVGXVVGGPSNTSDNFPDARAVFQQSEPTTYINAPLLGLLAYFSAHPNLPQSDGTD

SEQ ID NO: 10478 - protein, 323 aa, Triticum aestivum
  Clone ID: TRIAE-23APR03-C44341_1.p
MEGPFPLLVHDLGNRTDDCQTRFSISNQAVSTAAIHELKDYRCFESPQGWVLALEPASLHTFLWRPQDGQRISLPSPKQEFPRRCKCLLSDKPSSTSSCTVLVLDLDQPNLLVCRIGGSQWDSYNYELTMFLADDKPREIHMAKLKGIAAVGGKVYYTFTGHALGVVEFSPELSLTEFEVDMVELPDTMPFTSTYLVESCGDLFMVVVVFLGHNVHKIDKVDVYKMDFSRPEWCKVDRIGDRVFLLGGDSIGASNFGASCSASEHGLSSNCIYFLNNIAAEENYLHIFNLEKGTEEVQRPFRHKNGCLLPPPRPPMWLLPTDD

SEQ ID NO: 10479 - protein, 325 aa, Triticum aestivum
  unsure (1)..(325): unsure at all Xaa locations
  Clone ID: TRIAE-23APR03-C44413_1.p
MLRGTGVAAIRPPPAPPPPAAPKRANEPSDWPLVEACAAAPFEGSPAPGVPAANSRAATAAIAPPASAARGPPECYLPPTAFPAPDSILGDAGAAXPRFHFRWFTFPVTEVDLCGHATLASAHFLFTTVLPEHGKLEFMTRSGILTAKKVPAPGSTGVPGEEQGKLFIELDFPMIGFLDCNQMPSIPETLNGAPIVSVHKSATDGDLIVELSSGKEVVNILPSIDEIKNLACRGLIVTGPAPAGSGYDFFTRFFCPKFGIDEDPVTGSIHCVLAPYWGRKLGKQKLTAFQASPRGGTLYLQLDDANQRVQIQGEALTVMDGTLLA

SEQ ID NO: 10480 - protein, 334 aa, Triticum aestivum
  Clone ID: TRIAE-23APR03-C44573_1.p
PPQPPPAPPFPAAPPTPPAARAPHPPRPPPHAPPALLLLLLLVVPRHPRTRGCLATIPTDVKAEATFIAKEDGVIAGISLAEMIFNQVDPSLKVEWFEADGNYVRKGLQFGKVYGCAQSIIVAERVVLNFMQRMSGIATMTKAMADAARPACILETRKTAPGLRLVDKWAVLIGGGKNHRLGLFDMVMIKDNHISVAGGITNAMTSVDQFLEKENLAIPVEVETRTLEEVRDLLKYTDENKTSLTRIMLDNMVVPLPNGDLDVSMLKDAVQLINGRFETEASGNVTIDTVKKIGETGVTYISSGALTHSVKALDISLKIDTELALQVGRRTKRA

SEQ ID NO: 10481 - protein, 464 aa, Triticum aestivum
  Clone ID: TRIAE-23APR03-C44608_1.p
MSATEKSTEGEGEGEGSQRVEAFLDILGRVPMGEVEGALTSCGVGPTAEAAEQVLKSETCYSRPKSAVRFFRWAKASVQLTPLAWNLLVDILGKAAMFDPMWDAVLSMSQEGGLLSVATFASMFASYCARGNFKEAAMAFDVMERHGVTPDAVALNSLLAAMCRRDGGGQAAWELFERYKTTVAPDADTFAILLEAWEKEGNVQRAKSTFGEMVVRVGWDASNMPAYDAFLSTLVRGDQFNEALKFLQVMRTKGCLPGLKFFANAIDLVVRKGDHANAIAIWQIMVSDAGLVPNLPMYNAVIGLCSSVGNTDYAFQMLDEMPLNGVFADSDTYNSILEGLIKQRKARETEGFLAEMSKNEQLPSASNCAAAISLFCQEFNPSAAVDVWHCIVEHQITPAEESAKELIAGLLDFSRFAEVKKYTDQMLDMGIELPQSTIEKMKRAFYKAERHHTYDQLARRLKRR

SEQ ID NO: 10482 - protein, 359 aa, Triticum aestivum
  unsure (1)..(359): unsure at all Xaa locations
  Clone ID: TRIAE-23APR03-C44609_1.p
MVSARKGQGRGGGVRGPPRVDGGGSLASRVAVLAFCVGGIWSSYITQGILQETLSTKRFGPEERRFDHLAFLNFAQNVVCFVWSFIMIKLWSGGSSPAGRAPLLKYWGVSITNTIGPTMGIEALKYISYPAQVLAKSSKMIPVMLMGTILYGVKYTIPEYFCTFLVAGGVSSFALLKTSSKTIKKLANPNAPLGYGLCFLNLAFDGYTNSTQDLIKSRYPKXTNPWGYXCLGMNFWGTIYIAWSRPRSPLLFSNWPYANGFEAVSFCRENPEVAWDILMFCLCGAVGQNFIFLTISRFGSLTNTTITTTRKFMSIVISSVISGNPLSMEQWGSVVMVFSGLSLQIYLKWKRKKGRDHKE

SEQ ID NO: 10483 - protein, 686 aa, Triticum aestivum
  unsure (1)..(686): unsure at all Xaa locations
  Clone ID: TRIAE-23APR03-C44624_1.p
MAAAEENSSLFLIFILTMIALPALPLVPYTITRLCHAATKKAKTIHCRCSGCHRSGKYRKSIYSNFSTWCKLSNLLLLLLWIVVIFLIYYIKLSSREVXFEPYSILGLEPGASENEIKKSYTXRRLSIQYHPDKNPDPEAHTYFVESISKAYQALTDPISRENYEKYGHPDGRQGFQMGIALPKFLLNMDGASGGIMLLGIVGLCILFPLMIAVIYLSRSSKYTGNYVMHQTLSTYYYFMKPSLAPSKVMDVFIKAAEYMEMPVRRSDDEPLQKLFVAVRSELNLDLKNIRTEQAKFWKQHPSLVKMELLIQAHLTRESFALTPALVKDYRHMLELAPRLLEELVKIALLPRSPNGFGWLRPAIGVVELSQSIIQAVPLSARKAGGGNSEGIAPFLQLPHFTEATVKKIARKKIRAFQELCDMSEVERATLLTQVAGLSEEEARDVELVLEMIPTVEVDIKCEXTEGEEGIQEGDVVTMYAWVSLQRRSGLTAALPHAPFYPFHREENFWLLLADTASNEVWLSQKISFMDEATAITAASKAIQDTQEALGASPKEIGIAVREAVDRVKKGSRLVMGKFQAPSEGNHNLTSFCLCDAWIGCDSKTSFKLKVLKRSRAGTRTYVPEEGPVAEDGIEEEEEEEEEEYDDYESEYSEDEEEEKKKGKGKVANGAAHQRASSDIDSGSDD

SEQ ID NO: 10484 - protein, 356 aa, Triticum aestivum
  Clone ID: TRIAE-23APR03-C44638_1.p
MENGHAGKHRVAVIGSGNWGSVASRLLASNTAKLPSFHDEVRMWVFEETLPTGEKLSESINQAHENCKYLPGIKLGANVIADPDLESAVKDADMLVFVTPHQFVEGICKKLVGKLRPGVEAISLIKGMEVKMEGPCMISKLITDTLGINCCVLMGANIANEIAVEKFSEATIGYREDKEAANRWAKLFTTPYFLVAIVEDIEGVELCGTLKNVVAIAAALASGLDMGNNTKAAIMRIGLREMRAFSKLLFPSVRDNTFFESCGVADLITTCLGGRNRRVAEAFARNGGKRSFDELEAEMLHGQKLQGVSTAREVYEVLTYHGWQELFPLLSTVHEICIGQLPPTSIVEYRLAEGQS

SEQ ID NO: 10485 - protein, 361 aa, Triticum aestivum
  Clone ID: TRIAE-23APR03-C44703_1.p
MASPSGSAGDLAEPCGGASSTISPIRPMLSAAPPPTVLPPVWREFVWGAIAGAFGEGMMHPVDTLKTRLQSQAIMSGAKVQKNIFQMVRTVWASDGLRGFYRGISPGVTGSLATGATYFGVIESTKTWLENNNPNLSGHWSHFIAGGIGDTLGSFIYVPCEVMKQRMQVQGSSKSWALNATKGNVSQSPGTQMYGYYNGMFHAGSSIWRDHGVKGLYAGYGSTLARDVPFAGLMVTFYEGLKELTVYGKRKYLPDSDLQVSNSFEGLVLGGLSGGFSAYLTTPLDVIKTRLQVQGSTTRYDGWLDAVKKTWNAEGVNGLFKGSVPRIIWYIPASAFTFMAVEFLREHFNEKIDMDAETALN

SEQ ID NO: 10486 - protein, 475 aa, Triticum aestivum
  unsure (1)..(475): unsure at all Xaa locations
  Clone ID: TRIAE-23APR03-C4478_1.p
MGATGDSEVAAAEGAAAGCRARAALLGAYELGRTLGEGNFGKVKQARHRATGEHFAVKILDRGRVLSLRGADDQVRREIATLTMLAHPNVVRLHEVAASKTKIYMVLEFVNGGELFDRIAIKRKLSEREGRRLFQQLIDGVSYCHGKGVYHRDLKPENVLIDRKGNIKISDFGLSALPQHLGQVAXNDGLLHTTCGSPNYIAPEVLQNRGYDGSLSDIWSCGVILYIMLVGHLPFGDRNMVVLYQKIFKGDTQIPEWLSPGAQNLLRRILEPNPMKRINMAEIKLHEWFQKDYIPAAPYDDDDEDVRLGAILPIKQQISEAPGDKSTHQMNAFQLIGMASSLDLSGLFEEEGVSQRKIRFTSAHPPKDLFDKIEVSATQSGFHVQRAHSKLKITGNCNGPNNPTPFLVCAEVFVLGPSLHVVELRKSHGDTAVYKKLCDRISSDLGIDKTFGMGSLFDDNLPGFDSRATTPLVAL

SEQ ID NO: 10487 - protein, 282 aa, Triticum aestivum
  unsure (1)..(282): unsure at all Xaa locations
  Clone ID: TRIAE-23APR03-C4483_1.p
ASKQKELLSSSPFTCLLPSQCRRPISKRATTSASSAAPSASSCSSSASGDAGPHLALRLGLPGRDHPEAAVDAALTLGPAPATAPVPHRGGAKRGFADSLDRSPAAAAAXAGEEDKHKGEAAAAGAGAPPAAKAQVVGWPPDRSYRKNTLAANAVLTYEDKDADCEAGCCYVKGSMDGAPYLRKVDLKTYSSYDNLSLELEKMFSCFITGQKXVPAKPSTRDRLTRWVLRADALQDQEYVLTYEDKDADWMLVGDLPWDLFTTXCRKLRIMRGSDAAGMAPR

SEQ ID NO: 10488 - protein, 387 aa, Triticum aestivum
  unsure (1)..(387): unsure at all Xaa locations
  Clone ID: TRIAE-23APR03-C4484_1.p
SFNGAADKFRSDLMNIAMTTLSSKILSQDKEYFAELAVDAVLRLKGSTNLESIQILKKPRTSLKDSFLDEGGILDKKIVQGQGXRIENANILVIYTAMDTXKVKQAMPTIIADTAGLDSDIEASQNQAKRHKEKKIVGIDVISVGLGDMQNRCTCEAFKVAQAIVLSACEAAEMILRVDEIIXAPHAGGGTPGADTLGLCKLIEEIMSGVGRLVHGSPGVQGCFEVSISIGVDPRPLSDGNLSWRSSXRALSQTVTDTRVIYGGGWPEMVMSKEVDELAXRKTPGKKSHAIDAFSRALQAIPTIIADNAGLDSAELISQLRAEHHKENSTAGIDVISGGLGDMQKRGICEAFKVKQAIVLSATEAAEMILRVDEIITCAPRRREDRM

SEQ ID NO: 10489 - protein, 119 aa, Triticum aestivum
  Clone ID: TRIAE-23APR03-C44948_1.p
VSTVSTPVSRSSYRGPSIIEHLPSVGTRERDGDADAASSFQERAKDILVVVSGLLFGFGCGALTAASMYLVWSLVASTGAAGPYEELYSDDDDDDGAESPKKAGYVIIHGAEDVVAGKN

SEQ ID NO: 10490 - protein, 202 aa, Triticum aestivum
  unsure (1)..(202): unsure at all Xaa locations
  Clone ID: TRIAE-23APR03-C45063_1.p
CRAPGIRARSATGAGAQRPPPAPPRSMAPLPVLNLGTLHLRRLSKPFCLTADTGARTAAPPQCLREFIISXRTKRNHRVTTRMTKAQFRGHSTNVAIRPLDEEKAVQVATDLIGEGFIFSVAVAALIFEVQRSARSEARKEEARKQELEELRQKEEILAKDLEDLKLKLAELERLAKGRGLSGILNFKGVNAADSSKEATPA

SEQ ID NO: 10491 - protein, 160 aa, Triticum aestivum
  unsure (1)..(160): unsure at all Xaa locations
  Clone ID: TRIAE-23APR03-C4509_1.p
MVATPMAGPNVEDNKXRVSVQFRCVDEKSWGALAETVXGVMREVPEAAPCRRGRMVFEVRPTIKWDKGKALEFLLESLGFADCPNVLPVYIGDDRTDEDAFKVLRRRGQGVGILVSKHPKDTSASFSLQEPAEVMEFLLRLVEWKQLSKARLRLRRQADA

SEQ ID NO: 10492 - protein, 369 aa, Triticum aestivum
  Clone ID: TRIAE-23APR03-C45105_1.p
MSKKGGKKAAAGGGELSRFLQPHLQTITDTLQMMSEAAPGGLERTEWSEVVALGHVVSRQATVAGMVWSGDLPGVETLKENIAAYFNVLQGFLLACHGSTVGAGPTLHKYITSSAKGVVDASFSLFKVAFSAYKSGSPARMPISPSGKGSVWHALDALTEMVAPIRSTPLCAQTPLWVRRNAILRLMKYIPAKESDGTKAATPPNGDAAMSFSDKDESFSDLEEDEGFTEEEIAVAKLIIAVTADSLDAVKETIRFITSLLKSSGNQSGAAEDKVESMENLLSHCRDVADQVNELGASVYAQDPSEMKSAIKRLYVGITGMCQEIAGLGGSPKNAYAAFSGFEKSLKALEEEIGEDVVDEMKNLTISPS

SEQ ID NO: 10493 - protein, 389 aa, Triticum aestivum
  Clone ID: TRIAE-23APR03-C45211_1.p
MGYVGSHGVATLRKYKYSGVDHSIVAKYILQPFWSRFVNVFPLWFPPNMITLTGFMFLLTSAFLGFLYSPHLDTAPPRWVHLAHGILLFLYQTFDAVDGKQARRTNSSSPLGELFDHGCDALACTFESLAFGSTAMCGNATFWFWVISAVPFYFATWEHYFTNTLVLPIVNGPTEGLMLIYVCHIFTFFTGAEWWAQDFRKSLPLLNWVPLVPEISLYGIVLFLMIAFAVIPTIGSNTHNVYKVVEARKGSMVLALAMLFPFGLLMAGTLVWSYLSPSDIMRNQPHLLIIGTGFAFGYLVGRMILAHLCDEPKGLKTGMCMALAYFPFAIANALTARLDDGNPLFDEQLVLLIYCLFTVALYMHFATSVIHEITNALGIHCFRITSKKA

SEQ ID NO: 10494 - protein, 423 aa, Triticum aestivum
  unsure (1)..(423): unsure at all Xaa locations
  Clone ID: TRIAE-23APR03-C45222_1.p
SFSLPPPPPSPAAPLTGTRYQAGSRRPAPRRPAWPPPPRTARLLVPSPVPLLSLSPDPLWRLVAWLGWLLNPGPTVATADAWATQCPSGVFATSRCNLKIESLDNVFGRISQCVVWYSDVVFARILQNASVYALASGQVIAGVVTKVGTDVNGFKVGNHVAVWKYVNSCRDCDNCNSFLEKNLSKFVCTKHGLYQVGAXRLDNSDVXIAVPKRYSYXVHYGYRVGKAAPLVCAGITMYTPMMRHNMKQPGKSLGVVGLGGLGHMAVKFGKAFGLKVTVLSTSESKREEAISLLGADNFVVSSDKSQMESLKNSLDFIVDTASGDHPFDPYLALLKVGGIMALVGFPGEIRVHPATLNLGARTLSGSVTGGTKDTQEMINFCTANKIYPDIELIKIDYINEALERLVNRDVRYRFVIDIESSLK

SEQ ID NO: 10495 - protein, 175 aa, Triticum aestivum
  unsure (1)..(175): unsure at all Xaa locations
  Clone ID: TRIAE-23APR03-C45231_1.p
MLPAPPAPAPPSRGQEHGGGDRWRGGVRVNETLWYEVNRRQARRQRYAPPLRLLTPSSSTMAAAALTCARALFISGRELHPVQPHLPGSSWFWSGSIRVRIKALMDRFVKELQKALDADIQDRIMKEREMPATXQERKREVAEREAVWKAELSRREMATSLGLCQQALFNFFGMS

SEQ ID NO: 10496 - protein, 91 aa, Triticum aestivum
  Clone ID: TRIAE-23APR03-C452714_1.p
PLQVLQPAGATPAADSADGTPDLTRCALEKQGRSWLVGWPCCLTARGAEGSCKGGGGEGIWARVAPGGAAAIGNERIKADAAVIGNEKNQG

SEQ ID NO: 10497 - protein, 300 aa, Triticum aestivum
  Clone ID: TRIAE-23APR03-C45338_1.p
MRRAAVAVTAALLLLLVAGAAAGSPGAEPTCPRGAGPPFLDALGSRCPRGARIVPSPPLEVRGDAVDKELNLRCTGASCSILFYAAWCPFSSKFRPIFEALSTMFPQIHHFAVEESSATPSLFSRYGVRGFPAILLASETTMVRYRGTKDLKSLVQFYQETTGLDPITYIDVDQQESTGSLGSAMPGGRSLRKMAKDEPFLFLGALFIIMKIAAHFVPTVISQLRAFLIVRVQNLNLRICRGSSQLMERALTVLDVQRLWSKLRLSSKTRDLSKGASNARAWASSFASVSLGEPSSLRHA

SEQ ID NO: 10498 - protein, 442 aa, Triticum aestivum
  unsure (1)..(442): unsure at all Xaa locations
  Clone ID: TRIAE-23APR03-C45393_1.p
MESQHASRGRRTLEEIRQKRAAERMQQQTPAATASHGDPHGNQRAAAELLARVQQLENGNLELERENQMLMSKSSAKEVEKDSLVNRLNDLEKNVVTSIRNARNDISLEQDDAVVPKEDTLAQLRIMDKRLSEADEEQYRADKEYASMRAQLNTLQXMSIVYAAVFSKREHXSEQTIDKQLEIQDLQAQLKRASPRRRQGQPGLADAALLRQQDQQRLAEEQSRTTSLAAEKREMEEKIAALTKKSSEEASEFAARQAFSMQDREKLENQLHDMALMVERLEGSRQKLLMEIDSQSLEIENLFEENSVLSTSYQEAMSVTMQWENQVKDCLKQNEELRLHLEKLRIEQANLLKTNNTSVQLDGQSETSIPPELVTENLSLKDELVKEQSRSEGLSAEIMKLSAQLRKAVQAQNNLTRLYRPVLKDIEGNLMKMKQETYATIL

SEQ ID NO: 10499 - protein, 114 aa, Triticum aestivum
  unsure (1)..(114): unsure at all Xaa locations
  Clone ID: TRIAE-23APR03-C454200_1.p
SSTRSTRSTYCARAAPQSASTPWRPRRAPRAPPRPCSPQRPXSATSRTSAGASAPSAPSSPSTPGRPPPPPCRSPPSARAPRPSSSASPLRAHSAPPPARVPRRPAWTGPGSGP

SEQ ID NO: 10500 - protein, 556 aa, Triticum aestivum
  unsure (1)..(556): unsure at all Xaa locations
  Clone ID: TRIAE-23APR03-C45437_1.p
MGIAQAAAPLRLHLGCSGAAPPRLTSLRFGVGSHARKGGRRRNPPRAASSLHPSSNPRAHDHDPALKPPAPAPAGDFAGRDLNGAADHAPQQRRRAASDLEEEAWALLRESVVSYCGSPVGTIAACDPNDSSPLNYDQVFIRDFVPSGIAFLLKGEYDIVRTXFLHTLQEESWEKTMDDHSPGQGLMPASFKVRVVPLEGDEEGATEEVLDPDFGEAAIGRVTGIKLILKLCLADGFDMFPTLVVTDGSCMMDRRMGIHGHPLEIQSLFYSALLCAREMLTPMNGSADLIHGHPHRLMALSFHIREYYWLDKRKLNEIYRYKTEEYSYDAVNKFNIYPDQIPPWLVEWIPPEGGYLIGNLQPAHMDFRXFSLGNLWSIVSSLATTRQSHAILDLVEAKWSDLVAEMPLKICYPALEDQEWKYITGSDPKNTPWSYHNAGSWPTLLWQLTVACIKMNRPEIAARAVEVAERRISVDKWPEYYDTKRGRFIGKQARLFQTWSIAGFLVAKLLLENPEKSRILCNNEDEEFANAFNLMADSCNPNRKRGRKALKKTYIV

SEQ ID NO: 10501 - protein, 347 aa, Triticum aestivum
  Clone ID: TRIAE-23APR03-C45442_1.p
MAGILAWAADVVGGAGDSDDEAAAERERAAAMTPEQRLRAADLDARASSLRRAIQDLRARVPPPNVAQRLPHLHAHSLASSAALALQLNAHSSTKEQALHREVKIQEENTAYEKAISDCRQKIQEKQMEAAVLQSNLKEMEIAELDLKAKVDNAIMEQEAAQHKASMAASEATGNALLEAESLMNLKSKDLEEKKGELKLLEDKIQRLEKVWSSVEEESLKNPSPAQREKVLEKQLHSLIEQLTAKQAQAERLITDIHAKEKDLERLNSIQRNLHSGSSEAGAARNRFGGGLLSGDEDSGSKAARRPGQSGGFRTEGQKRLMILRSAFVLYILVLHVVVFIKISVSN

SEQ ID NO: 10502 - protein, 110 aa, Triticum aestivum
  Clone ID: TRIAE-23APR03-C454443_1.p
ILSSHSDGVLYLLTNASSENTRMSKVIAVDLNQKKLLDEQIFDKQRPNPYMGTIISSYLMPAAAVSKEKEHMKRRAPMSMGSSRKKQPAFANPAAVGGKGDVGDAMDLSQ

SEQ ID NO: 10503 - protein, 263 aa, Triticum aestivum
  unsure (1)..(263): unsure at all Xaa locations
  Clone ID: TRIAE-23APR03-C4547_1.p
MAMAAASIGGALGFLAPRRRGVSFAAAVGRRRPTLAVVRAASYEAGVGVMATKXGMMTYFDPENGKPVPVTVVGFREGGNVVTQVKTAATDGYDAVQVGYHGVREDKPTXPELGHLGKASAPPLRHRTRSGWWPAFDPGQGALEFNELXQGGDLVDVSAKSIGKGFQGGIKRHNFKRGLMTHGSKSHRALGSIGAGTTPGRVYKGKKMPGRMGGTKTKIRKLKIVRIDNDLKVVMIKGAIPGKQGNLLRITPAKIVGKNIPKS

SEQ ID NO: 10504 - protein, 86 aa, Triticum aestivum
  Clone ID: TRIAE-23APR03-C455231_1.p
ASAASGGGGWPGLQEWAGQATASDGGAASGRAGNGGAVGGARGRRHRGSKRRLQPGPRRLAAATAVRPSGRPATSESGRRSHGQIA

SEQ ID NO: 10505 - protein, 97 aa, Triticum aestivum
  Clone ID: TRIAE-23APR03-C455243_1.p
ERSKTRREERGKRERGGEEHLHHIMWLQQVGLRHRLLPARTGQDRVWRQGVVDKKGDVVVDEDGDGDSEQREEEVEVGGEGLPPARSPPCLLRLLAA

SEQ ID NO: 10506 - protein, 243 aa, Triticum aestivum
  unsure (1)..(243): unsure at all Xaa locations
  Clone ID: TRIAE-23APR03-C455250_1.p
MLGSAVLRLATPPRAAASAAAKNISLVDGSLRAVLHPGADDADSAAAGCSHKWRMVIAYDGTKFKGWQYQPSPPTIQCFLEKALIRITKLDRKELCLVGAGRTDXEAANHFVGVHDFTSFANAVHNDRVRSPIKKISRFDVTKMDAIIQLEVEGTGFLYRQVRNMVALVIQVGREGLPPEIVPTIIAAKDRKELAKVALSAPPHGLYLMSVNYDKEILKPPVGSPPVSFGRTHQISRCKLLFY

SEQ ID NO: 10507 - protein, 164 aa, Triticum aestivum
  unsure (1)..(164): unsure at all Xaa locations
  Clone ID: TRIAE-23APR03-C45525_1.p
HTRAPRASLFLLLLQPRDSVPPAPPPTAANTTSAGPSGPVRSRFDDVGXCCXTSFCPCVTFGRIAAIVDKGETSCFVSGSGYLLLNVVXRGWACLHSFRYRXKLREQYGLXEKPCPDCCVHMFCEACALCHGVPRAQRPAGFDMSAGWQGEWRRDRRAPDEPKG

SEQ ID NO: 10508 - protein, 906 aa, Triticum aestivum
  unsure (1)..(906): unsure at all Xaa locations
  Clone ID: TRIAE-23APR03-C4560_1.p
MGSSLPAKEANLFKVIVKSYETKQYKKGLKAADSILKKFPEHGETLSMKGLTLRWWDRCSDASEPRRRGREFARKWRGSWPACGSRGRPARVDWDPACCYRNALRFHPVNAPTSCCLVTAGAQMWVVPGPVPNXTKVHGKISKLQNGVLCAVINFLMHSFEENIIDWELSSLQSPVIISVPACTFSLSSCIWWKAKTFHPSYNEALPRFVAWQQQDVIVDKLSFREQMACILLKLSRFEEAEKIYRSLLFLAXRQLLIPNFFEQXLVVCSENGQYSADDVERLSALYKSLKEEYSWSSAVKRIPLDFLEGEKFHEAADNYVRPLLTKGVPSLFSDLSPLYEHPGKANILEQLFLKLEDSIRTSGCFPGSLQMEPPSTLMWTLLLVSQHYDRRSQYDIALDKIDEAILHTPTVIDLYSIKGNILQHAGNFSAAAALADEARSMDLADRYLNSECVMQMLQADQVGLAEKTAVLFTKDGDQHNNLHDMQCMWYELASGESYFRQGDLGRALKNFLAVEKHYTDMTEDQFDFHSYCLRKMTLRAYVSMLKFQNRLHAHEYFHKAAAGAIRCYMKLHDSPLKSSAEENDELSKLPAAQRKKLRQKQKKAEARAKREAEEKQEDETTSTNSSKSGKKQQARPVDLDPHGEKLVQVEDPLAEATKYLKLLQNNSSDSLETHILSFELNMRKQKVLLAFQAVKQLIKLDENNPDSHRSLIRFFHRINNLPAPATDSEKLIWNVLEAERPDLRQLHGKSLVEVNINFLEKHNASLTHRAAAAEMMYLLEPDKKLQAIKLIEDSTNNTASGNGVLGPIKEWGIQDCIDVHKLLDTVFADQDVANRWKVRCAEYFPCSTYFEGAKSAITAHIPGSTSESSPENGDVPSPQAKLEGDRHSLNGTVHVVDDLSNLSMR

SEQ ID NO: 10509 - protein, 283 aa, Triticum aestivum
  Clone ID: TRIAE-23APR03-C45626_1.p
RGGEWGDGWRGSGTPGTPCTKGATGGHCEGRGRFPGLTSSSPSFAPSVRHTEPFFTTRTSPAANTDPPRFIPGGSIGRPGGPLLPRMRPAYLTGAVLVAPMCKIADEMRPHPVVVSVLKLMTNIIPTWKIVPTTDVIDAAYRMQEKRDEIRNNPHCYQGKPRLKTAYELLKVSLNLENNVLSKVSLPFLIVHGGDDKVTDPSVSDLLYRSAVSQDKKLNLYPGMWHALTSGESPENIHTVFQDIIAWLDQRSSPKSSSSAAALDLSSEMEQKAKHDEQNIDKQ

SEQ ID NO: 10510 - protein, 196 aa, Triticum aestivum
  unsure (1)..(196): unsure at all Xaa locations
  Clone ID: TRIAE-23APR03-C4570_1.p
MGKNQAYKAMQRARLGSSSGAPGEGEEDGMTDGSFHSPEWHAARLASLNKTHTLTWEEFKKKQKDEELKRGEVEADKDKMMREYRAQLDAERAQKLGRGRDXKSKSSSSKKEKKEKDAKKRIKKRRKHRSSSESSSSSESSSSDDEDRGSRKSRSRSRSKRSKKDKKHRSRSKHAGSDSEEEGPVRLSKFFGNAKN

SEQ ID NO: 10511 - protein, 336 aa, Triticum aestivum
  Clone ID: TRIAE-23APR03-C4580_1.p
GPGEAAESANTHRVRLVGRPASRPAAAARLLRRRWPPRRTRSPPSTPNSQPPLPPSSRRAVSRVAQAIADRRADLARVQGFFADNAALVNLVQRLPDELSHQIMVPFGGAAFFPGSLIHTNELLVLLGDGYYADRSAKQTTEILHRRGMELEAQMEAIKATISDLEAEAKFFESTAAEASEGLVEIREEYDEEDTEIISSKTEASSSSGGISDEEHARMMARFDELEMLEKEAGSTSEDEGDDDDDDGDDEDAGTSEDGEENGETLSYGNEHDNVSFGASVSGSGGNGQSQGNAQLKSALKKLGEKETLQGSSLAPSGSTSITNSEVQASLRKAVS

SEQ ID NO: 10512 - protein, 344 aa, Triticum aestivum
  unsure (1)..(344): unsure at all Xaa locations
  Clone ID: TRIAE-23APR03-C4584_1.p
MDADGRLRRALAAFGGGDVWDLVDAALAAAAPADLRARRDGIVERLYAGARCRNCDAPESPPQPPRQPAEAASPAWQEEEEEEEEVADVDGLGLEEETDEGGGLESKILAIKDFLEDPDQSEEELVSLLQNLADMDITYKALQETDIGRHVNGLRKHPSGDVRQLVKLLVRKWKEIVDGWVRLHNSGGDGGNSILTDGDSRERXKAKGYQNARVSDFKYTPSPPQRHSGLSSERSRNNNGFESTLERHRASPAPTYHTKQNNGNNYSTTSSSAPARAMREQKDNHLDEKLDSARKRLQENYQEAQNAKKQRTMQVLDIHDIPKPKNKNTFIRKPGGGGLPGRHR

SEQ ID NO: 10513 - protein, 328 aa, Triticum aestivum
  unsure (1)..(328): unsure at all Xaa locations
  Clone ID: TRIAE-23APR03-C45863_1.p
SPSSKPIPTPSSPAKTLASHGESVLPRRHRQRQQETRRPLGKEGEYGGGYDRLDEEVEFRLPRGHRPVENLDTEGLEQASVDTRLAASNVGFRLLQKMGWKSGKGLGKNEQGILEPIKAGIRDAKLGXWGMQEQDDFFTGEDSVQRKRLELNVEPXEKHINRTVRXRQNREKKICSEIKEIQKTFFCNLCNKHYKLAYEFESHLSSYDHNHRKRFKEMKDIQSGGSGNRDDRPKREQQREEKELAKFAQLADAHRKQQKEKQEQPDISGEQATSKNLPTPGNQDQRRTLKFGFSKMTPSKAPVGSMSKKPKIATKVPSVFGNDSDEEA

SEQ ID NO: 10514 - protein, 178 aa, Triticum aestivum
  unsure (1)..(178): unsure at all Xaa locations
  Clone ID: TRIAE-23APR03-C458_1.p
MQSLQDKASEWSGVAAADAFAIDEVNVFEALGGTPQPFVDLSTNFYTRVYEDEEEWFREIFSGSRKEDAIQNQYEFLGAAXMGGPPLFSQRRGHPALIGRHRPFPVTHQAAERWLHHMQQALETTESINPDTKTKMMIFFRHTAYFLVAGNEMTRQTQSVPPCKHATSKPSRVSAQSI

SEQ ID NO: 10515 - protein, 145 aa, Triticum aestivum
  Clone ID: TRIAE-23APR03-C4590_1.p
PSRRLTQCAIQSAGVSISQECCVLFVLVGRRSAINRPPTPNDDDEEEEEGGKEASLGDIINLKLVESGEKERLMELLRERLVECGWRDDMKALCWAYARKKGRNNVTLDDLIHVITPKGRASVPDAVKAELLQRIRSFLMSSSLW

SEQ ID NO: 10516 - protein, 105 aa, Triticum aestivum
  Clone ID: TRIAE-23APR03-C45939_1.p
LAWLHWSSSCGHTFRRGRTPLCMVFLEAGLVLIHGRVDELIDVFFHVFKEGEQHHQFASSGNDVMGGFLGAAWPENRRVLGIPGIHVNGWLSSEDRRRKGGGAAA

SEQ ID NO: 10517 - protein, 96 aa, Triticum aestivum
  Clone ID: TRIAE-23APR03-C460957_1.p
PLEYRQGKDMQEIPWERLNYSRDQYRQMRLKQYKNYQSLARPRDALQKECQRAERRDAFYDFHLNTRHVKPTIVHFQVPIFMDISFRPRHSHVYDY

SEQ ID NO: 10518 - protein, 645 aa, Triticum aestivum
  unsure (1)..(645): unsure at all Xaa locations
  Clone ID: TRIAE-23APR03-C460_1.p
SRCTGGSTRRPEMSPAARNSDNGYVETDPTGRYGRFDELLGKGAMKSVYRGFDEVRGVEVAWNQAGRGTTAXSPDAGGDEGRPRRQQGRMTRNRSMVDVRSQLLHRTLVEXSTSACSSTPSARSRTSASAASPATAAGPRPRRRRCRPRAGAGEVARTSTSSSCSEQITLLRSLVCTVRSSICRCVVINACVDRVYPSGYIPAGATTHLLTREYEYITQHGYDEDYDELVDVYSFRMCMLEMLTVEYPYAECSNPAQIYKKVTSGKLPDAFYRVDDADARRFIGRCLVPASHRPSAQELLLDRFLSTQDTTMTLSPPPLLPALPTSGDRKDNPEEAEPVAARTDMTITGKLNTDDDTIFLKVQIVDEAGHSRNIYFPFDIAGDTATEVAREMVKELDITDRDPSEIAAMIEQEITRLVPDWVGGGCDDQQEYYTYADNDDNEEQPPFYYLSSSPTSSNGSHCGTGPTTSGGGYAGWFQDYAVSSDDDETSSTRSALHYSSEEAQPEEKPGVSKTGQVKATRFGPGDSGTAGHDVSSXSRAGRPRHHRGSPDAGGDEGRPRRQQGRMTRNRSMVDVRSQLLHRTLVEELNKRMFFNTVGAVENIGFRRIPGYGGGPSSSSATVTSSRGGDQRGRRSGKDKHQFFMF

SEQ ID NO: 10519 - protein, 701 aa, Triticum aestivum
  unsure (1)..(701): unsure at all Xaa locations
  Clone ID: TRIAE-23APR03-C4610_1.p
TFRKKRQKSTSPLPPPPPASRPPPFPSPARRQIGPEECLRHPSLAPRRHLGPGIGRRGASVGRAARPTGRGGGPAPRDGHGIRVCGRRSGLGAQIGPPGKRQCSTAHRKQGFRRRPDLFTEYGDANRYKIQXESSARGSYGVVCAHTSDAARILREIKLLNIFRHPADAAPILREIKLLRPLRHPDVVEIKHPMLPPSRKDFKDIYVVFELMESDLHQVIKANDDLTKEHYQFFLYQLLRALKYIHTASVYHRDLKPKNILANSNCKLKICDFGLARVAFNDTPTTVFWTDYVATRWYRAPELCGSFFTKYTPAIDIWSIGCIFAEVLTGKPLFPGKNVVHQLDLMTDLLGTPSMDTISRVRNEKARRYLSSMRKKDPVPFSQKFPNADPLGVKLLEKLLAFDPKDRPTAEEALTDPYFRGLSKPEREPSCQPIRKMEFDFEHSRVSKDDIRELIFQEILEYHPQLLKSYIDGTERTTFLYPSAVDHFKKQFSHLEESDGSGPVVPADRKHASLPRSTIVHSTPIPAKDTRPLFGKPCNKTSSETGRYAGNGHSASQASHAAQAVVSRRAAGSALPYDAASRPTISPGCPPQQQIPQMYGQYQHQAPAGAGIPQAMGGYACGGYTKGTAPNAAAAPAMRAPPYRHLPAGQKNGPLDRLAVETTDIYTRSLNGIVAAAAASAGTASAHRKVGAVPFGMPTTY

SEQ ID NO: 10520 - protein, 341 aa, Triticum aestivum
  unsure (1)..(341): unsure at all Xaa locations
  Clone ID: TRIAE-23APR03-C4627_1.p
LDIARVRGGAGRQGEPAGGGGRRRPRRCHASTPPDATRHRARRSASRRRWLVPPVLGACDSVXTPSSMYVNAFPRHGIYLGGRRLLSSPDSSPRSPFSPLRENPLLRTRPGHFEQNGCSSPILXLFRHNWLRPFIFNLIHTGMSHLFIRILLLLLFGILRVRHFCLLRGCGSYLPSGIVGTVLSALFLRNHYISVGASGALFGLLGSMLSELIMNWTIYSNKAAAITTLLFIIAINLAIGILPHADNFAHIGGFVSGFLFGFVLLARPQFGWMERHELPQTDQPPKYKTYQYALWGAALLLLLVGYVVGLAMLFKGKNGNDGCHWCRYLNCVPSSRWKCST

SEQ ID NO: 10521 - protein, 432 aa, Triticum aestivum
  unsure (1)..(432): unsure at all Xaa locations
  Clone ID: TRIAE-23APR03-C4628_1.p
MTHGPTSLLPGRARTTARSPSSRRQSLHPTTAEAMDGEDAHHRPSSSSSSGGPFLSGLCAAALRRKPISARASAAASGEGLVRQLGVLELVLLGIGASIGAGIFVITGTGARDAGPGVTISFALAGAACVLNALCYAELASRFPAVVGGAYLYTYAAFNELTAFLVFTQLMLDYHIGAASIARSLASYFIQFLELIPSVKGNVPSWIGHGEEFFGGVVSVNILAPILLVILTVILCRGVKESSAVNTFMTTLKIIIVIVVVFAGVFEVDVSNWSPFMPNGFKAVVTGSTVVFFAYVGFDAVANSAEEAKNPQRDLPIGILGSLLACVILYVAVCLVITGMLPYTLLGEDAPLAEAFSAKGLKFVTVLISIGAVAGLTTTLLVGLYVQSRLYLGLGRDGLLPSXFTKVNSRFHAQLSFLIWXGCVAAFLAGPL

SEQ ID NO: 10522 - protein, 154 aa, Triticum aestivum
  Clone ID: TRIAE-23APR03-C463702_1.p
MKSSSVQEACEDQVSEISSQAASNNNEASNTSSGPKLALDLSLTVTAAAAAATTTAESSTTDSNNGAQAAREPTRVFTCNYCQRKFFSSQALGGHQNAHRRERTLARRAAHRLEAYPYGYADVASLPLYGSPGLYPIGIQAHAFAAGPDAVPCG

SEQ ID NO: 10523 - protein, 240 aa, Triticum aestivum
  Clone ID: TRIAE-23APR03-C464118_1.p
MDEYRPRRSPATERFVGLFSSPSSSPTESSFVAGDEFHEDDFMFSSAPVAASDARPDGPGSPTRVPHSHLGLLAALHEGDKRLLVRRAGVGSGAAASAVAATPATLLRRKATIAAATSASGGSLSPTQSPASAAWAIPANPRPKNRAPAPQYHQSAPVKVPVRPPPKPAMDKWDELDDDDELRHGDATMLPPHEMVARASAGGAGPAAPFSMLEGAGRTLKGRDLRRVRDAVLRQTGWLD

SEQ ID NO: 10524 - protein, 150 aa, Triticum aestivum
  Clone ID: TRIAE-23APR03-C46417_1.p
PRPWAWGCRGVGRVKKVKNGGSMYVGNINYYHRPLRSGKWAVTYEEWEEEVYPPYANGPGYVISSDIAEYIVSEFDNQALRLFKMEDVSMGMWVQKFSKTRQPVEYSHDVKFFQAGCFDGYYTAHYQSPQHMICLWRKLQSGSAQCCNAR

SEQ ID NO: 10525 - protein, 329 aa, Triticum aestivum
  Clone ID: TRIAE-23APR03-C46420_1.p
MGATRADADEKEEGVMATDFFWSYTDEPHASRRREILAKYPQIKELFGSDPLAFIKIAAVVSLQLWTATLLRDAGWSKILPVAYFFGSFLNHNLFLAIHELSHNLAFATPSLNRWLGIFANLPIGVPMSVTFQKYHLEHHRFQGVDGIDMDIPSQTEAHVVKNTVSKSIWVVLQLFFYALRPLFLKPKPPGLWEFTNLTIQVALDAAMVYLYGWKSLAYLILSTFLGGGMHPMAGHFISEHYVFSPEQETYSYYGPLNLMTWHVGYHNEHHDFPRIPGAKLHKVKEIAPEYYDSLKSYRSWSQVIYMYVMDQTVGPFSRMKRKAPKKDL

SEQ ID NO: 10526 - protein, 421 aa, Triticum aestivum
  Clone ID: TRIAE-23APR03-C46509_1.p
MSSSEPRPRPAASFSGDLPEDALYEVLLRIPAKELCRLRAVCPAWHALTSDPPFVAAHKSTHRTAPPLLAIAYRDDSEVNGVAISDLSGNVVRRIPVTGYEIVMVNESGDAVHRSSSKEEHDSICVVRSRLDLVCFHWNVYSRTFCVLNPVTGATLDLPMGHSKELEHELEVQGRKWGCHVEWCAFGKVSSTREYKALRICSIRDRQVCEVITFDDTNHGSWRRKQDPPPRICTGRQMRCVVVDGVVYFLMDFHYTYFETGVITIEPGSIASFNLEAEEWGVLPGPGQVKRFVQENKKYSYSQLELQLSLAELNGCLVLVHNIHKVSMDLWFLTDFEKGIWVKKYSLPSHVARLFWYPFLMLDDGRIFFSGMDCLEGILSGGEQGEGFLQSYDPRNDTYADALELRDPRSICIYTGSVLSL

SEQ ID NO: 10527 - protein, 231 aa, Triticum aestivum
  unsure (1)..(231): unsure at all Xaa locations
  Clone ID: TRIAE-23APR03-C4651_1.p
MRLVGLTGGIASGKSTVSGLFKSAGVPVVDADVVARNVVQKGTGGWKKIVKAFGNGILLENGEIDRAQLGQVVFTDPEKRKLLNRLLAPHISCGIFWEILKLWVKGCLVIVVDIPLLFETKMDRWTDPVVVVWVDPKTQIERLMSRDSCGQEQAQGRIDAQLALDWKKSEADIVIDNSGSLDDTKEQFQEVLKQVSGPLTWKERMMSRDGLLSIVVCTAAGVXLLAQKNLL

SEQ ID NO: 10528 - protein, 87 aa, Triticum aestivum
  Clone ID: TRIAE-23APR03-C465_51.p
RWTIGTATSSGCSSGTRSRALPCPTSPRSAARPWTPSRLSATTTRGSSPTSSATATPTSRSMSSTTTTQGPTSPTTTTTSSTTTATK

SEQ ID NO: 10529 - protein, 172 aa, Triticum aestivum
  unsure (1)..(172): unsure at all Xaa locations
  Clone ID: TRIAE-23APR03-C465_62.p
LPANRAKGLGESDGGRSDLVAGAGAGFLPRQQGVPGHPNPQPVRRVDGPPRAERFRLPRRSGHLPRPPRRAGRPGPETQQVQAQGPDSLQDAHGGQGQGQGGEGGGGGGRXGQGGEEGGARQGQGGEEGGGRQGQGGEGGGGGGRQGQGGERGGACWWCCNPRLVEARPVSG

SEQ ID NO: 10530 - protein, 369 aa, Triticum aestivum
  Clone ID: TRIAE-23APR03-C465_89.p
MVSATKLEGGYCFHSKNSPLDQPEGVKIHLYRLGIEQREHDALKSFAYAGQGSPSLLDTLILSQWENFAQKGHMGYDVTACELKVIEGQRDFVIQMNDKWNTFPLKKHDKFGHPFGCLKPNSARSYEELLLCIAEGENNEPEVVPSITPPNNGVLLIANAYPVEYGHIFLVPNATNQLSSFWDKRMFGLITKIASEVNSAAFRVFFDDGTSIVPKHMFFQACYFANPLPVESSSTVALYDGATRSGICVSEIVDYPLKALVFTSTNVNALVDVVSEACLALHENNTVHSLMMSNNGRNVFLFPQVKNLVTGCCLSAWECCGYFVHHTKVDFDRASETGISNRMASFSFQDGDFEDLKKLCCAIADGLVT

SEQ ID NO: 10531 - protein, 337 aa, Triticum aestivum
  Clone ID: TRIAE-23APR03-C46607_1.p
MAGRRAPHVMSLHDSGPPLLGRAPQHPQPGDDRDEPPHGALLHHPRGGPSQHPAVAALEDRIVSRDRDIQEFLVDNQRFAATHVALQQQLISAQHELRAVSIAGTRARMERKADVCNIADQAARIEAEARSVAGARVEIEQVHADVRVLAAARNELMDRLKDLREQLGRAQSNSAKSENVRSQIETMRREIQKGRAAVEFEKKAHADNLLQSKAMEKNMIAVASEIERLRGELVNAEKRATAVTTAAAVTNPGYAQPYSSSEATYATMYGNPEAAYAAYGSAEATYAGTYANSDAYSTTNQAQTRTDGNQHYMAQPVHYAQYEGQQQQQQQHTNVQR

SEQ ID NO: 10532 - protein, 2311 aa, Triticum aestivum
  unsure (1)..(2311): unsure at all Xaa locations
  Clone ID: TRIAE-23APR03-C466_1.p
MGSTHLPIVGLNASTTPSLSTIRPVNSAGAAFQPSAPSRTSKKKSRRVQSLRDGGDGGVSDPNQSIRQGLAGIIDLPKEGTSAPEVDISHGSEEPRGSYQMNGILNEAHNGRHASLSKVVPFGMAWAGKTPHHXLXVANNVMGAAKCMRNVRAGAKGTCESGRAFQLKTMAAPEGMRRCAEPIKNADQSCGVPGGXYNKKYANVQLIVEIAVRTGVSAVWPGWGHASRNTELPDALNANGIVFLGPPSSSMNALGDKVGSALIAQAAGVPTLPWSGSQVEIPLEVCLDSIPAEMYRKACVSTTEEALASCQMIGYPAMIKASWGGRGKGIRWVNNDDYVRTLFGQVPXEVPGSPIIIMRLAPRSRHLEVQLLCDQYGNVAALHSRDCSVQRRHQKIIEEGPVTVAPRETVKELEQAARRLAKAVGYVGAATVEYLYSMETGEYYFLELNPRLQVEHPVTEWIAEVNLPAAQVAVGMGIPLWQVPEIRRFYGMDNGGCYDLWRITEARATVFLCDXRKWIPQGEHSLLMKSRRYLHDHDDKNTSETECERYCYLLTYVYGCIPVKSGGAIDDFTQPQFGHAFACAVFIAEAKTNISLALEEIQIRGECDXYVYYTVYLLSGSDFGDNRIHTGWLDNXIAMRVQAERPSWYILVVGGALYKTIMSNTDTVSEYVSYLVKGQIPPKHISLVHSTVSLNIEESKYTIETIRSGQGSYRLRMNGSVIEANVQTLCDGGLLMQLDGNSHVIYAEEEAGGTRLLIDGKTCLLQNDHDPSRLLAETPCKLLRFLVADGAHVEADVPYAEVEVMKMCMPLLSPAAGVINVLLSEGQPMQAGDLIARLDLDDPSAVKRAEPFNGSFPEMSLPIAASGQVHKRCATSLNAARMVLAGYDHPINKVVQDLVSCLDAPELPFLQWEELMSVLATRLPRLLKSELEGKYSEYKLNVGHGKSKDFPSKMLREIIEENLAHGSEKEIATNERLVEPLMSLLKSYEGGRESHAHFIVKSLFEDYLSVEELFSDGIQSDVIERLRQQHSKDLQKVVDIVLSHQGVRNKTKLILTLMEKLVYPNPAVYKDQLTRFSSLNHKRYYKLALKASELLEQTKLSELRTSIARSLSELEMFTEERTAISEIMGDLVTAPLPVEDALVSLFDCSDQTLQQRVIETYISRLYQPHLVKDSIQLKYQESGVIALWEFAEAHSEKRLGAMVIVKSLESVSAAIGAALKGTSRYASSEGNIMHIALLGADNQMHGTEDSGDNDQAQVRIDKLSATLEQNTVTADLRAAGVKVISCIVQRDGALMPMRHTFLLSDEKLCYEEEPVLRHVEPPLSALLELGKLKVKGYNEVKYTPSRDRQWNIYTLRNTENPKMLHRVFFRTLVRQPGASNKFTSGNISDVEVGGAEESLSFTSSSILRSLMTAIEELELHAIRTGHSHMFLCILKEQKLLDLVPVSGNKVVDIGQDEATACLLLKEMALQIHELVGARMHHLSVCQWEVKLKLDSDGPASGTWRVVTTNVTSHTCTVDIYREVEDTESQKLVYHSAPSSSGPLHGVALNTPYQPLSVIDLKRCSARNNRTTYCYDFPLAFETAVQKSWSNISSDTNRCYVKATELVFAHKNGSWGTPVIPMERPAGLNDIGMVAWILDMSTPEYPNGRQIVVIANDITFRAGSFGPREDAFFETVTNLACERKLPLIYLAANSGARIGIADEVKSCFRVGWSDDGSPERGFQYIYLTEEDHARISTSVIAHKMQLDNGEIRWVIDSVVGKEDGLGVENIHGSAAIASAYSRAYEETFTLTFVTGRTVGIGAYLARLGIRCIQRTDQPIILTGFSALNKLLGREVYSSHMQLGGPKIMATNGVVHLTVSDDLEGVSNILRWLSYVPANIGGPLPITKSLDPPDRPVAYIPENTCDPRAAISGIDDSQGKWLGGMFDKDSFVETFEGWAKSVVTGRAKLGGIPVGVIAVETQTMMQLIPADPGQLDSHERSVPRAGQVWFPDSATKTAQAMLDFNREGLPLFILANWRGFSGGQRDLFEGILQAGSTIVENLRTYNQPAFVYIPKAAELRGGAWVVIDSKINPDRIEFYAERTAKGNVLEPQGLIEIKFRSEELQECMGRLDPELINLKAKLLGAKHENGSLSESESLQKSIEARKKQLLPLYTQIAVRFAELHDTSLRMAAKGVIKKVVDWKDSRSFFYKRLRRRISEDVLAKEIRGVSGKQFSHQSAIELIQKWYLASKGAEAASTEWDDDDAFVAWRENPENYQEYIKELRAQRVSQLLSDVADSSPDLEALPQGLSMLLEKMDPSRRAQFVEEVKKVLK

SEQ ID NO: 10533 - protein, 336 aa, Triticum aestivum
  Clone ID: TRIAE-23APR03-C4671_1.p
MLLVDGEPVPCSSPEGSSGRELVAALMGNPGLRAASERLRAAPERTVPSGPEGPRHVYVFQREYATVDPARVELVGTDEMTTCVGVAIRNNKTGMTSISHMDFPKIVEGGFKQMLELLGDDDEPFDVHLIGGFDDASTKVVYSAGGKHSIQEGYSHPLCFMKVQVLHQSQQRFHSRSPCVLGINTMTDSYGNARPIVGGFVMQTSPGVVTPASFDITSRCPDEIVRRFRVSVSSYDPNWRGKLLETYDTHADIFQIAPACWMPDWAEMASSLNQLSDSEVLLQCSTSPAAEPPHFVETERRIWKYLIENPDWEDAFPKYKPRVFHWTNDGRWSRHS

SEQ ID NO: 10534 - protein, 408 aa, Triticum aestivum
  unsure (1)..(408): unsure at all Xaa locations
  Clone ID: TRIAE-23APR03-C4674_1.p
QCLFRESILGVMPHHWDRREDTLLQLAHFRKHKRKELKKTQGKNVVNNVHKPVEHNPLGKDDTNRISKVIGKAADLAGSAKGKKSLHTVYIPTITNYTQVWWVPNVVVAHEKEGIEAIHLASGRTLCKLHLTEGGLHADINGDGVLDHVQVVGGNGAEQTVVSGSMEVLKPCWAVATSGVPVREQLFNVSICHYNHLNLFHHGDFSRSFGRSFDPSGLEVATPVLLERDDGHKHRRGSHGDIIFLTSRGEXVTSYTPGLLGHDAMWRWQLSTGATWSNLPSPSGMMENVVVPTLKTFSLRAYDPKQVIIAGGDQEAVVISPDGSLLTSIDLPAPPTHALILEDFSGDGLTDVILVTSGGVYGFVQTRQPGALFFSTLVGFLIVVIGVIFVSLHLNSSNGGKPRSTGQR

SEQ ID NO: 10535 - protein, 328 aa, Triticum aestivum
  unsure (1)..(328): unsure at all Xaa locations
  Clone ID: TRIAE-23APR03-C4678_3.p
MEKAASFLSSLLGGGGGGDGPAGEPAATVASILIYPIKSCRGVSVPQAPVTSTGFRWDRQWVVVNAKGRALTQRVEPKMALVETELPPAAFDEDWQPTPDSYLVIRAPGMDTLKVPLAAEHVTLDDVSVWEWSGSAYDEGAEAAEWXFSSYFGKPSRLVRFKEESEIRPTNPEYAQGYKLTFTDVFPFLIASQGSLDALNELLKEPVPINRFRPNILVDGCHPYSEDLWKTIKINKLTFDGVKLCDRCKVPTVNQENGILGTEPAETMLTFRSGEVIRPSHKNKHKVYFGQYLVCKEAVSAKGKGRIVKVGDPVHVLQTYPSSDEVPA

SEQ ID NO: 10536 - protein, 599 aa, Triticum aestivum
  unsure (1)..(599): unsure at all Xaa locations
  Clone ID: TRIAE-23APR03-C467_1.p
MAQSWAFLIPVLVLGSFITSLFTPSYISNPLCGTAMCGGTLFHCAPAPKNHDPTPAGSTMYKTAFHFQSAKNWMNDPSGPMYFNGIYHEFSQYNLNGPIFGDIVWGHSVSTDLVNWIGLEPALVRDTPSDIDGCWTGSVTILPGGKPVIIYTGGDKDQHQAQNIAFPKNRSDPYLREWIKAANNPVLRPDEPGMNSIEFRDPTTGWIGPDGLWRMAVGGELNGYSAALLYKSEDFLNWTKVDHPLYSXWKGAMWECPDFFAVLPGNNMLLDLSAAIPQGAKHALKMSVDSVDKYMIGVYDLQRDAFVPDNVVDDRRLWLRIDYGTFYASKSFFDSNKNRRIIWGWSRETDSPSDDLEKGWAGLHTIPRTIWLADDGKQLLQWPVEEIESLRTNEISHQGIELNKGDLFEIKEVDAFQADVEIGFELASIDDADPFDPSWLLDPEKHCGEAGASVPGGIGPFGLVILASDNMDEHTEVYFRVYKXSQEKYMVLMCSDXRRSSLXRPDLEKPAYGGFFEFDLEKERKISLRTLIDRSAVESFGGGGRVCITSRVYPAVLADVGRAHIYAFNNGSATVRVPQLSAWTMRKAQVNVEKGWSAI

SEQ ID NO: 10537 - protein, 133 aa, Triticum aestivum
  Clone ID: TRIAE-23APR03-C468065_1.p
RVASKCDLEDNIISSSWRPHPILDGGLQHPRGLHMEEITIPPSRQIKLKGRTTLSSIQNGHLQEAPSLARCKPQVFCSRAPSCSSNSETCATRLWFSPTSTLKLGSAESPTYFKTDHRQFSASLAALKGVTIS

SEQ ID NO: 10538 - protein, 292 aa, Triticum aestivum
  unsure (1)..(292): unsure at all Xaa locations
  Clone ID: TRIAE-23APR03-C46813_1.p
MAFKTLQAPPSLARPDSCSFSPSNSKSYFYQPKPHSRPQARIATKNRLQSSPVLKCRANPHGRVDEVGQSHQDHQTTEIPILLYQSVVFPGQTLQLQTVEFRYRIMMQTLLLQEGHSFGIIYSSRKDSRMADVGCMVHIVQCDKLVDDRFFLMSCVGGDFRVLEVVRTKPYVIARVQAILKGDSPDSSNLGCLMQQEXHLKDVTMLSDKLSWKLMGDKARQLSRMHSPESFSLVVARLFVEDRSEQQWLLGLDDTAQRLVREGMYLQQRSKYLAAVAAIRDAFGQLSCNEKQ

SEQ ID NO: 10539 - protein, 329 aa, Triticum aestivum
  unsure (1)..(329): unsure at all Xaa locations
  Clone ID: TRIAE-23APR03-C46879_1.p
NRRGGPAPGDGPAAPVYAEHYLLXFGGSSHSTCFNDLYLLDLQTLEWSQPDTQGAHITPRSGHAGMMIDEDWYIVGGGDNASGSTDTIVMNASKFVWSVVTSVSVRDPLACEGLTLCSTTVDGEKFLIAFGGYNGKYNNEIFVMKPKPRNFVQPRLFQSPAAAAAAASVKAAYAAITATDEKTKDIVATDDLDVKRAEPGSSSKEMVAEIDALNGEKGELESRLAEVRTENSKLKDKLDVVKLSHNELTKELRSVENQLAAEGSRCQKLESQIAAAHKRLESASSLENELEALQQQISQAEQTMTTSQRRKSGGVWKWVGGSAEVSDNE

SEQ ID NO: 10540 - protein, 359 aa, Triticum aestivum
  Clone ID: TRIAE-23APR03-C470_51.p
MDLPVVDLAPFLQAAAGDAAPAEAEEALRALCATVSASLRDTGALLVKDPRCTAADNDRFLDVVERYFARSDDSKRLQERPHLHYQVGVTPEGVEVPRSLVDKEMQDRIKSMPEEFQPATPKGPDPKWRYMWRVGPRPSNTRFKELNAEPVIPDGLPEWKETMDSWGAKMISAIEVVAEMAAIGFGLSKDAFTSLMKEGPHLLAPTGSNLMRHGSEGTVFAGFHYDLNFLTIHGRSRFPGLNIWLSNGKKMEVKVPVGCLLIQSGKQLEWLTGGECLAGMHEVVVTKRTLEAIELAKEQNRSLWRISSTLFSHIASDATLKPLGHFAEAPNAHSYPPICAGEYVEQELSAINLKGKVAL

SEQ ID NO: 10541 - protein, 682 aa, Triticum aestivum
  unsure (1)..(682): unsure at all Xaa locations
  Clone ID: TRIAE-23APR03-C47238_1.p
MATTSRSGRHGSDDEEDSTPAMRRLRRLSLHLLQPAPEGGDSLVPAACAGKRRAGGLDADAAALTAYLRGRHRAMQARVYEFYVARPELQTPVELPMAAHRDLCFRQMAALVREAGVRPLSLMAGDPADYFAVMVGREACGSGTCRRLRCPRSNHPRPNRHAIGGLCSVYTGCXASTDNQHRPTILLQAQTVRQEAIWTNLYHIPNRVSQNQVYNKFYPKKVYNKNEMCISDNIVNKFLSSQIIVPIRDLETHAVLPGIEINDCGHKIGLNGVDNGALRFRSVRIPRDNLLNRFGDVARDGKYTSSLPTINRRFAATLGELVGGRVGLAYSSVGVLKVAVTIAVRYALLRQQFGPPKEPEISVLDYQSHQHKLMPMLASAYAFHFARAYLVDMYSEMKKTNDEDVTADVHVLSSGLKSYITSYTAKSISICRESCGGHGYAAVNRFGGLRNDHDIFQTFEGDNTVLLQQVAGDLLKQYQQKFKGGTLSVTWNYLRDSMNTYLSQPNPVTARWEGEDHLRDPKFQLDAFRYRTSRLLHSVAARLQKHMKTLGGFGAWNRCLNHLLTLAESHIESVILARFIEAVKSCPDEKTREVLKLVCDLYALERIWKDIGTYRNVDYVAPNKAKAIHKLVDYLSYQVRLVARELVDAFDVPDQIIRAPIGMQSEAYAQYTQGVGFYRQPT

SEQ ID NO: 10542 - protein, 164 aa, Triticum aestivum
  Clone ID: TRIAE-23APR03-C47425_1.p
MGISSMPAPKESLLIYLLYHAVVSIAALAGLLRAALVFLGLPAPPSLLAGEDADGADQLTAATPAGPSLAERFRSRFRPARFGRRRGAAASPTPDCRVCLVRFEADAVVNRLPCGHLFHRACLETWLDYDHATCPLCRSRLLPAATTAADESWSPPAPTLTAWI

SEQ ID NO: 10543 - protein, 307 aa, Triticum aestivum
  unsure (1)..(307): unsure at all Xaa locations
  Clone ID: TRIAE-23APR03-C4756_1.p
MEAVARASIAAGSHARVPLCRRPRPRHAVRCLRGRPSVACAAAADADVVRLFDAAKLTVGRVGERAAWWSGVGSGAASGLAVPVPPDAPPQNLGNRLRRGTLTGIVGIQSSVIKPGEASEATRKVPKFILLALIDFAFTDADVIEEGTLAAVIGRGKTESGQPSFIQEKGIVESADKVAFIIDNDKYVNGIEGSIPVLVKSGNWIDTAEEIDDLFLGDAEVWRRPSIGTAGPSGGDFPXLVTKEGHHILDVIFTTPIQDLGKVAEDLEKIVGVVDHGIICNTMPYAVIASKGEVQVLDRKSSVIPNT

SEQ ID NO: 10544 - protein, 258 aa, Triticum aestivum
  Clone ID: TRIAE-23APR03-C4795_1.p
MRVKRRSRHRKVVKFYSTCFGFREPYKVLIDGTFVHHLLVHQLLPADDALRELLSASRAPPLLTSKCVVAELRRLGKSHSEAFDAAQLVATASCEHDKVVSAVDCILSLVGDKNPEHYFVATQDSDLRAKLREVPCVPVIYGLKNSLFIEQPSVQQRQFAQLDEEKRIHMEKSEFKKLLKASSEGKTSVCGNAPGVAEKSKFKRNRAKGPNPLSCKKKKPKPQPSAAQNQGPKTDGEAKRKRVRKRKRSAKGSSQAET

SEQ ID NO: 10545 - protein, 118 aa, Triticum aestivum
  Clone ID: TRIAE-23APR03-C47_10.p
MAMRPLVVLALAVALAGVALGGGAAEGAGECGRSSPDRMALRMAPCISAADEPDSAPSSSCCSAVHTIGKSPSCLCAVMLSGTAKMAGIKPEVAITIPKRCNMADRPVGYKCGDYTLP

SEQ ID NO: 10546 - protein, 537 aa, Triticum aestivum
  Clone ID: TRIAE-23APR03-C4824_1.p
MSGFLAVAGKIVTFLLWVLFLVLQTATKVVGGLLQVAPPAEPQEEPQPEAAPRPRSPPAARNRAGGGPADPYGPQSQLWDPPPPPHTAPVTDEYHSSSIYRRRVSAPQAAEDLVVSSSSYSHSAVAAAPASPAHAVSVPPVSRTIKTPAVASKRPKLERKYSKIVDQYRSLDEVIEALAQAGLESSNLIIGIDFTKSNEWTGKSSFNGVSLHHIGDAPNPYEQAISIIGQTLSAFDEDNLIPCYGFGDASTHDQDVFAFNPDERPCYGFQEALARYREIVPHLRLSGPTSFSPIIEMATTIVEQSGGQYHVLVIIADGQVTRSVNTEFGQLSTQEQMTVDAIVQASEFPLSIILVGVGDGPWDMMNEFDDNIPARSFDNFQFVNFTGIMSKKISQSNKETEFALSALMEIPLQYKATLQLGILGRRLAKSPERVPLPPPFASYNTTSRAAPSWANNFRSVPSNLREEATLDSTITPSVTPPPAADARASELQFCPVCLAKPRDMAFGCGHQTCSGCGPQVVDCPICRRPIDTRVKLY

SEQ ID NO: 10547 - protein, 222 aa, Triticum aestivum
  unsure (1)..(222): unsure at all Xaa locations
  Clone ID: TRIAE-23APR03-C4838_1.p
WAAQITQGKPPPATGTPSPSRPPPAPAAPSPLDAILLRHAPRRNPSQPRRPAPPPVPPGPRSQGHSGHPKPWRSGGRARFSRRPLGLAAATAAEGPEHQHRGARPRRRRERPRLAKAKRSKKKNLFDVVQFLPDWSDGHKVAKTTWRDVSYQITKINLYKDGRHGXKAWGIRHKAGVQVADAPIKLSGVNKRGWKYIKASQKTVQDTPAAETPAAATATATA

SEQ ID NO: 10548 - protein, 186 aa, Triticum aestivum
  unsure (1)..(186): unsure at all Xaa locations
  Clone ID: TRIAE-23APR03-C4851_1.p
HACLVIFYFFSPLIKSSNFHIVYGSAGKRCLLSRSVARAFQLPKCSVLDLPQSVGQGRRXPAKDNLSFVAGDMFESIPPADAVLLKNVLRDWGHDDCVKILQRCKEAIPARGAGGKVIIIDMVRGSLLGDKKIAEMEALQDMFAMCTNGVERDESEWKRIFSDAGFSHDYKIMPVLGPLSVIEIYP

SEQ ID NO: 10549 - protein, 368 aa, Triticum aestivum
  unsure (1)..(368): unsure at all Xaa locations
  Clone ID: TRIAE-23APR03-C49092_1.p
MEGVGREHDSSVALPVEDFGAAKDTTSVSTKPTRRYPLASWVAILALATLVGVYIFSLSLKQNGMLFGLRGPTTMEKEREQPCHHPGVPETEIPSVHFPTPNTYSRKECACTPVRFFAILSMQRSGSGWFETLLNSHENISSNGEIFSVKDRRSNVTAITQTLDKLYNLDWVSSAAKNECTAAVGLKWXMLNQGLMKHHQEIAEYFNRRGVSLIFLLRRNLLQRYVSILANDYDRNTKQLNGTHKAHVHHRGQADVLAQYKPTIDTKSLIAELKRSDKLAADGLVSFKKIRSIVLYYEDVVSNRTKLTDVLDFLKLPKMKLSSRHVKIHTKRLRDHIDNWTDVSNTLNGTQYESFLERAKMTRLARCK

SEQ ID NO: 10550 - protein, 99 aa, Triticum aestivum
  Clone ID: TRIAE-23APR03-C4921_1.p
GVAAARPLPANTAPHPGIGVVRGKTEDAGATDGRVVLKEERGKAGNGGEAVSPSEATVDDATAEEEACEEGKEGEECMQRRLLHDAHLDYIYTQHKGRP

SEQ ID NO: 10551 - protein, 320 aa, Triticum aestivum
  Clone ID: TRIAE-23APR03-C494_2.p
LTKVTCTLRAGVESIGVCYGMSANNLPAASTVVSMFKSNGINSMRLYAPDQAALQAVGGTGVNVVVGAPNDVLSNLAASPAAAASWVRSNIQAYPKVSFRYVCVGNEVAGGATQNLVPAMKNVQGALASAGLGHIKVTTSVSQAILGVYSPPSAGSFTGEADAFMGPVVQFLARTGAPLMANIYPYLAWAYNPSAMDMSYALFTASGTVVQDGSYGYQNLFDTTVDAFYTAMAKHGGSNVKLVVSESGWPSGGGTAATPANARIYNQYLINHVGRGTPRHPGAIETYVFSMFNENQKDSGVEQNWGLFYPNMQHVYPISF

SEQ ID NO: 10552 - protein, 151 aa, Triticum aestivum
  Clone ID: TRIAE-23APR03-C4969_1.p
MSGRKKTREPKEENVTLGPAVREGEHVFGVAHIFASFNDTFIHVTDLSGRETLVRITGGMKVKADRDESSPYAAMLASQDVAVRCKELGITALHIKLRATGGNKTKTPGPGAQAALRALARSGMKIGRIEDVTPVPTDSTRRKGGRRGRRL

SEQ ID NO: 10553 - protein, 584 aa, Triticum aestivum
  Clone ID: TRIAE-23APR03-C499_5.p
MASAAAPLIVSLLCCTALAVHAAHVVYPELQSLEATEVDKELRTGYHFQPPKHWINDPNGPMYYKGLYHLFYQYNPKGAVWGNIIWAHSVSTDLVDWVALEPGIYPSKPFDINGCWSGSATILPNGVPVIMYTGIEPKETPSAERRVPGQPLRPFLRKWVKPDYNPIINPDHGINASAFRDPTTAWYGPDGHWRLVVGSKENMRGIAVLYRSRDFRRWIKAHHSLHAGLTGMWECPDFYPVAVAGGRRHHRSGVDTRELHDSTVAAEVKYVLKVSLDVTRYEYYTIGWYDHAKDRYTPDLDFPDNDYGLRYDYGDFYASKSFYDPVKKRRVLWGWANESDTVPDDRNKGWAGIQAIPRKIFLSRSGRQLIQWPVEEIKSLRAKHVNVSNKAVKGGEYFKIDGFKSVQSDVEAAFVIKNLEKAEKFDTAWQTDAQGLCKKLNSHVKGGVGPFGLWLLASDDLKERTAVFFRVFKNNDTSYVVLMCNDPTRSSYESLIYRPTFAGFVNVDITKTKKIALRTLIDQSVVESFGAGGKTCILTRVYPRKAVGDNAHLFVFNNGESDIKLTNLRAWEMKTPTMNKRLGQ

SEQ ID NO: 10554 - protein, 455 aa, Triticum aestivum
  Clone ID: TRIAE-23APR03-C5005_1.p
MAEDGEKAAAAAAVGGVAGGGGGEAEQEREEQSVKLFVGQVPKHMTEAELAAMFKEVALVDEVTVIKDKATKASRGCCFLICPSRDEADKAVNAYHNKHTLPGAASPLQVKYADGELERLEHKLFIGMLPKNVADTELTDLFSKYGNIKDLQILRGSQQTSKAGCAFIKYEMKEQAVAAIEDLNGKHKVEGSSVPLVVKWADTEKERQARKAQKAQLQSPNMPNGRPMPQSSVFGALQMGYMPQYNGFSYQPPGTYGLMQYPLSPMQNQGPFQNMGQPVNQGNSIRGVNPELSPNSGPRSFNPMHLGSPYPAVPGMQYPGSYPGGPMNNRPFGNPHNPLKVPSANVNLIAFSPRSNGGGQTQTEGPPGANLFIYHIPQEFGDQELSDAFQRFGRVISAKVFVDKATGSSKCFGFVSYDNPVSAQSAIAMMNGFQLGGKKLKVQLKRDNNKLSKPF

SEQ ID NO: 10555 - protein, 815 aa, Triticum aestivum
  Clone ID: TRIAE-23APR03-C501_24.p
MGETAGGRALSRIHSVRERIGDSLSAHTNELVAVFSRLVNQGKGMLQPHQITAEYNAAIPEAEREKLKDTAFEDLLRGAQEAIVIPPWVALAIRPRPGVWEYVRVNVSELGVEELNVLNYLQFKEQLANGSIDNNFVLELDFEPFNASFPRPSLSKSIGNGVQFLNRHLSSKLFHDKESMYPLLNFLRAHNYKGMTMMLNDRIRSLGTLQGALRKAETHLSGLPADTPYSEFHHRFQELGLEKGWGDCAQRASETIHLLLDLLEAPDPSSLEKFLGTIPMVFNVVILSPHGYFAQANVLGYPDTGGQVVYILDQVRAMENEMLLRIKQQGLDITPKILIVTRLLPDAHGTTCGQRLEKVLGTEHTHILRVPFKTEDGIVRKWISRFEVWPYLEAYTDDVAHEIAGELQATPDLIIGNYSDGNLVACSLAHKLGVTHCIAHALEKTKYPNSDLYWKKFEDHYHFSCQFTADLIAMNHADFIITSTFQEIAGNKDTVGQYESHMAFTMPSLYRVVHGIDVFDPKFNIVSPGADMSIYFPYTEQQKRLTSLHTEIEELLFSDVENAEHKFVLKDKKKPIIFSMARLDRVKNMTGLVEMYGRNPRLQELVNLVVVCGDHGKVSKDKEEQAEFKKMFDLIEQYNLIGHIRWISAQMNRVRNGELYRYICDMKGAFVQPAFYEAFGLTVIEAMTCGLPTFATAYGGPAEIIVHGVSGYHIDPYQNDKASALLVDFFGKCQEDPSHWNKISQGGLQRIEEKYTWKLYSERLMTLSGVYRFWKYVSNLDRRETRRYLEMLYALKYRKMAATVPLAVEGETSGK

SEQ ID NO: 10556 - protein, 290 aa, Triticum aestivum
  unsure (1)..(290): unsure at all Xaa locations
  Clone ID: TRIAE-23APR03-C5027_1.p
MASESAAAAASSPAARAGGGKDEELADLVRRIVDVLSRYSDRLPFDLDRQKLRSLTTLAAIAITIVFAWKLLRAPPEQPRRPRRRDAPSSSNTSSRSQPGALVGTNACSSVDSRAHEAINQLFQPVNLTLEHLVKHKPXAKGRRVTCRLLGVILEETTPEELQNHVTVRPSVLEVLLEIAKICDVYLMEHVLDDESEEKVLSALSEAGLFTGGGLVRDKVLFCSTEIGRTSFVRQLEPDWHIDSSPEIVHQLSRFIKYQLHISPQQTERVSPNVFSSASLEQFFGGLDQR

SEQ ID NO: 10557 - protein, 373 aa, Triticum aestivum
  unsure (1)..(373): unsure at all Xaa locations
  Clone ID: TRIAE-23APR03-C504_1.p
MDGARVAEFRPTMTHAGRFLLYNIFGNQFEITAKYQPPIMPIGRGAYGIVCSVMNFETREMVAIKKIANAFDNNMDAKRTLREIKLLRHLDHENIVGLRDVIPPATPQSFNDVYIATELMDTDLHHSIRSRKALSEEHCQYFLGPGPRSRRHISTALVRRHRRLVRQLHLHAAHQPRVXSPGRDHMHQMPLCTGVICTPADRRPPIHPDRGRQEVHEAPAAVPSXGPSQGQFPKVQPAALAPHREDIHLIRLITDVIGTPTDDDLGIIRNEDARRYMRXLPQFPRRSFPGQFPKVQPAALDLIERMLTFNPLQRITVEEALEHPYLERLHDVADEPICTDPFSFDFEQHPLTEDQMKQLIFNEALELNPNFRY

SEQ ID NO: 10558 - protein, 375 aa, Triticum aestivum
  unsure (1)..(375): unsure at all Xaa locations
  Clone ID: TRIAE-23APR03-C5057_1.p
MWGERAHHKHGHHHDNVGSRDRQPKFIADNYSSVDEVVAALREAGLESSNLILGIDFTKSNEWSGRHSFGRKSLHAISGTPNPYEQAISIIGRTLSPFDDDNLIPCFGFGDASTHDHSVFSFYQENRPCRGFEEVLDRYRQIVPHLNLSGPTSFAPLIYAAMSVVESSNCQYHVLVIIADGQVTTSNSRARLSPQEQATIQAIVAXDASFYPLXAARRSMWGCGDGPKDDAAXLEVKSKKFGKARRYLNVHKALLYVKMAICVCSLMDNFHHLLYSLLLSSWHAQNANPPRILPPPSKVLERDNIVAASHTPAATSQSTDVGYTVSDEKVCPICLTNPKAFSFYVCRKTCKECGPTLSTCPLCRAPITVRVRLFS

SEQ ID NO: 10559 - protein, 155 aa, Triticum aestivum
  Clone ID: TRIAE-23APR03-C505_1.p
SRSALPIPQTLPTHTKHTIHGAPHVGREENPRPGARRRAAAGRRQGRGDVHAPRPPLRLEKLIKKMNAEGAALQGSGWVWLALDKEAKRLSVETTPNQDPLVTKGSNLHPLLGIDVWEHAYYLQYKNNVRPDYLTNIWKVVNWKYAGEEYEKVLA

SEQ ID NO: 10560 - protein, 204 aa, Triticum aestivum
  Clone ID: TRIAE-23APR03-C5065_1.p
MACLHDHECGDHNCAADWSLYNHIDIPKVVALNESVAGSVKSVFKSWDQRLETSGGFLESNEGDPELLVFIPFTSDVKIKSIAVVGGADGTSPSRMRVFINREGIDFSDAQNMQPVQEWELAENLQGVLEYQTRYSRFQGVANLTLHFPDNFGGDTTKIYYIGLRGEATQNKRDVVATIVYEVMPNPSDHKTKSETGGGFSHVE

SEQ ID NO: 10561 - protein, 167 aa, Triticum aestivum
  Clone ID: TRIAE-23APR03-C5079_1.p
MCCDLGLCSRTFPAVCRDMEKVRAGGSMERLLLSLCVRSHSQRLWRRHGTRATQCAATCEKCQPGHVGLIPPRLQRLVPWLPGAHVHGGCSQQRRRRRRKKKSRPWKCCDLALCTRSSPPMCRCLDKVEQCAANCKSCDPAASDSSRRVCNDWYHGFPGAKCTADGN

SEQ ID NO: 10562 - protein, 424 aa, Triticum aestivum
  unsure (1)..(424): unsure at all Xaa locations
  Clone ID: TRIAE-23APR03-C5082_1.p
MAGRREPPLMRTGLGSGQPPSRGSRIAAAVAVGVTLGCVCAFFYPDGLISRSTDSALHWRRRADSVTCEPSEEVXLATSPLTSLERINADFRKQINELLVKLQMAGQGKNQALYSAGPFGTVKALRTNPTVMPDESTNPRLPWLLLTGDGRKEIVVAVANAIEKQMTGVWFTNIKRVGITNYLVVALDDSFEYFCKSKDVPVYRRDPDEGIDSIGKTGGNHAVSALKFRILREFLQLGYSVLLSDIDIMFFQNPFDHLYRDSDIESMSDGHDNMTAYGFNDVFDEPSMGWARYAHTMRIWVFNSGFFFIRPTIPSIELLDRVAGRLSREPKSWDQAVFNQELFFPSHPGYEGLHASNGAILIRRFPLGYVLFKTVRKSAQLRKLKPVIVHLNYHPDKEARMKAVIEFYVNGKQNALDHFPDGSE

SEQ ID NO: 10563 - protein, 174 aa, Triticum aestivum
  Clone ID: TRIAE-23APR03-C510_24.p
MASSKSSLAMFALAIVMAVVAGVSAQNTPQDFVNLHNRARAADGVGAVTWDNSVARFAQDYANKRAADCRLQHSGGPFGENIFWGSGQSWTAANAVKSWVDEKRNYHLNTNTCDAGKVCGHYTQVVWRKSTRIGCARVVCAGNRGVFIICNYNPPGNFNGDRPFAFLTLDAEAK

SEQ ID NO: 10564 - protein, 359 aa, Triticum aestivum
  unsure (1)..(359): unsure at all Xaa locations
  Clone ID: TRIAE-23APR03-C51148_1.p
MESGSTFYAGEGLHIDPSWLIDPKLLFVGPRIGEGGHAKVYEGKXGNHDVATKYKNQNVAIKIVHKGDTPEEVIKRQGRFLREVTMLSRVQHKNLVKFIGACLEPVMVVVTELLVGGSLRKYLVSLRPRNLEPRVAVGFALDIARAMECLHAHGIIHRDLKPENLLLTADQRTVKLVDLGLAREETLTEMMTAETGTYRWMAPELYSTVTLRHGEKKHYNHKVDVYSFAIVLWELLHNRLPFEGMSNLQAAYAAAFKNIRPSADNLPEELSEILTSCWKEDPSDRPNFTQIVQMLLHYLSTLSPPEHMAPARTFSSENAILPPESPGTSSLMASRGDITPKGNIEDKPRGFFFCFSQCY

SEQ ID NO: 10565 - protein, 410 aa, Triticum aestivum
  Clone ID: TRIAE-23APR03-C51173_1.p
TALAIAGVRACMAVLSSARRLLPWGRAPAGGVSGGLRALLGTDGGGGRSLLPSRWKSSQPQLDPVDRSDEEGGGDIDWDNLGFGLTPTDYMYVMRCSQEEGGFSRGELARYGNIELSPPSGVLNYAEGLFVGLKAYRRADGPGYMLFRPEENARRMQHGAGRMCMPAPSVEQFVHAVKQTVLANRRWVPPQGKGALYLRPLLIGSGAILGLAPAPEYTFMIYAAPVGTYFKEGMAAINLLVEEEIHRAMPGGTGGVKTISNYAPVLKAQMDARSKGFADVLYLDSVHKRYVEEASSCNLFVVKGGAVATPATEGTILPGVTRRSIIELARDSGYQVEERLVSIDDLVSADEVFCTGTAVGVTPVSTITYQGTRYEFRTGEDTLSKKLYTALTSIQMGLAEDKKGWTVAVD

SEQ ID NO: 10566 - protein, 270 aa, Triticum aestivum
  Clone ID: TRIAE-23APR03-C51202_1.p
VVRGCRSKVADPYTTWMHINTEKLHISKLLLCSPNLVAALVGIGHTSQILMCQPGASSWSVRAYDQCKGFEDMAFYQGKLYAIANDENLLVVNISQDHSTGDPQVSRIGQIIKGESPPWYPAVFEDDTMCCKKLYLVESHGVLLMARRTIMCQVPGPGAVPIEVIAGMNEFEVSKADFERSRWVKVSTVGDDQVLFLGRKCSRSMSVSQYGLPGDHIFFLDDDEYAYDEETSSLGVYSMRFRSIRSGDPNIAWKRCAEMYLAAWLFPEDR

SEQ ID NO: 10567 - protein, 111 aa, Triticum aestivum
  Clone ID: TRIAE-23APR03-C5127_1.p
TASISSPAMSGRGKGGKGLGKGGAKRHRKVLRDNIQGITKPAIRRLARRGGVKRISGLIYEETRGVLKIFLENVIRDAVTYTEHARRKTVTAMDVVYALKRQGRTLYGFGG

SEQ ID NO: 10568 - protein, 451 aa, Triticum aestivum
  unsure (1)..(451): unsure at all Xaa locations
  Clone ID: TRIAE-23APR03-C5128_1.p
IEKKYFSRQECINLREVKSLRRMNHPNIVKLKEVIRENDMLFFVFEYMECNLYQLMKSKGKPFSETEIRNWCFXQVFQALSHMHQRGYFHRDLKPENLLVTKELIKVADFGLAREIISEPPYTEYVSTRWYRAPEVLLQASVYSSAVDMWAMGAIIAELFSHRPLFPGSSEADEIYKICSILGTPNQHTWAGGLQLAASIHFQFPQSGSINLSEVVPTASEDALNLISWLCSWDPRKRPTAVEVLQHPFFQPCFYVPPSLRFRSTGYATTPPSVGAKGAMDQKNARRYPVGTLSNGRPAVNNSYLSTNNAPARAAGVQRKLELDHQVKPVGNHKLTKENAMNQPWSRLPPAPVRNNGNYLAAKEQIPRGGVPDIAEKLSQLSVTSTTNRAPTMSSDRFADLKGTTRAHQPEPVRRPVPLGPRDTWHARNDPFRRTYEMPGERALLQRKLVS

SEQ ID NO: 10569 - protein, 333 aa, Triticum aestivum
  unsure (1)..(333): unsure at all Xaa locations
  Clone ID: TRIAE-23APR03-C512_1.p
PAGRQEAPAGARAWGCRSDGRRSRRAGSEPQLRGCLAGCWLGKALANDDGRLSSSDWISAWTPVLPQGQPPPGPREGRGGSRRLGGGSLRAKRGGSSGGRLTGVCTLIKPTGFVPRATGPRKQIADVIPTFISVGFEIPSSLSVTTCGSASSSKTAPMKSPGGPPAFKDVIRGGAXGLLASSLHQNKGYYYGGPANGSGIGMLMTPPGASFGIPDPMQQHGDLVVGGNGIGAATASIFQGGTGEEGDDGMGGVMGLQWQPQVGNGGGGGVVSGGVHHLGTGNNVTMGNSNIHNNNNNNSGGDDNNGGSSRDCYWINNGGSNPWQSLLNNSSLM

SEQ ID NO: 10570 - protein, 411 aa, Triticum aestivum
  unsure (1)..(411): unsure at all Xaa locations
  Clone ID: TRIAE-23APR03-C51349_1.p
MPVFSLRAMASLFGHVEPAPKDPILGVTEAFLADPSPDKVNVGVGAYRDDNGKPVVLDCVREAERRIAGNLNMEYLPMGGSMHMIEESLKLAYGEDSEFIKDKRIAAVQALSGTGACRLFADFQKRFLPDSQIYIPTPTWSNHHNIWRDAQVPQRTFSYYHPESRGLDFAGLMDDIKNAPNGSFFLLHACAHNPTGVDPTEEQWGEISDXGKANRHIPFFDMLYQRFASVDPERDSKAIRKLLENGHQIGXTHEYAKNLXLHGHRHGWLSMICDDADAGKLLLRVNYCILGVQXSNPPVYGXALVGFNSLLGNASEVDFYVLGKVVGYGXRIIGTRKALREXLQELGSPSSWEHVTNQIGMFCYSGMTPEQVDRLTSEYHIYMTRNGRISMAGVTTGNVAYLANAIHDVTK

SEQ ID NO: 10571 - protein, 365 aa, Triticum aestivum
  Clone ID: TRIAE-23APR03-C51421_1.p
MVAIATSFSAAAAVAVARRSSPAHLQLVARRRLPFCTAASSSTVPPAAAAGFGWADALRVASEFGVGDESDLSGYFQKVDICNRGMGNKGEFVEFMVEDQVVGYIHKGFTEHLRDFHDVFTIVSGSNGKNSVEHVTLHSSLRTPEDRTIAIGDVIKGLGELIPGIRNELYPVTSSYGMPVYFSLERAAAPYFGIKAYGVHMNGYIEKHGEKSLWIGKRSDVKQTYPGMLDHLVAGGLPYGISCKENIIKECEEEAGIPRSMSTNATSVGAISYMDINGFRYKRDVLFCYDLRLPVDFVPNNEDGEVDSFRLIPVPHAANIIRRTDFFKPNCNLVIIDFLFRHGYINPDCNGYLKLLTSLRSGDCS

SEQ ID NO: 10572 - protein, 525 aa, Triticum aestivum
  unsure (1)..(525): unsure at all Xaa locations
  Clone ID: TRIAE-23APR03-C514_1.p
MAAIKPPPPDRPPQAARLPSPSSSSSAVAAAKRGATGSRGLLMGRYELGRVLGKGTFAKVYHARHVQTGESVAIKVLDREKAVRSGLVSHIKREIAVLRRVRHPNIVHLFEVMATKTKIYFVMELVRGGELFSRVSKGRLKEDIARRYFQHLISAVGFCHTRGVFHRDLKPENLLVDEAGNLKVSDFGLSAVAEPFQPEGLLHTFCGTPAYVAPEVLARRGYEGAKADIWSCGVILFVLMAGYLPFHDQNLMAMYRKVYKGEFRCPRWFSKDLTSLIMRFLDTNPSTRITLPEVMESRWFKKGFRPVKFYIEDDQLYNVIDAENDMLDLGLPDPLPQPLLPPPSSPSPQEVDGDDSGSESDASVVSCPATSSFEERHRLRGPLPRPASLNAFDIISFSRGFNLSGLFEEKGDEVRFISSEPMSGIITKLEEIANVKSFAVRKKDWRVSLEGTREGVKGPLTICAEIFELTPSLVVVEVKKKAGDKEEYDDFCNKELKPGMQHLVHQMAPVPITPTISEXAERPSR

SEQ ID NO: 10573 - protein, 809 aa, Triticum aestivum
  Clone ID: TRIAE-23APR03-C5166_1.p
MAGDLRSSPWPWPRPSWRRRRRGRSCTMAGGIHKVTPPVLEPLTMRCHGRRSALFAVAVAAAIVAAAAAAEVVHDGRRTYIVHCSHAAMPSEFAAHGDWYASSLQSVSGGAAEVIYTYDTLLHGYSARLTRAEARALEAQPGVLLVNPETRYELHTTRTPEFLGLDRAEALFPESNTASDVIVGVLDTGVWPERPPSYDDAGFGPVPAGWKGKCEGGSDFNSSACNRKLIGARYFLAGYEASKGPVDTTKESRSPRDNDGHGTHTSSTAAGSAVRGADLLGYASGTAKGMAPRARVATYKVCWVGGCFSSDILKGMEVAVADGVDVLSLSLGGGTSDYYRDSIAVGAYSAMERGIFVSCSAGNAGPGAASLTNGAPWITTVGAGTLDRDFPAYVTLGNGNKYNGVSLYNGKQLPTTPVPFIYAGNASNSSMGALCMTGTLIPAKVAGKIVLCDRGTNARVQKGFVVRDAGGAGMVLANTAANGEELVADAHILPGAGVGERAGNAMRTYASSDPKPTANIVFAGTKVGIQPSPVVAAFSSRGPNTVTPGILKPDLIAPGVNILAAWSGSVGPSGIAGDDRRTSFNIISGTSMSCPHVSGLAALLRSAHQDWSPAAIRSALMTTAYAAYPNGDGLLDVATERAATPLDMGAGHVDPSKAVDPGLVYDLAAADYLDFLCAIEYEPAQIAALTKHSSDHCSPNRTYSVAALNYPSFSATFPAAGGTEKHARTLTNVGKPGTYKVTAAAAAGGTAIKVSVEPPTLSFSKVGEKKSYTVSFAAGGKPSGTNGFGRLVWSSEHHVVASPILATWT

SEQ ID NO: 10574 - protein, 383 aa, Triticum aestivum
  Clone ID: TRIAE-23APR03-C51676_1.p
MEAMDVKYRPALYPNGSVKKLRQAAAPPPPPVEAVPTYKECLKNHAAAIGAHAVDGCGEWMPVVELNTADPASYKCAACGCHRNFHRLVMVEGSPPPPPPPPPALLPAPPVPMPMPATVLHGLRQRAHGHETPEDRLPGVDGDDSDSDSDGSEYDDERSVSPPQHPPPAHLPAPVAQQPPPYISSAPHPHMLLSLNSSAPGAPQGQSRLPAQLSPATAPPPHGMMPARKRFRTKFTAEQKQRMQELSERLGWRLQKRDEGVVDEWCRDIGVSKGVFKVWMHNNKHNYLGGHSARRSASAAASSAATTPTAPAAGGPFRLAPASPAPGAPFNPSASHSSPAPTGTGFNMNGTASSASTATTTATPTPIFAAGRKLNGASSPQSA

SEQ ID NO: 10575 - protein, 204 aa, Triticum aestivum
  unsure (1)..(204): unsure at all Xaa locations
  Clone ID: TRIAE-23APR03-C516_11.p
MATKIYIVYYSTWGHVATLAEEIKKGADTVPGVEVTVWRVPETLPEEVLGKMHAAPGREDHPVITASQLAEADGILFGFPTRFGMMAAQMKAFFDSTGGLWQEGSLAGKPAGIFLATGTQGGGQETTALTAITQLTHHGMLFVPVGYTHGAGMFAIDEVKGGSPYGSGTFAGKDGXRTPSDAELALAXHQGKYFAGIAKKLNAV

SEQ ID NO: 10576 - protein, 204 aa, Triticum aestivum
  Clone ID: TRIAE-23APR03-C516_18.p
MATKIYIVYYSTWGHVATLAEEMKKGADSVPGVEVTVWRVPETLPEEVLGKMHAAPGREDHPVITASQLAEADGILFGFPTRFGMMAAQMKAFFDSTGGLWQAQSLSGKPAGVFFATGTQGGGQETTALTAVTQLTHHGMLFVPVGYTHGAGMFAMDEVKGGSPYGAGIFAGADGSRVPSDAELALAAHQGKYFAGIAKKLKAV

SEQ ID NO: 10577 - protein, 414 aa, Triticum aestivum
  Clone ID: TRIAE-23APR03-C516_23.p
MAGMAPEGSQFDAKNYDSKMQELLSQGETEEFFTSYDEVHESFDDMGLQENLLRGIYAYGFEKPSAIQQRGIVPFCKGLDVIQQAQSGTGKTATFCSGILQQLDYGLVECQALVLAPTRELAQQIEKVMRALGDYLGVKVHACVGGTSVREDQRILASGVHVVVGTPGRVFDIVRRQSLRPDNIKMFVLDEADEMLSRGFKDQIYDIFQLLPGKIQVGVFSATMPPEALEITRKFMNKPVRILVKRDELTLEGIKQFYVNVEKEEWKLDTLCDLYETLAITQSVIFVNTRRKVDWLTDKMRGRDHTVSATHGDMDQNTRDIIMREFRSGSSRVLITTDLLARGIDVQQVSLVINYDLPTQPENYQHRIGRSGRFGRKGVAINFVTREDERMLFDIQKFYNVVIEELPANVADLL

SEQ ID NO: 10578 - protein, 670 aa, Triticum aestivum
  unsure (1)..(670): unsure at all Xaa locations
  Clone ID: TRIAE-23APR03-C5171_1.p
GRRTSEPPPSFSSRHAHYFPAFFPASPHPTWRSPAARAAASCSSPSSSSPPPFASSPPPPAAFYLPGVAPRDFQKDDDLQVKVNKLSSIKLQFSYDYYFLDYCKPEKIKNSAENLGEVLRGDRIENSVYNFKMRRDGSFKVVCRTKLAAVETKXYLRKVQISLPSAYEVGXLTKFSSQIKHGAGANRSLKTGXEIGYNFNGVEYVFNNRXRFTGFSHVYRNDLETRIVGFHVVQICIYHEYLSWYDKSPTVQTCNANTKITPGSHTPQEVAPDAYVVFSYDVTFESSEIIWASRWDVYLLSSDSQIHWFSIINSLMIVLFLSGMIAMIMMRTLYKDIANYNQLDNQEEAQEETGWKLVHGDAFRPPVHSGLLCVYVGTGVQFFGMTVVTMMFALLGFLSPANRGGLMTAMVLLWVFMGVLAGYTSSRLYKMFKGTEWKKITLKTAFMFPGIIFGVFFVLNALIWGEKSSGAVPFGTMFALVLLWFGISVPLVFVGSFLGFKQPAIEDPVKTNKIPRQIPEQAWYLQPAFSILAGGILPFGAVFIELFFILTSIWLNQFYYIFGFLFIVFVILLVTCAEITIVLCYFQLCSEDYHWWWRAYLTAGSSALYLFAYAIFYFFNKLEITKLVSGILYFGYMLIISYAFFVLTGTIGFYACFWFVRKIYASVKID

SEQ ID NO: 10579 - protein, 505 aa, Triticum aestivum
  Clone ID: TRIAE-23APR03-C51757_1.p
MAGAGEDDAAPPPPSPDRQQPMEEAAAAAKRSRSENHHGLADGPSFRMEDLPAEVQPVIISLLPLKEAVRTSIVSRSWTTLWRFHCDLCFDVDSNTDDNSAHQVNGTGTNDQSTNRYNTKITRAKFMETVNSVIQRHSGIGINKFSISCDLHKEDSHHLDKWIRFAASSKAKIIDFHRKISDYRVEEAPHFPLEALDAQGSSFVQSLSLASVSIKPRSGICRFTILRRLVLSSVQIFGDFPGLLAKCSRLEDLEIKWCSGVDDLIVPHTLDKLQHLLIAGMDVQMVEFHATDLAHFEYKGRVTPIVLHGCLKLEKATIAFEASNVLPHAFNVIPSISPVKILIVRAFISKYGQSLELPLRPQGMFMHLRHMTCKIIVLARDVNDYNGVLQLAHWLDSAPRLETLDLHMSYLRSGAFVSAEVAGVEAPCMRRHDHLKTVFMSGFQCYKSQIELACCILGNASVLEQLTVEAIWGDDDYRRICEWAEVTSKRFGKVITVLDAPLNSE

SEQ ID NO: 10580 - protein, 181 aa, Triticum aestivum
  Clone ID: TRIAE-23APR03-C5190_4.p
MGMKRCIVPSILLMLSLEAALLIADRPSVDDEVGTILLPSQGQDQQAAMAAPRPWKCCDRPRCTRSIPPICTCVDEAFECASTCKACVPSTRNPSLQVCQDQYVGDPGPICRPWECCDSAACTKTDPPTCRCGDEVEQCAPTCKSCEASTSNPSLNVCKDAFTGAIPPTCTPPEALAAGGN

SEQ ID NO: 10581 - protein, 374 aa, Triticum aestivum
  unsure (1)..(374): unsure at all Xaa locations
  Clone ID: TRIAE-23APR03-C5193_1.p
MVGTAAARAVARLAARLGLLLSLAXQAAAQKYNAVYRFRGPVXDRGTRATKGRPSASPSSSRPYGANSTXGAPPRRCPQRPAPVDHLLHPRKGPPPFLPPSKSTSXSSKKGATTATTGSTTMATPFSTLPCHRAEATGNNGTNRLTLQXSRVQDLLPRAYQVNRLNWQGSSLTSGECGVNGYGRRRGSATTPPDQASTYEPQIVDTIGAGVEKLVAMGAVDVVVPGVLPIGCFPIYLTIYGTSSAADYDALGCLKKFNDLSTYHNSLLQAKVSALQAKYKSARIMYADFYAGVYDMVRSPSKYGFSSVFEACCGSGGGKYNYANSARCGMSGASACASPASHLSWDGIHLTEAAYKQITDGWLNGAFCHPGITH

SEQ ID NO: 10582 - protein, 175 aa, Triticum aestivum
  unsure (1)..(175): unsure at all Xaa locations
  Clone ID: TRIAE-23APR03-C51_20.p
MLLGCGSLSSWVRRLVACVGAEXCFGCAKSTPITAVDEPSKGLRIQGRSIKHRSLSEDFWSTSPREMENSALQSHRSMSSISTAAQSSEQHGAGSSSNPNEFVNQGLLLWNQTRQQWVGNRRLNSQRQKTREPKIGWNATYESLLGSTKTFAQPIPLGEMVXFLVDGWEQEGLYD

SEQ ID NO: 10583 - protein, 162 aa, Triticum aestivum
  Clone ID: TRIAE-23APR03-C5205_1.p
MDPFSKKRKPDENGAVAVSPAAGAAALGLTRDDVLRLLDPLSRDQLADIAAAAALASGVALDAVRAAADRDPALRKLFVRGLGWETNSDSLRAIFSAYGDLEEAVVISDKTTGRSKGYGFVTFRHADSALLALKEPFFFFFFLVFFFYFFVFCFLTNKLSLH

SEQ ID NO: 10584 - protein, 304 aa, Triticum aestivum
  Clone ID: TRIAE-23APR03-C52075_1.p
MASTMPFSAGLVSLGSPPPQRHSCRFQRYHRPGTLISSAIRHGQVKAMAGVSMDGLAQPQAPVAVVTGASRGIGRAIAVALGKAGCKVVVNYAKSGMEAEEVCREIMESGGTAISFSADVSIEAEVETMMRAVIDTWGTLDVMVNNAGITRDALLMRMKKAQWQEVVDVNLTGVYLCAQAAAAVMMKRKKGRIINIASVAGMIGNIGQANYCAAKAGVIGLTKAMAREYGGRNINVNAVSPGWVASDMTAKLGDDIERKALETIPLGRFGKPEEIAGLVEFLAVHPAASYMTGQVLPVDGGLSI

SEQ ID NO: 10585 - protein, 301 aa, Triticum aestivum
  Clone ID: TRIAE-23APR03-C52358_1.p
LGAAASPPLSRSPSPTPCPSGGALPFVPSRPYFKERHLRRDNLARCAFPTDVLGITNATFVDIRFNRFYREVPAGLFCSFPIVEAIFVNNNQFSGKIPSNLGDSPVNYLALANNQFTGPIPSSIGRAANTLLEVLFLNNKLSGCLPYELGLLAKATVIDAGTNQLTGTIPASYACLRKVEQLNLADNLLYGEVPDALCRLAYPSSGGHLANLTLSDNYFTSLGSCCWALIKQGKLNVARNCIPYAPNQRSHEECAGFFHRTKTYCPVSTYVPCHHPKDYGAGKEEASAAEYKYRTYSALHP

SEQ ID NO: 10586 - protein, 269 aa, Triticum aestivum
  Clone ID: TRIAE-23APR03-C5260_1.p
MSGAADTAAAAAVAAVAGSSGALPLSGRVAIVTGASRGIGRAIAAHLSSLGASVVLGYAASAAEADALAAELPRAVAVRADVSEEAGVRGLFDAAQSAFGCAAPHILVANAGVLGDKYPPLAGTATADFDRVFAVNTRGAFLCLREAANRLPRGGGGRIVAVTSSVVGSNPTGYSAYTASKAAVEAMVRTMAKELKGTRVTANCVAPGATATDMFFAGKSDETVRRTAETNPMERLGEAGDIAPVVGFLCTDSAEWVNGQVIRVNGGYV

SEQ ID NO: 10587 - protein, 353 aa, Triticum aestivum
  Clone ID: TRIAE-23APR03-C52659_1.p
RAALYSLMAVERDIFGISGPTYLNPVNWNCENNRRSVAACLVQAVYVLERDRQLNRQSVDAAAPPWWEFFHFEMIRKLVDDVDLSIFGAIFEFNPPSSKEASAQDAPRFIIAFRGTITEKETISRDLSLDLQLVQNGLHKTSRFAIAMQAVQNVASAFPGSPIWLAGHSLGAGTAILTGRNMVKKGALLDSFLFNPPFVAAPIEGIRDERVKHGFRIARSVITAGLTIAMKAKTEGNNQRSVAEESFNILSSWTPYLFVNPGDHVCSEYIGYFQHRRNMEDLGAGFIEKLATQNSIGDLFYKALGWESEPLHLLPSADLIVNVSPSLDFKYAHGISQWWQPDLNLQCNKYRYS

SEQ ID NO: 10588 - protein, 267 aa, Triticum aestivum
  unsure (1)..(267): unsure at all Xaa locations
  Clone ID: TRIAE-23APR03-C527_112.p
MSSASLGARLLRRAASSSRLSTLSRRCAHSSAMSRAPVSLARFHPAAAAAAASPSGTTARRFLSSQSPASSSKISPDENLRRVIDSEIECVVESEEGSAQQIDPPEDFPFEIIDNPGDQSIVLKRELAGETIKATVYTNFDTEEDLNNEDSDAENDDDSFKPALQMXVVTVEKPGNAVLEFECNFNDDELAIENMRLLNRDAISTENAYEGPQFSDLDESLQKSFHRYLEVRGIKHSLHDWLHEYMMSKDEKEYVVWLKNMREFIEK

SEQ ID NO: 10589 - protein, 560 aa, Triticum aestivum
  unsure (1)..(560): unsure at all Xaa locations
  Clone ID: TRIAE-23APR03-C527_113.p
MAAPSRTSWADVADAEPAPPAPVPAAAPATSNGPARADRSSYVPPHLRNRSSNAPPVSSAPPPRAAPGLLGRPTGGVGGRFGGGGAPPRRWDREPNPFGDEEEVPAEPVPFDEHQNTGINFEAYEDIPVETSGREVPPAVGTFAEIDLGAALNDNIRRCKYVRPTPVQRHAIPISLAGRDLMACAQTGSGKTAAFCFPIISGIMRGPPMQRSQLXGSRTACPLALILSPTRELSMQIHEEARKFSYQTGVRVVVAYGGAPITQQLRDLERGVDILVATPGRLVDLLERARVSLQSIRYLALDEADRMLDMGFEPQVRRIVEQMDMPPRGVRQTLLSSATFPGEIQRMAXDFLENYIFLAVGRVGSSTELIAQRVEFVQEADKRSHLMDLLHAQRDSSEQGKQALTLVFVETKRGADSLENWLCTNGFPATSIHGDRNQQEREYALRSFKSGQTPILVATDVAARGLDIPHVAHVVNFDLPNDIDDYVHRIGRTGRAGKSGIATAFFNDNNSSMAKSLADLMQESNQEVPAWLTRYAARPRPCPRPGTPSTPGSAPLAGTS

SEQ ID NO: 10590 - protein, 262 aa, Triticum aestivum
  Clone ID: TRIAE-23APR03-C527_133.p
MSSASLAARLLRRAASSSRASTLSRRCAHSSATSRAPVSLARFHPAAASPSGTTARRFLSSQSPASSSKISPDENLRRVIDSEIECVVESEEGSAQQIDPPEDFPFEIIDNPGDQSIVLKRELAGETIKATVYTNFDTEEDLNNEDSGAENDDDSFKPALQMVVTVEKPGGSILEFECNFNDDELAIENMRLLNRDAKFTENAYEGPQFSDLDESLQKSFHRYLEVRGIKHSLHDWLHEYMMSKDEKEYVVWLKNMREFIEK

SEQ ID NO: 10591 - protein, 585 aa, Triticum aestivum
  Clone ID: TRIAE-23APR03-C527_145.p
MAEAGDPTLEQGLLADPEESNQLTYTGDGSVDFSGNPVVKEKTGRWKACPFILGNECCERLAYYGISTNLVTYLTKKLHDGNSSAARNVTTWQGTCYLTPLIGAILADAYWGRYWTIATFSTIYFIGMSVLTLSASVPMLMPPSCEGVICPEASPLQYTVFFLGLYLIALGTGGIKPCVSSFGADQFDDTDPAERIQKGSFFNWFYFSINIGALISSSFLVWVQDNLGWGLGFGIPTVFMGLAIISFFAGTSLYRFQKPGGSPITRVCQVVAATLRKWNAHVPEDSSLLYELPDGVSAIEGSRQLEHTDELRCLDRAATITDLDVKEDSFNNPWRVCTVTQVEELKILVRMFPVWATTIVFSAVYAQMSTMFVEQGMVLDPTIGSFKIPPASLSTFDVVSVIIWVPIYDSILVPIARRFTGKERGFSELQRMGIGLVISILAMSAAAVLEIKRLAIAREAHLVDQNVPVPLSILWQIPQYFLVGASEVFTFIGAPEFFYDQSPDAMRSLCSALQLITTALGNYLSAFILTMVAYFTTRGGRPGWIPDNLNEGRLDYFFWLLAGLSFLNFLVYVLCANRFKSKKAA

SEQ ID NO: 10592 - protein, 244 aa, Triticum aestivum
  Clone ID: TRIAE-23APR03-C527_154.p
MASSARAAASAARSALRRAPLAASSSSSAAGVLRRSAAAGLETRMPLHSAASAARLGSCITRDGNNAFSWNSRRMFSSNEKHLPAISDPKIETAFKDLMAASWNELPGSLVEEAKKAVSMATDDKAGQEALENVFRAAEACEEFSGVLVTLRMALDDLCGLTGENVGPLPGYLEEAVKSAYSRYMTYLESFGPEEHYLRKKVESELGTKMIHLKMRCSGIGSEWGKITLIGTSGISGSYVEMRA

SEQ ID NO: 10593 - protein, 229 aa, Triticum aestivum
  Clone ID: TRIAE-23APR03-C527_155.p
MATALRSSSAAAVHRFLRISRSTLSTLPYASRPATVPPFSPSITAISGGYNAFSWNFRRLLSSNEKHMPAMSDPQIESALKDLMAASWSELPHSLVEEAKKTVSKSTDDAAGQEALKNVFRAAEACEEFGGVLVTLRMALDDLCGLTGENVGPLPGYVEDAVKSTYNRYMTYLESFGPDEHFLRKKVENELGTKMIHLKMRCSGIGSEWGKITLIGTSGISGSYVELRA

SEQ ID NO: 10594 - protein, 647 aa, Triticum aestivum
  unsure (1)..(647): unsure at all Xaa locations
  Clone ID: TRIAE-23APR03-C527_156.p
MTHPSSSSSSAPAAAPDDPTSLAPGFRFHPTDEELVSYYLKRKVLGRPLKVDAIAEVDLYKVEPWDLPARSRLRSRDSQWYFFSRLDRKHANRARTNRATAGGYWKTTGKDREVRHGARVVGMKKTLVFHAGRAXPKGERTNWVMHEYRLEGDGAAGIPQDSFVVCRIFQKAGPGPQNGAQYGAPFVEEEWEADEDDDFGPMPVQRDVFGEHEAPGAMEKGYLQMNDLIQDLAGQNENGSVVLPVSDTSNTSSHSEDVEGNSGDILNDPSLGSNFLQYIHPGEQNSPMLNENMLSNANVGDFLNSSSPNDEFLELKDLELPLGNDSTIWPSDGWAWKTAFPLDAVNRSNNEVPLITGDQPFQPDELAQLLQTLQDDSSQLGSTMTDLPHSSITNSVKPEDDSLVYFDAPFDNSMFSDGFRQTNEFLGSPATILSGIETLDDGIPYYDAMDDNLFNDMMCSVQQSAGSSSHVFNGPVLTQEVNNPSYTYSPTQKVVEPNFVVGAPSSARLSEAGGQLNCVVLPDSQAKNGSMGKRFVKMLDSISAPPAFAAEFPGKSLSGVHPNTISVSTEVISIGSLTVASRQGKWSFQKDEDMELVFSTGFQPDNRIHCGGCNTVTAVLRGGFCLFFLSAIMLLVSYEVGLCIYGK

SEQ ID NO: 10595 - protein, 311 aa, Triticum aestivum
  Clone ID: TRIAE-23APR03-C527_163.p
MATHFVLNTGAKIPSVGLGTWQSDPGIVGEAVYAAVKAGYRHIDCARAYNNEKEVGLALKKLFEESVVKREDLFITSKLWCGHHAPEDVPEALGDSLDDLQLDYLDLYLIHWPFKIKKGTSIGNPENFLPPDIPATWGAMEKLHDAGKARAIGVSNFASKKLGDLLAVARIPPAVDQVECHPGWQQSKLHTFCQSAGVHLSAYSPLGSPGSTWMNGNVLKEPVVLSIAEKLGKTPAQVALRWNIQMGHSVLPKSVSEERIKQNLAVYDWSIPEDLLAKFSEIKQARLLMGNFIVNKDSVYKTHDELWDGEI

SEQ ID NO: 10596 - protein, 445 aa, Triticum aestivum
  Clone ID: TRIAE-23APR03-C528_118.p
MREILHIQGGQCGNQIGAKFWEVICGEHGVDPTGQYTGSAPEQLERMDVYFNEAGGNRYVPRAVLMDLEPGTMDSLRSGPIGAIFRPDNFVYGQSGAGNNWAKGHYTEGAELIDSVLDVVRKEAENSDCLQGFQVCHSLGGGTGSGMDTLLISKIREEYPDRMMLTFSVFPSPKVSDTVVEPYNATLSVHQLVENADECMVLDNEALYDICFRTLKLTNPSFGDLNHLISATMSGVTCCLRFPGQLNSDLRKLAVNLIPFPRLHFFMVGFAPLTSRGSQQYRALTVPELTQQMWDAKNMMCAADPRHGRYLTASAMFRGKMSTKEVDEQMMNVQNKNSSYFVEWIPNNVKSSVCDIPPVGLAMSSTFVGNSTSIQEMFRRVSEQFTAMFRRKAFLHWYTSEGMDEMEFTEAESNMNDLVAEYQQYQDATAEEDYEEEEEPAADQP

SEQ ID NO: 10597 - protein, 267 aa, Triticum aestivum
  Clone ID: TRIAE-23APR03-C528_126.p
MGFAQLVIGPAGSGKSTYCSGLYQHCETVGRRIHMVNLDPAAEHFSYPVSTDIRELISLDDVMEELGMGPNGGLIYCMEHLEDNLDDWLDEQLENYLDDDYLVFDCPGQIELFTHVPVLRNFVEYLKRKNFTVCAVYLLDSQFVSDVTKYISGCMASLSAMIQLELPHINILSKMDLVSNKKDVEDYLNPEAQVLLSQLNRQMAPRFHKLNKALAELVDDYNMVNFIPLDLRKESSIQYVLSNIDNCIQYGEDADVKVRDFIPEEDG

SEQ ID NO: 10598 - protein, 181 aa, Triticum aestivum
  unsure (1)..(181): unsure at all Xaa locations
  Clone ID: TRIAE-23APR03-C528_135.p
MGFIGDQVESIRSMQVRXQVLAQIISLGMIVTSALIIWKGLIVATGSESPVVVVLSGSMEPGFKRGDILFLRMSKEPIRTGEIVVFNVDGREIPIVHRVIKVHERQESAEVDILTKGDNNFEDDRLLYAHGELWLQQHHIMGRAVGYLPYVGWVTIVMTEKPIIKYLLIGALGLLVIMSKD

SEQ ID NO: 10599 - protein, 449 aa, Triticum aestivum
  unsure (1)..(449): unsure at all Xaa locations
  Clone ID: TRIAE-23APR03-C528_166.p
MREILHIQGGQCGNQIGAKFWEVVCAEHGIDPTGRYAGDTDLQLERXVNVYYNEASCGRFVPRAVLMDLEPGTMDSVRSGPYGGIFRPDNFVFGQSGAGNNWAKGHYTEGAELIDSVLDVVRKEAENCDCLQGFQVCHSLGGGTGSGMGTLLISKIREEYPDRMMMTFSVFPSPKVSDTVVEPYNATLSVHQLVENADECMVLDNEALYDICFRTLKLTTPTFGXDLNHLISATMSGVTCCLRFPGQLNSDLRKLAVXNLIPFPRLHFFMVGFAPLTSRGSQMYRALTVPELTQQMWDSKNMMCAADPRHGRYLTASAMFRGKMSTKEVDEQMLNVQNKNSSYFVEWIPNNVKSSVCDIPPTGLKMSSTFVGNSTSIQEMFRRVSEQFTAMFRRKAFLHWYTGEGMDEMEFTEAESNMNDLVAEYQQYQDATXEEEEDYEDEQEDEEAA

SEQ ID NO: 10600 - protein, 446 aa, Triticum aestivum
  unsure (1)..(446): unsure at all Xaa locations
  Clone ID: TRIAE-23APR03-C528_168.p
MREILHIQGGQCGNQIGAKFWEVICDEHGIDQTGKYAGDSDLQLERINVYYNEASGGRFVPRAVLMDLEPGTMDSLRSGPYGQIFRPDNFVFGQSGAGNXNWAKGHYTEGAELIDSVLDVVRKEAENCDCLQGFQVCHSLGGGTGSGMGTLLISKIREEYPDRMMLTFSVFPSPKVSDTVVEPYNATLSVHQLVENADECMVLDNEALYDICFRTLKLATPTFGDLNHLISATMSGVTCCLRFPGQLNSDLRKLAVNLIPFPRLHFFMVGFAPLTSRGSQQYRALTVPELTQQMWDSKNMMCAADPRHGRYLTASAMFRGKMSTKEVDEQMLNVQNKNSSYFVEWIPNNVKSSVCDIPPTGLSMSSTFVGNSTSIQEMFRRVSEQFTAMFRRKAFLHWYTGEGMDEMEFTEAESNMNDLVAEYQQYQDATADEEEEYDEEEEEEAA

SEQ ID NO: 10601 - protein, 394 aa, Triticum aestivum
  unsure (1)..(394): unsure at all Xaa locations
  Clone ID: TRIAE-23APR03-C528_170.p
MATACPPLSLPSTSLLRKTTRAGPARQPLPSVRCSAVGEAVAEAAVAGTAEEPLLVSAIKGKKVERPPVWLMRQAGRYMKSYQNLCEKYPLFRERSENVDLVVEISLQPWKVFKPDGVILFSDILTPLPGMNIPFDIVKGKGPVIYDPXLRTAAAVNEVREFXPEEWVPYVGQALNLLRGEVKNEAAVLGFVGAPFTLASYCVEGGSSKNFSKIKRMAFAEPAILHNLLQKFTTSMASYIKYQADNGAQAVQXFDSWATELSPVDFEEFSLPYLKQIVDSVKETHPDLPLILYASGSGGLLERLPLTGVDVVSLDWTVDMAEGRKRLGSNIAVQGNVDPGVLFGSKEFITKRIYDTVQKAGSEGHVLNLGHGIKVGTPEENVAHFFEVAKGIRY

SEQ ID NO: 10602 - protein, 448 aa, Triticum aestivum
  unsure (1)..(448): unsure at all Xaa locations
  Clone ID: TRIAE-23APR03-C528_176.p
MREILHIQGGQCGNQIGAKFWEVVCAEHGIDPTGRYAGDTDLQLERVNVYYNEASCGRFVPRAVLMDLEPGTMDSVRSGPYGGIFRPDNFVFGQSGAGNNWAKGHYTEGAELIDSVLDVVRKEAENCDCLQGFQVCHSLGGGTGSGMGTLLISKIREEYPDRMMLTFSVFPSPKVSDTVVEPYNATLSVHQLVENADECMVLDNEALYDICFRTLKLTTPSFGDLNHLISATMSGVTCCLRFPGQLNSDLRKLAVNLIPFPRLHFFMVGFAPLTSXRGSQQYRALTVPELTQQMWDAKNMMCAADPRHGRYLTASAMFRGKMSTKEVDEQMLNVQNKNSSYFVEWIPNNVKSTVCDIPPTGLKMASTFIGNSTSIQEMFRRVSEQFTAMFRRKAFLHWYTGEGMDEMEFTEAESNMNDLVSEYQQYQDATADEEGEYEDEEDDADLQD

SEQ ID NO: 10603 - protein, 450 aa, Triticum aestivum
  unsure (1)..(450): unsure at all Xaa locations
  Clone ID: TRIAE-23APR03-C528_189.p
MREILHIQGGQCGNQIGAKFWEVICDEHGIDGTGRYAGDSDLQLERINVYYNEASGGRFVPRAVLMDLEPGTMDSVRSGPFGQIFRPDNFVFGQSGAGNNWAKGHYTEGAELIDSVLDVVRKXEAENCDCLQGFQVCHSLGGGTGSGMGTLLISKIREEYPDRMMLTFSVFPSPKVSDTVVEPYNATLSVHQLVENADECMVLDNEALYDICFRTLKLATPSFGDLNHLISATMSGVTCCLRFPGQLNSDLRKLAVNLIPFPRLHFFMVGFAPLTSRGSQMYRALTVPELTQQMWDAKNMMCAADPRHGRYLTASACFRGKMSTKEVDEQMLNVQNKNSSYFVEWXIPNNVKSSVCEHXPPGGLKMAGTFVGNSTSIQEMFRRVSEQFTAMFRRKAFLHWXYTGEGMDEMEFTEAESNMNDLVAEYQQYQXDATADEEYDEEEEEERDAE

SEQ ID NO: 10604 - protein, 445 aa, Triticum aestivum
  Clone ID: TRIAE-23APR03-C528_194.p
MREILHIQGGQCGNQIGAKFWEVICDEHGIDQTGKYAGDSDLQLERINVYYNEASGGRFVPRAVLMDLEPGTMDSLRSGPYGQIFRPDNFVFGQSGAGNNWAKGHYTEGAELIDSVLDVVRKEAENCDCLQGFQVCHSLGGGTGSGMGTLLISKIREEYPDRMMLTFSVFPSPKVSDTVVEPYNATLSVHQLVENADECMVLDNEALYDICFRTLKLATPTFGDLNHLISATMSGVTCCLRFPGQLNSDLRKLAVNLIPFPRLHFFMVGFAPLTSRGSQQYRALTVPELTQQMWDSKNMMCAADPRHGRYLTASAMFRGKMSTKEVDEQMLNVQNKNSSYFVEWIPNNVKSSVCDIPPTGLSMSSTFVGNSTSIQEMFRRVSEQFTAMFRRKAFLHWYTGEGMDEMEFTEAESNMNDLVAEYQQYQDATADEEEEYDEEEEEEAA

SEQ ID NO: 10605 - protein, 445 aa, Triticum aestivum
  unsure (1)..(445): unsure at all Xaa locations
  Clone ID: TRIAE-23APR03-C528_195.p
MREILHIQGGQCGNQIGAKFWEVICDEHGIDQTGKYAGDSDLQLERINVYYNEASGGRFVPRAVLMDLEPGTMDSLRSGPYGQIFRPDNFVFGQSGAGNNWAKGHYTEGAELIDSVLDVVRKEAENCDCLQGFQVCHSLGGGTGSGMGTLLISKIREEYPDRMMLTFSVFPSPKVSDTVVEPYNATLSVHQLVENADECMVLDNEALYDICFRTLKLATPTFGDLNHLISATMSGVTCCLRFPGXQLNSDLRKLAVNLIPFPRLHFFMVGFAPLTSRGSQQYRALTVPELTQQMWDSKNMMCAADPRHGRYLTASAMFRGKMSTKEVDEQMLNVQNKNSSYFVEWIPNNVKSSVCDIPPTGLSMSSTFVGNSTSIQEMFRRVSEQFTAMFRRKAFLHWYTGEGMDEMEFTEAESNMNDLVAEYQQYQDATADEEEEYDEEEEEDA

SEQ ID NO: 10606 - protein, 445 aa, Triticum aestivum
  Clone ID: TRIAE-23APR03-C528_196.p
MREILHIQGGQCGNQIGAKFWEVICDEHGIDGTGRYAGDSDLQLERINVYYNEASGGRFVPRAVLMDLEPGTMDSVRSGPFGQIFRPDNFVFGQSGAGNNWAKGHYTEGAELIDSVLDVVRKEAENCDCLQGFQVCHSLGGGTGSGMGTLLISKIREEYPDRMMLTFSVFPSPKVSDTVVEPYNATLSVHQLVENADECMVLDNEALYDICFRTLKLATPSFGELNHLISATMSGVTCCLRFPGQLNSDLRKLAVNLIPFPRLHFFMVGFAPLTSRGSQMYRALTVPELTQQMWDAKNMMCAADPRHGRYLTASACFRGKMSTKEVDEQMLNVQNKNSSYFVEWIPNNVKSSVCDMPPRGLKMAGTFVGNSTSIQEMFRRVSEQFTAMFRRKAFLHWYTGEGMDEMEFTEAESNMNDLVAEYQQYQDATADEEYDEEEEEERDAE

SEQ ID NO: 10607 - protein, 445 aa, Triticum aestivum
  Clone ID: TRIAE-23APR03-C528_202.p
MREILHIQGGQCGNQIGSKFWEVVCDEHGIDPTGRYVGTSDLQLERVNVYYNEASCGRFVPRAVLMDLEPGTMDSVRTGPYGQIFRPDNFVFGQSGAGNNWAKGHYTEGAELIDSVLDVVRKEAENCDCLQGFQVCHSLGGGTGSGMGTLLISKIREEYPDRMMLTFSVFPSPKVSDTVVEPYNATLSVHQLVENADECMVLDNEALYDICFRTLKLTTPSFGDLNHLISATMSGVTCCLRFPGQLNSDLRKLAVNLIPFPRLHFFMVGFAPLTSRGSQMYRPLTVPELTQQMWDSKNMMCAADPRHGRYLTASAMFRGKMSTKEVDEQMINVQNKNSSYFVEWIPNNVKSSVCDIPPRGLSMASTFIGNSTSIQEMFRRVSEQFTAMFRRKAFLHWYTGEGMDEMEFTEAESNMNDLVSEYQQYQDATADEEGEYEEEEELEQE

SEQ ID NO: 10608 - protein, 396 aa, Triticum aestivum
  Clone ID: TRIAE-23APR03-C528_205.p
TSLLSRTLLPDQSIFFLRYDLCLYLTIADKTSALDVIRQLIPHLTERTYALDELSGVARLLGKPEVEKKRSSKPLLIQIMQTKEGLKLGLACLKHGLAEDRKKIIKSLKGQNMKLALGDYGCLFLACLLSIVDDTKLVTKVVIDELTNHLKELIFDKNGRRPLLQLLHPLCSRYLTPTDLNCLKYSVPSLVSKDEASESATKVNLDSKLDDVADKEHGGSEDTLVASDSKKDPFKRRQELLVKSELFEVLIETCIENVGELLRTNFGKDVLYEVAVGGKNNVLEGVTDRVHVLHNAIASDAARPRTEDVEHAFDNYHSSRVIRKMILDCPEFAATLWKKALKGKCKSFADGFSSKVVAAYLESRDSKVKDLAKSEVQLLIDGGILKNPDHKAAEKK

SEQ ID NO: 10609 - protein, 656 aa, Triticum aestivum
  Clone ID: TRIAE-23APR03-C528_211.p
MAGGGDHPGANKRKREAAGRPKAPSKGPGPGPGDAAKRKKTYDAPAAKPKPQPVTAKEKRVAAKEMSESRKMKRKPNYNLEKELAVLWEKMRCRDVSKENRSKLVTEALRKMDGKYFEIAGSHVTARVLQTCVKWCSQPERDAVFVALQPHLLHLSRKKYAVFLVKKLIKLATKKQLALFISSLHGHVASLLRHTIGAAVVDCAFHQATPPQKRSLLLELYSTELQLFKDLTEQKSCSLLETISKLGLQKSSVLQYMTTVIQPLLEKGIVEYSIVHTVILEYLTIADKTSASDVIRQLIPHLTQGSSVVDGDELSGVAEVPTKSKAKKKRSSEPLLIRIMQTREGLKIGLACLKHGSAKDRKKIIKSLKGQNMKLALGDYGCLFLACLLSIVDDTKLVTKVVIDELKNHLKELIFDKNGRRPLLQLFHPLCSRYLTLGDLFCLKYNVPSLVSKDEASESATKVNLDSKLDDVADKEPGGSEDTLIASDSKEDPFKRRQELLVKSELFEVLIETCIENVGELLRTNFGKDVLYEVAVGGKNNVLEGVTDRIHVLHNAIASDAERPRTEDVEHAFDNYHSSRVIRKMILDCPAFAATLWKKALKGKCKSFADGFSSKVVAAYLESSDSKVKDLAKSEVQPLIDGGILKIPDHKAAEKK

SEQ ID NO: 10610 - protein, 446 aa, Triticum aestivum
  unsure (1)..(446): unsure at all Xaa locations
  Clone ID: TRIAE-23APR03-C528_219.p
MREILHIQGGQCGNQIGSKFWEVVCDEHGIDPTGRYVGTSDLQLERVNVYYNEASCGRFVPRAVLMDLEPGTMDSVRTGPYGQIFRPDNFVFGQSGAGNNWAXKGHYTEGAELIDSVLDVVRKEAENCDCLQGFQVCHSLGGGTGSGMGTLLISKIREEYPDRMMLTFSVFPSPKVSDTVVEPYNATLSVHQLVENADECMVLDNEALYDICFRTLKLTTPSFGDLNHLISATMSGVTCCLRFPGQLNSDLRKLAVNLIPFPRLHFFMVGFAPLTSRGSQMYRSLTVPELTQQMWDSKNMMCAADPRHGRYLTASAMFRGKMSTKEVDEQMINVQNKNSSYFVEWIPNNVKSSVCDIPPRGLSMASTFIGNSTSIQEMFRRVSEQFTAMFRRKAFLHWYTGEGMDEMEFTEAESNMNDLVSEYQQYQDATADEEGEYEEEEDLEQE

SEQ ID NO: 10611 - protein, 442 aa, Triticum aestivum
  unsure (1)..(442): unsure at all Xaa locations
  Clone ID: TRIAE-23APR03-C528_223.p
MPSGSTQFRYTQTPSKVLHLRNMPWESSEEELVELCKPFGRVVNTMCNVGANRNQAFVEFADQNQAISMVSYYASSSEPAQVRGKTVYIQYSNRQEITNNKGTGDSSGNVLLVTFEGVQPNDVSIDVIHLVFSAFGFVHKIATFEKAAGFQALIQYTDAPTALEAKNSLDGRSIPRYLLAEHVSICHLRITFSAHKDLNIKFQSHRSRDYTNPYLPVNPTAIEGIAQPILGSDGKIKEPESNVLLASIENMQYAVGVDVLHTVFSSFGAVRKIAMFEKNGGMQALIQYPDITTAGVAKQALEGHCIYDGGYCXDERSRDYTVSDPSAQVQAAGQAPGLSTTGAAWQSTTPAAFYGSSAGATSIGQVPAWNPNMQRGAFAPASTSYPTQLLMANPGPHFPAVGSSSGAPPMLYQASQQMAQYGTAPTALPHAALSGEPMYFPK

SEQ ID NO: 10612 - protein, 447 aa, Triticum aestivum
  unsure (1)..(447): unsure at all Xaa locations
  Clone ID: TRIAE-23APR03-C528_231.p
MREILHIQGGQCGNQIGAKFWEVICDEHGIDQTGKYAGDSDLQLERINVYYNEASGGRYVPRAVLMDLEPGTMDSLRSGPYGQIFRPDNFVFGQSGAGNNWAKGHYTEGAELIDSVLDVVRKEAENCDCLQGFQVCHSLGGGTGSGMGTLLISKIREEYPDRMMMTFSVFPSPKVSDTVVEPYNATLSVHQLVENADECMVLDNEALYDICFRTLKLTTPTFGDLNHLISATMSGVTCCLRFPGQLNSDLRKLAVNLIPFPRLHFFMVGFAPLTSRGSQMYRALTVPELTQQMWDSKNMMCAADPRHGRYLTASAMFXRGKMSTKEVDEQMLNVQNKNSSYFVEWIPNNVKSSVCDIPPTGLKMSSTFVGNSTSIQEMFRRVSEQFTAMFRRKAFLHWYTGEGMDEMEFTEAESNMNDLVAEYQQYQDATVEEEEDYEDEQEDEEAA

SEQ ID NO: 10613 - protein, 366 aa, Triticum aestivum
  Clone ID: TRIAE-23APR03-C528_235.p
MSKTALLTPYKMGRFDLSHRVVLAPLTRERSFGNVPQPHAILYYQQRTTKGGLLIAEATGVSDTAQGYKDTPGIWTKEQVEAWKPIVNGVHAKGGIFFCQIWHVGRVSNHTFQPNGQAPISSTDKPLKPVVRANGIDVPTISTPRRLQTNEIPLVINDFRAAARNAIEAGFDGVEIHGAHGYLIDQFLKDQVNDRTDKYGGSLENRCRFALEVVQAVVDEVGADKVGIRLSPFANYSEASDSNPEALGLYMAHALNKFGILYCHMVEPRMVNIGEKFETPHSLRPIRDAFKGTFIVAGGYDRDDGNKAIADDYADLVAYGRLFLSNPDLPRRFEIGAPLNKYIRDTFYLSDPVIGYTDYPFLPSDV

SEQ ID NO: 10614 - protein, 375 aa, Triticum aestivum
  unsure (1)..(375): unsure at all Xaa locations
  Clone ID: TRIAE-23APR03-C52941_1.p
PCPKIKIRRSSLAAIPPAAVPSGPARRTISGRETLVPWGGVGCGLSAAALXLRGRSSGRDAEVLRSVGRTGSLKDLSAILDTASKVLPLVVAVSGRVSSDTPLICQQSGMRGVIVEEXTAEQHFLKHNDAGSWIQDSAVMLSVSKEVPWYLDDGTGGVYVVAGRSAAGLILTVASEVFEESGRTLARGTLDYLQGLKMLGVKRTGRVLPTGTSLTVVGEAIKDDVGXFRIQRPHKGPFYASPKSIDQLILNLGKWAKLYQLASMGFAAFGVFLLAKRALDHFLQRKRQREFHKKARAAAAQRQARDAEGGNGTSDGEPKKDQLVLEICVICLEQEYNAVFVPCGHMCCCMNCSSHVTNCPLCRRRIDQAVRTFRH

SEQ ID NO: 10615 - protein, 830 aa, Triticum aestivum
  Clone ID: TRIAE-23APR03-C52_1.p
MLCLTAPSCSPSLPPRPSRPAADRPGPGISGGGNVRLSAVPAPSSLRWSWPRKAKSKFSVPVSAPRDYTMATAEDGVGDLPIYDLDPKFAGFKEHFSYRMKKYLDQKHSIEKHEGGLEEFSKGYLKFGINTENDATVYREWAPAAMDAQLIGDFNNWNGSGHRMTKDNYGVWSIRISHVNGKPAIPHNSKVKFRFHRGDGLWVDRVPAWIRYATFDASKFGAPYDGVHWDPPSGERYVFKHPRPRKPDAPRIYEAHVGMSGEKPEVSTYREFADNVLPRIKANNYNTVQLMAIMEHSYYASFGYHVTNFFAVSSRSGTPEDLKYLVDKAHSLGLRVLMDVVHSHASSNKTDGLNGYDVGQNTQESYFHTGERGYHKLWDSRLFNYANWEVLRFLLSNLRYWMDEFMFDGFRFDGVTSMLYNHHGINMSFAGSYKEYFGLDTDVDAVVYLMLANHLMHKLLPEATVVAEDVSGMPVLCRSVDEGGVGFDYRLAMAIPDRWIDYLKNKDDLEWSMSGIAHTLTNRRYTEKCIAYAESHDQSIVGDKTMAFLLMDKEMYTGMSDLQPASPTIDRGIALQKMIHFITMALGGDGYLNFMGNEFGHPEWIDFPREGNNWSYDKCRRQWSLADIDHLRYKYMNAFDQAMNALDDKFSFLSSSKQIVSDMNEEKKIIVFERGDLVFVFNFHPSKTYDGYKVGCDLPGKYKVALDSDALMFGGHGRVAHDNDHFTSPEGVPGVPETNFNNRPNSFKILSPSRTCVAYYRVEEKAEKPKDEGAASWGKTALGYIDVEATGVKDAADGEATSGSEKASTGGDSSKKGINFVFLSPDKDNK

SEQ ID NO: 10616 - protein, 219 aa, Triticum aestivum
  unsure (1)..(219): unsure at all Xaa locations
  Clone ID: TRIAE-23APR03-C5313_1.p
MGIDGTRSPGGETVADFKRLLRRAFRLDRVVASHDGAASLGKPRLLIISRKASRRFLNERAMAHAAAAAQFDVRIAEPDNHTDMPNFARLVNSADVMXMGVHGAGLTNMVFLPSRAARRQVVPFGGLEWLSRVTFKDPAKDFDVTYMEYNVSLEESSLKDLYPKDHFYLKHPYDVHKKGWNAIKTTYLDKQSVRLDLDKLTRTLQHARSLLPSPSPSSH

SEQ ID NO: 10617 - protein, 370 aa, Triticum aestivum
  Clone ID: TRIAE-23APR03-C5319_1.p
MAGGGGKVACAAWIRRREDKATRVFAVHGRPSPPALEVLGFDSGSCSLSEEPLARIVLGDDPDDAPLAVAVHPTGDELVCTTAKGCRLFKLIFEEFTVRFIESKAPAIESVGLQKCVAFSTDGAKFAIGGEDGHLRIFHWPSMKVLLDEPNAHKSFRDMDISLDSEFLVSSSTDGTARIWKINEGVPLVNLTRSSDEKIECCRFSRDGMKPFLFCTVAKGSKAVTVVCNISDWSRIGYKRLLGKPASTLSVSLDGKFLALGNQDGDFCVVDVKEMEISHWSKKVHLGSPICGIEFCPTERVVISTSPQWGAELTRLNVPADWKEWQIWLILLALFLASAVLFYVFYQNSGSFWSGTPRRDVIDLPSHAEF

SEQ ID NO: 10618 - protein, 285 aa, Triticum aestivum
  unsure (1)..(285): unsure at all Xaa locations
  Clone ID: TRIAE-23APR03-C53225_1.p
MGEPPSREGSYSSFPNSDDDEPETSGSERGAGGGGEDAHRPLPLRQQLVGACRADDRLRPLLTLNVSCSAAENRFISHLSQHFEVSEVGMLARCLCVPLVSLRVGKVDQHGTLLXGQPSEGELSLGLHSSSRFHLTFSPPLGRPPEVALSDDPFKPSDGGCPPCPSSLQYSVTPLHMPVTSVEPFPQSPLGPLVSNEVSSVSSFSAKLDTTNSPSLNLPSILHDPSLHLQLPTSIVPLHGSMVSTYPLLHLPFPTSPLVPVHGSQVPTFSVASPATSYFTICFIA

SEQ ID NO: 10619 - protein, 300 aa, Triticum aestivum
  Clone ID: TRIAE-23APR03-C5322_1.p
MEEADKDRNSCKRLRAVGGGGDSADAWRSFRVARAAAGGKDRHSKVVTSRGLRDRRIRLSVQTAIQFYDIQDRLGVDQPSKAIEWLIQAAATAIDGLPSLDCSFAFPVASPAAEDTAEVSTSETSKGSVLSLANGPADNDNAAHQASAYNGGSANGTFAGLLHCSNAADKPMQHQHQQQQPTLAYYAAPGSHIAPMSFEMIPQLTFSQDQQHCHHHHHHHHASVSFDRSTLQSNTVSTPQWPPSQHPFLMQRFSAAPAEPSPMFPFFLGGNNAAAAAAPAAANAPERRLQLWDFKEERKT

SEQ ID NO: 10620 - protein, 317 aa, Triticum aestivum
  unsure (1)..(317): unsure at all Xaa locations
  Clone ID: TRIAE-23APR03-C5337_1.p
MPKDRSSRSVSHEGCRSRVSPYKLRSGSRRSEEAAAAAAAAAAKQAAEWEEVRCPVCMDHPHNAVMLVCSSHEKGCXPFICDTSYRHSNCLDQYRKASKESSKDSGAAECAECQQPVKLACPLCRGPVSHWTKDYDARKFMNSKDRACTMESCEFKGAYNQLRKHAREDHPAVRPTEVDPNRQRDWHRMEQQRDLGDLFSMLRSGISGREDGVGVSEGDEGVSERSLHATSITMVFIVRSGRSILHYTDGEIPGRRSRTILLVGEPRGEASRGGGSSGNGDAEATTTDNEETDLAMSTQASAGSQEDAGEADGDPAQ

SEQ ID NO: 10621 - protein, 350 aa, Triticum aestivum
  unsure (1)..(350): unsure at all Xaa locations
  Clone ID: TRIAE-23APR03-C5341_1.p
SKSTILSGPIRNVDSPEDATWIDRYIGIEGNAGSEMWLLHQSDASCVVKAGSAAXSSDYGGTSSRWGFITRRRCITQKQHRMTNXYYEVQKNVHDLFAQPKSSSIARVGLPVAAQLPRPARLLTHSSGRLRPSNNSTRMKSLPVVDIGGNQIENIITQSSVVHMLAECVGLSWFESWGTKKLCELGLPLMKPYRLVKVNEGQPVLKAFQLLREKGVGGVPVMDTNGTKAIGNISIRDVQYLLSAPKIYKQYRTISAKDFLTAVRHHLQEQHEASPLLHDVITCKRDDVIKEIILKLDSTKIHRIYVVDDKGDTEGVITLRDIISKLVHEPRHYFGDFFDGVVPLPANSTV

SEQ ID NO: 10622 - protein, 162 aa, Triticum aestivum
  Clone ID: TRIAE-23APR03-C5343_1.p
NAQQSEGFADFYIKLVLELSELCAEQNLEVWYLEDELISPCLLEELPNQGDQIDDLKILFDCICEALTEIQERYFRLSSWLSFLKHDIRAPPMGEDLVAEVDKYVDDYLRHSFQSTLDHTIKKDFEVRTWMDIRSKTEGIVVEIWEFVLEELIDEAVFDLWI

SEQ ID NO: 10623 - protein, 266 aa, Triticum aestivum
  Clone ID: TRIAE-23APR03-C53558_1.p
MAMAAYSNQAQAMMRDYLLADPLVPYTSVLIGVFLCKMAYDLTRILSSFYFKGYSSLTKIQRVEWNNRGMSSAHAIFIAAVSVYLVASTDLFSDRLNGPITFRSSIISTSALGVSVGYFITDLAMIFWLFPSLGGMEYVLHHTLSLVAIAYTMLSGEGQFYTYMILISETTTPEINMRWFLDTAGLKKSSAYLINGILIFVVWLVARIFLFLYVFYHIYLHYSQIMKMHAFGYYLTLTVPSVLFVMNAMWFTKILKGVMKTLSKWS

SEQ ID NO: 10624 - protein, 277 aa, Triticum aestivum
  Clone ID: TRIAE-23APR03-C53744_1.p
MGTGTGTALGPAMAAAASSTAHRPRPLPAAATANRSASRPTASAPPGRTLVCSAPRQSRPPRRAVATTARAAEAGAPSSTSPDAVTYSSSIDTDMPLYEPLGVSFDEYLQDRPRVFRAMFPDESRSQQLSDEEWRIQMLPLEFLLITVRPVVVMQLRNRNAGGLDLRITEWELRGLDSGYTPASFDLGVRGSLYADRGQRRGSRLRGHLEISITVALPPPLRIVPEAILRGVAESVLSTLAERMKRDVDVGLVADFRRFRLEKAASRAAVARADSKA
